United States Patent Application Publication US 2018/0126003 A1 - sequence listing, part 143

SEQ ID NO: 250929 - DNA, 516 bp, Artificial Sequence
  derived and/or modified sequence
atggaaaaacggcttcaggaggctcagctgtataaggaagaaggcaaccagcgatatcgcgagggcaaataccgagacgcagtgagccggtatcatagagccctactccagctccggggactggacccctctttaccctcacccctgccaaacttgggacctcaaggtcctgctttgacacctgagcaggaaaacattctccacactacgcaaactgattgttataataatctcgctgcctgtctcctccagatggagccagttaactacgagcgcgtgcgagagtatagccagaaagtccttgagcggcaacctgataatgccaaagctctctaccgggctggtgtagcattttttcacctacaggactacgatcaagctagacattacctgttggcagccgtcaacagacagccaaaagacgccaacgttcgcaggtatctgcagctcacacagtcggagctcagtagttatcacagaaaggaaaaacagctgtatctgggtatgttcggttag

SEQ ID NO: 250930 - DNA, 423 bp, Artificial Sequence
  derived and/or modified sequence
atggagaagcggctgcaggaggcccagctgtacaaggaggagggaaatcagcggtatcgagaagggaaatatagggacgctgtgtcccggtaccatagagccctgttgcaactacgtgggctggatccatccttgccaagtccgctgcccaatctcgggcctcagggacccgctctgacaccggaacaggagaatattctccatactacccaaacagactgctacaacaatctcgcggcttgtctcttgcaaatggaaccagtcaattacgagcgcgttagggaatacagccagaaggtgctggagcgacagcccgataacgctaaggccctatatcgcgctggtgttgcctttttccacctgcaggactacgatcaggctcgtcattaccttctggccgctgtgaaccggcaaccaaaatag

SEQ ID NO: 250931 - DNA, 516 bp, Artificial Sequence
  derived and/or modified sequence
atggagaaaaggctgcaagaggctcagctgtataaggaggaaggaaaccagcggtacagggaaggcaaatacagggatgccgtctcacggtaccaccgtgcgctgttacaacttcgcggattggatccgtccctgccatcaccactgcccaaccttggaccacaggggcctgctcttacacccgaacaggaaaacatactgcacactactcagaccgattgttataacaacttagccgcatgcctgctccagatggaacctgtgaattacgaaagagtgagagagtattctcaaaaagtgctcgagcggcagcctgacaatgcgaaagccctgtaccgggcaggtgtcgcgtttttccacctccaggactacgaccaggctcggcactacttattagctgctgtgaatagacagcctaaggatgcaaacgtcaggcgttatcttcaacttacgcagagtgagttaagtagctatcataggaaggagaaacaattgtatctggggatgtttggttag

SEQ ID NO: 250932 - protein, 758 aa, Artificial Sequence
  derived and/or modified sequence
MRKQGVSSKRLQSSGRSQSKGRRGASLAREPEVEEEMEKSALGGGKLPRGSWRSSPGRIQSLKERKGLELEVVAKTFLLGPFQFVRNSLAQLREKVQELQARRFSSRTTLGIAVFVAILHWLHLVTLFENDRHFSHLSSLEREMTFRTEMGLYYSYFKTIIEAPSFLEGLWMIMNDRLTEYPLIINAIKRFHLYPEVIIASWYCTFMGIMNLFGLETKTCWNVTRIEPLNEVQSCEGLGDPACFYVGVIFILNGLMMGLFFMYGAYLSGTQLGGLITVLCFFFNHGEATRVMWTPPLRESFSYPFLVLQMCILTLILRTSSNDRRPFIALCLSNVAFMLPWQFAQFILFTQIASLFPMYVVGYIEPSKFQKIIYMNMISVTLSFILMFGNSMYLSSYYSSSLLMTWAIILKRNEIQKLGVSKLNFWLIQGSAWWCGTIILKFLTSKILGVSDHIRLSDLIAARILRYTDFDTLIYTCAPEFDFMEKATPLRYTKTLLLPVVMVITCFIFKKTVRDISYVLATNIYLRKQLLEHSELAFHTLQLLVFTALAILIMRLKMFLTPHMCVMASLICSRQLFGWLFRRVRFEKVIFGILTVMSIQGYANLRNQWSIIGEFNNLPQEELLQWIKYSTTSDAVFAGAMPTMASIKLSTLHPIVNHPHYEDADLRARTKIVYSTYSRKSAKEVRDKLLELHVNYYVLEEAWCVVRTKPGCSMLEIWDVEDPSNAANPPLCSVLLEDARPYFTTVFQNSVYRVLKVN

SEQ ID NO: 250933 - DNA, 2277 bp, Artificial Sequence
  derived and/or modified sequence
atgcggaagcaaggggtttccagcaagagactccagtcttccggccgatcacagtctaagggtcggcgtggagccagcctggctagggaacccgaggttgaggaagagatggagaagtcagctttaggcggcggcaagctcccccgaggaagttggaggtcttctcccggcaggatccagtctttaaaggaacgcaagggcctggaattggaagtggtggcaaagacattcctgttaggccccttccagttcgtgcggaacagcttggcgcaattgcgcgaaaaagtgcaggagttgcaagcccggcgtttcagcagtaggacaactctcggcatcgccgtgttcgtggctatcttgcattggttacatctggtgaccctcttcgagaacgatagacacttttcccacctgagctccctggagagggagatgacatttcgaacagagatgggtctgtattactcctacttcaaaaccatcatcgaagccccatcctttctggagggtttgtggatgatcatgaatgatcgcctgactgaatatccactgataatcaatgctatcaaacgattccatctctaccccgaagtcattattgccagttggtactgcacgttcatgggcattatgaatctgttcggcctagagactaagacctgttggaacgtcacacggatcgaaccactgaacgaggttcagtcttgcgaaggcctgggggatccagcttgtttttatgtaggtgtcatctttatcctcaacggtctcatgatggggctgtttttcatgtacggtgcttacctgagtggaactcagctgggcggcctaattacggtgttatgtttttttttcaatcacggggaggccacgcgggttatgtggactcctccactacgtgagtcattcagctacccattccttgttttacagatgtgcatactgaccctaattctccggacctcttccaacgaccgccgacctttcatcgcattgtgtctgagcaatgttgcgttcatgcttccctggcagtttgcccagtttatattgtttacccagattgccagcctatttccaatgtatgtggtggggtacatcgagccctctaagtttcagaagataatctacatgaatatgatcagcgtcactttgtccttcatccttatgttcggaaacagtatgtacctgtcaagctactacagctcctctttgcttatgacttgggcaattatcttgaaacgcaatgaaattcagaaactaggcgtgtctaagcttaacttttggttaatacagggatccgcatggtggtgtggtacaattattcttaaatttcttacttccaagattctgggagtgtcagaccatatccggctgtcagatctcatcgccgccagaattctcagatacacagattttgacactctgatatacacttgcgccccagaatttgatttcatggaaaaggcaactcctctgcgttacaccaagactctattgcttccagtggtgatggtaatcacctgtttcatatttaagaagaccgtacgggacatatcctacgttctggccacaaacatctacctgcgcaagcaactgcttgaacattccgaactcgcctttcacaccctgcaacttctggtgtttacagcgctggctatcctgattatgcgcctgaagatgttcctgactccacatatgtgtgtcatggcaagccttatctgttcccgacagctgttcggctggctgtttcgccgggtgcgcttcgagaaggtgatatttggtatcctgactgtgatgtctattcagggctatgctaacctgaggaaccagtggtcaatcatcggcgaatttaataacctcccgcaagaggagttgcttcagtggattaaatattctaccacttcagacgctgtgtttgctggcgcaatgccaacaatggcaagcattaagttgagcaccctccacccaattgtgaaccacccccattacgaagacgctgatctcagggctaggacaaaaatagtctacagcacctactcccgtaaatctgctaaggaggttcgcgacaaactgctggagttgcacgtcaattactacgtgttagaggaggcctggtgcgttgtgcgaaccaagcccggctgtagcatgctggaaatctgggatgttgaggaccccagcaatgctgcaaaccccccactgtgtagcgttcttctggaagacgcgaggccctactttaccacagtgttccagaacagcgtatatagagtacttaaagttaactag

SEQ ID NO: 250934 - DNA, 2277 bp, Artificial Sequence
  derived and/or modified sequence
atgaggaagcagggcgtgagcagcaagaggctgcagagcagcggccgcagccagagcaagggccggcggggggccagcctggcccgggagcctgaggtggaggaggagatggagaagagcgccctgggcggcggcaagctgccccggggctcctggaggagcagccctggccgcatccagagcctgaaggagaggaagggcctggagctggaggtggtggccaagaccttcctgctgggccccttccagtttgtgaggaacagcctggcccagctgcgggagaaggtgcaggagctgcaggcccggcgcttcagcagcaggaccaccctgggcattgctgtgtttgtggccatcctgcactggctgcacctggtgaccctgtttgaaaatgacagacacttcagccacctgagcagcctggagcgggagatgaccttcagaacagagatgggcctgtactacagctacttcaagaccatcatcgaggcccccagcttcctggagggcctgtggatgatcatgaatgaccggctgacagagtaccccctcatcatcaatgccatcaagcgcttccacctgtacccagaggtgatcatcgcctcctggtactgcaccttcatgggcatcatgaacctgtttggcctggagaccaagacctgctggaatgtgacccgcatcgagcccctgaatgaggtgcagagctgtgagggcctgggggaccctgcctgcttctacgtgggcgtcatcttcatcctgaatggcctgatgatgggcctcttcttcatgtatggagcctacctgagcggcacccagctgggcggcctcatcaccgtgctgtgcttcttcttcaaccacggggaggccaccagggtgatgtggaccccacccctgcgggagagcttctcctaccccttcctggtgctgcagatgtgcatcctgaccctcatcctgcggaccagcagcaatgaccggcggcccttcatcgccctgtgcctgagcaatgtggccttcatgctgccctggcagtttgcccagttcatcctcttcacccagatcgccagcctcttccccatgtatgtggtgggctacatcgagcccagcaagttccagaagatcatctacatgaacatgatctctgtgaccctgtccttcatcctgatgtttggaaacagcatgtacctgagcagctactacagcagcagcctgctgatgacctgggccatcatcctgaagagaaatgagatccagaagctgggcgtgtccaagctgaacttctggctgatccagggcagcgcctggtggtgtggcaccatcatcctgaagttcctgaccagcaagatcctgggcgtgtctgaccacatccggctgagtgacctgattgctgcccgcatcctgcgctacacagactttgacaccctcatctacacctgtgcccctgagtttgacttcatggagaaggccacccccctgcgctacaccaagaccctgctgctgcctgtggtgatggtgatcacctgcttcatcttcaagaagacagtgcgggacatctcctatgtgctggccaccaacatctacctgaggaagcagctgctggagcacagcgagctggccttccacaccctgcagctgctggtgttcaccgccctggccatcctgatcatgaggctgaagatgttcctgaccccccacatgtgtgtgatggccagcctcatctgcagccggcagctgtttggctggctgttccggcgggtgcgctttgagaaggtgatcttcggcatcctgactgtgatgagcatccagggctacgccaacctgaggaaccagtggagcatcatcggggagttcaacaacctgccccaggaggagctgctgcagtggatcaagtacagcaccaccagtgatgctgtgtttgctggggccatgcccaccatggccagcatcaagctgagcaccctgcaccccatcgtgaaccacccccactatgaagatgctgacctgcgggcccggaccaagatcgtgtacagcacctacagcaggaagagcgccaaggaggtgcgggacaagctgctggagctgcacgtgaactactacgtgctggaggaggcctggtgtgtggtgaggaccaagccaggctgcagcatgctggagatctgggatgtggaggaccccagcaatgctgccaacccccccctgtgcagcgtgctgctggaggatgcccggccctacttcaccaccgtcttccagaacagcgtgtacagagtgctgaaggtgaactag

SEQ ID NO: 250935 - DNA, 2277 bp, Artificial Sequence
  derived and/or modified sequence
atgcggaagcagggcgtgagcagcaagcggctgcagagcagcggccgcagccaaagtaagggtaggaggggtgcctcgctggctcgagaacccgaagtggaagaggaaatggagaagagtgctctcggagggggaaaacttccccgcggctcgtggcgctcttctcctggcaggatccaatcccttaaggagaggaagggtctcgagcttgaggtcgtggctaagactttcctactcgggcccttccaattcgtcaggaatagcttggcacagcttagagaaaaagtccaggagcttcaggctagaaggttttcctcccgtaccacactcggaattgccgtattcgtcgcaattctgcactggctgcatttggttacgctgttcgagaacgaccggcacttcagccatctttcctccctggaaagagaaatgacctttcgcaccgagatgggcctgtactacagttattttaagaccattatcgaagcacccagcttcctcgaaggtctctggatgatcatgaacgatagactgacagaataccccctgatcattaacgccattaagagattccacctttatcccgaggtgatcatcgcgagttggtattgcactttcatgggtatcatgaatttattcggtctcgaaacgaaaacatgctggaatgtgaccagaatcgaaccactgaacgaggtgcagagttgcgagggcctcggtgaccctgcatgcttctacgtaggagtaatatttatactgaatgggcttatgatgggccttttctttatgtatggagcatatctgtcaggcactcaattgggcgggcttatcaccgtgctttgttttttcttcaaccacggggaggccacaagggtgatgtggacccctcctctgcgggagtcgtttagctacccttttttggtactgcagatgtgtattctaacgcttatcttaagaaccagcagtaacgatagacgccctttcattgccctttgcctttcgaatgttgcctttatgctaccttggcagtttgcacagttcattctgtttacacaaatcgcatccctctttcctatgtatgtcgtagggtacatcgagccttctaagtttcagaaaattatctacatgaacatgatatccgtgaccctgagttttatcctaatgttcgggaatagcatgtatttgtcgagttattacagctcctcactgctgatgacctgggctattatcctgaaacgaaacgaaatccagaagctgggcgtgtccaagctgaacttttggctcattcaaggctcagcttggtggtgtggaacgattattttgaagttcctaacatctaagatcttgggagtttccgaccacatacgcctgagcgacctgatcgctgcgcgtatactgcgttatacagactttgacaccctaatctacacctgcgcaccagagttcgacttcatggagaaagccacgccattgcgatacactaaaacgctcctgctgcctgtcgtaatggtgattacatgttttatcttcaagaaaactgtccgcgatatcagttacgtgttggccaccaacatatatctgcgcaagcaactgctggagcatagcgagctagcttttcacaccctgcagctgctcgtcttcacagcccttgcaattctgattatgcggttgaaaatgttcctgaccccccacatgtgcgtgatggcgtcactgatttgttccagacagctgttcggctggctatttcgacgggtcagattcgagaaagtgatcttcggaatcttgacggtgatgtccattcagggctatgctaacctgagaaaccagtggtcaattatcggtgagttcaataacctcccacaggaggagctcctccagtggattaagtacagcacaacctcagacgccgtcttcgcaggcgccatgcctacaatggcaagcatcaagctgtccacactgcacccaatcgtgaaccaccctcactatgaagacgctgatctccgagcaaggaccaagattgtatacagcacctatagtcgcaagagcgccaaggaggtcagggataaactcttagaactgcatgtcaattactatgtactcgaggaggcctggtgtgtcgttaggacaaagccaggctgtagcatgctcgaaatctgggacgtagaggacccttccaacgccgcaaacccaccactctgttccgtcctgctggaagacgctaggccatactttaccaccgtgttccagaactccgtctatcgggtgctcaaggtgaactag

SEQ ID NO: 250936 - DNA, 2277 bp, Artificial Sequence
  derived and/or modified sequence
atgaggaagcaaggcgtctccagcaaacgtctccagtcatctggacgcagtcaatctaagggaagaaggggtgcctcactagccagggagcccgaggtggaggaagaaatggaaaaaagtgccttgggcggtggaaaactgcccagaggctcttggagaagttctcccggtcgcatccagtctctaaaagagagaaagggtcttgaactggaggtggtggctaagacattccttctgggaccatttcagtttgtgcgtaactccttggcacagttacgggagaaagtccaggagcttcaggcaagaagattctcatctaggacaacattggggatcgccgtttttgtcgcaattctccactggctgcacctggtcactctgttcgagaacgaccggcatttttcacaccttagcagcctggagcgagagatgacattcagaactgagatgggactttactacagttacttcaagacaattatcgaagccccatcctttcttgaaggactgtggatgataatgaatgatcgattgacagagtacccactgatcattaatgcgatcaagagattccatctgtaccctgaggtgattattgcttcgtggtattgcaccttcatgggtatcatgaatcttttcgggctggagacgaagacctgctggaacgtgacaagaatagagcccctgaatgaggtgcagagttgtgaaggactgggggacccggcatgcttttacgtgggtgtcatattcatcttgaacggcttaatgatgggtctgttttttatgtacggtgcatatctgagtgggacgcaactgggagggctaatcacggtcctgtgcttcttctttaatcacggcgaagctactagagtgatgtggacacctccgctgcgtgagtctttctcctatccttttctcgttctgcagatgtgcattctgacattaattctgagaacctcgtcaaacgaccggaggcctttcatcgctctgtgcttgtctaacgtggccttcatgctgccgtggcagttcgcgcaattcattttgttcacccagatagcctccctgtttcctatgtacgtggttggttatatagagccctctaagttccagaaaattatctacatgaacatgatctcagtgaccctgtcattcatactgatgttcggtaactctatgtacctgagtagctattactccagcagcttactcatgacgtgggctatcatactcaagcgtaacgaaatccaaaaactgggtgtttccaaactaaatttttggctgatccaggggtctgcctggtggtgtggcactatcatcctcaaattcttgaccagcaagatattaggggtgtctgatcacatccgtctgtcagaccttatagccgctagaatcctgcgttacaccgactttgacactctgatctatacctgcgctccggaatttgatttcatggaaaaggctacccccttacgctacacgaaaaccctgctcctccccgtagtgatggtgattacttgttttatcttcaaaaagacggtacgagatattagctatgtactggccaccaacatttacctgaggaagcagttgcttgagcactccgaactggcttttcatacattgcagctgctggttttcacagctttagccatcctgatcatgagactgaagatgtttctgaccccccacatgtgtgttatggcttccctcatctgttctaggcagctgtttggatggttgttccgcagagtgcgctttgaaaaggtaatcttcgggattctgacggtgatgagtatccagggttatgctaacctgcgtaaccagtggtctattattggcgaattcaacaatttaccccaggaagagctgctacagtggatcaagtactctactacatccgacgctgtctttgcgggagcgatgccaaccatggcctctataaaactgagcacactccatcctatagtgaaccatccccactacgaggatgcagatcttagagccaggacaaagatcgtttattctacctactctaggaagagcgccaaggaggtgcgggacaagctcttggagcttcatgtgaactactacgtccttgaggaggcctggtgtgtagtgaggaccaagccaggctgcagcatgttggaaatctgggatgtggaggatccatctaacgctgctaaccccccactgtgttcggtgctactcgaggacgcccgtccctacttcacaaccgtgttccaaaatagcgtgtatcgcgtattaaaggtcaactag

SEQ ID NO: 250937 - DNA, 2277 bp, Artificial Sequence
  derived and/or modified sequence
atgagaaagcagggcgtgagcagcaagagactgcagagcagcggcagaagccagagcaagggcagaagaggcgccagcctggccagagagcccgaggtggaggaggagatggagaagagcgccctgggcggcggcaagctgcccagaggcagctggagaagcagccccggcagaatccagagcctgaaggagagaaagggcctggagctggaggtggtggccaagaccttcctgctgggccccttccagttcgtgagaaacagcctggcccagctgagagagaaggtgcaggagctgcaggccagaagattcagcagcagaaccaccctgggcatcgccgtgttcgtggccatcctgcactggctgcacctggtgaccctgttcgagaacgacagacacttcagccacctgagcagcctggagagagagatgaccttcagaaccgagatgggcctgtactacagctacttcaagaccatcatcgaggcccccagcttcctggagggcctgtggatgatcatgaacgacagactgaccgagtaccccctgatcatcaacgccatcaagagattccacctgtaccccgaggtgatcatcgccagctggtactgcaccttcatgggcatcatgaacctgttcggcctggagaccaagacctgctggaacgtgaccagaatcgagcccctgaacgaggtgcagagctgcgagggcctgggcgaccccgcctgcttctacgtgggcgtgatcttcatcctgaacggcctgatgatgggcctgttcttcatgtacggcgcctacctgagcggcacccagctgggcggcctgatcaccgtgctgtgcttcttcttcaaccacggcgaggccaccagagtgatgtggaccccccccctgagagagagcttcagctaccccttcctggtgctgcagatgtgcatcctgaccctgatcctgagaaccagcagcaacgacagaagacccttcatcgccctgtgcctgagcaacgtggccttcatgctgccctggcagttcgcccagttcatcctgttcacccagatcgccagcctgttccccatgtacgtggtgggctacatcgagcccagcaagttccagaagatcatctacatgaacatgatcagcgtgaccctgagcttcatcctgatgttcggcaacagcatgtacctgagcagctactacagcagcagcctgctgatgacctgggccatcatcctgaagagaaacgagatccagaagctgggcgtgagcaagctgaacttctggctgatccagggcagcgcctggtggtgcggcaccatcatcctgaagttcctgaccagcaagatcctgggcgtgagcgaccacatcagactgagcgacctgatcgccgccagaatcctgagatacaccgacttcgacaccctgatctacacctgcgcccccgagttcgacttcatggagaaggccacccccctgagatacaccaagaccctgctgctgcccgtggtgatggtgatcacctgcttcatcttcaagaagaccgtgagagacatcagctacgtgctggccaccaacatctacctgagaaagcagctgctggagcacagcgagctggccttccacaccctgcagctgctggtgttcaccgccctggccatcctgatcatgagactgaagatgttcctgaccccccacatgtgcgtgatggccagcctgatctgcagcagacagctgttcggctggctgttcagaagagtgagattcgagaaggtgatcttcggcatcctgaccgtgatgagcatccagggctacgccaacctgagaaaccagtggagcatcatcggcgagttcaacaacctgccccaggaggagctgctgcagtggatcaagtacagcaccaccagcgacgccgtgttcgccggcgccatgcccaccatggccagcatcaagctgagcaccctgcaccccatcgtgaaccacccccactacgaggacgccgacctgagagccagaaccaagatcgtgtacagcacctacagcagaaagagcgccaaggaggtgagagacaagctgctggagctgcacgtgaactactacgtgctggaggaggcctggtgcgtggtgagaaccaagcccggctgcagcatgctggagatctgggacgtggaggaccccagcaacgccgccaacccccccctgtgcagcgtgctgctggaggacgccagaccctacttcaccaccgtgttccagaacagcgtgtacagagtgctgaaggtgaactag

SEQ ID NO: 250938 - DNA, 4060 bp, Artificial Sequence
  derived and/or modified sequence
gcgaatggcttccaacgcatgcgccccaccccacatttcacagtcgccatgacgaccgggaggtccgcaacggctgcggggacaagtccgttgaggctgccaggcgagtcaggtctctctggacctcgcctgactcggctgggctgtgcctgaaattgacccagctccaccatactccttgattatgagaaaacaaggagtaagctcaaagcggctgcaatcttccggccgcagccagtctaaggggcggcgcggggcctccctcgcccgggagccggaggtagaggaggagatggaaaagtcggccctaggcggcgggaaactgccaaggggctcctggaggtcctccccggggaggatccaaagtctgaaagagcgaaaaggcttggagctagaggtggtggccaagacctttcttctcggccccttccagttcgtccgtaattccctggcgcagctccgggaaaaggtgcaggaactgcaggcgcggcggttctccagcagaaccactctcggcatcgctgtctttgtggcaattttacattggttacatttagtaacactttttgaaaatgatcgtcatttctctcacctctcatctttggaacgggagatgacttttcgcactgaaatgggactttattattcatacttcaagaccattattgaagcaccttcgtttttggaaggactgtggatgattatgaatgacaggcttactgaatatcctcttataattaatgcaataaaacgcttccatctttatccagaggtaatcatagcctcctggtattgcacattcatgggaataatgaatttatttggactagaaactaagacctgctggaatgtcaccagaatagaacctcttaatgaagttcaaagctgtgaaggattgggagatcctgcttgcttttatgttggtgtaatctttattttaaatggactaatgatgggattgttcttcatgtatggagcatacctgagtgggactcaactgggaggtcttattacagtactgtgcttctttttcaaccatggagaggccacccgtgtgatgtggacaccacctctccgtgaaagtttttcctatcctttccttgtacttcagatgtgtattttaactttgattctcaggacctcaagcaatgatagaaggcccttcattgcactctgtctttccaatgttgcttttatgcttccctggcaatttgctcagtttatactttttacacagatagcatcattatttcccatgtatgttgtgggatacattgaaccaagcaaatttcagaagatcatttatatgaacatgatttcagttacccttagtttcattttgatgtttggaaattcaatgtacttatcttcttattattcttcatctttgttaatgacgtgggcaataattctaaagagaaatgaaattcaaaaactgggagtatctaaactcaacttttggctaattcaaggtagtgcctggtggtgtggaacaatcattttgaaatttctgacatctaaaatcttaggcgtttcagaccacattcgcctgagtgatcttatagcagccagaatcttaaggtatacagattttgatactttaatatatacctgtgctcccgaatttgacttcatggaaaaagcgactccgctgagatacacaaagacattattgcttccagttgttatggtgattacatgttttatctttaaaaagactgttcgtgatatttcatatgttttagctacaaacatttatctaagaaaacagctccttgaacacagtgagctggcttttcacacattgcagttgttagtgtttactgcccttgccattttaattatgaggctaaagatgtttttgacaccgcacatgtgtgttatggcttccttgatatgctctcgacagctctttggctggctttttcgcagagttcgttttgagaaggttatctttggcattttaacagtgatgtcaatacaaggttatgcaaacctccgtaatcaatggagcataataggagaatttaataatttgcctcaggaagaacttttacagtggatcaaatacagtaccacatcagatgctgtctttgcaggtgccatgcctacaatggcaagcatcaagctgtctacacttcatcccattgtgaatcatccacattacgaagatgcagacttgagggctcggacaaaaatagtttattctacatatagtcgaaaatctgccaaagaagtaagagataaattgttggagttacatgtgaattattatgttttagaagaggcatggtgtgttgtgagaactaagcctggttgcagtatgcttgaaatctgggatgtggaagacccttccaatgcagctaaccctcccttatgtagcgtcctgctcgaagacgccaggccttacttcaccacagtatttcagaatagtgtgtacagagtattaaaggttaactgagaaggatactacccattttactatggcacaatgccgtgtgtcaaaaacaatcaccctttggcttattcacattaataaaaatcacaagctttaataacagacacttaaaaataagataaaaatggattggaaatttttctgattactaaaaggtaaattacttttctgttcattgaatgtcagccttattaagcttgtcatataagttattaaatcattcatgtcatactgcataaacaaatgttcatttcagaattttaaagagaaatgtatataaaagaacaatgaattttaataaatcaggggtatgtaagtcctttttcatccaactaggtgaattgcttcagattttctctagtaccagagggtacctcctcaaactctttgaaccacttaaggcagaagaatgcaagctctgaaatgacatccttaaaatgctgatactggtcacagcctctttacctctgtgaggaaattgtaacagtgtgtcttttaaggtgtttttattttaccagcccttaagaaagatctctaataccttttaatacttttttttaataatttcaagttgaagtgtttttaaaaacactttgttttgtaatgttttgaatctcttgagatgtgtttaccccactagatacatatttgccactggttagttctccatctaagctcaagaggttattcatctctctttagattccagtggcttttcttttaacatccaggtaaaacagaaactgctatggtatacaaccaagttttggggttaaacataatcagaaaagaaaatccagttaaatttatgaagtgagattttcagatcctagatcttgaataaaggaaaggtcttttcatcttgatggccccaaagcttgttggtcatggtctttatttctggccactatcttcttaaataatatatttttaagccctcatttatttttggttttgggtgaggaaagtcatgttttctaagtcctctcccctaataaaacctacccaacaatagtgctttgaaaagtggtagttatcttgaagatactcttgccaaatgcaaagataaacattctttttgtctgctttataaatatgaaatatgccagatctatagtattttaatgtgcatctactttaaatgagtcatcttggggtttttataattcccttatgttcttgcccctctacacttgaaataacaaaatgccttaattttatggattagttctcttatagtagacaggcagctatatgcagcaaaaccaataaagttatttttcaactttcatagttgtaaaatatcttataacagaatacaaaacagctaagaaaacatgccacattttattttagcattttcaaataatttgtttttggtgtaagcacaggataaaaaaggagagcgtcaaagaaaagagacataacacctaacattcataaaaattaacaaagtatattttggatgatgtttttacaggaaatattttaaataagttggtagaacttttaaaatggtactgtattagctaataaaatattcagtacaaatatatgtttggatttatgcattaaaaaactaataaaattatttccaacttt

SEQ ID NO: 250939 - protein, 1150 aa, Artificial Sequence
  derived and/or modified sequence
MAPPLRPLARLRPPGMLLRALLLLLLLSPLPGVWCFSELSFVKEPQDVTVTRKDPVVLDCQAHGEVPIKVTWLKNGAKMSENKRIEVLSNGSLYISEVEGRRGEQSDEGFYQCLAMNKYGAILSQKAHLALSTISAFEVQPISTEVHEGGVARFACKISSHPPAVITWEFNRTTLPMTMDRITALPTGVLQIYDVSQRDSGNYRCIAATVAHRRKSMEASLTVIPAKESKSFHTPTIIAGPQNITTSLHQTVVLECMATGNPKPIISWSRLDHKSIDVFNTRVLGNGNLMISDVRLQHAGVYVCRATTPGTRNFTVAMATLTVLAPPSFVEWPESLTRPRAGTARFVCQAEGIPSPKMSWLKNGRKIHSNGRIKMYNSKLVINQIIPEDDAIYQCMAENSQGSILSRARLTVVMSEDRPSAPYNVHAETMSSSAILLAWERPLYNSDKVIAYSVHYMKAEGLNNEEYQVVIGNDTTHYIIDDLEPASNYTFYIVAYMPMGASQMSDHVTQNTLEDVPLRPPEISLTSRSPTDILISWLPIPAKYRRGQVVLYRLSFRLSTENSIQVLELPGTTHEYLLEGLKPDSVYLVRITAATRVGLGESSVWTSHRTPKATSVKAPKSPELHLEPLNCTTISVRWQQDVEDTAAIQGYKLYYKEEGQQENGPIFLDTKDLLYTLSGLDPRRKYHVRLLAYNNIDDGYQADQTVSTPGCVSVRDRMVPPPPPPHHLYAKANTSSSIFLHWRRPAFTAAQIINYTIRCNPVGLQNASLVLYLQTSETHMLVQGLEPNTKYEFAVRLHVDQLSSPWSPVVYHSTLPEAPAGPPVGVKVTLIEDDTALVSWKPPDGPETVVTRYTILYASRKAWIAGEWQVLHREGAITMALLENLVAGNVYIVKISASNEVGEGPFSNSVELAVLPKETSESNQRPKRLDSADAKVYSGYYHLDQKSMTGIAVGVGIALTCILICVLILIYRSKARKSSASKTAQNGTQQLPRTSASLASGNEVGKNLEGAVGNEESLMPMIMPNSFIDAKGGTDLIINSYGPIIKNNSKKKWFFFQDSKKIQVEQPQRRFTPAVCFYQPGTTVLISDEDSPSSPGQTTSFSRPFGVAADTEHSANSEGSHETGDSGRFSHESNDEIHLSSVISTTPPNL

SEQ ID NO: 250940 - DNA, 3453 bp, Artificial Sequence
  derived and/or modified sequence
atggctccacctcttaggccacttgctcggctcaggcctcccggaatgttactccgggccctgctgcttttactcctgctgtcccctctgcccggtgtgtggtgcttttctgaacttagcttcgttaaggagcctcaggatgtgaccgtaacgaggaaggaccctgttgtgcttgactgccaggcacatggcgaggtaccaatcaaggtgacatggctcaagaatggcgccaagatgagtgagaacaaaagaatcgaggtcctctcaaatggttccctgtacatttcagaggtggagggaagacgcggcgaacagagcgacgagggcttctaccagtgtcttgcaatgaacaagtacggcgctattttgtcccagaaggctcacctggccctttctactatttcggcattcgaggtgcagccaatcagcaccgaagtgcatgaggggggagtcgccaggtttgcatgtaaaatttcatcccacccaccagctgttatcacatgggagtttaatcggacgactcttcccatgacaatggatcggattaccgcgctgcctactggcgtgctgcagatttacgacgtctcacagagagacagtggcaattatcggtgcattgccgcaacggtggcacaccggcgtaaatccatggaggcttcactcactgtcatccctgcaaaggaaagcaagtctttccatacgcctacaattattgccggtccgcagaacatcaccacctcactccaccaaacagttgtcctggagtgcatggctacaggtaatcccaagcctatcatcagctggagtcggctggatcacaagagtatcgatgtgttcaacacccgagtacttgggaacggaaaccttatgatttctgatgtgaggctgcagcacgctggtgtttacgtgtgcagggccacaacccctggaacccgaaatttcacagtggctatggcgacactgaccgttctagcccccccatcctttgtcgaatggccagagagcctcactagaccaagagccggtacagcgcgtttcgtttgccaggccgagggcatcccttctcctaagatgtcctggcttaagaacgggaggaagatccattccaatggccgaatcaagatgtacaatagcaaacttgttataaaccagatcatccctgaagacgatgcaatataccaatgcatggctgaaaattcacagggaagtattttaagtagggcacggctgacagtagtcatgagtgaggaccggccaagcgccccatacaacgtgcatgctgagaccatgtcgagttccgctattttactggcctgggagcgtccactgtacaactccgacaaggtaattgcctactctgtgcactatatgaaggcggagggcctcaacaatgaggaataccaagtcgtgataggcaatgacactacccattacataattgatgaccttgaacctgctagtaactacaccttctacatagtcgcatacatgcctatgggagcctcccagatgagcgatcatgtcactcagaataccctggaagatgtgcctctgaggcctcccgagattagcctgacaagtcgatcccctaccgatattttaattagttggctgccaatccccgccaaatatcggcgtggtcaggtggtgttgtatagactcagcttccgactgtctaccgagaattccatccaggttttggaattaccgggaactacccatgagtatctactggaggggcttaaacctgactcggtctacctggtccgcatcaccgcagctactagagtcggacttggagagtcatccgtctggacttcacaccgaacccctaaggctacatccgtaaaggcgcccaaaagccccgagctgcaccttgaaccactgaattgtacaacgatctcggtgagatggcagcaagacgtggaagacacggcagctatccagggatataagctctattataaggaggagggccagcaggaaaacggaccaatcttcctggatactaaagatctcctttatacactgagcgggcttgaccccagacggaagtaccacgttcgtctcttggcttacaataacattgacgatgggtaccaggcagaccaaacggtgagtactccagggtgcgtgtcagtgcgtgaccgcatggtgcccccaccccccccacctcatcacctatacgctaaggcgaatacttctagctctatctttctccactggaggaggcctgcgttcacggccgctcagattattaattacactatccggtgcaatccggtcgggctgcaaaacgcgagtctggtgctgtacctgcagacctccgagacgcacatgctggtgcagggcctcgagccaaacaccaaatatgaattcgctgttaggctccatgtggatcaactaagtagcccatggagccctgtcgtttatcattcaaccctgcctgaggccccagcgggccctcctgtgggcgtgaaggttacgctgatcgaggatgacactgcactggtttcatggaaaccacccgatgggcccgagactgtcgtgacccgatataccatactgtatgcaagtcgcaaggcatggattgcaggagaatggcaagtgctgcacagagagggcgcgatcacaatggctctgctggagaatctagtggcaggtaacgtctacattgtgaaaataagcgcttcgaacgaggttggggaggggccattttctaactcagttgaactggctgtgctccccaaagaaacgtctgaatccaaccagcgccccaaaagacttgactctgccgatgctaaggtgtactctggctactatcatctagaccagaaaagcatgactggaatcgcagtgggcgtggggatcgcgctcacctgcatcttgatatgcgtgttgatcctgatttaccgatcaaaggctcgaaaatcttctgcttctaaaactgctcagaacggaactcaacagcttccccggacgagcgccagtctcgcctctggcaacgaagtgggcaagaacctcgaaggagcggtgggaaatgaagagagccttatgcctatgatcatgcctaactcctttatcgacgccaagggcggaaccgatttaatcattaatagctatggacccatcatcaaaaataactccaaaaaaaaatggttcttcttccaggatagcaagaagatacaggttgaacagccccagcggcgattcaccccagcggtatgtttctatcaacccggaacaaccgtgttgatctcagatgaagatagccctagtagcccagggcagactaccagcttttctcggccgttcggggtggctgccgacactgagcactccgccaacagcgaaggctctcacgagacgggcgactctgggcgcttcagccacgagtcaaatgatgagattcatctgagctctgtgatctccaccacaccgccaaatctgtag

SEQ ID NO: 250941 - DNA, 3453 bp, Artificial Sequence
  derived and/or modified sequence
atggccccacccctgcggcccctggcccggctgcggcccccaggcatgctgctgcgggccctgctgctgctgctgctgctgagccccctgcccggggtgtggtgcttcagcgagctgagctttgtgaaggagccccaggatgtgacagtgaccaggaaggaccctgtggtgctggactgccaggcccatggagaggtgcccatcaaggtgacctggctgaagaatggagccaagatgtctgagaacaagagaattgaggtgctgagcaatggcagcctgtacatcagcgaggtggagggcagaagaggagagcagagtgatgagggcttctaccagtgcctggccatgaacaagtatggagccatcctgagccagaaggcccacctggccctgagcaccatcagcgcctttgaggtgcagcccatcagcacagaggtgcatgaaggaggagtggccaggtttgcctgcaagatcagcagccaccccccagctgtgatcacctgggagttcaacagaaccaccctgcccatgaccatggaccgcatcacagccctgcccactggagtgctgcagatctatgatgtgtcccagagggacagcggcaactaccgctgcatcgccgccaccgtggcccacaggaggaagtccatggaggccagcctgaccgtcatcccagccaaggagagcaagagcttccacacccccaccatcatcgccggcccccagaacatcaccaccagcctgcaccagacagtggtgctggagtgcatggccactggaaaccccaagcccatcatctcctggagccggctggaccacaagagcattgatgtgttcaacaccagggtgctgggcaatggaaacctgatgatcagtgatgtgcggctgcagcacgccggcgtgtatgtgtgccgggccaccaccccaggcaccaggaacttcaccgtggccatggccaccctgactgtgctggccccacccagctttgtggagtggccagagagcctgacccggcccagggctggaacagccaggtttgtgtgccaggccgagggcatccccagccccaagatgtcctggctgaagaatggaaggaagatccacagcaatggccgcatcaagatgtacaacagcaagctggtgatcaaccagatcatcccagaagatgatgccatctaccagtgcatggccgagaacagccagggcagcatcctgagccgggcccggctgactgtggtgatgtctgaggaccggcccagcgccccctacaacgtgcatgctgagaccatgagcagcagcgccatcctgctggcctgggagcggcccctgtacaacagcgacaaggtgattgcctacagcgtgcactacatgaaggccgagggcctgaacaatgaggagtaccaggtggtgattggaaatgacaccacccactacatcattgatgacctggagcccgccagcaactacaccttctacatcgtggcctacatgcccatgggcgccagccagatgtctgaccacgtgacccagaacaccctggaggatgtgcccctgcggcccccagagatcagcctgaccagccgcagccccacagacatcctgatctcctggctgcccatcccagccaagtacagaagaggccaggtggtgctgtaccgcctgtccttccggctgagcacagaaaattccatccaggtgctggagctgcccggcaccacccatgagtacctgctggagggcctgaagccagattctgtgtacctggtgcgcatcacagctgccaccagggtgggcctgggggagagctctgtgtggaccagccacaggacccccaaggccacctctgtgaaggcccccaagagccctgagctgcacctggagcccctgaactgcaccaccatctctgtgcgctggcagcaggatgtggaggacacagctgccatccagggctacaagctgtactacaaggaggagggccagcaggagaatggccccatcttcctggacaccaaggacctgctgtacaccctgagcggcctggaccccaggaggaagtaccacgtgcggctgctggcctacaacaacattgatgatggctaccaggccgaccagacagtgtccaccccaggctgtgtgtctgtgcgggacaggatggtgcccccacctcctccaccccaccacctgtatgccaaggccaacaccagcagcagcatcttcctgcactggaggaggcctgccttcaccgctgcccagatcatcaactacaccatccgctgcaaccctgtgggcctgcagaatgccagcctggtgctgtacctgcagaccagcgagacccacatgctggtgcagggcctggagcccaacaccaagtatgaatttgctgtgcggctgcacgtggaccagctgagcagcccctggagccctgtggtgtaccacagcaccctgcctgaggccccagctggcccccctgtgggcgtgaaggtgaccctgattgaagatgacacagccctggtgtcctggaagcccccagatggccctgagaccgtggtgacccgctacaccatcctgtatgccagcaggaaggcctggattgctggggagtggcaggtgctgcaccgggagggcgccatcaccatggccctgctggagaacctggtggccggaaatgtgtacatcgtgaagatcagcgccagcaatgaggtgggggagggccccttcagcaacagcgtggagctggccgtgctgcccaaggagaccagcgagagcaaccagaggcccaagaggctggacagcgcagatgccaaggtgtacagcggctactaccacctggaccagaagtccatgactggaattgctgtgggcgtgggcatcgccctgacctgcatcctgatctgtgtgctgatcctgatctaccgcagcaaggccaggaagagcagcgccagcaagacagcccagaatggcacccagcagctgcccaggaccagcgccagcctggccagcggaaatgaggtgggcaagaacctggagggcgctgtgggcaatgaggagagcctgatgcccatgatcatgcccaacagcttcattgatgccaagggcggcacagacctgatcatcaacagctatggccccatcatcaagaacaacagcaagaagaagtggttcttcttccaggacagcaagaagatccaggtggagcagccccagaggcgcttcaccccagctgtgtgcttctaccagcccggcaccaccgtgctgatcagtgatgaggacagccccagcagccctggccagaccaccagcttcagccggccctttggagtggccgctgacacagagcacagcgccaacagcgagggcagccatgaaacaggagacagcggccgcttcagccatgagagcaatgatgagatccacctgagcagcgtcatcagcaccaccccacccaacctgtag

SEQ ID NO: 250942 - DNA, 3453 bp, Artificial Sequence
  derived and/or modified sequence
atggccccccccctgcggcccctggcccggctgcggccccccggcatgcttctccgagccctcctcttactgctgctgctatcccctctcccaggcgtgtggtgtttctctgagttatcatttgtgaaagaaccccaagatgtcacagtgacgcggaaggaccctgtggtcctggactgccaggcacacggcgaagtcccaattaaagttacctggttgaaaaatggcgctaagatgtctgaaaacaaaagaattgaggtactgtctaatggctcactatatatttcagaggtcgaaggacggaggggagaacagagcgatgaagggttctaccagtgtctggctatgaacaagtatggcgctattctctcacagaaggcccatttggccctgtctaccatttcagcgtttgaggtgcagcctatatcgacggaagtgcatgagggcggagtggcaaggtttgcatgcaagatctctagccacccgccagcagttattacttgggaattcaatagaacaactcttccaatgactatggacagaatcaccgcgctgccaaccggagttctccagatttatgacgtgagtcagagagatagtggcaactaccgatgcatagctgcaacggtcgcccaccggagaaaaagtatggaagcgagcctgactgtcatccccgcaaaggaatccaagagctttcacacccctactatcatagccggcccccagaacataacgacctccctgcaccagactgtggtcttagagtgcatggcaaccgggaatccgaaaccaatcatatcgtggtcacggctggatcacaagtcaatcgatgtttttaatacccgggtcttgggaaatggaaatctgatgatttccgatgtgaggctgcagcatgctggcgtgtacgtgtgcagagctacaacacctggaacccgtaattttacagttgccatggccacactgacagtgctagcccctcctagttttgtcgaatggcctgagtcactgacgcggccacgggcgggaaccgcccggttcgtttgtcaggccgaaggaatcccttctcctaaaatgagttggctcaagaacggccgcaagatccactccaacgggcgtatcaagatgtacaattcaaagctagttatcaaccagatcattcctgaagacgacgccatttaccagtgtatggctgagaattcccagggaagtatcctgagtagagctagactgactgtggttatgagcgaagatcggcccagcgctccttataatgtgcacgccgagaccatgtcatcgagtgccatcctcctggcctgggagcgccctctgtacaactccgataaggtgatcgcctatagcgtgcactacatgaaggcggagggtctgaataatgaagaataccaggtggtgatcggcaatgacacaacccactacatcatagacgatttggagcccgcaagcaactataccttctacatcgtcgcctacatgcctatgggagcttcccaaatgtcagaccatgtcacacagaacaccctggaggacgtgcctttaagaccgcctgaaatcagtctcaccagcaggagtcccacagatatcttaatcagctggctgcctattcctgccaaatatcgccgtggacaggtggttctgtaccgactgtctttcaggcttagtacagaaaattctattcaggtgctggagctcccaggaacaacccacgagtacctactggagggactcaagcccgatagcgtctacctggtaaggatcaccgcagctacaagagtgggcctcggagaatcttcagtctggactagccatcggacaccaaaggccacgtcagtgaaggctcccaagtccccagagcttcacctggagcccctgaactgtacaaccatctccgttagatggcaacaggacgtggaggatacagcagctatccaagggtacaagctgtattataaggaagaagggcagcaggaaaacggaccaatttttctcgacacaaaagatctcctgtacacactctcaggcttggacccgcggcgaaaataccatgtgagactgctggcctacaacaatatagacgacggatatcaggctgaccagactgtctcaacaccaggctgcgtgagcgtccgggatcggatggttccccccccccctcccccccaccatctttatgccaaggccaacaccagctctagcatttttctgcattggaggagacctgcatttaccgctgcccaaataattaactacaccatacgctgcaatccagttgggctgcaaaacgcaagccttgtcctgtacctgcagacatccgagacccatatgcttgttcagggactcgagcctaatacaaagtatgagtttgccgttagattgcacgtggatcagctgtccagcccctggagccccgtggtctatcactctaccctgcctgaagcaccagccggccctccagtcggagtcaaggttacactgatcgaggacgacaccgccttggtgtcctggaaaccgccagacggtcctgagactgtggtcacgaggtacaccattctgtacgcctcaaggaaggcatggatcgccggggagtggcaagttctgcacagagaaggggctattacaatggccctcctggaaaacctcgtagctggcaatgtttatatagtgaagattagcgcgtcaaacgaggtgggagaaggtccattctccaatagtgtggaactggccgttctgccaaaggaaaccagcgagtctaatcagagacccaaacgcctagacagcgccgacgccaaagtatactccggttactaccatctcgaccaaaaatccatgaccggcatcgcagtgggagttggaatcgcccttacgtgtattctgatctgtgtcttgatcctgatctatcgaagtaaagctcgcaaatcctcagcctcaaagactgctcaaaatgggacacagcagctccctaggacatctgcaagcttggctagcggcaacgaggtaggcaaaaatctggagggggctgtggggaatgaggagagcctaatgccaatgatcatgcctaactctttcatcgatgccaagggtggaactgatctgattattaattcatacggtccaatcattaagaacaattcaaagaaaaagtggttcttctttcaggactcaaaaaagatccaggtggaacagccgcagagaaggtttacgcctgcagtttgcttttaccagcctggcaccacggtacttataagcgatgaggattcacccagttcgccagggcagactacctcattctccaggccattcggagtggccgccgacaccgaacactctgccaatagcgaagggtctcatgagaccggggattcgggccgcttctcacacgagtcgaacgacgagattcacctatcaagcgtgatttcgacgaccccccccaatctgtag

SEQ ID NO: 250943 - DNA, 3453 bp, Artificial Sequence
  derived and/or modified sequence
atggctccccctttgcgcccactggcacggctgcggcctcctggaatgctgctgcgggcactgcttcttctgctccttctcagcccactgccaggcgtctggtgctttagtgagttaagtttcgttaaggaacctcaggacgtgacggtgacaagaaaagaccctgtggtgctggattgtcaggcgcacggggaggttcccattaaagtcacgtggctaaagaatggggctaaaatgagtgagaataaaaggatcgaagtgctgagtaatgggagcttgtacatttcagaggtggaaggccgaaggggggagcaatctgacgagggcttctatcagtgtttagctatgaacaagtacggagcaatcctcagccagaaggctcatctagctctttccacaatctctgcttttgaggttcagcccatctctaccgaggttcacgagggtggagtggctcgattcgcctgcaagatctcttcacacccccctgccgtgatcacttgggagttcaacagaaccactctgccaatgactatggatcgtattacagccctgccaacaggggtgctccagatctatgacgtgtcacagcgagacagtggtaattaccgatgtattgcagctaccgtcgcgcaccggaggaagtctatggaggcgagtttgacagtgatacctgcaaaagagtccaagtcattccatactcccacgataattgctgggccacagaacattacgactagcttacatcaaaccgtcgtgcttgagtgcatggccaccggcaaccccaagcccatcatctcctggtctagactcgaccacaagtcaattgatgttttcaacactcgggtgcttggaaatgggaacttaatgatttctgacgttcggcttcagcacgccggtgtctatgtgtgcagagctacaacccctggaacaaggaattttactgtggcaatggcgactctcacagtcctcgccccacccagttttgtggaatggcctgagtcactgacccggccaagggctggaactgcacgcttcgtttgtcaggctgaggggataccaagccctaaaatgagttggcttaagaatggcagaaaaatccacagcaatggccgaatcaagatgtataactcaaagttagttatcaatcagatcatacccgaggacgacgccatctatcagtgcatggccgagaattctcagggtagcattctgtctcgcgctagactcacggtcgtcatgagcgaggatagaccatctgccccttataacgttcatgccgagacgatgagctcgtctgctattctgttagcatgggagcggcctttatacaattccgacaaggtgattgcttacagtgtacattatatgaaggccgagggactgaataacgaggagtaccaagttgtgattggaaacgacactacacattacatcattgatgacttggagcccgcttctaactacaccttttacattgttgcctacatgcccatgggggctagtcagatgagtgatcacgtaacccaaaacacactggaggacgtgcctttaagaccccctgagatttcactgacctcaaggtcccccaccgatatactgatctcgtggctgcccatacctgctaaataccggagaggtcaggtggttctgtacaggctgtctttcaggctgagtacagaaaacagcatccaagttctggaactgccaggcacaacccacgaatacttattggaggggttgaagccagacagcgtgtatttagtccggattaccgcagcaacacgcgtgggtcttggcgaatcatctgtgtggacaagccatcgcacgccaaaggcaacttctgtgaaggctccaaaatcgccagaacttcacctcgaacccctcaactgcacaacaattagcgtgcgatggcagcaagatgtcgaggacacagctgcgatccagggctataaattgtattacaaggaggaaggccagcaagaaaacggacctatttttctcgacaccaaggacctgctgtataccctaagcggtttggaccccaggcgcaaatatcatgttagactgctcgcatacaataacattgatgacggatatcaggccgatcagaccgtgtcaacccccggatgcgtgtctgttcgtgatcggatggtgccgcctcctccacctcctcaccatctgtacgcaaaggctaatacatcctcttctatctttttacattggaggcgtcccgctttcaccgccgcacagatcatcaattatacaataaggtgcaatcctgtaggtctccagaatgcttcactggtgctctacttgcagacatccgagacacatatgcttgtacagggactcgaacccaacaccaaatacgagttcgcagtccgtctgcacgtagatcagctgagttcaccatggtcacccgtagtttaccacagtactctgccagaagctccggctggaccccctgtgggggtcaaagtgacccttatcgaggacgatactgcactcgtgagttggaaaccacctgacggccctgaaaccgtggtgactcgctacacgattttgtacgcgtcacggaaggcctggatagccggagagtggcaggtcctccatcgcgaaggtgcaatcaccatggccctcctggagaatctggttgccggtaatgtgtacatcgtgaaaatcagcgctagtaatgaggtaggcgaaggacctttcagtaactccgtggagttggctgttctgccgaaagagacttccgaaagcaatcagcggcctaagagacttgacagcgctgacgctaaggtttatagcggatattaccaccttgatcaaaaatctatgacggggatagccgtgggagtggggatcgctctgacctgcattcttatctgcgtcctgatactcatctatcgtagcaaagccagaaagagcagcgcgagtaaaaccgctcagaatggcactcagcaactgccacggacctctgcgtcactcgcaagcggcaacgaggttggaaaaaacctagagggggcagttggaaatgaggaatctcttatgcccatgattatgcccaatagctttattgacgccaagggaggtacggatctgattattaactcatatggtccgatcattaagaacaactctaagaagaagtggtttttctttcaggattccaagaagatccaagttgaacagccacagagacgttttacaccggctgtttgcttttaccaaccgggaactacagtattaatctctgatgaggacagtccatcttccccgggacaaacaacatctttttcaaggccttttggtgttgctgcggacacggaacatagcgccaactccgaagggagccacgaaacgggcgatagcggacgattcagccatgaatcaaatgacgaaattcatttgtcatctgtgatcagcacaaccccacctaatctgtag

SEQ ID NO: 250944 - DNA, 11967 bp, Artificial Sequence
  derived and/or modified sequence
gacaggggctctgggcggccggggagcatgcccgcgcggctacgctgaatggcgcctcctctgcgacccctcgcccggctgcgaccgccggggatgctgctccgcgcgctcctgctcctgctgctgctcagtcctttgccaggagtgtggtgctttagcgaactgtcttttgtaaaagaaccacaggatgtaactgtcacaagaaaggacccagtcgttttagattgccaggctcacggagaagttcctattaaggtcacatggttgaaaaatggagcaaaaatgtctgaaaataaacggatcgaggttctttctaacggctctttatacatcagtgaggtggaaggcaggcgaggagagcagtccgatgaaggattttatcagtgcttggcaatgaacaaatatggagccattcttagtcaaaaagctcatcttgccttatcaactatttctgcatttgaagtccagccaatttccactgaggtccacgaaggtggagttgctcgatttgcatgcaagatttcatcccaccctcctgcagtcataacatgggagttcaatcggacaactctacctatgactatggacaggataactgccctaccaacaggagtattgcagatctatgatgtcagccaaagggattctggaaattatcgttgtattgctgccactgtagcccaccgacgtaaaagtatggaggcctcgctaactgtgattccagctaaggagtcaaaatccttccacacaccaacaattatagcaggtccacagaacataacaacatctcttcatcagactgtagttttggaatgcatggccacaggaaatcccaaaccaatcatttcttggagccgccttgatcacaaatccattgatgtctttaatactcgggtacttggaaatggtaatctcatgatatctgatgtcaggctacaacatgctggagtatatgtttgtcgggccactacccctggcacacgcaactttacagttgctatggcaactttaactgtattagctcctccttcatttgttgaatggccagaaagtttaacaaggcctcgagctggcactgctcgatttgtgtgtcaggcagaaggaatcccctctcccaagatgtcatggttgaaaaatggaaggaagatacattcgaatggtagaattaaaatgtacaacagtaaattggtaattaaccagattattcctgaagatgatgctatttatcagtgcatggctgagaatagccaaggatctattttatctagagccagactgactgtagtgatgtcagaagacagacccagtgctccctataatgtacatgctgaaaccatgtcaagctcagccattcttttagcctgggagaggccactttataattcagacaaagtcattgcctattctgtacactacatgaaagcagaaggtttaaataatgaagagtatcaagtagtcatcggaaatgacacaactcattatattattgatgacttagagcctgccagcaattatactttctacattgtagcatatatgccaatgggagccagccagatgtctgaccatgtgacacagaatactctagaggatgttcccctgagacctcctgaaattagtttgacaagtcgaagtcccactgatattctcatctcctggctgccaatcccagccaaatatcggcggggccaagtggtgctgtatcgcttgtctttccgcctaagtactgagaattcaatccaagttctggagctcccggggaccacgcatgagtaccttttggaaggcctgaaacctgacagtgtctacctggttcggattactgctgccaccagagtggggctgggagagtcatcagtatggacttcacataggacgcccaaagctacaagcgtgaaagcccctaagtctccagagttgcatttggagcctctgaactgtaccaccatttctgtgaggtggcagcaagatgtagaggacacagctgctattcagggctacaagctgtactacaaggaagaagggcagcaggagaatgggcccattttcttggataccaaggacctactctatactctcagtggcttagaccccagaagaaaatatcatgtgagactcctggcttacaacaacatagacgatggctatcaggcagatcagactgtcagcactccaggatgcgtgtctgttcgtgatcgcatggtccctcctccaccaccaccccaccatctctatgcgaaggctaacacctcatcttccatcttcctgcactggaggaggcctgcattcaccgctgcacaaatcattaactacaccatccgctgtaatcctgttggcctgcagaatgcttctttggttctgtaccttcaaacatcagaaactcacatgttggttcaaggtctagaaccaaacaccaaatacgaatttgccgttcgattacatgtggatcagctttccagtccttggagccctgtagtctaccattctactcttccagaagcaccagcaggcccaccagttggagtaaaagtgacattaatagaggatgacactgccctggtttcttggaaaccccctgatggcccagaaacagttgtgacccgctatactatcttatatgcatctaggaaggcctggattgcaggagagtggcaggtcttacaccgtgaaggggcaataaccatggctttgctagaaaacttggtagcaggaaatgtgtacattgtcaagatatctgcatccaatgaggtgggagaaggacccttttcaaattctgtggagctggcagtacttccaaaggaaacctctgaatcaaatcagaggcccaagcgtttagattctgctgatgccaaagtttattcaggatattaccatctggaccaaaaatcaatgactggcattgctgtaggtgttggcatagccttgacctgcatcctcatctgtgttctcatcttgatataccgaagtaaagccaggaaatcatctgcttccaagacggcacagaatggaactcaacagttacctcgtaccagtgcctccttagctagtggaaatgaggtaggaaagaacctggaaggagctgtaggaaatgaagaatctttaatgccaatgatcatgccaaacagcttcattgatgcaaagggaggaactgacctgataattaatagctatggtcctataattaaaaacaactctaagaaaaagtggttttttttccaagactcaaagaagatacaagttgagcagcctcaaagaagatttactccagcggtctgcttttaccagccaggcaccactgtattaatcagtgatgaagactcccctagctccccaggtcagacaaccagcttctcaagaccctttggtgttgcagctgatacagaacattcagcaaatagtgaaggcagccatgagactggggattctgggcggttttctcatgagtccaacgatgagatacatctgtcctcagttataagtaccacaccccccaacctctgattctttcactggcagtgattcaggtggagattccgcattgaggaagtgtgaagaccctgctgtgtcatctgttagtgagcagacttcctccttagttctgcagccgccatctgccatgctatgctttgataaaaatgattttccaatctagacggccatgctcaggtattctcaccattaaatctgttcgaaggacaatgaacagggaaccaaagccttttgtgaaaatcttaatatctttatggggtattttagctttttttgaatgtgttttgttttttatttttaaacttgtgtaatttgaatgtttcattgtcagcaatgtgaaagaacggtcgagatgtttgactggattataaaatatatcactggagcaaagggaagacttttgaaagcccctttgctgactatctacctcagtttgcctcccggcaaactctgaagacaactttgttacctcatttgttgttatagtttatctcagctacataaccaatgatacttcctagtagtattgtgttttcattgctgtacgtgtaatgtgtgtgatcaaaggagtcatataggtagatgagtaagaatgtttatctgaagctctgatttttttaaaaaaagaaactatgacatctgcatggtttggataagttcatacctctggctgtgaggaccgttaaaccactgagaagaggaaaagtggggctatttcttctaacgatgaccaaaacaagaaagtatatttcttttgagaacagaactattcaataccaggtagggatcattttgcttaaaaggcctttatgttttgggcattagagtctgagtgctttatctcctatatcccaaacctcaagctgcccagaactgtgccttttctaccttcccctttgcctgacggttggccaaaggctgcactgtctagtttgcaaagcatcctcaactttgccagtattagttgcaaaaccccatgcagaatatggatttttaaagaaaatgggttaaggtggttttttttctttttttaaatcccagtttggcttaaaggagtgaagacatttcatgaactattaagaatgaaggtaaatgcaacagtagacagtaaaatgaactcgaagttattatggtaacagtgcctttcagtataatgaaattctttgccttatacctttttaatattcatgaaattgtttaggaacaggagtacaaaaagttgccttaagagtttcttggattttatcagtaactattttgatgtatagtatcttaccaaggcattttttttaagtgcaggttttgtttagggataaatattcagagttctaccaccctacttgtgttttcttgaattctttagagaatatggtatctacttaatcttccttcagtgtcagtgctgtgaatgaggaatgctaactccaggagtgagttaatcctcttgcaggtttgaaatcagcaaattgtttactcagctacataacataggccttttctccgtcatgagacagttacctaggtgccgagcagtgggagaggataaagaactaaacgcgtgtagagaaggggtcccatatccttttaaaagtattttttcaaattttctggaagtgacttttgattctcattttaaaaggaatcataatgggtttacacttgaaatgctttgttcctagaggaggcagggtcatgttcactgatgttctaaaatcaaaggaatattagcagataatagtcccagcatcatctgctagtctaatgactgtagatataacatttttaatttttttaaatctgtaattttgtgccaaactggatgtgattaagactaaagttcaatgccagcaaccacttctgaactaaactcagagtcccccagttagttatctaagtacggaattcatcgcaaaacaaacaaaaaagcagagctttaggtgaacagtctgcagcaaggaaaaatgctgctcctgcctttatagctcctgttttatactacctccttttaaagttattctagtgttattttttttcctgtactcagggaacgttttgttacttttgagctgcctcatggaagcataggcagattgacagggtatagcgctttgtggttggtaagtagaagtatatagggccaacttttatcagtatctaaaattaagtacagtgagatcattttatttttaagctttcattaaaaggcaaacaaaatctaaagctgaaacatcatccatcatggttatggaagatgtgtctaggactacatgaattcgagtggttttaaatggctaaaaagacgagctaaagtccttgaggaaagtattttgtttgtttggtttttgatgaataggcttatagttacaatagaactttaggctataactatttgataattatttaacagtacattttttaccttttcattttgttcttatacggactttttcataataattctgttaccaaagaattttcagtagaaaataaaattttgattataattccccccaaattgaattaactagaagcatttatagatatgaaacttacacaagtagttactaacccaaaacaatagggtttatattgattgttgtagttaaatagattagtaatgttaactaccttattgttaccagagcatttaaaataagttgtaatactttctttaccagcagatcgttccaaagaatttcaggtatagttttttcttcagcaagtaaatcttcaactatacagtattaaagtatttttatattgttgaaactacttgttggagagaaaattttttttttttaccaaaaataaatactttggtctcattgaataagatatttagtaatacagcaaagacttctttttacttgaccaaatcaagcttctttgaagtcttaagtatgaaattgtaattaaaatgtgaagattttcactcatttttcatagtggtattacttcatggtattgtacttcaaaggggctaatatgcaaatggtaactattttcttttccaaagatgtatttgctgtaagtactgatacctgcatgtcatttttatgccaaatattacaagatactgctcatcagtattttcataccaaagaccattaagatgtataggttagcctgtaagtaagtaaagatgagcagatttgaaataaatttatttagaggccgatagagaatctagctttagtagcaaaaaatatcaaagggctaagtttacataattaaaagcaatacaattatattggtatttatcagtgtttttattcaagtactttttatcagcaaattaaaaagaaaaaaaccaaagatatttaaggttacctccgcatataggcaaatatagttgtacattaaactgttgtttcttgtttttatgttaaaccaaacatgtctcttcggaacacagtctgtatacaaataacatgcatgaggactttccatttaatctgtgattcagccacatgatgtttttgccaaatgatgtgatactttccaaagcaccttgagtgtgaaatgtcaacagaaatatcagcaagcttttatgttgcagagtattatggtacctctgaattagcctgtatagttctcttcctgctttaagcattacctggttagctcagacggcttgaggcagtcccttaataatagggatgcttttcatctctaaggatgtaagaggcaaacaaatcatgtcattctttaagtgggctatgctttgatagatgtgctctttaaaggtgtgagattggaatttagagttgttaaattgaaatgtttgcattgcaccaaaggagctcagttttcaaactttaatggaaccttgggtaaagggaaaaaatttttaatgaaatctggggttttatattttgattagcctaaaagtaaaaatacagctttatccattaagtgacttttaaaaatcagttttgccataccaaagaaattagattcttagtgtcacatgctatacttttgtctgtgcttgaaacgagcaatgccaacattgggaacaatgacagaggtttgcatcagtttgtcttggctttgttaaggacttctgccagaaatgtgctcgtggttgacaacccaggatcattgttcaagttcttatgcagacacctttgaaaacaattcagatcgtgtcacaagaatttggaattgaaaatatcatttattttttaatgcaagaatacccagatgtggtttcacttcagcagtagctatagtggttcacttatatacatttctgtttcactgaatgtaaattttgaatactgaatgtaaaaaaaaaactccagttatattgaaacagtcactaagactgcacatgtgttttgcagactttcttcctgaccatttgccacatgggtctctgataagattctgttggtttaatagtcaaaataatctttgcagtttgtgagcactgagtagcaggttctggagactaccatatacaaccagttgtctaattgtgatttttttattgatgtttagaagaatgtaaccgtagagttctgtgttaagttgatttatgctcaggacataagatcacaggctaatgcaatgtgtatgtttcaggctttaatcttctcaatttccctttttaagccgttgatggtgtttaagattaacatgacagtcttgtatttttaccagatactgtattatttttcctattgctgctgtaacacattaccatgaaggtggtggcttaaaataacacaaatttttcttaagttctgcagatcagaagtctaacacaggtctccctgggacaaaatcaaggcgcttgcagggctgtttctttttgaggctttagggaaaaatctatttccttttctagttttttaaggctgggaacccctccttccatcttcaaagccagccatgtagcatctctctgaagctccttccgttatcatttctctttgtccaaccccagctgatacaggttatctaggtttaaggattccagtgatcacattgagcccacctaaataatccaggataatctccccaactgaagttcctcaacttaatcacatctacagagttccttttgctatgtttggtaacatattcactggttccagggatttgggcatggacttctgtaggtggccagtattttgcccacaacaggtacattctttctgtggaattctgatccctgtaaaatgtctgtagcattaaagagattggaaatctgaggtcatgtgccccttggggatctttaaagattaaaagcatgaaaactttgacttgtagcctaccaaaattatacactaaactttctctccaaaatacttgtgaaacaatttatctttaaagtttctgaatatgtgcttcataaaataacatctcatgtttatcagcaagtgtcctaaatatttgcgtctaactttatggaatttattcagaaaaagaattgaaaactcttcttatagttaccctttctccttttctcttcagtggttatgttgctggggaagagttgggggaagacctcaaaacacaggaactcagagtgatgaacaggaccatgctcaagtttattctttgttttcttttaatgacatattcacaacattcacaactttctgcctttaaatctggttcctctcttcagcttcaccaagccactgaatgcttttcagttttattaaccctcacattccccatccttctcagcaagagcctctccttatgccatcagcatgtatatacatttcctaggaaatttgatctttcttgtcattcttttttggttccaatcggccttttcctggttctcaaagctctagtttcttctaatttctggatcatcgcaagtctggccctctttgaactttaaaacataatgtctaattccaccccaattttcagcatttcttcaactaaatcgataaagctgtctccattatgagaaaggccagaataatactccgagtaagcataagaaagctggtcattttacaacttctcccgactctaggaagtaatatgatgccatttgttgagcatctacagtgtgccaagcacatggttcatctctgcaaactgctgctacattctgtaaagcaagtattatccgcattttagggattaggaacagcttcctgatctcttgccaaaagtcacagctagtgagtggtttaggcaagatacaaaccctagttagttaatccttactcagaagtgtataggactatgatacattgtctcagcttaaaaaaaaaaaaaaaaaaaaaaggtatttaatcacccagggtcatagtgccttccatagtgtgaccagatacaactgttttttccttgtatccacaaaagccaggttgtgtcagaacaacctttctacagagtaataaccaatcgaaaaagagaagactaccttatttaaatccacttattcacaggagggattaaggcggctgtaactcatcccttatcatctcctaatttctctcctccaaaaccttccatttatctcagctaaaattgtgtctgaaggctgtttgtacttagagttacattacaaataaggtaggcatggtttctagagtccttttctagtcaagcatttccttattcgacaatgtcttcagaattgcattttatcttttgtaattttctgtagctcccatattccaaacaggaattcattgacttgaaaaagtcaggtgtgtaaacagtaatcctttcttgttaggtctgaagagttcatgattttttatgaatataaactaatttattatttgcattaatgtaggagacagcaaagttaacggagagtcataaaacagaacaagtataagttaggctttggagcacctaagttctaatcttgacaattttgagaatcgtttggtacaaaaattcttaaactgtttctgtgccttctccatccatgaaatgaggataatttttttgtgcaaaatgaaacaatagtactttgaaaacttaagagaaaattcaagtgtaaataatcataatctgaaactcatttgtatgaggctgtgaaagattttacagactctttcttttcaagtcagcctttgcaattatattttgcctttgttgaaatgaaaaatgtttgcatctcccgtacgcatacacaaaaccaatagaagaaagtggttggtaaaagatatagctgaaatggaaacactcatatgttaggtggataaaatcataagagaaaatgggaattgactgtactttcaaagtactaaatttgaagtcatcttactccaatttaagtcatatatatatatatatatatatatatatatatatatatatatatatatatattggcttttaaagagttaaagagagaatcagatctgtccagcaggatagatgggtgaggagaaaagtacatatttaggatttttctctaaaagatctttttcaagattatggagtattttaatatttctgcaaactattccaaatgaatgcattttatatagggcaacacatactggcacctgattctggtttattcgagttcatatgtagggtttgttgggaagaattatatgattggcttctttttttagaggaaatattttcccttttttcttatccatatactattctgaacagctttgcagatttccttaagttcatagcttgtaagtagttcatggtatatagacatagtcttgacttacaactgaaaaaaaatttatgttacagaagtttattttttctatggaactgtctttaaaaacaaaaatattacaaatcttgaccttgaaatattctgtttcctgttatcacattctggatatctattttgtttgcaaatgaaaattattactgatgattagcaacttgagcctgttaataggaaattgcaaagcctgaatacacacacattgccttagcctatcagtagagtagaggacatatgttaagaaaatgtgtctgcttgttgctgttgttggacaaaattttatgtctgtgtgtatgatttttttttttctattttcttcaaagatgtgaattaaatgaaagtgtgggagccagttaaattattttgtattatgggtgttctggatcctttcactccgtataccattttcttgtaagggcagcatttgtagacttgctaatggactgtagagctgagctatattaattttatacttgactcaggggatcagttctgtgaatgccattgcacgaagaaagcaaatgtttgccttgattttgaatgtatctttttaatgtcttcttaaaacatatttgtttaataatgtagatttgtttttttttttctagtatcatagtaaatattgcttagtacttgcccccaccccactgggtagtttatatactaccctataggtcatgccaaaaatgaataaaagtttaaatgccaaaatgtttatgaaactgctgtctaaatactgattgattgcacaatttaaataaaagctttccttagttaaaaaa

SEQ ID NO: 250945 - DNA, 3453 bp, Artificial Sequence
  derived and/or modified sequence
atggccccccccctgagacccctggccagactgagaccccccggcatgctgctgagagccctgctgctgctgctgctgctgagccccctgcccggcgtgtggtgcttcagcgagctgagcttcgtgaaggagccccaggacgtgaccgtgaccagaaaggaccccgtggtgctggactgccaggcccacggcgaggtgcccatcaaggtgacctggctgaagaacggcgccaagatgagcgagaacaagagaatcgaggtgctgagcaacggcagcctgtacatcagcgaggtggagggcagaagaggcgagcagagcgacgagggcttctaccagtgcctggccatgaacaagtacggcgccatcctgagccagaaggcccacctggccctgagcaccatcagcgccttcgaggtgcagcccatcagcaccgaggtgcacgagggcggcgtggccagattcgcctgcaagatcagcagccacccccccgccgtgatcacctgggagttcaacagaaccaccctgcccatgaccatggacagaatcaccgccctgcccaccggcgtgctgcagatctacgacgtgagccagagagacagcggcaactacagatgcatcgccgccaccgtggcccacagaagaaagagcatggaggccagcctgaccgtgatccccgccaaggagagcaagagcttccacacccccaccatcatcgccggcccccagaacatcaccaccagcctgcaccagaccgtggtgctggagtgcatggccaccggcaaccccaagcccatcatcagctggagcagactggaccacaagagcatcgacgtgttcaacaccagagtgctgggcaacggcaacctgatgatcagcgacgtgagactgcagcacgccggcgtgtacgtgtgcagagccaccacccccggcaccagaaacttcaccgtggccatggccaccctgaccgtgctggccccccccagcttcgtggagtggcccgagagcctgaccagacccagagccggcaccgccagattcgtgtgccaggccgagggcatccccagccccaagatgagctggctgaagaacggcagaaagatccacagcaacggcagaatcaagatgtacaacagcaagctggtgatcaaccagatcatccccgaggacgacgccatctaccagtgcatggccgagaacagccagggcagcatcctgagcagagccagactgaccgtggtgatgagcgaggacagacccagcgccccctacaacgtgcacgccgagaccatgagcagcagcgccatcctgctggcctgggagagacccctgtacaacagcgacaaggtgatcgcctacagcgtgcactacatgaaggccgagggcctgaacaacgaggagtaccaggtggtgatcggcaacgacaccacccactacatcatcgacgacctggagcccgccagcaactacaccttctacatcgtggcctacatgcccatgggcgccagccagatgagcgaccacgtgacccagaacaccctggaggacgtgcccctgagaccccccgagatcagcctgaccagcagaagccccaccgacatcctgatcagctggctgcccatccccgccaagtacagaagaggccaggtggtgctgtacagactgagcttcagactgagcaccgagaacagcatccaggtgctggagctgcccggcaccacccacgagtacctgctggagggcctgaagcccgacagcgtgtacctggtgagaatcaccgccgccaccagagtgggcctgggcgagagcagcgtgtggaccagccacagaacccccaaggccaccagcgtgaaggcccccaagagccccgagctgcacctggagcccctgaactgcaccaccatcagcgtgagatggcagcaggacgtggaggacaccgccgccatccagggctacaagctgtactacaaggaggagggccagcaggagaacggccccatcttcctggacaccaaggacctgctgtacaccctgagcggcctggaccccagaagaaagtaccacgtgagactgctggcctacaacaacatcgacgacggctaccaggccgaccagaccgtgagcacccccggctgcgtgagcgtgagagacagaatggtgcccccccccccccccccccaccacctgtacgccaaggccaacaccagcagcagcatcttcctgcactggagaagacccgccttcaccgccgcccagatcatcaactacaccatcagatgcaaccccgtgggcctgcagaacgccagcctggtgctgtacctgcagaccagcgagacccacatgctggtgcagggcctggagcccaacaccaagtacgagttcgccgtgagactgcacgtggaccagctgagcagcccctggagccccgtggtgtaccacagcaccctgcccgaggcccccgccggcccccccgtgggcgtgaaggtgaccctgatcgaggacgacaccgccctggtgagctggaagccccccgacggccccgagaccgtggtgaccagatacaccatcctgtacgccagcagaaaggcctggatcgccggcgagtggcaggtgctgcacagagagggcgccatcaccatggccctgctggagaacctggtggccggcaacgtgtacatcgtgaagatcagcgccagcaacgaggtgggcgagggccccttcagcaacagcgtggagctggccgtgctgcccaaggagaccagcgagagcaaccagagacccaagagactggacagcgccgacgccaaggtgtacagcggctactaccacctggaccagaagagcatgaccggcatcgccgtgggcgtgggcatcgccctgacctgcatcctgatctgcgtgctgatcctgatctacagaagcaaggccagaaagagcagcgccagcaagaccgcccagaacggcacccagcagctgcccagaaccagcgccagcctggccagcggcaacgaggtgggcaagaacctggagggcgccgtgggcaacgaggagagcctgatgcccatgatcatgcccaacagcttcatcgacgccaagggcggcaccgacctgatcatcaacagctacggccccatcatcaagaacaacagcaagaagaagtggttcttcttccaggacagcaagaagatccaggtggagcagccccagagaagattcacccccgccgtgtgcttctaccagcccggcaccaccgtgctgatcagcgacgaggacagccccagcagccccggccagaccaccagcttcagcagacccttcggcgtggccgccgacaccgagcacagcgccaacagcgagggcagccacgagaccggcgacagcggcagattcagccacgagagcaacgacgagatccacctgagcagcgtgatcagcaccaccccccccaacctgtag

SEQ ID NO: 250946 - protein, 496 aa, Artificial Sequence
  derived and/or modified sequence
MFCHLRPMRRLCLEKIFPHWFPFSRALSGAEAVNALRPFYFAVHPDFFGQHPVEREINENSLKRLSVYLENLQKPGFKSLKPTQLTFYVRETDQSSSDGQEPFSTSGFRAVKFTLHTRDLLSTVLYILNSCSLSVEHIQSLNTNMHTQPLKEAKRMPDRPIKWDKSYYSFTGFKDPDEDLEQVSRVETTLTSWLDNNGKSAVKKLKNSLPLRKELDRLKDELSHQLQLSDIRWQRSWGIAHRCSQLHSLSRLAQQNLETLKKAKGCTIIFTDRSGMSAVGHVMLGTMDVHHHWTKLFERLPSYFDLQRRLMILEDQISYLLGGIQVVYIEELQPVLTLEEYYSLLDVFYNRLLKSRILFHPRSLRGLQMILNSDRYAPSLHELGHFNIPTLCDPANLQWFILTKAQQARENMKRKEELKVIENELIQASTKKFSLEKLYKEPSISSIQMVDCCKRLLEQSLPYLHGMHLCISHFYSVMQDGDLCIPWNWKNGEAIK

SEQ ID NO: 250947 - DNA, 3687 bp, Artificial Sequence
  derived and/or modified sequence
ggggaaggcctggcacgctccagccaaccagggcgtcacctgcagctcgtccccctgcccgggcttgcctcgagcgccctgccgccgccggagcggggagggtgttgggggcaggtggagccgggagggcccagctgagaattcagggttgggggctcagagggcactgcggctaggagcccgtcaaagcctgtcgcccaccggggcgagggcaggtgggagcgcctggccgtgcgtcgcgcgctggttggccagctgacgccccagtgcgcatgcgcgtccgaacagccctgcgggcggagcgactgtcctcccttctggtgtactgggtgggaggtggaactagtcggacaaagccctcgcgtcggacccttgccagaactcaattaatggatgcctcgaagttgacgtacatatatattcagaaatgttttgccacctgagacctatgaggaggttatgtctagagaagatatttccacactggtttcccttttcaagagctttatcgggagctgaagcagtcaatgccttgaggcctttctattttgcagtacatccagatttctttggacagcaccccgtagaaagggaaatcaatgaaaattctcttaaaaggttaagtgtctacctagaaaacctccagaaaccaggcttcaagtctttgaaaccaactcagcttacattttatgtaagagaaacagaccagagttcctccgatggccaggaaccttttagtacttccggatttcgagcagtcaaatttactttgcacaccagagatctgctaagcacagtgttatatattctcaactcctgcagtttatctgttgaacatatccaaagcttgaatactaatatgcatacccagcctctcaaagaagctaaaaggatgcctgacaggcccatcaaatgggacaagtcttattactcctttactggattcaaggaccctgatgaagaccttgaacaagtctcgagagtggaaacaactctcacatcctggttagataacaatgggaaaagtgctgttaaaaagctaaagaacagtttgccacttagaaaagaactagatcgtttaaaagatgaactgtctcatcaattgcaactctcagatatcaggtggcagaggagctggggcatcgcccaccgctgtagccagctgcatagtttaagccgcttagcacagcagaatttggaaacacttaaaaaagcaaaagggtgtacaatcatatttacagaccgttctggcatgagtgcagtgggccatgtgatgctaggaacaatggatgtccatcaccactggacaaaactttttgaaagattgccaagttattttgaccttcagaggaggctgatgattttagaagaccaaataagctatcttttaggtggcatacaagttgtttatattgaagaattacagccagtattgacacttgaagaatattactctcttcttgatgtgttttataatagactgttgaaaagtagaatactatttcaccctcgaagtttgcgtggtttacaaatgatccttaacagtgacagatatgctccaagcttgcatgaactcgggcattttaatattccaacactctgtgatccagcaaatctccagtggtttattctcaccaaagctcagcaggcaagagagaacatgaaaagaaaggaagagttaaaggttattgaaaatgaattgatacaggcatcaacaaagaaattttctttggagaagttatataaagagcccagcatttctagtatacaaatggtggattgttgtaagagacttctagaacaatcactgccttacctacatgggatgcacctctgcatttcacatttttactctgttatgcaagatggagacctttgtattccttggaattggaagaatggagaagccattaagtaacacagaaatctgttttatttttttaagagataagaaaggaacttaaattaaaaatatttaaatccacaatttgatataacagtattatttacataagaacaaagtttctaactgctgctttaaaagtagacttttttaaaaaaattaatttctgctaggagaggttttatatgccaggcgtggtggctcatgcctgcggtcccagctacttagggaggctaagataggaggatcacttgagcccaggaggccaaggttgcagtgggcccagattgcaccattgccctccagcctgagcaacagaacaagaccttgtctcaaaaaataataatgataatttaaaataaataagtaactaataaaaagattttatatcccagtcttatgatgttggttggcaaggctagataaaaagatgttagaatgaaagaacatatttttagtgatatgtaaatgaaggattctacaatagtcatatatttttatatgaatgaatgttgggttgggctggagaggtatgtgtgtgtaaatataaaggtctcacattcagagtatagctctgaaataatggaactcatgtctacaattcaacatgcatctgtatagttacatctcatgtaaatatacacagacatattttgcagccagtaattgacagttaatgtccaaaacaggtgattgataggtaacagaaattagataaccaccaattttgcccaagagaaagactagaaggactaaaagcagttgaatgtatggtactgacattgtcataagcagtctgataaccagtttattgaaacgtgtgcattaacagagaatttaattttaaacccataatttctcctatccattaaaatattataattgttagtagtatgaaaccaacaggaaatgttttttaatcatttagtgaggtgattcatttgtttcatgggcaaacactatccaggaaaagccttgcttgcctgtttcccaaagagctctaagaaatagaatcaagtgtaaaatggttcagaccattcaggatttcttgtcactcttctcaaccacgatcttcctgttattactgatgtttgaaaccctgtcattagccccggcctggttaaagcccctcagagtcacctctcattcatagcaatagaattcaaccccaagtggttgatggtgtccccagcacagccgagagacctgatctctggattcagtgcttttagctcttcgagtttaccctaagataccttcgggcaatatttttaaccaacccaaaagctcttcaggtcatttctgaagaggacaaggtgaatcttggcttggaacaccatttttgggctcttgctactgaatgaatcagaaaggaattttttctgaagagcattagaaagtaaaagagatgttaaaataagttcttgaagtatgttttatatttatctaaaacactgattttaaaagtttacattcaaatgtgtattcaaaagaagtactgatttgtaattattatagtttgtgtgtatcatcccttttaaccgtgcctaacaactgtacttaaattttgttttctagtgtaacaaatgtttcccataagattttctagagccaaataatgggagtgaaaaattccttaagtgttatataagaaaatatattagaaaatcagctttggattatacgatttctaaaatatactaatacagaatcctcagtaatatgttttgaattggattttttctcagaactgttacataataaataatacatcaaccagataa

SEQ ID NO: 250948 - DNA, 1844 bp, Artificial Sequence
  derived and/or modified sequence
ctcctccagcagtccctttccccttcttccccaagatccagcgcgtgctcggttgcccttctccgttccttgcaggcccttgggtcaggacccaccacctgccggaccatcattttccgagtccctccggcctagtcggagtgctcgctcgcgcctcctaaagctctcagccgagcgcgccgagacccctcagggcggccgcaattaatggatgcctcgaagttgacgtacatatatattcagaaatgttttgccacctgagacctatgaggaggttatgtctagagaagatatttccacactggtttcccttttcaagagctttatcgggagctgaagcagtcaatgccttgaggcctttctattttgcagtacatccagatttctttggacagcaccccgtagaaagggaaatcaatgaaaattctcttaaaaggttaagtgtctacctagaaaacctccagaaaccaggcttcaagtctttgaaaccaactcagcttacattttatgtaagagaaacagaccagagttcctccgatggccaggaaccttttagtacttccggatttcgagcagtcaaatttactttgcacaccagagatctgctaagcacagtgttatatattctcaactcctgcagtttatctgttgaacatatccaaagcttgaatactaatatgcatacccagcctctcaaagaagctaaaaggatgcctgacaggcccatcaaatgggacaagtcttattactcctttactggattcaaggaccctgatgaagaccttgaacaagtctcgagagtggaaacaactctcacatcctggttagataacaatgggaaaagtgctgttaaaaagctaaagaacagtttgccacttagaaaagaactagatcgtttaaaagatgaactgtctcatcaattgcaactctcagatatcaggtggcagaggagctggggcatcgcccaccgctgtagccagctgcatagtttaagccgcttagcacagcagaatttggaaacacttaaaaaagcaaaagggtgtacaatcatatttacagaccgttctggcatgagtgcagtgggccatgtgatgctaggaacaatggatgtccatcaccactggacaaaactttttgaaagattgccaagttattttgaccttcagaggaggctgatgattttagaagaccaaataagctatcttttaggtggcatacaagttgtttatattgaagaattacagccagtattgacacttgaagaatattactctcttcttgatgtgttttataatagactgttgaaaagtagaatactatttcaccctcgaagtttgcgtggtttacaaatgatccttaacagtgacagatatgctccaagcttgcatgaactcgggcattttaatattccaacactctgtgatccagcaaatctccagtggtttattctcaccaaagctcagcaggcaagagagaacatgaaaagaaaggaagagttaaaggttattgaaaatgaattgatacaggcatcaacaaagaaattttctttggagaagttatataaagagcccagcatttctagtatacaaatggtggattgttgtaagagacttctagaacaatcactgccttacctacatgggatgcacctctgcatttcacatttttactctgttatgcaagatggagacctttgtattccttggaattggaagaatggagaagccattaagtaacacagaaatctgttttatttttttaagagataagaaaggaacttaaattaaaaatatttaaatccacaatttgatataacagtattatttacataagaacaaagtttc

SEQ ID NO: 250949 - DNA, 1491 bp, Artificial Sequence
  derived and/or modified sequence
atgttctgccacctgagacccatgagaagactgtgcctggagaagatcttcccccactggttccccttcagcagagccctgagcggcgccgaggccgtgaacgccctgagacccttctacttcgccgtgcaccccgacttcttcggccagcaccccgtggagagagagatcaacgagaacagcctgaagagactgagcgtgtacctggagaacctgcagaagcccggcttcaagagcctgaagcccacccagctgaccttctacgtgagagagaccgaccagagcagcagcgacggccaggagcccttcagcaccagcggcttcagagccgtgaagttcaccctgcacaccagagacctgctgagcaccgtgctgtacatcctgaacagctgcagcctgagcgtggagcacatccagagcctgaacaccaacatgcacacccagcccctgaaggaggccaagagaatgcccgacagacccatcaagtgggacaagagctactacagcttcaccggcttcaaggaccccgacgaggacctggagcaggtgagcagagtggagaccaccctgaccagctggctggacaacaacggcaagagcgccgtgaagaagctgaagaacagcctgcccctgagaaaggagctggacagactgaaggacgagctgagccaccagctgcagctgagcgacatcagatggcagagaagctggggcatcgcccacagatgcagccagctgcacagcctgagcagactggcccagcagaacctggagaccctgaagaaggccaagggctgcaccatcatcttcaccgacagaagcggcatgagcgccgtgggccacgtgatgctgggcaccatggacgtgcaccaccactggaccaagctgttcgagagactgcccagctacttcgacctgcagagaagactgatgatcctggaggaccagatcagctacctgctgggcggcatccaggtggtgtacatcgaggagctgcagcccgtgctgaccctggaggagtactacagcctgctggacgtgttctacaacagactgctgaagagcagaatcctgttccaccccagaagcctgagaggcctgcagatgatcctgaacagcgacagatacgcccccagcctgcacgagctgggccacttcaacatccccaccctgtgcgaccccgccaacctgcagtggttcatcctgaccaaggcccagcaggccagagagaacatgaagagaaaggaggagctgaaggtgatcgagaacgagctgatccaggccagcaccaagaagttcagcctggagaagctgtacaaggagcccagcatcagcagcatccagatggtggactgctgcaagagactgctggagcagagcctgccctacctgcacggcatgcacctgtgcatcagccacttctacagcgtgatgcaggacggcgacctgtgcatcccctggaactggaagaacggcgaggccatcaagtag

SEQ ID NO: 250950 - DNA, 1491 bp, Artificial Sequence
  derived and/or modified sequence
atgttttgtcatctgcgtccaatgagaagattgtgcctggagaaaatctttccccattggtttcctttcagcagagccctgagtggggcagaggccgtgaatgctttacggcctttctatttcgccgtacatcccgattttttcggacagcaccccgtcgaaagagaaataaacgagaattccctgaaacggctgtcagtgtacctggaaaatctccaaaagcctgggttcaaatccctgaagcctactcagctcaccttctacgtccgtgagacagaccagtctagctcagatggacaggaaccgttttcaacctcaggcttccgggccgttaaattcacacttcacactcgagatcttttgtcaaccgtcctttatatcctcaattcctgctcgctgtccgtggagcacatccagtctttgaacactaacatgcatactcagcccctgaaggaagccaaaaggatgccagacaggcctattaaatgggacaagtcgtactactcgttcacaggtttcaaggaccccgacgaggatttggagcaagtaagtagagtggaaacaacactaacctcatggctcgataacaacggaaaaagtgccgtaaaaaagctgaaaaactctctccccctccgcaaggagctggaccgcctgaaagacgaactctcacaccagctccaattgagcgacatccgatggcagcgtagttggggcattgcccataggtgctcacagctgcatagtctgtcgagattagcacagcagaacctggagaccttgaagaaagcgaagggatgtacaatcatctttactgataggtccggcatgagtgccgtaggccacgtaatgctgggtacaatggacgtccatcatcactggacaaagttatttgagagacttccttcctatttcgatctgcagcgtcggcttatgattctggaagaccagattagctacctgttgggtggcattcaggtggtatatatagaggagctccagcctgtgctgaccctagaggaatactattcactgctcgatgttttctataaccgcctcctgaaaagcaggatcctgtttcatccccgctcgctgcggggcctgcagatgattctgaattcggaccgctacgcgccctccctccacgagttggggcactttaatataccaaccctgtgcgaccccgccaatttgcagtggttcattctgactaaggcacagcaggctagggaaaatatgaagcgaaaagaagagctgaaagttatcgagaacgagctaattcaggcttctacgaagaagttctctcttgagaagctgtataaggaacctagtataagcagtattcagatggtggattgctgcaagcgtctcctggagcaatccctaccctacctacatggcatgcatctgtgtatcagtcacttctactcagtcatgcaggacggggacttgtgcattccatggaactggaagaatggcgaagccattaaatag

SEQ ID NO: 250951 - DNA, 1491 bp, Artificial Sequence
  derived and/or modified sequence
atgttttgccatctgcggcccatgagacggctttgcttagaaaagatcttcccgcactggttcccattctcacgggccctgagcggagctgaggcagtgaacgctctgcggccattttatttcgccgtacatcctgacttttttggtcagcatcctgtggaacgcgagatcaacgagaattcacttaagcgcctgtctgtgtaccttgagaacctccagaaaccagggtttaaaagcttgaagcctacacaactgaccttttacgttcgagaaaccgatcagtcatctagcgacggacaggagccgttttctacttctggcttcagggccgtaaagttcacactgcacactcgggaccttctgtccaccgtgctgtacatcctcaactcctgttctctaagtgtggagcacatccaatctcttaataccaacatgcacacacaacctctcaaagaggcaaaaaggatgcctgaccgtcccatcaagtgggacaagtcgtattactcctttaccggctttaaagaccccgatgaagacttggaacaagtgtcaagagtcgagacaacattaacgtcctggttggataataacggcaaaagcgcagtcaagaaattgaaaaactctcttcccctgcgcaaagaactggacagacttaaggatgaactgagccatcagctgcagttgtctgacatacgctggcagcgttcatggggcatcgcccatcggtgttcacagctgcattctttaagccggttggctcagcagaacctggaaaccctgaagaaagccaagggatgtacgattatctttaccgaccgtagcggaatgtctgcagtcggccacgtaatgctgggaaccatggacgtccatcatcactggaccaagctgttcgagagactgccctcatactttgacttacaacggagactcatgatattagaggatcagatctcctaccttttgggcggcatacaagtggtgtacatcgaggagctgcagcccgtgctgacactagaggaatactactccctcttagacgtcttctataacagactactgaagtcacgaatcctttttcatccaagatcattacgcggcttgcagatgatcctgaatagtgacaggtacgctccatccctgcacgagctgggccatttcaacattcctactctttgtgaccccgccaatcttcagtggtttattttgaccaaagcacagcaggctcgcgagaacatgaaaagaaaggaggagctcaaagtgatcgagaacgaactgatccaggcatcaaccaagaaattctctctggaaaaactttacaaggagccatccatctcttctatacaaatggttgattgctgtaagaggctgctggagcagagcctgccgtatctgcatggcatgcatctctgcatctcccacttttatagcgtgatgcaggatggcgacctttgcattccttggaactggaagaacggagaggctattaagtag

SEQ ID NO: 250952 - DNA, 1491 bp, Artificial Sequence
  derived and/or modified sequence
atgttctgccacctgcggcccatgaggcggctgtgcctggagaagatcttcccccactggttccccttcagccgggccctgagcggggctgaggccgtgaatgccctgcggcccttctactttgctgtgcacccagacttcttcggccagcaccctgtggagcgggagatcaatgaaaacagcctgaagaggctgtctgtgtacctggagaacctgcagaagccaggcttcaagagcctgaagcccacccagctgaccttctacgtgcgggagacagaccagagcagcagtgatggccaggagcccttcagcaccagcggcttccgggctgtgaagttcaccctgcacacccgggacctgctgagcacagtgctgtacatcctgaacagctgcagcctgtctgtggagcacatccagagcctgaacaccaacatgcacacccagcccctgaaggaggccaagaggatgccagaccggcccatcaagtgggacaagagctactacagcttcaccggcttcaaggaccctgatgaggacctggagcaggtgtcccgggtggagaccaccctgacctcctggctggacaacaacgggaagtctgctgtgaagaagctgaagaacagcctgcccctgaggaaggagctggaccggctgaaggatgagctgagccaccagctgcagctgagtgacatccgctggcagaggtcctggggcatcgcccaccgctgcagccagctgcacagcctgagccggctggcccagcagaacctggagaccctgaagaaggccaagggctgcaccatcatcttcacagacaggagcggcatgtctgctgtgggccacgtgatgctgggcaccatggatgtgcaccaccactggaccaagctgtttgagcggctgcccagctactttgacctgcagaggcggctgatgatcctggaggaccagatctcctacctgctgggcggcatccaggtggtgtacatcgaggagctgcagcctgtgctgaccctggaggagtactacagcctgctggatgtgttctacaaccggctgctgaagagccgcatcctcttccaccccaggagcctgcggggcctgcagatgatcctgaacagcgacagatatgcccccagcctgcacgagctgggccacttcaacatccccaccctgtgtgaccctgccaacctgcagtggttcatcctgaccaaggcccagcaggcccgggagaacatgaagaggaaggaggagctgaaggtgattgaaaatgaactcatccaggccagcaccaagaagttcagcctggagaagctgtacaaggagcccagcatcagcagcatccagatggtggactgctgcaagaggctgctggagcagagcctgccctacctgcacggcatgcacctgtgcatcagccacttctacagcgtgatgcaggatggagacctgtgcatcccctggaactggaagaatggagaggccatcaagtag

SEQ ID NO: 250953 - DNA, 1491 bp, Artificial Sequence
  derived and/or modified sequence
atgttctgccacctgcggcccatgcggcggctgtgcctggagaagattttcccacactggttccctttctcaagggctctcagtggtgccgaagccgtcaatgccctgagacccttctattttgctgtgcacccagatttttttggacagcacccggtggagagagagatcaacgaaaactctttgaagagactctccgtctacctggagaatctgcagaaaccaggtttcaagtctttaaagccaacccagctgaccttttacgtgcgggaaaccgatcaatcttcctccgacgggcaggaacctttttcaacctctggattccgcgccgtgaagtttactctgcacactagggaccttctatctacagtcctatacatcctgaactcctgctcgctctctgtagagcacatccagagcctcaacactaatatgcatactcagccactgaaagaggcgaagcggatgccagacagaccaatcaaatgggacaagtcatactacagcttcaccggattcaaggacccagatgaggacctcgagcaggtaagtcgcgttgaaacaacccttacaagttggctcgacaacaacggcaaatcggccgtcaagaaactgaaaaactcgctgcccctgagaaaggagctcgaccgtctgaaggacgagcttagtcatcagctccagttgagtgatattcggtggcagaggagctgggggatcgcccatcgttgctcccagctgcactccctgagtcgcctggcccagcagaacctcgaaaccttgaaaaaggctaagggctgtactattattttcaccgacaggagtggcatgagtgccgtggggcacgtgatgctgggtaccatggatgtgcaccatcattggaccaagttattcgagcgtctgccatcctactttgatctccaacggaggctgatgatcctggaggaccagatatcttacctgctcggcggtatacaggtggtgtatattgaagagctgcagcctgtgcttacgttagaagagtattattctttactggacgtgttttacaaccgcttactgaaaagtagaatcctgttccacccccgatcgctgcgggggctgcaaatgatcctcaactctgacagatacgcgccctccttgcatgaactgggccacttcaacatcccgaccctgtgcgatccagccaacctgcagtggttcatcctgaccaaggcacaacaggctcgagagaatatgaagcggaaggaggagctcaaggtgatcgaaaacgaactgattcaggcttccacgaaaaagttctctttggagaagctctacaaagaaccttccatttcaagcatccagatggtggactgctgtaaaagattactcgaacagtccctaccttacctgcatggcatgcacctgtgtatttctcacttttactccgttatgcaagacggtgacttgtgcattccatggaattggaagaacggggaggccataaaatag

SEQ ID NO: 250954 - DNA, 1491 bp, Artificial Sequence
  derived and/or modified sequence
atgttctgccacctgcggcccatgcggcggctgtgcctggagaagattttccctcactggtttccctttagccgcgcgctgagtggggccgaggccgtcaacgccctgcgacccttttacttcgctgttcatcccgatttcttcggtcagcatcccgtggagagagaaatcaatgaaaactccctgaaacggctgtcggtgtatctggaaaacctgcagaaacctggatttaagtcattgaaacctactcagttgacattctatgttcgggaaacagaccagtctagctctgatgggcaggaaccttttagcacctccggctttagagctgtgaagtttaccctccatacacgagacttgctctcaacagtgctgtacatcctaaactcctgcagtctgagcgttgagcacatacagagcctcaacacgaatatgcacactcagcctttaaaagaggcaaagcgcatgcccgatcggccgattaaatgggataaatcctattattcctttacaggctttaaggatcctgacgaagatctggaacaggtatctcgagtggagacaacgctgaccagctggttggacaataatggcaagtcagccgtgaagaagctaaaaaacagcctccctctgcgcaaggagctcgatcggttgaaagatgagctgtcgcatcagctgcaactttccgacattcggtggcagaggagttggggcatcgcccatcggtgctcgcagttgcattccctcagccggctggcacagcagaacctggagactctgaagaaggcaaaggggtgtactatcatcttcaccgaccgctctggcatgagtgctgtgggtcacgtgatgttaggcaccatggatgtgcatcaccactggacgaagctctttgaacgacttccatcttatttcgatcttcaacggaggcttatgatcctggaagatcagatctcgtacctgctgggcggaatccaggtcgtgtatattgaggagctccagccagtccttacacttgaagaatactactctcttctcgacgtcttttataaccgattgctgaaatcccggatactgtttcatcctaggtcactgcggggcctgcagatgatcttaaacagtgaccgttatgcaccctctctgcacgaattgggacacttcaatattccaacattgtgtgatccagcaaatctacaatggtttatccttaccaaggcccaacaagcaagggaaaatatgaagcgcaaggaggaactgaaggttatagagaacgagttgatacaggcatcgactaagaaattttccctggagaaactctacaaggagccttccatctcgagcatccaaatggtggactgttgtaaacgactgctggagcagtcactgccatatcttcacggcatgcacctgtgcatctctcacttctatagcgtgatgcaggacggcgatctttgtataccatggaattggaagaatggggaggccattaagtag

SEQ ID NO: 250955 - DNA, 1491 bp, Artificial Sequence
  derived and/or modified sequence
atgttctgtcacttacggcctatgcggaggctgtgccttgagaagatcttcccacactggttccctttttctcgcgctttgagtggggcagaagcagtgaatgccctgagacccttctactttgccgtgcaccccgattttttcggccaacacccagtggaacgagaaataaatgaaaacagtctgaaaaggctctctgtctacttggagaatcttcagaaacctggatttaagtcgctgaagcccacacagttgaccttctacgttagagagacagaccagagttcctcagatgggcaggaacccttctccacctcaggctttagagccgtgaagtttaccctgcacactcgagatcttctaagcaccgtgctatacattctgaactcctgctccctctcagtagagcatatccagagcctcaacactaatatgcacacacagcctctgaaagaagcaaagcgcatgcctgatcggcctatcaagtgggataagtcttattactcatttactggattcaaggacccagatgaggacttagagcaagtgagccgtgtggagactacccttaccagttggctggataataatggaaagtctgcggtcaagaagctaaagaacagcctgcccctcagaaaggagctggacaggctcaaagatgagctgagtcatcagctacaacttagtgacattcgatggcagcgttcctggggaatcgcacaccggtgttctcaattacactccctctcccgcctcgcgcaacaaaatttagaaactcttaagaaagccaaagggtgcaccattatttttacagaccgctccggaatgtcagccgttggacacgttatgcttggcacaatggatgtgcatcatcattggactaaactgttcgagagactgccaagctacttcgatctccagcggagactaatgatcttagaggatcagattagttatctgctcggcggtatccaagtggtgtatatcgaagagctccagcccgtcctgacgctggaggagtattatagtctcttggacgttttttacaatcggctcctgaaaagcaggatcttgttccatccgaggtcgctgcggggactccagatgatactgaactccgataggtacgccccatcactgcatgagctgggccacttcaatatccccacgctgtgcgatccagctaacctacagtggttcatcttgaccaaagcccagcaagctcgggagaacatgaagagaaaggaggagctgaaggtcatcgaaaatgagctgattcaggcgagtaccaagaaattctcacttgagaaactgtacaaggaaccttccattagctctatccagatggtggattgctgcaaacgtttgctggagcagtcgctgccctatctgcacggcatgcacctgtgcatcagtcatttttatagtgtgatgcaagacggtgatctgtgtatcccatggaactggaaaaatggagaagccatcaaatag

SEQ ID NO: 250956 - DNA, 1491 bp, Artificial Sequence
  derived and/or modified sequence
atgttttgccatttgagaccgatgcgcaggttgtgcttggagaagatcttccctcactggtttccttttagtcgggcactgtctggagccgaagcggttaatgccctgcgcccattttatttcgcggtacatcccgattttttcggccagcaccccgtggaaagggaaataaacgaaaactcactgaagaggttgagcgtctacctggaaaacctgcaaaaaccaggcttcaagtccctgaagccaacacagctcaccttctacgtgagggaaaccgatcagtctagttccgatggtcaggaacccttctcaacgtccggcttcagggcagtgaagttcaccctccacacccgggatctgctgtctaccgtcctgtacattctgaactcctgcagcctgagtgtggagcatattcaaagtctgaataccaatatgcatacccagccactgaaggaagcaaagcggatgcccgacagacccatcaaatgggacaaaagttactactcattcactggcttcaaagatcctgacgaagacttggaacaagtttctagagtggagactaccctcactagctggctggataataatggaaagagcgccgtgaaaaaactgaagaattctctgccactgaggaaggaactcgataggttaaaggacgagctgtcccatcagctgcagctgagcgacatcaggtggcagcggagctggggcatagcccacaggtgtagccagctccactctctgagccgactggcacagcagaacttggagacactgaaaaaggctaaaggctgcaccatcatcttcactgatcgtagtggcatgtcagcagttggacatgttatgctgggtacaatggatgtgcaccatcactggactaagctgtttgagcggctgccgtcttattttgacctccagcgccgactcatgatcctggaggatcagatctcatacttactgggaggtatacaggtcgtgtacattgaggagctgcagccagtgctcaccttggaggaatactactccctgttagatgttttttataatcgtctgctcaagtcgcgcatcctattccaccctcggagtttgcgcggtttacagatgatcctcaattctgaccggtacgccccaagcttgcacgagctgggtcatttcaacattcccactttgtgtgatccggcaaatcttcaatggtttatcctgaccaaagcccagcaggcgagagagaacatgaaacgcaaggaagagctgaaggtgattgaaaacgagctgatccaagcgagcaccaagaaattctccttggaaaagttgtataaagagccttccatttcctccattcagatggtcgattgttgtaagcgcctcttggaacagagcctcccttacctacacggtatgcacctttgcattagccacttctactcggtcatgcaggatggcgatctgtgcatcccctggaattggaagaacggagaggccataaagtag

SEQ ID NO: 250957 - protein, 333 aa, Artificial Sequence
  derived and/or modified sequence
MLCRLGGRWLRPLPALQLWARDLPLAPVPTSGAKRPTLPVWAVAPVSAVHANGWYEALAASSPVRVAEEVLLGVHAATGLPWWGSILLSTVALRGAVTLPLAAYQHYILAKVENLQPEIKTIARHLNQEVAVRANQLGWSKRDARLTYLKNMRRLISELYVRDNCHPFKATVLVWIQLPMWIFMSFALRNLSTGAAHSEGFSVQEQLATGGILWFPDLTAPDSTWILPISVGVINLLIVEICALQKIGMSRFQTYITYFVRAMSVLMIPIAATVPSSIVLYWLCSSFVGLSQNLLLRSPGFRQLCRIPSTKSDSETPYKDIFAAFNTKFISRK

SEQ ID NO: 250958 - DNA, 3128 bp, Artificial Sequence
  derived and/or modified sequence
gttgctggcgcgtgcgcgtatcagccttggctggccggtgtatgtccgctggattgtgaggcccgggatctgggctccgccgtggtgcagaaatgctgtgccggctcggcggtcggtggctgcggccgctccctgccctgcagctttgggctagggacctgccgcttgcgccggttcctacgagcggcgccaagcgccccactctcccagtgtgggcagtggcaccagtctctgcagtacatgcgaacggctggtacgaggccctggccgcgtcttcgccggtgcgggttgcggaggaagtactgctcggcgtgcacgccgccacgggcctgccctggtggggcagcattctgctctccaccgtggccttacggggtgctgtcacgctgcctttggcagcctaccagcactacatcctggccaaggtggaaaatttgcagccagaaataaaaactattgccaggcatcttaaccaagaagttgcagttcgtgcaaatcagttggggtggtccaaaagagatgccaggctcacttatctaaagaatatgaggaggctaatttcagagctatatgtgcgagataactgccaccctttcaaagccactgtgttggtttggattcagcttccaatgtggatcttcatgtcttttgctctccggaatttaagcacgggggcagcacattcagaaggtttttctgttcaggaacagttagctactggtggaattctgtggtttcctgacctcactgcacccgactccacttggattctgcctatctctgttggcgtcatcaatttgttaatagtggagatttgtgctctacaaaaaattggaatgtctcgttttcagacgtatattacgtactttgtccgtgcaatgtcggtgttgatgataccaattgctgcaacggtaccctcatcaattgttctctactggttatgctccagcttcgtgggcctttcacagaatttgctgctgcgttctcctggatttcgccaactttgccgaataccatcgaccaagtcagattcagaaactccttataaagacatatttgctgcctttaataccaagttcatttcaagaaaatgacatattttccaataattttgaaacagttgcaggagtcactatcatctaaatgtatttagacttagaaattcagatgttacttgatttccttttatttaaaatcattaacttcatgaaatattgtaggttaagatgtaatccagaccaggcacagtggctcatgcctgtaatcccagcactttgggaggtcgaggtgggtggatcacctgaggtctggagtttgagaccagcctggccaacatggtgaaaccctgtctgtactaaaataacaaaaaaattagctgggcttagtggcaggtgcctgtaatcccagctacttgggaggctgaggcaggagaatcgcttgaacctggaatacagaggtttcagtgagctgagatcaccccattgcactccagcctggacaacaagagtgaaacgctatcaaagaaaaaaaaaagatgtaatccagatatatttgacagtaattaaaatcttttaaatgttataaatgcagtatgtttgtgaaagtattagaatagaaccaaagtgcctgtctctgtttataaagttacagtttgttagagctaccagaactttggagaatagggttagctactgaatgatggcaagttaaactaaacaatactgcatattactgttttgtaaaataagaggatcagtgagatgattcatgttttttttttttgagatggagtctcactgtgtcacccaggctggagtgcagtggcgcaatctcagctcactgcaacctccatctcccggattccagtgattttcctgcctcagcctccaagtatctgggattgcaggtgcacaccaccacgcccagctaatttttgtatttttagtagagatggggtttcaccatgttggacaggctggtctggaactgctgacctcaactaatccaccctccttggcctcccatagtgctgggattacaggcatgagccacctcacccagcattttttttttttaatttttttaatgagacagagtctctctctgtcacctaggctggagtgcagtggcacgatctcggctcactgcaacctctgcctcccgtgttcaagcaattctcctacctcagcctactgggtagctgggactacaggggtgcaccaccatgcccagctaagttttgtatttttagtagagatgggatttcaccatgttggctaggctggtcttgaactcctggcctcaagtgatctgcccaccttggcctcccaaagtgctgggattacaggcgtgagccactgtgcccagctgagatgtttcttattattttggaggtggagaggattttagacctctttgagcatctgaaaaaaggctatatatgtatggttttctcttcagaaaaatcttaagactcacaatacggggacttccttgttaccaggaagattttctggcaattcctagttaataaatcttattctaatggaacatacattgatcttgagttaatgcgtggttgaaaaaaaaagcgggggcaacttgaaatatatgcagtaaagtagtccatgcatacaagtccctaacatggtagatgatgttgcctcccggccctgctcagaaagaatacaaaaagtgtacattcctttttctataatttaagaagtctggaatacagagtgtaacactgtgtactgctagcacccaaagtggaaaatcttaagcattcagattgtttagtcaaagaagaaaaccagaagggcagttgcctattgaggtgattttaaacctgtttatttgtaaggattaagtaccctaataggcttaaactatgatagaggtttaatacagaaaaaattgacaggtattataaattgtggatccagttacttgcttatttaatttgtaaagaggtaaaattagctctggttgagatatcaagtatggcaggtatttgagaaggctataaatcataattttcatttagttaaaatatggacctgattctgggaaaccctatcattccatctcaatgttttacaataaaataaaaactaaagtgaaattca

SEQ ID NO: 250959 - DNA, 1002 bp, Artificial Sequence
  derived and/or modified sequence
atgctgtgcagactgggcggcagatggctgagacccctgcccgccctgcagctgtgggccagagacctgcccctggcccccgtgcccaccagcggcgccaagagacccaccctgcccgtgtgggccgtggcccccgtgagcgccgtgcacgccaacggctggtacgaggccctggccgccagcagccccgtgagagtggccgaggaggtgctgctgggcgtgcacgccgccaccggcctgccctggtggggcagcatcctgctgagcaccgtggccctgagaggcgccgtgaccctgcccctggccgcctaccagcactacatcctggccaaggtggagaacctgcagcccgagatcaagaccatcgccagacacctgaaccaggaggtggccgtgagagccaaccagctgggctggagcaagagagacgccagactgacctacctgaagaacatgagaagactgatcagcgagctgtacgtgagagacaactgccaccccttcaaggccaccgtgctggtgtggatccagctgcccatgtggatcttcatgagcttcgccctgagaaacctgagcaccggcgccgcccacagcgagggcttcagcgtgcaggagcagctggccaccggcggcatcctgtggttccccgacctgaccgcccccgacagcacctggatcctgcccatcagcgtgggcgtgatcaacctgctgatcgtggagatctgcgccctgcagaagatcggcatgagcagattccagacctacatcacctacttcgtgagagccatgagcgtgctgatgatccccatcgccgccaccgtgcccagcagcatcgtgctgtactggctgtgcagcagcttcgtgggcctgagccagaacctgctgctgagaagccccggcttcagacagctgtgcagaatccccagcaccaagagcgacagcgagaccccctacaaggacatcttcgccgccttcaacaccaagttcatcagcagaaagtag

SEQ ID NO: 250960 - DNA, 1002 bp, Artificial Sequence
  derived and/or modified sequence
atgctttgccgcttaggtggcagatggttaagaccgctgccagcccttcagctgtgggctagggaccttccccttgcacctgtgcccaccagtggggctaagaggccaacactgcccgtatgggccgtggccccagtgtccgccgttcacgctaatggttggtacgaagccctagccgcatccagccctgtgcgcgttgccgaggaggtgctgttgggtgtacacgcagccactggtctgccttggtggggatccatcctcctgagcactgttgccctgcggggcgcagtgaccctgcctctcgccgcctaccagcactacattctggccaaggttgagaatctgcagcctgagatcaaaacaatagcacgccacctcaatcaggaggttgctgtcagagccaatcaactgggttggtctaagcgagatgcccgactcacttaccttaaaaatatgagaaggcttatctcggaactctatgtgagagataattgccacccatttaaggccaccgtgctagtgtggatccaacttccaatgtggatcttcatgagcttcgccctgaggaacctgtctaccggagccgcccactcggagggcttttccgtccaggaacaactggccaccgggggaattctgtggttcccggacctgactgctccagattctacctggatcctgcctatcagcgtaggcgtaattaatctgctaatagtggagatctgtgctcttcaaaagattggaatgagtagattccagacttacatcacctattttgtacgtgcaatgtcagtgctcatgataccaatcgcagctaccgtgccgtcctccatcgttctctattggctgtgtagttcttttgtgggactgtctcagaatctcctgctgcgctccccaggctttcgacagctctgtcgtattccaagcaccaaaagcgattcggagaccccgtacaaagatatcttcgccgcgtttaacaccaagttcatttccaggaagtag

SEQ ID NO: 250961 - DNA, 1002 bp, Artificial Sequence
  derived and/or modified sequence
atgctgtgccgcctgggcggccgctggctgcggcccctgcctgccctgcagctgtgggcccgggacctgcccctggcccctgtgcccaccagcggggccaagaggcccaccctgcctgtgtgggccgtggcccctgtgtctgctgtgcacgccaacggctggtatgaggccctggccgccagcagccctgtgcgggtggccgaggaggtgctgctgggcgtgcacgccgccaccggcctgccctggtggggcagcatcctgctgagcacagtggccctgcggggagctgtgaccctgcccctggccgcctaccagcactacatcctggccaaggtggagaacctgcagcctgagatcaagaccatcgcccggcacctgaaccaggaggtggccgtgcgggccaaccagctgggctggagcaagagagatgcccggctgacctacctgaagaacatgagaagactcatcagcgagctgtatgtgcgggacaactgccaccccttcaaggccaccgtgctggtgtggatccagctgcccatgtggatcttcatgagctttgccctgaggaacctgagcactggagctgcccacagcgagggcttctctgtgcaggagcagctggccactggaggcatcctgtggttcccagacctgacagccccagacagcacctggatcctgcccatctctgtgggcgtcatcaacctgctgattgtggagatctgtgccctgcagaagattggcatgagccgcttccagacctacatcacctactttgtgcgggccatgtctgtgctgatgatccccatcgccgccaccgtgcccagcagcatcgtgctgtactggctgtgcagcagctttgtgggcctgagccagaacctgctgctgcggagccctggcttccggcagctgtgccgcatccccagcaccaagagtgacagcgagaccccctacaaggacatctttgctgccttcaacaccaagttcatcagcaggaagtag

SEQ ID NO: 250962 - DNA, 1002 bp, Artificial Sequence
  derived and/or modified sequence
atgctgtgccggctgggcggccggtggctgcggcccctgcccgccctgcagctgtgggccagggacctgcccttggcccccgtccctactagcggggcaaaaaggcccactctacccgtgtgggccgtggctcctgtgtccgctgtgcatgccaatggatggtatgaggccttagcagcttctagccctgtccgagttgccgaggaggtcctcctgggggtgcatgcagctactggccttccctggtggggtagtatcttgctctcaactgtggcgctgcggggcgcagtgaccctgcccctggctgcatatcagcattatatcctggccaaggtcgaaaacctgcaaccagagataaagacaattgctaggcatttgaaccaggaagtcgcagttagagctaatcagctcggttggtctaagcgtgacgccagattaacatacctgaagaacatgaggagactaatctccgagttgtatgtccgcgataactgtcatccgtttaaggccacagtgctggtctggattcagctcccaatgtggatatttatgtctttcgccctgcgcaatctctccaccggtgcagctcacagcgaaggtttctctgtccaagagcagctcgcgacaggcggtattttgtggtttcccgatctgacggcacccgatagtacctggatattacctatcagcgttggggtcattaacctcctgatagtcgagatttgcgcactccagaagatcggtatgtctagattccagacctatattacctacttcgtgcgtgctatgtcagtacttatgatccctatagctgccacagtgccttcctctatcgtcctttactggctgtgctcgtcattcgtgggattaagccagaatctgctgcttaggagtccagggttcaggcagctatgccggataccaagcaccaagagcgattccgagaccccatataaagatatctttgccgcctttaataccaaatttatcagtcgtaagtag

SEQ ID NO: 250963 - DNA, 1002 bp, Artificial Sequence
  derived and/or modified sequence
atgctttgccgactgggtggacggtggcttagacctttaccagccctgcaattgtgggcgagagatttgcctctggcccctgtccctacatcaggcgcaaaacgcccaaccctgcccgtgtgggccgttgcgccagtgagcgccgtgcacgccaacggttggtatgaggctcttgccgctagtagccccgtacgagtcgccgaggaagtcttgctgggcgtccacgcagcaaccggactgccatggtggggaagcatcttactctccacagtagcactgcggggagccgtgactctgcctttagctgcataccaacactacatcctcgccaaggtggagaacttgcaaccagagattaaaaccatcgcccgacatctgaaccaggaggtagctgtgcgtgccaatcagttggggtggagtaagcgggacgctcgattgacttacctcaagaacatgagaaggttgatctcagagctttacgttcgggataactgccaccctttcaaggccacagttctagtgtggatccagctccctatgtggatctttatgtcattcgccttacggaatttgagcacaggagcagcacattccgaaggttttagtgtgcaagagcagctcgccactggcggaatcctgtggttccctgaccttactgctccagactctacgtggattctgccaatttcagtcggcgttatcaatcttctgattgtagagatttgtgccctacagaagatcggaatgtcgcggttccagacttatatcacctattttgtacgtgccatgagcgtgctgatgattcctattgcggctaccgtcccgtcttctatcgtgctttactggttatgcagctcatttgtcggcctgtcccagaacctgcttctcagatcgcccggtttcagacagctttgccggattccaagcactaagtcagattctgaaactccatataaggacatctttgccgcattcaacactaaatttatcagccgtaagtag

SEQ ID NO: 250964 - protein, 155 aa, Artificial Sequence
  derived and/or modified sequence
MAVPGCNKDSVRAGCKKCGYPGHLTFECRNFLRVDPKRDIVLDVSSTSSEDSDEENEELNKLQALQEKRINEEEEKKKEKSKEKIKLKKKRKRSYSSSSTEEDTSKQKKQKYQKKEKKKEKKSKSKKGKHHKKEKKKRKKEKHSSTPNSSEFSRK

SEQ ID NO: 250965 - DNA, 468 bp, Artificial Sequence
  derived and/or modified sequence
atggccgtgcccggctgcaacaaggacagcgtgagagccggctgcaagaagtgcggctaccccggccacctgaccttcgagtgcagaaacttcctgagagtggaccccaagagagacatcgtgctggacgtgagcagcaccagcagcgaggacagcgacgaggagaacgaggagctgaacaagctgcaggccctgcaggagaagagaatcaacgaggaggaggagaagaagaaggagaagagcaaggagaagatcaagctgaagaagaagagaaagagaagctacagcagcagcagcaccgaggaggacaccagcaagcagaagaagcagaagtaccagaagaaggagaagaagaaggagaagaagagcaagagcaagaagggcaagcaccacaagaaggagaagaagaagagaaagaaggagaagcacagcagcacccccaacagcagcgagttcagcagaaagtag

SEQ ID NO: 250966 - DNA, 468 bp, Artificial Sequence
  derived and/or modified sequence
atggcagtgcctgggtgtaacaaggattccgttcgcgccggctgcaagaagtgcggctacccaggccacctgacattcgaatgtaggaacttcttgcgagtggatccaaagcgcgatattgttctggacgttagcagtacgtcaagcgaagattctgacgaagaaaacgaggaactgaacaagctgcaggcactgcaggaaaagcgaatcaacgaggaggaggagaagaaaaaggaaaagtcaaaagaaaaaataaaactgaagaagaaacgcaagagaagctactcctcaagtagtacagaggaagacactagtaagcaaaaaaaacaaaagtaccagaaaaaagagaagaagaaggagaagaagagcaagtccaagaagggcaagcaccacaaaaaggagaaaaaaaaaagaaaaaaagagaaacatagctctacccccaacagctcagaattcagccggaagtag

SEQ ID NO: 250967 - DNA, 468 bp, Artificial Sequence
  derived and/or modified sequence
atggctgtgcccggctgcaacaaggacagcgtgcgggccggctgcaagaagtgtggctacccaggccacctgacctttgaatgtagaaacttcctgcgggtggaccccaagagggacatcgtgctggatgtgagcagcaccagcagcgaggacagtgatgaagaaaatgaggagctgaacaagctgcaggccctgcaggagaagaggatcaatgaggaggaggagaagaagaaggagaagagcaaggagaagatcaagctgaagaagaagaggaagaggagctacagcagcagcagcacagaggaggacaccagcaagcagaagaagcagaagtaccagaagaaggagaagaagaaggagaagaagagcaagagcaagaagggcaagcaccacaagaaggagaagaagaagaggaagaaggagaagcacagcagcacccccaacagcagcgagttcagcaggaagtag

SEQ ID NO: 250968 - DNA, 468 bp, Artificial Sequence
  derived and/or modified sequence
atggccgtgcccggctgcaacaaggacagcgtgcgggccggctgcaaaaagtgcgggtatcctggacacctcaccttcgagtgccggaatttcctgcgggtggatcctaagagggacattgtgctcgacgtgtcttccacatcctccgaagactcggatgaggaaaatgaggaactgaataaactgcaggcattgcaggaaaaaagaattaatgaggaggaggagaagaaaaaagagaagtcaaaggaaaagatcaagctgaagaagaagcgtaaacggagctatagtagctcgtcgaccgaagaggacactagtaaacaaaaaaagcagaagtaccagaagaaagagaaaaagaaagaaaagaaatccaagtctaagaagggaaagcaccacaaaaaagagaagaaaaaaaggaagaaggaaaagcacagttcaacccccaacagtagcgaattttcccgtaagtag

SEQ ID NO: 250969 - DNA, 468 bp, Artificial Sequence
  derived and/or modified sequence
atggctgtgcccggatgcaacaaagattctgtgagggccggatgcaagaaatgtggataccctgggcatctgacttttgaatgtcgaaacttcctcagggttgacccgaaacgagacatagtgttggatgttagtagcacatcttcagaagactccgatgaggagaacgaagaactcaacaaactccaagcactccaagagaaaaggattaacgaggaggaggaaaaaaaaaaggaaaaaagcaaagaaaagatcaagcttaaaaagaagcgcaagcggagctattctagttcctccactgaagaagacaccagcaagcagaagaaacagaaataccaaaaaaaagagaagaagaaagaaaagaagagtaaatctaagaaaggcaagcaccataaaaaagagaaaaagaaacgtaagaaagagaaacacagcagcaccccaaacagcagcgagttctccagaaagtag

SEQ ID NO: 250970 - protein, 357 aa, Artificial Sequence
  derived and/or modified sequence
MENKAMYLHTVSDCDTSSICEDSFDGRSLSKLNLCEDVSRPRSSPDDLKALTRNVNRLNESFRDLQLRLLQAPLQADLTEQVWKVQDALQNQSDSLLALAGAVQRLEGALWGLQAQAVQTEQAVALLRDRTGQQSDTAQLELYQLQVESNSSQLLLRRHAGLLDGLARRVGILGEELADVGGVLRGLNHSLSYDVALHRTRLQDLRVLVSNASEDTRRLRLAHVGMELQLKQELAMLNAVTEDLRLKDWEHSIALRNISLAKGPPGPKGDQGDEGKEGRPGIPGLPGLRGLPGERGTPGLPGPKGDDGKLGATGPMGMRGFKGDRGPKGEKGEKGDRAGDASKDILLGPWDMVLAQG

SEQ ID NO: 250971 - protein, 495 aa, Artificial Sequence
  derived and/or modified sequence
MENKAMYLHTVSDCDTSSICEDSFDGRSLSKLNLCEDGPCHKRRASICCTQLGSLSALKHAVLGLYLLVFLILVGIFILAVSRPRSSPDDLKALTRNVNRLNESFRDLQLRLLQAPLQADLTEQVWKVQDALQNQSDSLLALAGAVQRLEGALWGLQAQAVQTEQAVALLRDRTGQQSDTAQLELYQLQVESNSSQLLLRRHAGLLDGLARRVGILGEELADVGGVLRGLNHSLSYDVALHRTRLQDLRVLVSNASEDTRRLRLAHVGMELQLKQELAMLNAVTEDLRLKDWEHSIALRNISLAKGPPGPKGDQGDEGKEGRPGIPGLPGLRGLPGERGTPGLPGPKGDDGKLGATGPMGMRGFKGDRGPKGEKGEKGDRAGDASGVEAPMMIRLVNGSGPHEGRVEVYHDRRWGTVCDDGWDKKDGDVVCRMLGFRGVEEVYRTARFGQGTGRIWMDDVACKGTEETIFRCSFSKWGVTNCGHAEDASVTCNRH

SEQ ID NO: 250972 - protein, 270 aa, Artificial Sequence
  derived and/or modified sequence
MENKAMYLHTVSDCDTSSICEDSFDGRSLSKLNLCEDGPCHKRRASICCTQLGSLSALKHAVLGLYLLVFLILVGIFILAGPPGPKGDQGDEGKEGRPGIPGLPGLRGLPGERGTPGLPGPKGDDGKLGATGPMGMRGFKGDRGPKGEKGEKGDRAGDASGVEAPMMIRLVNGSGPHEGRVEVYHDRRWGTVCDDGWDKKDGDVVCRMLGFRGVEEVYRTARFGQGTGRIWMDDVACKGTEETIFRCSFSKWGVTNCGHAEDASVTCNRH

SEQ ID NO: 250973 - protein, 400 aa, Artificial Sequence
  derived and/or modified sequence
MENKAMYLHTVSDCDTSSICEDSFDGRSLSKLNLCEDGPCHKRRASICCTQLGSLSALKHAVLGLYLLVFLILVGIFILAVSRPRSSPDDLKALTRNVNRLNESFRDLQLRLLQAPLQADLTEQVWKVQDALQNQSDSLLALAGAVQRLEGALWGLQAQAVQTEQAVALLRDRTGQQSDTAQLELYQLQVESNSSQLLLRRHAGLLDGLARRVGILGEELADVGGVLRGLNHSLSYDVALHRTRLQDLRVLVSNASEDTRRLRLAHVGMELQLKQELAMLNAVTEDLRLKDWEHSIALRNISLAKGPPGPKGDQGDEGKEGRPGIPGLPGLRGLPGERGTPGLPGPKGDDGKLGATGPMGMRGFKGDRGPKGEKGEKGDRAGDASKDILLGPWDMVLAQG

SEQ ID NO: 250974 - DNA, 1074 bp, Artificial Sequence
  derived and/or modified sequence
atggagaacaaggccatgtacctgcacaccgtgagcgactgcgacaccagcagcatctgcgaggacagcttcgacggcagaagcctgagcaagctgaacctgtgcgaggacgtgagcagacccagaagcagccccgacgacctgaaggccctgaccagaaacgtgaacagactgaacgagagcttcagagacctgcagctgagactgctgcaggcccccctgcaggccgacctgaccgagcaggtgtggaaggtgcaggacgccctgcagaaccagagcgacagcctgctggccctggccggcgccgtgcagagactggagggcgccctgtggggcctgcaggcccaggccgtgcagaccgagcaggccgtggccctgctgagagacagaaccggccagcagagcgacaccgcccagctggagctgtaccagctgcaggtggagagcaacagcagccagctgctgctgagaagacacgccggcctgctggacggcctggccagaagagtgggcatcctgggcgaggagctggccgacgtgggcggcgtgctgagaggcctgaaccacagcctgagctacgacgtggccctgcacagaaccagactgcaggacctgagagtgctggtgagcaacgccagcgaggacaccagaagactgagactggcccacgtgggcatggagctgcagctgaagcaggagctggccatgctgaacgccgtgaccgaggacctgagactgaaggactgggagcacagcatcgccctgagaaacatcagcctggccaagggcccccccggccccaagggcgaccagggcgacgagggcaaggagggcagacccggcatccccggcctgcccggcctgagaggcctgcccggcgagagaggcacccccggcctgcccggccccaagggcgacgacggcaagctgggcgccaccggccccatgggcatgagaggcttcaagggcgacagaggccccaagggcgagaagggcgagaagggcgacagagccggcgacgccagcaaggacatcctgctgggcccctgggacatggtgctggcccagggctag

SEQ ID NO: 250975 - DNA, 1488 bp, Artificial Sequence
  derived and/or modified sequence
atggagaacaaggccatgtacctgcacaccgtgagcgactgcgacaccagcagcatctgcgaggacagcttcgacggcagaagcctgagcaagctgaacctgtgcgaggacggcccctgccacaagagaagagccagcatctgctgcacccagctgggcagcctgagcgccctgaagcacgccgtgctgggcctgtacctgctggtgttcctgatcctggtgggcatcttcatcctggccgtgagcagacccagaagcagccccgacgacctgaaggccctgaccagaaacgtgaacagactgaacgagagcttcagagacctgcagctgagactgctgcaggcccccctgcaggccgacctgaccgagcaggtgtggaaggtgcaggacgccctgcagaaccagagcgacagcctgctggccctggccggcgccgtgcagagactggagggcgccctgtggggcctgcaggcccaggccgtgcagaccgagcaggccgtggccctgctgagagacagaaccggccagcagagcgacaccgcccagctggagctgtaccagctgcaggtggagagcaacagcagccagctgctgctgagaagacacgccggcctgctggacggcctggccagaagagtgggcatcctgggcgaggagctggccgacgtgggcggcgtgctgagaggcctgaaccacagcctgagctacgacgtggccctgcacagaaccagactgcaggacctgagagtgctggtgagcaacgccagcgaggacaccagaagactgagactggcccacgtgggcatggagctgcagctgaagcaggagctggccatgctgaacgccgtgaccgaggacctgagactgaaggactgggagcacagcatcgccctgagaaacatcagcctggccaagggcccccccggccccaagggcgaccagggcgacgagggcaaggagggcagacccggcatccccggcctgcccggcctgagaggcctgcccggcgagagaggcacccccggcctgcccggccccaagggcgacgacggcaagctgggcgccaccggccccatgggcatgagaggcttcaagggcgacagaggccccaagggcgagaagggcgagaagggcgacagagccggcgacgccagcggcgtggaggcccccatgatgatcagactggtgaacggcagcggcccccacgagggcagagtggaggtgtaccacgacagaagatggggcaccgtgtgcgacgacggctgggacaagaaggacggcgacgtggtgtgcagaatgctgggcttcagaggcgtggaggaggtgtacagaaccgccagattcggccagggcaccggcagaatctggatggacgacgtggcctgcaagggcaccgaggagaccatcttcagatgcagcttcagcaagtggggcgtgaccaactgcggccacgccgaggacgccagcgtgacctgcaacagacactag

SEQ ID NO: 250976 - DNA, 813 bp, Artificial Sequence
  derived and/or modified sequence
atggagaacaaggccatgtacctgcacaccgtgagcgactgcgacaccagcagcatctgcgaggacagcttcgacggcagaagcctgagcaagctgaacctgtgcgaggacggcccctgccacaagagaagagccagcatctgctgcacccagctgggcagcctgagcgccctgaagcacgccgtgctgggcctgtacctgctggtgttcctgatcctggtgggcatcttcatcctggccggcccccccggccccaagggcgaccagggcgacgagggcaaggagggcagacccggcatccccggcctgcccggcctgagaggcctgcccggcgagagaggcacccccggcctgcccggccccaagggcgacgacggcaagctgggcgccaccggccccatgggcatgagaggcttcaagggcgacagaggccccaagggcgagaagggcgagaagggcgacagagccggcgacgccagcggcgtggaggcccccatgatgatcagactggtgaacggcagcggcccccacgagggcagagtggaggtgtaccacgacagaagatggggcaccgtgtgcgacgacggctgggacaagaaggacggcgacgtggtgtgcagaatgctgggcttcagaggcgtggaggaggtgtacagaaccgccagattcggccagggcaccggcagaatctggatggacgacgtggcctgcaagggcaccgaggagaccatcttcagatgcagcttcagcaagtggggcgtgaccaactgcggccacgccgaggacgccagcgtgacctgcaacagacactag

SEQ ID NO: 250977 - DNA, 1203 bp, Artificial Sequence
  derived and/or modified sequence
atggagaacaaggccatgtacctgcacaccgtgagcgactgcgacaccagcagcatctgcgaggacagcttcgacggcagaagcctgagcaagctgaacctgtgcgaggacggcccctgccacaagagaagagccagcatctgctgcacccagctgggcagcctgagcgccctgaagcacgccgtgctgggcctgtacctgctggtgttcctgatcctggtgggcatcttcatcctggccgtgagcagacccagaagcagccccgacgacctgaaggccctgaccagaaacgtgaacagactgaacgagagcttcagagacctgcagctgagactgctgcaggcccccctgcaggccgacctgaccgagcaggtgtggaaggtgcaggacgccctgcagaaccagagcgacagcctgctggccctggccggcgccgtgcagagactggagggcgccctgtggggcctgcaggcccaggccgtgcagaccgagcaggccgtggccctgctgagagacagaaccggccagcagagcgacaccgcccagctggagctgtaccagctgcaggtggagagcaacagcagccagctgctgctgagaagacacgccggcctgctggacggcctggccagaagagtgggcatcctgggcgaggagctggccgacgtgggcggcgtgctgagaggcctgaaccacagcctgagctacgacgtggccctgcacagaaccagactgcaggacctgagagtgctggtgagcaacgccagcgaggacaccagaagactgagactggcccacgtgggcatggagctgcagctgaagcaggagctggccatgctgaacgccgtgaccgaggacctgagactgaaggactgggagcacagcatcgccctgagaaacatcagcctggccaagggcccccccggccccaagggcgaccagggcgacgagggcaaggagggcagacccggcatccccggcctgcccggcctgagaggcctgcccggcgagagaggcacccccggcctgcccggccccaagggcgacgacggcaagctgggcgccaccggccccatgggcatgagaggcttcaagggcgacagaggccccaagggcgagaagggcgagaagggcgacagagccggcgacgccagcaaggacatcctgctgggcccctgggacatggtgctggcccagggctag

SEQ ID NO: 250978 - DNA, 1074 bp, Artificial Sequence
  derived and/or modified sequence
atggagaataaagccatgtacctgcacactgtgagtgactgcgacaccagctctatctgcgaagactccttcgacggacgcagcttatcaaagctgaatttgtgcgaagacgtaagcaggccaagatcctcacctgacgacttaaaggccctaacccgcaatgttaaccgcttgaacgagtctttccgcgacctgcagctgagacttttgcaggcaccgctccaggctgacctcacagagcaggtctggaaggtgcaggacgcactgcaaaatcagtccgattctctgcttgcacttgcgggcgccgtgcagcgattggaaggagctctatgggggcttcaggcccaggccgtgcagactgagcaggcagtcgccctgctgcgtgacaggaccggacagcagtccgacacagcccaactggaactgtaccagttgcaggttgaaagcaattcttcccagttactgttgagaagacacgccggacttctggatgggctcgcacggcgcgtggggatcctcggcgaggaactggccgacgtgggcggtgttttaaggggtttgaatcactctctgtcatatgacgtggcgctgcatcggaccaggctgcaggatctgcgggtgctcgtgtctaatgcatcagaagatactcgtcgcttgcgtcttgcacatgtaggtatggagttacagctgaagcaggagctcgcgatgttaaacgccgttacagaggacctgcgcctcaaggactgggagcatagcatcgccctgcgcaacatctccttagctaagggacccccaggaccaaagggcgaccagggcgacgaagggaaggaaggaagacccgggatcccagggcttcctgggttaagggggctcccgggagaaaggggaactcccggtctgccagggcctaagggcgatgacggcaagctgggagcgactggccctatgggcatgcgaggatttaagggagacaggggccctaaaggcgaaaaaggcgagaagggggatcgggcaggcgatgcctctaaggacattctgctcgggccttgggacatggttctggcacagggatag

SEQ ID NO: 250979 - DNA, 1488 bp, Artificial Sequence
  derived and/or modified sequence
atggagaacaaggcaatgtacttacatacagtcagtgattgtgatacttccagcatttgcgaagatagcttcgatggcaggtccctgtctaagctgaatttgtgcgaggacgggccatgccacaagcgaagagctagcatatgctgtactcagctgggcagtctgtcagccctgaaacatgcggttctcggcctatacctcttagtctttttgattctagtaggcatatttattttagctgtcagtcgccccagaagtagtccagacgatctaaaggccctgactcgtaacgtgaatcgcctgaacgagtctttcagggatctgcaacttcggctgttgcaagccccgttacaggccgatctgacagagcaggtgtggaaagttcaggacgccctccagaaccagtccgattctctgctggcgctggccggagcagtccagcgcctggagggagctttatggggtctgcaggctcaagctgtgcagaccgagcaggcggtcgccttactccgagaccggacaggacagcagtctgacacagcacagcttgaattgtaccagctccaggtggagtccaactcctcccagttattgcttcggcggcacgcaggtctcctggatggcctggcccgacgagtcggaatactcggtgaagaacttgccgacgtgggcggggttctgcgggggttgaaccactccctctcatacgacgtggccctccacaggacccggctgcaggacctccgggttctcgtctctaatgcgagcgaggacaccaggagactgcggctagcacatgtggggatggagctgcagctgaagcaggagctggccatgttgaacgctgtcacggaggaccttcgcctgaaggattgggaacacagcatagctctccggaacatctccctggctaaaggtccccccggcccaaagggcgaccagggagatgagggcaaggagggaagacccgggattcccggtctgcctggactgcgagggctaccaggggaaaggggaacgcctggcctgccaggaccaaaaggtgatgacggaaaactgggggccacaggaccgatgggcatgagagggtttaaaggtgacagagggcctaaaggcgaaaagggggagaaaggagacagggccggtgatgctagcggcgtcgaggccccaatgatgatccggctggttaacggctcaggcccccacgagggacgggtggaagtgtaccacgatcggaggtgggggaccgtctgcgatgacggatgggacaagaaagatggagatgtggtatgtcgcatgctgggttttcggggtgtggaggaagtctatagaaccgcccgttttggacaagggaccgggcgtatttggatggacgacgtggcctgtaagggaaccgaggaaactattttcagatgcagcttctctaagtggggagtcaccaattgcggtcacgcggaggacgcgagcgtgacctgtaaccgccattag

SEQ ID NO: 250980 - DNA, 813 bp, Artificial Sequence
  derived and/or modified sequence
atggagaataaggcgatgtaccttcatacagttagtgattgcgacacttcaagtatctgtgaggatagttttgacgggagatcactctcaaaactgaatctatgcgaagacggcccgtgccataagcgtcgagcctcgatttgttgtactcagttgggtagtctctctgctctcaagcatgctgtccttgggctttaccttctggtgtttctgatactggttggtatcttcatcttggccggacccccggggcccaaaggggaccagggcgacgaggggaaagagggcaggcccggcattccaggactgcccggcctcaggggcctacctggcgagcgagggacccctggattgcctggtcctaaaggtgacgatgggaagcttggggccaccggacccatggggatgcgcggctttaagggagataggggacccaagggcgagaagggcgaaaagggcgatagggccggggacgcctcaggggtagaggctccgatgatgattagactcgtaaacggctctggccctcacgaggggcgggtggaagtgtatcatgatcggcggtggggtacagtgtgcgacgatggctgggataagaaggatggagacgtggtctgtcgaatgctggggtttcggggcgtagaagaagtctatcgtaccgccagattcggtcaaggcacaggaaggatttggatggatgacgtcgcctgtaaaggcacagaagaaactatctttaggtgcagtttctccaagtggggggttactaactgcggccatgcagaggatgccagtgtcacttgcaaccgacattag

SEQ ID NO: 250981 - DNA, 1074 bp, Artificial Sequence
  derived and/or modified sequence
atggagaacaaggccatgtacctgcacacagtcagtgactgcgacaccagctctatctgtgaagacagtttcgacgggaggtccctatctaaactcaacctgtgcgaagatgttagcaggcctcggtcctctcccgacgacttgaaggctctcacacgaaacgtcaatcgtctgaatgaatccttcagggacctgcagctgaggctcctgcaggcccctttacaggccgatctaacagagcaagtctggaaggtacaagatgcactccagaaccagtctgactcactgctcgcactggccggcgcggtccagagactcgaaggcgcgctctggggacttcaggcccaagcggtccagactgagcaagccgtagccctcctgcgggatcgaacgggccagcagtctgatacggcacagctggagttgtatcaattgcaggtcgaatccaactccagccaactcctgctccggcggcatgccggattgctcgatggtttggctcggcgggtcggcattctaggcgaagagcttgccgacgttggcggggttctgagaggcctcaatcactcattatcctatgatgtagctttgcatcgaacaagactgcaggatctgagggtgcttgtctccaatgcgtctgaagacacccgccggctgcgcctggcccatgtgggtatggagctacaactcaagcaggaacttgcgatgctgaacgccgtcactgaggacctgcggctcaaggactgggagcacagcatcgcactcaggaacatctcattggctaaaggcccccccgggcccaagggggatcaaggggatgaaggcaaagagggtaggccaggtattcccggactcccagggctcaggggactgcccggagaacgcggcaccccaggtctccctggcccaaaaggagatgatgggaagttgggcgccactggcccaatgggtatgagagggttcaagggggaccgtggaccaaaaggagaaaagggcgagaaaggcgaccgggccggcgacgcctccaaagacatcctcttgggcccatgggacatggtactcgcccagggttag

SEQ ID NO: 250982 - DNA, 1203 bp, Artificial Sequence
  derived and/or modified sequence
atggagaataaggctatgtatctgcacactgtgagtgactgcgacacttccagcatctgtgaagatagctttgacggccggtcacttagcaagcttaatctgtgtgaagacggcccttgtcacaaacgtagggcgtcaatttgctgtactcagttgggctctttaagtgcccttaagcatgccgtcctcggactgtatctattggtctttctcattctggtgggaatattcattctggcggtctcgcgcccccggagctcacccgacgaccttaaggctcttactcggaatgtcaatcgtctcaacgaaagttttagagacctgcaattacgcctgttgcaggcacctttacaggcagatctgacagagcaggtttggaaagttcaggacgccttacagaaccagagcgattctctcctcgcgcttgctggtgcagttcagcgattagaaggcgctctctggggtttacaggcacaggcagtgcagaccgagcaagccgtggcactgctcagagacagaacagggcaacagagtgatactgcccaactcgaactataccaactccaagtggagagcaactcaagccagctgctcctgcggcgacacgctggactcctcgacggtttagctaggcgcgtggggatccttggggaagagttggctgatgtcggaggagtcttacgggggctcaaccattctttgagttacgatgtggcactccaccgaacgcgccttcaggatctgcgcgtactcgtgtcaaacgcatctgaagataccagaagacttagactggcgcacgtgggaatggaattgcagttaaaacaggaactggccatgctaaatgccgttaccgaagacttaagactgaaggactgggagcactcaatcgctctcagaaatatctctttggccaaaggccccccgggccctaaaggcgaccagggcgatgaggggaaagagggccgtcccgggatacccggccttccagggctgcgaggcctccccggagagcgcgggactcctggcttaccagggcctaagggggacgatggaaagttaggggcaacgggacctatgggcatgagggggttcaagggcgatcggggcccaaaaggagagaagggtgagaagggcgatcgcgctggagacgcttcaaaggacattttgctgggaccctgggatatggtgttggcacagggctag

SEQ ID NO: 250983 - DNA, 1074 bp, Artificial Sequence
  derived and/or modified sequence
atggagaacaaggccatgtacctgcacacagtgtctgactgtgacaccagcagcatctgtgaagattcttttgatggccgcagcctgagcaagctgaacctgtgtgaagatgtgtcccggcccaggagcagcccagatgacctgaaggccctgaccagaaatgtgaaccggctgaatgaaagcttccgggacctgcagctgcggctgctgcaggcccccctgcaggccgacctgacagagcaggtgtggaaggtgcaggatgccctgcagaaccagagcgacagcctgctggccctggccggggctgtgcagaggctggagggcgccctgtggggcctgcaggcccaggccgtgcagacagagcaggccgtggccctgctgcgggacagaacaggccagcagagcgacacagcccagctggagctgtaccagctgcaggtggagagcaacagcagccagctgctgctgcggagacatgctggcctgctggatggcctggcccggcgggtgggcatcctgggggaggagctggctgatgtgggcggcgtgctgcggggcctgaaccacagcctgtcctatgatgtggccctgcacaggacccggctgcaggacctgcgggtgctggtgtccaatgccagcgaggacacccggcggctgcggctggcccacgtgggcatggagctgcagctgaagcaggagctggccatgctgaatgctgtgacagaggacctgcggctgaaggactgggagcacagcatcgccctgaggaacatcagcctggccaagggccccccaggccccaagggggaccagggagatgagggcaaggagggccggcccggcatccctggcctgcccggcctgcggggcctgcccggggagcggggcaccccaggcctgcccggccccaagggagatgatggcaagctgggcgccaccggccccatgggcatgaggggcttcaagggggaccggggccccaagggggagaagggggagaagggggacagagctggagatgccagcaaggacatcctgctgggcccctgggacatggtgctggcccagggctag

SEQ ID NO: 250984 - DNA, 1488 bp, Artificial Sequence
  derived and/or modified sequence
atggagaacaaggccatgtacctgcacacagtgtctgactgtgacaccagcagcatctgtgaagattcttttgatggccgcagcctgagcaagctgaacctgtgtgaagatggcccctgccacaagagaagagccagcatctgctgcacccagctgggcagcctgagcgccctgaagcatgctgtgctgggcctgtacctgctggtgttcctgatcctggtgggcatcttcatcctggccgtgtcccggcccaggagcagcccagatgacctgaaggccctgaccagaaatgtgaaccggctgaatgaaagcttccgggacctgcagctgcggctgctgcaggcccccctgcaggccgacctgacagagcaggtgtggaaggtgcaggatgccctgcagaaccagagcgacagcctgctggccctggccggggctgtgcagaggctggagggcgccctgtggggcctgcaggcccaggccgtgcagacagagcaggccgtggccctgctgcgggacagaacaggccagcagagcgacacagcccagctggagctgtaccagctgcaggtggagagcaacagcagccagctgctgctgcggagacatgctggcctgctggatggcctggccaggagagtgggcatcctgggggaggagctggctgatgtgggcggcgtgctgcggggcctgaaccacagcctgtcctatgatgtggccctgcacaggacccggctgcaggacctgcgggtgctggtgtccaatgccagcgaggacacccggcggctgcggctggcccacgtgggcatggagctgcagctgaagcaggagctggccatgctgaatgctgtgacagaggacctgcggctgaaggactgggagcacagcatcgccctgaggaacatcagcctggccaagggccccccaggccccaagggggaccagggagatgagggcaaggagggccggcccggcatccctggcctgcccggcctgcggggcctgcctggagagcggggcaccccaggcctgcccggccccaagggagatgatggcaagctgggcgccaccggccccatgggcatgaggggcttcaagggggaccggggccccaagggggagaagggggagaagggggacagagctggagatgccagcggcgtggaggcccccatgatgatccggctggtgaatggaagtggcccccatgagggccgggtggaggtgtaccatgaccggcgctggggcaccgtgtgtgatgatggctgggacaagaaggatggagatgtggtgtgcaggatgctgggcttccggggcgtggaggaggtgtacagaacagcccgcttcggccagggcaccggccgcatctggatggatgatgtggcctgcaagggcacagaggagaccatcttccgctgcagcttcagcaagtggggcgtgaccaactgtggccatgctgaagatgcctctgtgacctgcaacagacactag

SEQ ID NO: 250985 - DNA, 813 bp, Artificial Sequence
  derived and/or modified sequence
atggagaacaaggccatgtacctgcacacagtgtctgactgtgacaccagcagcatctgtgaagattcttttgatggccgcagcctgagcaagctgaacctgtgtgaagatggcccctgccacaagagaagagccagcatctgctgcacccagctgggcagcctgagcgccctgaagcatgctgtgctgggcctgtacctgctggtgttcctgatcctggtgggcatcttcatcctggccggccccccaggccccaagggggaccagggagatgagggcaaggagggccggcccggcatccctggcctgcccggcctgcggggcctgcccggggagcggggcaccccaggcctgcccggccccaagggagatgatggcaagctgggcgccaccggccccatgggcatgaggggcttcaagggggaccggggccccaagggggagaagggggagaagggggacagagctggagatgccagcggcgtggaggcccccatgatgatccggctggtgaatggcagcggcccccatgagggccgggtggaggtgtaccatgaccggcgctggggcaccgtgtgtgatgatggctgggacaagaaggatggagatgtggtgtgcaggatgctgggcttccggggcgtggaggaggtgtacagaacagccaggtttggccagggcaccggccgcatctggatggatgatgtggcctgcaagggcacagaggagaccatcttccgctgcagcttcagcaagtggggcgtgaccaactgtggccacgcagaagatgcctctgtgacctgcaacagacactag

SEQ ID NO: 250986 - DNA, 1203 bp, Artificial Sequence
  derived and/or modified sequence
atggagaacaaggccatgtacctgcacacagtgtctgactgtgacaccagcagcatctgtgaagattcttttgatggccgcagcctgagcaagctgaacctgtgtgaagatggcccctgccacaagagaagagccagcatctgctgcacccagctgggcagcctgagcgccctgaagcatgctgtgctgggcctgtacctgctggtgttcctgatcctggtgggcatcttcatcctggccgtgtcccggcccaggagcagcccagatgacctgaaggccctgaccagaaatgtgaaccggctgaatgaaagcttccgggacctgcagctgcggctgctgcaggcccccctgcaggccgacctgacagagcaggtgtggaaggtgcaggatgccctgcagaaccagagcgacagcctgctggccctggccggggctgtgcagaggctggagggcgccctgtggggcctgcaggcccaggccgtgcagacagagcaggccgtggccctgctgcgggacagaacaggccagcagagcgacacagcccagctggagctgtaccagctgcaggtggagagcaacagcagccagctgctgctgcggagacatgctggcctgctggatggcctggccaggagagtgggcatcctgggggaggagctggctgatgtgggcggcgtgctgcggggcctgaaccacagcctgtcctatgatgtggccctgcacaggacccggctgcaggacctgcgggtgctggtgtccaatgccagcgaggacacccggcggctgcggctggcccacgtgggcatggagctgcagctgaagcaggagctggccatgctgaatgctgtgacagaggacctgcggctgaaggactgggagcacagcatcgccctgaggaacatcagcctggccaagggccccccaggccccaagggggaccagggagatgagggcaaggagggccggcccggcatccctggcctgcccggcctgcggggcctgcctggagagcggggcaccccaggcctgcccggccccaagggagatgatggcaagctgggcgccaccggccccatgggcatgaggggcttcaagggggaccggggccccaagggggagaagggggagaagggggacagagctggagatgccagcaaggacatcctgctgggcccctgggacatggtgctggcccagggctag

SEQ ID NO: 250987 - DNA, 1074 bp, Artificial Sequence
  derived and/or modified sequence
atggagaacaaggccatgtacctgcacaccgtgagcgactgcgacaccagttcaatctgtgaagactcattcgatggaaggtctctgtccaagctgaatttgtgtgaggacgtttctaggcctcggtcgtcccccgacgacctcaaggcattgacaagaaacgtcaatcggctgaatgagagttttagagatttgcagttgcggctcctgcaagcccccctccaagcggatctgactgagcaagtctggaaggtccaggatgccctacaaaatcagtccgactcgctgttagctctcgctggggccgtacagaggctggagggggctttgtgggggctacaggcgcaagccgtgcaaacagagcaggcagtggccctcctacgggacagaacgggtcaacagtccgatacggcccaactcgaattgtaccagttacaagtcgaatctaattccagtcagcttctcttaagaagacacgctggtctgctcgacgggctcgcacgccgagtaggcattctgggtgaagaactggccgatgttgggggggtcctccggggattgaatcactccctgtcatatgacgtggccctccaccgaactcggctccaggacctgagggtccttgtctcaaacgcctctgaggatacccggcggctaaggctggctcatgttgggatggagttgcaactcaaacaggaacttgctatgcttaatgcagtgacagaagacctgagactcaaggattgggagcacagcatcgcccttcgaaatatctcattggccaaggggcccccaggccctaagggcgaccaaggggacgaggggaaggagggccgtcctggcatacctgggctccctggcctcaggggcttgcccggcgaaaggggcacacctggcttgcctgggcccaagggagacgatggaaaactcggagcaactggacctatgggcatgaggggttttaaaggcgaccgtgggccaaaaggggaaaaaggcgagaagggtgaccgagcgggggacgcatccaaagatatcctcctaggaccatgggatatggtcctggcacagggatag

SEQ ID NO: 250988 - DNA, 1488 bp, Artificial Sequence
  derived and/or modified sequence
atggagaacaaggccatgtacctgcacaccgtgagcgactgcgacacatcgtctatctgtgaggacagttttgatgggaggagcctttcaaagctaaatctgtgcgaagacggaccctgtcataaacggcgggcatcaatttgttgcacgcaacttgggagtttgtcagctctgaagcacgctgtgcttggcctgtacctcctcgtgtttctgatactggttgggatctttatccttgctgtgtcgcgacccaggtcttcacccgatgacctgaaggccctgaccaggaacgttaatcgactgaatgagtcctttcgggacttgcagctgcggctgttgcaagctccactgcaggccgatcttaccgaacaggtgtggaaggttcaggacgcactccagaaccagagcgacagtctgttggcactggccggagcagttcagcgcttggagggggcactgtgggggcttcaggcccaggctgttcaaactgaacaggccgttgcgctcctgagggatcgtactggacagcaatcagacacagcacagctcgaattataccagctccaggtggagagcaattctagccaactgctgctccgccggcacgctggactcttggacggccttgcgcgtagggtaggtatactgggggaggagcttgccgacgtgggtggggtacttagaggactgaaccatagtctcagttatgatgtggctctccaccgtactcggttacaggatctacgcgtattagtctccaacgcctccgaagacactcgccgtctgagacttgcgcacgtcgggatggaattgcagctcaagcaggaactggcgatgttgaatgctgttacagaagacctacgactgaaagactgggagcattccatagctctgagaaacatttcgttggcgaaggggccccctggacccaaaggcgaccaaggcgacgagggtaaagagggccggcccgggattcccggcctgcccggtctgagagggctgcccggagagcgcggcacacctggtctgcctggcccaaagggagatgacggcaagctgggcgcaaccgggcccatgggcatgagaggcttcaaaggggacagaggacccaagggcgagaaaggcgaaaagggcgatagagcgggagatgcaagcggagtagaagcacccatgatgatacggctggtgaacggttccgggccacatgaggggagggttgaagtttatcatgatagacgctggggcactgtatgcgacgacgggtgggacaagaaagacggggatgttgtttgccggatgctgggctttcggggcgtggaggaagtgtaccggaccgctagattcggacagggaactggacgtatttggatggatgatgtggcctgcaaaggaacagaagagaccatattccgctgctctttcagcaagtggggtgtgacaaactgcggacacgcagaggacgccagcgtgacatgcaataggcactag

SEQ ID NO: 250989 - DNA, 813 bp, Artificial Sequence
  derived and/or modified sequence
atggagaacaaggccatgtacctgcacaccgtgagcgactgcgacacctcttccatttgcgaggactcttttgacgggcgaagtctatccaaactcaacctttgtgaagacggaccgtgccacaaacggagagctagtatttgttgtacccagctgggaagcctttcagcgttgaaacatgccgtgcttggcctgtacctgctggtcttcttgatcttggttggcatcttcatattggccggtcctcctggaccaaagggtgatcagggggacgagggcaaagaggggaggcccggtatccccggacttccaggattacgcgggcttccaggagaacgaggcactcctggccttcccggcccaaagggagacgatggaaagctgggcgccacagggcccatggggatgcgcggcttcaaaggagaccggggaccaaagggcgagaagggggagaagggtgaccgcgccggggacgcaagtggagtggaagctccaatgatgattcgacttgttaacggctctggcccacacgaaggccgtgttgaggtataccacgaccggcgatggggcaccgtttgtgacgatggatgggacaagaaggatggtgatgtagtctgtcggatgctgggcttccgtggagtcgaagaggtgtaccgaactgcccggttcggacagggaactggaagaatttggatggatgacgtggcctgcaaagggacagaggagactatttttcgctgtagcttttccaagtggggggtgacaaactgcggacacgctgaagacgcctctgtaacatgtaacaggcattag

SEQ ID NO: 250990 - DNA, 1074 bp, Artificial Sequence
  derived and/or modified sequence
atggagaacaaggccatgtacctgcacaccgtgagcgactgcgacacaagctcgatttgcgaagattcatttgacggacgaagcttgagcaaactgaacttgtgtgaagatgttagtaggccgcgcagtagtcccgacgatcttaaagcactgacccgcaacgtgaaccgattaaatgaaagcttcagggatctgcagttgcgattacttcaggctcccctgcaggccgatctcacagaacaagtctggaaagttcaggatgcactgcagaatcagagcgattccctcctcgctctggccggtgcagtgcagagacttgagggtgcactttggggactccaggcccaggctgttcagacagagcaggccgtggcgttgcttcgggacaggactggccagcagtctgatactgctcagctggagctgtaccagctccaggtagagagcaacagtagccagctcctgctccgccgtcacgcgggtctgctggatgggcttgcccgcagggtgggtattctgggagaggagctggcggacgtgggtggggtgctgcgcgggttaaaccattccctgtcttacgacgtagccctacatcgcactagactgcaagatttgcgcgtcctggtcagcaacgcctctgaggacacgcgaagactgaggcttgctcacgtagggatggaactgcagttgaaacaggagctggctatgttgaatgccgtcacagaagacctgaggctaaaggactgggaacactctattgcactgaggaatatttctcttgccaagggacctccaggcccgaaaggggaccaaggcgacgagggcaaggaaggccggcctggaattccaggcctgcctggcctgcggggtttgccgggtgaaaggggtacgcctggtttgccaggaccgaagggcgacgacggcaagctcggggctacaggacctatgggaatgcggggtttcaaaggcgacaggggccccaagggcgagaagggagagaagggcgaccgggcaggcgacgcatccaaagatatcttgctcggcccatgggacatggtgttagcccaggggtag

SEQ ID NO: 250991 - DNA, 1203 bp, Artificial Sequence
  derived and/or modified sequence
atggagaacaaggccatgtacctgcacaccgtgagcgactgcgacacctcctctatctgcgaagactcctttgacggacggagtttgagcaagctgaatttgtgcgaggacggaccctgtcacaagaggcgggcctccatatgctgtacccagctgggtagcctgagtgctctgaaacacgccgtattagggctgtacctcctagtgtttctgattcttgttggaatcttcatcttggctgttagccgcccgcgcagtagcccggacgacctgaaggccctgactcgcaatgtgaacagattgaacgaatcattcagggacttgcaattgaggctactgcaggctccactgcaggcagatttaacagagcaggtttggaaggtccaggacgcccttcaaaatcagtcagattcactgttggctttagcaggcgcggtacaacgactggaaggagcactttggggactgcaggctcaggccgttcagacagagcaggctgtcgcattacttagagataggaccggccagcagagtgacactgctcagctggagctgtatcagttacaggtggaatccaactcttctcagttgcttctgcgtagacatgcgggactactggacgggttagctcgtcgggttggcatactgggagaggagcttgccgacgtaggaggcgtgttgcgggggctgaaccatagcctgtcttatgatgtagcgctgcatcgcacacggctccaggatcttagggtcctcgtttccaacgcctctgaggatacccggcggcttcgtctcgctcacgtagggatggagttgcagctgaagcaagagctggccatgctgaatgccgtgactgaggacctccggctcaaggactgggaacattctattgccctgcgcaacatcagtctggctaaggggcctcctggcccgaagggcgaccagggagatgagggtaaagaaggaaggccaggaattccggggctgccaggtcttagaggactgccaggggagcgcggtacgcctggtctgccagggccaaagggggatgacgggaagttgggagccacaggccccatggggatgagaggctttaagggggaccgaggtcctaaaggagaaaagggtgagaaaggcgatcgagccggggacgcttccaaggacattctgctcggcccttgggacatggttctcgctcagggatag

SEQ ID NO: 250992 - DNA, 1074 bp, Artificial Sequence
  derived and/or modified sequence
atggagaacaaggcaatgtaccttcacaccgtcagcgattgtgacacttcatcaatttgcgaggacagcttcgacggacggtcactgtcaaagctgaatctctgcgaggatgtatccaggcccaggagctccccagatgacctgaaggcattgacacggaacgtgaacaggttgaatgagtcctttagagatctgcagctgaggctcctgcaggcacctcttcaggccgatctgacagagcaggtgtggaaagtgcaggacgctctgcaaaaccagagtgattctctgctggctttggccggtgcggttcagagactggagggtgctctgtggggactccaagcgcaggccgtgcagaccgaacaggccgtcgccctcctgcgggaccgaaccggtcaacaaagtgacacggctcaactcgagctgtatcagcttcaggtcgaatcgaattcatcccaactgcttctgcggagacacgctggcctacttgatggtcttgctagacgcgtggggatccttggggaagagttggccgacgttggcggagtcctgagggggctgaatcattcgctgtcttacgacgtcgcccttcatcgcacgcggctgcaggatctgagggttctggtgtcaaatgccagtgaggacacacgcagactacgactcgctcacgtgggaatggagctacagctgaagcaggagctggccatgctcaatgcagtgacagaagacctgaggctgaaggactgggaacatagcatagcgctgcggaacatttcactggccaaaggcccaccaggacccaaaggggatcagggggatgagggtaaggagggacgccctggtatccccggactgccagggcttcgcggactgcctggtgaaagaggcacgcctggcttacccggacctaaaggcgacgatggcaaactgggtgcgacagggccaatgggaatgcgcggatttaagggggataggggaccaaaaggtgaaaagggagaaaaaggcgacagagctggagatgccagcaaggacattcttctgggaccatgggacatggtgctggcacagggctag

SEQ ID NO: 250993 - DNA, 1488 bp, Artificial Sequence
  derived and/or modified sequence
atggaaaacaaggctatgtacctgcacactgttagcgactgcgatacgtcatccatctgcgaagatagcttcgacggacggtcgctctcaaagctgaacttatgcgaggatggcccatgccacaaaaggagagcctctatctgctgtacccaactcggaagtctcagcgcccttaagcatgcagtgctcggcctttacctgctggtatttctgatcctggtcggcattttcatcctggctgtgtcgcggcctcgttctagtcctgacgatctgaaagctctaactagaaatgttaaccgcctgaatgagagtttccgcgacctgcagctccgactgctgcaagcaccccttcaggccgacttgaccgaacaggtatggaaagtgcaagacgccttacagaaccagtcagattccctcctggccctggcaggcgctgttcaaaggctagagggggcactatggggacttcaagcacaggcagtgcagaccgaacaggccgtggcactgttgagagaccgtacagggcagcagtctgacaccgcacaactggaactgtatcagcttcaggtagagagcaattcatcacagctgcttctgaggaggcacgctggcctgctcgatggactcgctcgtcgcgtaggaatactgggagaagaactcgccgacgtggggggtgtgcttcgcggtctaaaccacagcctctcatatgatgtcgcactgcaccgaactagactccaagatcttagagttctggtctcaaacgcctccgaggacacacggaggctcaggttggcacatgtcgggatggagttacaattgaagcaggagctagcgatgctgaatgctgttaccgaagacctcaggctcaaagattgggaacattctattgcacttagaaacatctccctggctaaagggcctccagggcctaagggcgatcagggggacgaggggaaagagggcaggcccggtattcctggcctgcctgggctccggggactgcccggtgagcggggaactccgggactgcccggtccgaagggcgatgatggaaagttaggagcaaccgggccaatgggcatgcgcggttttaaaggggaccggggtccaaagggagagaaaggcgaaaagggagaccgcgctggtgatgccagcggtgtggaagccccaatgatgattagactcgttaacggttctggtccacacgagggaagagtggaggtttaccatgaccggagatggggaactgtctgtgacgacggatgggataagaaggacggggacgtggtgtgcaggatgctggggttccgaggcgtggaggaggtgtatcgcacagcacggttcggacagggaaccggcaggatctggatggacgatgtcgcttgtaaaggaaccgaagagactatcttccgttgcagtttctctaaatggggcgtcacaaactgtgggcacgccgaagacgccagcgttacctgtaacagacattag

SEQ ID NO: 250994 - DNA, 813 bp, Artificial Sequence
  derived and/or modified sequence
atggaaaataaagcaatgtatctgcacacagtgtccgactgcgatacatctagtatttgcgaagactcgtttgatgggaggtccctttcaaagctgaatctttgtgaagacggcccttgtcacaagaggcgcgcttccatctgttgcacccaacttggatctctgtctgccctgaaacatgccgtcttaggactatatctcttagtgttccttatacttgtggggatctttatcctcgccggtcctcctggtccgaagggagaccagggggatgagggaaaggaagggagacctggaattcctggtctacctgggctccgtggactaccaggtgagcgagggacccccggactgcctgggccaaagggagacgacggaaagctaggcgcaaccggccctatgggaatgcgcggttttaagggggaccgcggtcctaagggggaaaaaggcgagaagggcgaccgggcaggggatgcctctggggtggaagcccctatgatgattagactggttaatggaagtggccctcatgagggtagagtagaggtctatcacgatcgacgttggggaacggtttgcgatgatggctgggacaaaaaggatggggatgtagtttgtaggatgctcgggttcaggggagtcgaggaggtatatcgtactgctagatttgggcaaggcacaggcagaatttggatggatgacgtcgcctgtaagggaaccgaagagacaatcttcaggtgctcgttttccaagtggggagtaactaattgcgggcacgcagaggatgcgtccgtgacgtgcaatagacattag

SEQ ID NO: 250995 - DNA, 1074 bp, Artificial Sequence
  derived and/or modified sequence
atggaaaacaaggccatgtacctccacactgtgtctgattgcgacacgagcagtatctgtgaggacagttttgatgggagatctttaagcaaactgaatctgtgtgaggatgtctctcggccacgcagctcccccgacgatttgaaggcactgactcgcaacgtaaaccggctgaacgaatccttcagagacctacagctaagattgctgcaagctccactgcaagcggacttgaccgagcaagtgtggaaagtacaggacgccctgcagaaccagtccgattccctcctggctttggcaggcgctgtacagcgcctagaaggagccctgtggggtctgcaagctcaggccgtgcagaccgagcaggctgtcgctctcttaagagacagaactggtcagcagtctgacacagcccaactggaactgtaccagctccaggtggagtccaattcgtctcaactgcttttaaggcggcatgctgggctgctcgacggccttgctcgccgtgttggtatcctgggcgaagaattagccgacgtgggaggagtgcttaggggactgaatcattctttgtcctatgacgttgccctgcaccgcacacgcctccaggacttacgggtgctggtgtctaacgcatcggaggatactcgtaggctgagactggcccatgtcgggatggagctgcagcttaaacaagagctggccatgctaaatgcagtcacggaggatctacggttaaaggattgggaacactctatcgcactaaggaacatttctctcgccaagggcccacccggaccgaagggagatcagggggacgaaggaaaagaaggacgccctggtattccaggtctgcccggtctgcgaggacttcctggagagcggggtactcccggactacccggtcctaagggcgacgacgggaaactaggagcaactgggcctatgggaatgagagggttcaaaggagacaggggccctaagggtgagaaaggagaaaaaggtgatagagcaggtgacgccagcaaagacatcctactggggccatgggacatggtcttggctcaggggtag

SEQ ID NO: 250996 - DNA, 1203 bp, Artificial Sequence
  derived and/or modified sequence
atggagaacaaggcgatgtatctacatacggtgtcagattgcgacacttcctctatttgtgaggacagctttgacggccgaagcctgtctaagttgaacctttgtgaagacggaccatgccataaaaggcgggcatctatctgctgcacccagcttggctctctctctgctctgaagcacgcagtcctggggctctaccttctggtctttctgattctcgtgggtatattcattttggccgtgtctaggccccgaagcagtcccgatgaccttaaggctctcacccgcaacgtgaacaggctgaacgagtcgttcagggacctgcagttgcggttgctgcaggccccactgcaagcggatttgaccgagcaggtgtggaaagtgcaagatgctctgcagaaccagtccgattcccttctcgccttggccggagctgtgcagaggctggagggcgctctgtgggggcttcaggcgcaagccgtgcagaccgaacaggcagtcgccctactgcgagacagaaccggccagcaatctgacaccgctcagcttgagctgtaccaactgcaagttgaatcaaatagcagccagctgctgctgaggcgccacgcaggccttctggacggcctggccagacgtgtcggcattctgggggaagagttggcagacgtggggggagtgcttcgtgggctgaaccattcattgtcttatgatgtcgccctgcacagaacaagactgcaggatctgcgcgtgttggtctccaatgcctctgaggatactcgccgactgcgcctggctcacgttggcatggagctccagctgaaacaggagctggcaatgctgaacgccgtcacagaagacctgcggttgaaggactgggaacactccatcgcactaaggaatatttcattggccaaaggccctcccggtcctaagggagaccagggagacgagggaaaagaggggaggcccggaattcccggactccccggactgagaggactcccaggggaaaggggtacacccggtttgcctggcccaaagggcgatgatggcaaactcggcgcaacaggccctatgggtatgcggggtttcaagggggacagagggccaaagggcgaaaagggggaaaaaggggacagagccggagatgcctccaaggacatattgctgggaccatgggacatggtcctcgcgcagggctag

SEQ ID NO: 250997 - DNA, 1514 bp, Artificial Sequence
  derived and/or modified sequence
tttattttatacggactggcggcgagagcagctgcagttcgcatctcaggcagtacctagaggagctgccggtgcctcctcagaacatctcctgatcgctacccaggaccaggcaccaaggacagggagtcccaggcgcacaccccccattctgggtcccccaggcccagacccccactctgccacaggttgcatcttgacctggtcctcctgcagaagtggcccctgtggtcctgctctgagactcgtccctgggcgcccctgcagcccctttctatgactccatctggatttggctggctgtggggacgcggtccgaggggcggcctggctctcagcgtggtggcagccagctctctggccaccatggcaaatgctgagatctgaggggacaaggctctacagcctcagccaggggcactcagctgttgcagggtgtgatggagaacaaagctatgtacctacacaccgtcagcgactgtgacaccagctccatctgtgaggattcctttgatggcaggagcctgtccaagctgaacctgtgtgaggatgtgtccaggccgcgcagctcccctgacgacctgaaggccctgactcgcaatgtgaaccggctgaatgagagcttccgggacttgcagctgcggctgctgcaggctccgctgcaagcggacctgacggagcaggtgtggaaggtgcaggacgcgctgcagaaccagtcagactcgttgctggcgctggcgggcgcagtgcagcggctggagggcgcgctgtgggggctgcaggcgcaggcggtgcagaccgagcaggcggtggccctgctgcgggaccgcacgggccagcagagcgacacggcgcagctggagctctaccagctgcaggtggagagcaacagtagccagctgctgctgaggcgccacgcgggcctgctggacgggctggcgcgcagggtgggcatcctgggcgaggagctggccgacgtgggcggcgtgctgcgcggcctcaaccacagcctgtcctacgacgtggccctccaccgcacgcggctgcaggacctgcgggtgctggtgagcaacgccagcgaggacacgcgccgcctgcgcctggcgcacgtaggcatggagctgcagctgaagcaggagctggccatgctcaacgcggtcaccgaggacctgcgcctcaaggactgggagcactccatcgcactgcggaacatctccctcgcgaaagggccaccgggacccaaaggtgatcagggggatgaaggaaaggaaggcaggcctggcatccctggattgcctggacttcgaggtctgcccggggagagaggtaccccaggattgcccgggcccaagggcgatgatgggaagctgggggccacaggaccaatgggcatgcgtgggttcaaaggtgaccgaggcccaaaaggagagaaaggagagaaaggagacagagctggggatgccagtaaggacattctgctggggccgtgggatatggtgttggcacagggctag

SEQ ID NO: 250998 - DNA, 4026 bp, Artificial Sequence
  derived and/or modified sequence
gtattccagaccccattgcagaagcctccgcaactgctccaagaactttattttatacggactggcggcgagagcagctgcagttcgcatctcaggcagtacctagaggagctgccggtgcctcctcagaacatctcctgatcgctacccaggaccaggcaccaaggacagggagtcccaggcgcacaccccccattctgggtcccccaggcccagacccccactctgccacaggttgcatcttgacctggtcctcctgcagaagtggcccctgtggtcctgctctgagactcgtccctgggcgcccctgcagcccctttctatgactccatctggatttggctggctgtggggacgcggtccgaggggcggcctggctctcagcgtggtggcagccagctctctggccaccatggcaaatgctgagatctgaggggacaaggctctacagcctcagccaggggcactcagctgttgcagggtgtgatggagaacaaagctatgtacctacacaccgtcagcgactgtgacaccagctccatctgtgaggattcctttgatggcaggagcctgtccaagctgaacctgtgtgaggatggtccatgtcacaaacggcgggcaagcatctgctgtacccagctggggtccctgtcggccctgaagcatgctgtcctggggctctacctgctggtcttcctgattcttgtgggcatcttcatcttagcagtgtccaggccgcgcagctcccctgacgacctgaaggccctgactcgcaatgtgaaccggctgaatgagagcttccgggacttgcagctgcggctgctgcaggctccgctgcaagcggacctgacggagcaggtgtggaaggtgcaggacgcgctgcagaaccagtcagactcgttgctggcgctggcgggcgcagtgcagcggctggagggcgcgctgtgggggctgcaggcgcaggcggtgcagaccgagcaggcggtggccctgctgcgggaccgcacgggccagcagagcgacacggcgcagctggagctctaccagctgcaggtggagagcaacagtagccagctgctgctgaggcgccacgcgggcctgctggacgggctggcgcgcagggtgggcatcctgggcgaggagctggccgacgtgggcggcgtgctgcgcggcctcaaccacagcctgtcctacgacgtggccctccaccgcacgcggctgcaggacctgcgggtgctggtgagcaacgccagcgaggacacgcgccgcctgcgcctggcgcacgtaggcatggagctgcagctgaagcaggagctggccatgctcaacgcggtcaccgaggacctgcgcctcaaggactgggagcactccatcgcactgcggaacatctccctcgcgaaagggccaccgggacccaaaggtgatcagggggatgaaggaaaggaaggcaggcctggcatccctggattgcctggacttcgaggtctgcccggggagagaggtaccccaggattgcccgggcccaagggcgatgatgggaagctgggggccacaggaccaatgggcatgcgtgggttcaaaggtgaccgaggcccaaaaggagagaaaggagagaaaggagacagagctggggatgccagtggcgtggaggccccgatgatgatccgcctggtgaatggctcaggtccgcacgagggccgcgtggaagtgtaccacgaccggcgttggggcaccgtgtgtgacgacggctgggacaagaaggacggagacgtggtgtgccgcatgctcggcttccgcggtgtggaggaggtgtaccgcacagctcgattcgggcaaggcactgggaggatctggatggatgacgttgcctgcaagggcacagaggaaaccatcttccgctgcagcttctccaaatggggggtgacaaactgtggacatgccgaagatgccagcgtgacatgcaacagacactgaaagtgggcagagcccaagttcggggtcctgcacagagcacccttcctgcatccctggggtggggcacagctcggggccaccctgaccatgcctcgaccacaccccgtccagcattctcagtcctcacacctgcatcccaggaccgtgggggccggtcgtcatttccctcttgaacatgtgctccgaagtataactctgggacctactgcccgtctctctcttccaccaggttcctgcatgaggagccctgatcaactggatcaccactttgcccagcctctgaacaccatgcaccaggcctcaatatcccagttccctttggccttttagttacaggtgaatgctgagaatgtgtcagagacaagtgcagcagcagcgatggttggtagtatagatcatttactcttcagacaattcccaaacctccattagtccaagagtttctacatcttcctccccagcaagaggcaacgtcaagtgatgaatttcccccctttactctgcctctgctccccatttgctagtttgaggaagtgacatagaggagaagccagctgtaggggcaagagggaaatgcaagtcacctgcaggaatccagctagatttggagaagggaatgaaactaacattgaatgactaccatggcacgctaaatagtatcttgggtgccaaattcatgtatccacttagctgcattggtccagggcatgtcagtctggatacagccttacctccaggtagcacttaactggtccattcacctagactgcaagtaagaagacaaaatgactgagaccgtgtgcccacctgaacttattgtctttacttggcctgagctaaaagcttgggtgcaggacctgtgtaactagaaagttgcctacttcagaacctccagggcgtgagtgcaaggtcaaacatgactggcttccaggccgaccatcaatgtaggaggagagctgatgtggagggtgacatgggggctgcccatgttaaacctgagtccagtgctctggcattgggcagtcacggttaaagccaagtcatgtgtgtctcagctgtttggaggtgatgattttgcatcttccaagcctcttcaggtgtgaatctgtggtcaggaaaacacaagtcctaatggaacccttaggggggaaggaaatgaagattccctataacctctgggggtggggagtaggaataaggggccttgggcctccataaatctgcaatctgcaccctcctcctagagacagggagatcgtgttctgctttttacatgaggagcagaactgggccatacacatgttcaagaactaggggagctacctggtagcaagtgagtgcagacccacctcaccttgggggaatctcaaactcataggcctcagatacacgatcacctgtcatatcaggtgagcactggcctgcttggggagagacctgggcccctccaggtgtaggaacagcaacactcctggctgacaactaagccaatatggccctaggtcattcttgcttccaatatgcttgccactccttaaatgtcctaatgatgagaaactctctttctgaccaattgctatgtttacataacacgcatgtactcatgcatcccttgccagagcccatatatgtatgcatatataaacatagcactttttactacatagctcagcacattgcaaggtttgcatttaagttaaaaaaaaaaaaaaaaaaaaactaaaggtgaaagatgccacattgaacaaactaaattcccaacccggttctggcaaagaatccagttatcccttccatgaagacgcacataactctcttacttggtctttccattagggacaacataagtcttgttttacatcaaataaaaacaatgttaaaaagtgtgtgaaccttaaaaatggaagtctactagtttacatacctacttcagaggacatggaaatgaccatgggcctgcatttcagggaccaaagcaaattaggcctggcctaaaatacatcagaccttttgtaagaaagaatttcaataaagcaaaaaacatgtcacaag

SEQ ID NO: 250999 - DNA, 2934 bp, Artificial Sequence
  derived and/or modified sequence
ggcggcgagagcagctgcagttcgcatctcaggcagtacctagaggagctgccggtgcctcctcagaacatctcctgatcgctacccaggaccaggcaccaaggacagggagtcccaggcgcacaccccccattctgggtcccccaggcccagacccccactctgccacaggttgcatcttgacctggtcctcctgcagaagtggcccctgtggtcctgctctgagactcgtccctgggcgcccctgcagcccctttctatgactccatctggatttggctggctgtggggacgcggtccgaggggcggcctggctctcagcgtggtggcagccagctctctggccaccatggcaaatgctgagatctgaggggacaaggctctacagcctcagccaggggcactcagctgttgcagggtgtgatggagaacaaagctatgtacctacacaccgtcagcgactgtgacaccagctccatctgtgaggattcctttgatggcaggagcctgtccaagctgaacctgtgtgaggatggtccatgtcacaaacggcgggcaagcatctgctgtacccagctggggtccctgtcggccctgaagcatgctgtcctggggctctacctgctggtcttcctgattcttgtgggcatcttcatcttagcagggccaccgggacccaaaggtgatcagggggatgaaggaaaggaaggcaggcctggcatccctggattgcctggacttcgaggtctgcccggggagagaggtaccccaggattgcccgggcccaagggcgatgatgggaagctgggggccacaggaccaatgggcatgcgtgggttcaaaggtgaccgaggcccaaaaggagagaaaggagagaaaggagacagagctggggatgccagtggcgtggaggccccgatgatgatccgcctggtgaatggctcaggtccgcacgagggccgcgtggaagtgtaccacgaccggcgttggggcaccgtgtgtgacgacggctgggacaagaaggacggagacgtggtgtgccgcatgctcggcttccgcggtgtggaggaggtgtaccgcacagctcgattcgggcaaggcactgggaggatctggatggatgacgttgcctgcaagggcacagaggaaaccatcttccgctgcagcttctccaaatggggggtgacaaactgtggacatgccgaagatgccagcgtgacatgcaacagacactgaaagtgggcagagcccaagttcggggtcctgcacagagcacccttcctgcatccctggggtggggcacagctcggggccaccctgaccatgcctcgaccacaccccgtccagcattctcagtcctcacacctgcatcccaggaccgtgggggccggtcgtcatttccctcttgaacatgtgctccgaagtataactctgggacctactgcccgtctctctcttccaccaggttcctgcatgaggagccctgatcaactggatcaccactttgcccagcctctgaacaccatgcaccaggcctcaatatcccagttccctttggccttttagttacaggtgaatgctgagaatgtgtcagagacaagtgcagcagcagcgatggttggtagtatagatcatttactcttcagacaattcccaaacctccattagtccaagagtttctacatcttcctccccagcaagaggcaacgtcaagtgatgaatttcccccctttactctgcctctgctccccatttgctagtttgaggaagtgacatagaggagaagccagctgtaggggcaagagggaaatgcaagtcacctgcaggaatccagctagatttggagaagggaatgaaactaacattgaatgactaccatggcacgctaaatagtatcttgggtgccaaattcatgtatccacttagctgcattggtccagggcatgtcagtctggatacagccttacctccaggtagcacttaactggtccattcacctagactgcaagtaagaagacaaaatgactgagaccgtgtgcccacctgaacttattgtctttacttggcctgagctaaaagcttgggtgcaggacctgtgtaactagaaagttgcctacttcagaacctccagggcgtgagtgcaaggtcaaacatgactggcttccaggccgaccatcaatgtaggaggagagctgatgtggagggtgacatgggggctgcccatgttaaacctgagtccagtgctctggcattgggcagtcacggttaaagccaagtcatgtgtgtctcagctgtttggaggtgatgattttgcatcttccaagcctcttcaggtgtgaatctgtggtcaggaaaacacaagtcctaatggaacccttaggggggaaggaaatgaagattccctataacctctgggggtggggagtaggaataaggggccttgggcctccataaatctgcaatctgcaccctcctcctagagacagggagatcgtgttctgctttttacatgaggagcagaactgggccatacacatgttcaagaactaggggagctacctggtagcaagtgagtgcagacccacctcaccttgggggaatctcaaactcataggcctcagatacacgatcacctgtcatatcaggtgagcactggcctgcttggggagagacctgggcccctccaggtgtaggaacagcaacactcctggctgacaactaagccaatatggccctaggtcattcttgcttccaatatgcttgccactccttaaatgtcctaatgatgagaaactctctttctgaccaattgctatgtttacataacacgcatgtactcatgcatcccttgccagagcccatatatgtatgcatatataaacatagcactttttactacatagctcagcacattgcaaggtttgcatttaagtt

SEQ ID NO: 251000 - DNA, 1074 bp, Artificial Sequence
  derived and/or modified sequence
atggagaacaaagctatgtacctacacaccgtcagcgactgtgacaccagctccatctgtgaggattcctttgatggcaggagcctgtccaagctgaacctgtgtgaggatgtgtccaggccgcgcagctcccctgacgacctgaaggccctgactcgcaatgtgaaccggctgaatgagagcttccgggacttgcagctgcggctgctgcaggctccgctgcaagcggacctgacggagcaggtgtggaaggtgcaggacgcgctgcagaaccagtcagactcgttgctggcgctggcgggcgcagtgcagcggctggagggcgcgctgtgggggctgcaggcgcaggcggtgcagaccgagcaggcggtggccctgctgcgggaccgcacgggccagcagagcgacacggcgcagctggagctctaccagctgcaggtggagagcaacagtagccagctgctgctgaggcgccacgcgggcctgctggacgggctggcgcgcagggtgggcatcctgggcgaggagctggccgacgtgggcggcgtgctgcgcggcctcaaccacagcctgtcctacgacgtggccctccaccgcacgcggctgcaggacctgcgggtgctggtgagcaacgccagcgaggacacgcgccgcctgcgcctggcgcacgtaggcatggagctgcagctgaagcaggagctggccatgctcaacgcggtcaccgaggacctgcgcctcaaggactgggagcactccatcgcactgcggaacatctccctcgcgaaagggccaccgggacccaaaggtgatcagggggatgaaggaaaggaaggcaggcctggcatccctggattgcctggacttcgaggtctgcccggggagagaggtaccccaggattgcccgggcccaagggcgatgatgggaagctgggggccacaggaccaatgggcatgcgtgggttcaaaggtgaccgaggcccaaaaggagagaaaggagagaaaggagacagagctggggatgccagtaaggacattctgctggggccgtgggatatggtgttggcacagggctag

SEQ ID NO: 251001 - DNA, 1945 bp, Artificial Sequence
  derived and/or modified sequence
tagaggagctgccggtgcctcctcagaacatctcctgatcgctacccaggaccaggcaccaaggacagggagtcccaggcgcacaccccccattctgggtcccccaggcccagacccccactctgccacaggttgcatcttgacctggtcctcctgcagaagtggcccctgtggtcctgctctgagactcgtccctgggcgcccctgcagcccctttctatgactccatctggatttggctggctgtggggacgcggtccgaggggcggcctggctctcagcgtggtggcagccagctctctggccaccatggcaaatgctgagatctgaggggacaaggctctacagcctcagccaggggcactcagctgttgcagggtgtgatggagaacaaagctatgtacctacacaccgtcagcgactgtgacaccagctccatctgtgaggattcctttgatggcaggagcctgtccaagctgaacctgtgtgaggatggtccatgtcacaaacggcgggcaagcatctgctgtacccagctggggtccctgtcggccctgaagcatgctgtcctggggctctacctgctggtcttcctgattcttgtgggcatcttcatcttagcagtgtccaggccgcgcagctcccctgacgacctgaaggccctgactcgcaatgtgaaccggctgaatgagagcttccgggacttgcagctgcggctgctgcaggctccgctgcaagcggacctgacggagcaggtgtggaaggtgcaggacgcgctgcagaaccagtcagactcgttgctggcgctggcgggcgcagtgcagcggctggagggcgcgctgtgggggctgcaggcgcaggcggtgcagaccgagcaggcggtggccctgctgcgggaccgcacgggccagcagagcgacacggcgcagctggagctctaccagctgcaggtggagagcaacagtagccagctgctgctgaggcgccacgcgggcctgctggacgggctggcgcgcagggtgggcatcctgggcgaggagctggccgacgtgggcggcgtgctgcgcggcctcaaccacagcctgtcctacgacgtggccctccaccgcacgcggctgcaggacctgcgggtgctggtgagcaacgccagcgaggacacgcgccgcctgcgcctggcgcacgtaggcatggagctgcagctgaagcaggagctggccatgctcaacgcggtcaccgaggacctgcgcctcaaggactgggagcactccatcgcactgcggaacatctccctcgcgaaagggccaccgggacccaaaggtgatcagggggatgaaggaaaggaaggcaggcctggcatccctggattgcctggacttcgaggtctgcccggggagagaggtaccccaggattgcccgggcccaagggcgatgatgggaagctgggggccacaggaccaatgggcatgcgtgggttcaaaggtgaccgaggcccaaaaggagagaaaggagagaaaggagacagagctggggatgccagtaaggacattctgctggggccgtgggatatggtgttggcacagggctagctgtcccccaagcagccccataagtttggaggttcagaggctggagccatggctggggctcaagtgtcaaaggaggctccctaccttttttagggctctgctggtctagcaagagatgctgatagaccccaggggcactggccacatttctagaggtgtcataaacctggcggttgtgtgcatggatctggaggcttcccccggtcactcgctagcccagctggtataatctctgtgcctcagtgttctcatctataaaatagggataacaggagtctttaccttataaggtcattgtgaaaattgaatgagttaatctgtgtaaagtgcttatgatcatgctggacacctggtgagga

SEQ ID NO: 251002 - protein, 180 aa, Artificial Sequence
  derived and/or modified sequence
MALADLYEEGGGGGGEGEDNADSKETICRPSGRKSSKMQAFRIWDVNQKTFYLRNNQLVAGYLQGPNVNLEEKIDVVPIEPHALFLGIHGGKMCLSCVKSGDETRLQLEAVNITDLSENRKQDKRFAFIRSDSGPTTSFESAACPGWFLCTAMEADQPVSLTNMPDEGVMVTKFYFQEDE

SEQ ID NO: 251003 - DNA, 543 bp, Artificial Sequence
  derived and/or modified sequence
atggccctggccgacctgtacgaggagggcggcggcggcggcggcgagggcgaggacaacgccgacagcaaggagaccatctgcagacccagcggcagaaagagcagcaagatgcaggccttcagaatctgggacgtgaaccagaagaccttctacctgagaaacaaccagctggtggccggctacctgcagggccccaacgtgaacctggaggagaagatcgacgtggtgcccatcgagccccacgccctgttcctgggcatccacggcggcaagatgtgcctgagctgcgtgaagagcggcgacgagaccagactgcagctggaggccgtgaacatcaccgacctgagcgagaacagaaagcaggacaagagattcgccttcatcagaagcgacagcggccccaccaccagcttcgagagcgccgcctgccccggctggttcctgtgcaccgccatggaggccgaccagcccgtgagcctgaccaacatgcccgacgagggcgtgatggtgaccaagttctacttccaggaggacgagtag

SEQ ID NO: 251004 - DNA, 543 bp, Artificial Sequence
  derived and/or modified sequence
atggctcttgctgacctctacgaggagggcggcggcggggggggggaaggagaggataacgctgacagcaaggagaccatttgtagaccatcaggtaggaagagctcaaagatgcaagcattcagaatttgggatgtgaatcagaaaaccttttacctgagaaacaaccagctcgtggccgggtacctccagggccctaatgtgaaccttgaggagaaaattgatgttgtccctatcgagccccatgcattgttcctgggcattcacggcggcaagatgtgtctcagttgcgtgaagagcggagacgaaactcggctgcagctcgaagccgtcaacattacagatctcagcgagaacaggaaacaggacaagcggtttgcatttattagaagcgacagcggtccaaccaccagtttcgagtcagccgcatgtccgggctggttcctttgcacagccatggaggcagatcagccagttagtctcaccaacatgccggacgaaggggtgatggttaccaagttttacttccaggaagacgagtag

SEQ ID NO: 251005 - DNA, 543 bp, Artificial Sequence
  derived and/or modified sequence
atggccctggccgacctgtatgaggagggcggcggcggcggcggggagggggaggacaatgctgacagcaaggagaccatctgccggcccagcggcaggaagagcagcaagatgcaggccttccgcatctgggatgtgaaccagaagaccttctacctgaggaacaaccagctggtggccggctacctgcagggccccaacgtgaacctggaggagaagattgatgtggtgcccatcgagccccacgccctcttcctgggcatccatggaggcaagatgtgcctgagctgtgtgaagtctggagatgagacccggctgcagctggaggccgtgaacatcacagacctgtctgagaacaggaagcaggacaagagatttgccttcatccgcagtgacagcggccccaccaccagctttgaatctgctgcctgccccggctggttcctgtgcacagccatggaggccgaccagcctgtgtccctgaccaacatgccagatgagggcgtgatggtgaccaagttctacttccaggaggatgaatag

SEQ ID NO: 251006 - DNA, 1810 bp, Artificial Sequence
  derived and/or modified sequence
agctccaccctgggagggactgtggcccaggtactgcccgggtgctactttatgggcagcagctcagttgagttagagtctggaagacctcagaagacctcctgtcctatgaggccctccccatggctttagctgacttgtatgaagaaggaggtggaggaggaggagaaggtgaagacaatgctgactcaaaggagacgatctgccgaccctctgggagaaaatccagcaagatgcaagccttcagaatctgggatgttaaccagaagaccttctatctgaggaacaaccaactagttgctggatacttgcaaggaccaaatgtcaatttagaagaaaagatagatgtggtacccattgagcctcatgctctgttcttgggaatccatggagggaagatgtgcctgtcctgtgtcaagtctggtgatgagaccagactccagctggaggcagttaacatcactgacctgagcgagaacagaaagcaggacaagcgcttcgccttcatccgctcagacagtggccccaccaccagttttgagtctgccgcctgccccggttggttcctctgcacagcgatggaagctgaccagcccgtcagcctcaccaatatgcctgacgaaggcgtcatggtcaccaaattctacttccaggaggacgagtagtactgcccaggcctgcctgttcccattcttgcatggcaaggactgcagggactgccagtccccctgccccagggctcccggctatgggggcactgaggaccagccattgaggggtggaccctcagaaggcgtcacaacaacctggtcacaggactctgcctcctcttcaactgaccagcctccatgctgcctccagaatggtctttctaatgtgtgaatcagagcacagcagcccctgcacaaagcccttccatgtcgcctctgcattcaggatcaaaccccgaccacctgcccaacctgctctcctcttgccactgcctcttcctccctcattccaccttcccatgccctggatccatcaggccacttgatgacccccaaccaagtggctcccacaccctgttttacaaaaaagaaaagaccagtccatgagggaggtttttaagggtttgtggaaaatgaaaattaggatttcatgatttttttttttcagtccccgtgaaggagagcccttcatttggagattatgttctttcggggagaggctgaggacttaaaatattcctgcatttgtgaaatgatggtgaaagtaagtggtagcttttcccttctttttcttctttttttgtgatgtcccaacttgtaaaaattaaaagttatggtactatgttagccccataattttttttttccttttaaaacacttccataatctggactcctctgtccaggcactgctgcccagcctccaagctccatctccactccagattttttacagctgcctgcagtactttacctcctatcagaagtttctcagctcccaaggctctgagcaaatgtggctcctgggggttctttcttcctctgctgaaggaataaattgctccttgacattgtagagcttctggcacttggagacttgtatgaaagatggctgtgcctctgcctgtctcccccaccgggctgggagctctgcagagcaggaaacatgactcgtatatgtctcaggtccctgcagggccaagcacctagcctcgctcttggcaggtactcagcgaatgaatgctgtatatgttgggtgcaaagttccctacttcctgtgacttcagctctgttttacaataaaatcttgaaaatgccta

SEQ ID NO: 251007 - DNA, 543 bp, Artificial Sequence
  derived and/or modified sequence
atggccctggccgacctgtacgaggagggcggcggcggcggcggcgagggcgaagataacgcagactcaaaggagacaatctgcagaccgtctggccgcaaatcctccaaaatgcaggcttttcgcatttgggacgtgaatcaaaaaacattttatttgaggaacaatcaattagtggcagggtaccttcaggggcccaacgtgaacctcgaggaaaagatcgatgtcgtgccaatcgagccacatgccttgttcctgggaattcatggcgggaagatgtgtctctcctgcgttaagagcggggacgagacccggctacagctggaggccgtgaacataaccgatctgagcgagaataggaagcaggataagagattcgcattcataaggagtgactcaggacctaccaccagctttgagtccgcggcatgtcctggttggtttctgtgcacagctatggaggcggatcagcctgtgtccctgacaaacatgccggacgaaggtgtgatggtgactaagttctacttccaggaggatgagtag

SEQ ID NO: 251008 - DNA, 543 bp, Artificial Sequence
  derived and/or modified sequence
atggccttggcagacctgtacgaggagggcggagggggtgggggagaaggagaggacaacgcagatagcaaggaaacaatttgtcgcccttctgggaggaaatccagcaagatgcaagcttttcggatctgggacgtcaatcagaagaccttctatttgcgcaacaatcagctcgtcgcaggttatctgcaggggcctaacgtgaatcttgaagaaaagatcgacgtggtacccattgaaccacacgcattgttcctgggaatccatgggggtaagatgtgcctcagctgcgtaaaatcaggagacgagacgcggctccagttagaggccgttaatattaccgatctatcggagaatcggaaacaggacaagaggtttgcattcattcggagcgacagtgggccaacgacatcctttgagagtgccgcatgtcccggttggtttctttgcaccgctatggaagccgaccagccagtgtccctgacgaacatgcctgatgagggtgttatggtgactaagttttacttccaagaagatgagtag

SEQ ID NO: 251009 - protein, 177 aa, Artificial Sequence
  derived and/or modified sequence
MEICRGLRSHLITLLLFLFHSETICRPSGRKSSKMQAFRIWDVNQKTFYLRNNQLVAGYLQGPNVNLEEKIDVVPIEPHALFLGIHGGKMCLSCVKSGDETRLQLEAVNITDLSENRKQDKRFAFIRSDSGPTTSFESAACPGWFLCTAMEADQPVSLTNMPDEGVMVTKFYFQEDE

SEQ ID NO: 251010 - DNA, 534 bp, Artificial Sequence
  derived and/or modified sequence
atggagatctgcagaggcctgagaagccacctgatcaccctgctgctgttcctgttccacagcgagaccatctgcagacccagcggcagaaagagcagcaagatgcaggccttcagaatctgggacgtgaaccagaagaccttctacctgagaaacaaccagctggtggccggctacctgcagggccccaacgtgaacctggaggagaagatcgacgtggtgcccatcgagccccacgccctgttcctgggcatccacggcggcaagatgtgcctgagctgcgtgaagagcggcgacgagaccagactgcagctggaggccgtgaacatcaccgacctgagcgagaacagaaagcaggacaagagattcgccttcatcagaagcgacagcggccccaccaccagcttcgagagcgccgcctgccccggctggttcctgtgcaccgccatggaggccgaccagcccgtgagcctgaccaacatgcccgacgagggcgtgatggtgaccaagttctacttccaggaggacgagtag

SEQ ID NO: 251011 - DNA, 534 bp, Artificial Sequence
  derived and/or modified sequence
atggaaatctgcagaggtctcaggagccatctgattaccttgctcctgtttctcttccattcagagacaatctgcaggccatcaggcagaaagtcctccaaaatgcaggcattccggatttgggatgtcaatcagaagacgttctacctgagaaacaaccagttggtggctggatacctgcaggggcccaacgtgaatcttgaggaaaagatagatgttgtccccatcgagccccatgcactgttcctggggattcatggaggaaagatgtgtctgagctgcgttaaatctggcgacgaaactagattgcagctggaggctgtaaatataacggacctcagcgaaaaccggaaacaggataagaggtttgcttttatccggtcagattctggacccacaacgtccttcgaatccgcagcatgcccgggttggttcctgtgcaccgctatggaagctgatcaacctgtcagtctgacaaatatgcctgatgaaggcgtcatggtaacgaaattctacttccaggaagatgagtag

SEQ ID NO: 251012 - DNA, 534 bp, Artificial Sequence
  derived and/or modified sequence
atggagatctgccggggcctgcggagccacctgatcaccctgctgctcttcctgttccacagcgagaccatctgccggcccagcggcaggaagagcagcaagatgcaggccttccgcatctgggatgtgaaccagaagaccttctacctgaggaacaaccagctggtggccggctacctgcagggccccaacgtgaacctggaggagaagattgatgtggtgcccatcgagccccacgccctcttcctgggcatccacggcggcaagatgtgcctgagctgtgtgaagtctggagatgagacccggctgcagctggaggccgtgaacatcacagacctgtctgaaaataggaagcaggacaagagatttgccttcatccgcagtgacagcggccccaccaccagctttgagagcgctgcctgccccggctggttcctgtgcacagccatggaggccgaccagcctgtgtccctgaccaacatgccagatgaaggagtgatggtgaccaagttctacttccaggaggatgaatag

SEQ ID NO: 251013 - DNA, 848 bp, Artificial Sequence
  derived and/or modified sequence
atttctttataaaccacaactctgggcccgcaatggcagtccactgccttgctgcagtcacagaatggaaatctgcagaggcctccgcagtcacctaatcactctcctcctcttcctgttccattcagagacgatctgccgaccctctgggagaaaatccagcaagatgcaagccttcagaatctgggatgttaaccagaagaccttctatctgaggaacaaccaactagttgctggatacttgcaaggaccaaatgtcaatttagaagaaaagatagatgtggtacccattgagcctcatgctctgttcttgggaatccatggagggaagatgtgcctgtcctgtgtcaagtctggtgatgagaccagactccagctggaggcagttaacatcactgacctgagcgagaacagaaagcaggacaagcgcttcgccttcatccgctcagacagtggccccaccaccagttttgagtctgccgcctgccccggttggttcctctgcacagcgatggaagctgaccagcccgtcagcctcaccaatatgcctgacgaaggcgtcatggtcaccaaattctacttccaggaggacgagtagtactgcccaggcctgcctgttcccattcttgcatggcaaggactgcagggactgccagtccccctgccccagggctcccggctatgggggcactgaggaccagccattgaggggtggaccctcagaaggcgtcacaacaacctggtcacaggactctgcctcctcttcaactgaccagcctccatgctgcctccagaatggtctttctaatgtgtgaatcagagcacagcagcccctgcacaaagccctt

SEQ ID NO: 251014 - DNA, 534 bp, Artificial Sequence
  derived and/or modified sequence
atggagatctgccggggcctgcggagccacctgatcaccctgctgctgtttctgttccattctgagaccatatgccgacctagcgggcggaagtcgtcgaaaatgcaggctttcaggatctgggatgtaaatcagaaaaccttttacctgagaaataatcagctggttgcaggctatctgcagggaccaaatgtgaacctggaagagaaaattgatgtggtgcctatcgaaccacacgcactgttcctgggaatccatggagggaagatgtgtttgtcatgcgtgaaaagcggagatgagacccgactacagctggaggcagttaacataaccgacctgtccgagaatagaaagcaggataaaaggtttgccttcattcggagtgactcagggcctactactagtttcgaatcagcagcatgccccggttggttcctgtgtacggctatggaggccgaccaacccgtatccttgacaaatatgccagacgagggcgtcatggtcacgaagttctatttccaggaggacgagtag

SEQ ID NO: 251015 - DNA, 534 bp, Artificial Sequence
  derived and/or modified sequence
atggaaatttgccgcggtcttcgcagtcacttgatcaccctgttgctcttcctctttcattccgagacgatttgccgcccttcaggacggaagtcaagcaaaatgcaggccttccgcatatgggacgtcaatcagaagaccttctatctcaggaataatcagttggtcgcagggtacctacaaggaccaaatgtcaaccttgaggagaaaatcgatgtggttccaatagaaccacacgcgttatttctgggaattcacggtggcaagatgtgtctgagttgcgtaaagagcggcgatgaaactcgccttcagctcgaggcagtgaacatcaccgatctatctgagaaccggaagcaagataaacggttcgcgtttattcggtccgattccggtcccactacaagctttgagagcgcagcgtgcccgggatggttcctgtgtacagcaatggaggccgaccaaccagtatcattgaccaacatgcccgatgagggggtgatggtaactaaattttacttccaggaggacgagtag

SEQ ID NO: 251016 - protein, 813 aa, Artificial Sequence
  derived and/or modified sequence
MSLLGDPLQALPPSAAPTGPLLAPPAGATLNRLREPLLRRLSELLDQAPEGRGWRRLAELAGSRGRLRLSCLDLEQCSLKVLEPEGSPSLCLLKLMGEKGCTVTELSDFLQAMEHTEVLQLLSPPGIKITVNPESKAVLAGQFVKLCCRATGHPFVQYQWFKMNKEIPNGNTSELIFNAVHVKDAGFYVCRVNNNFTFEFSQWSQLDVCDIPESFQRSVDGVSESKLQICVEPTSQKLMPGSTLVLQCVAVGSPIPHYQWFKNELPLTHETKKLYMVPYVDLEHQGTYWCHVYNDRDSQDSKKVEIIIDELNNLGHPDNKEQTTDQPLAKDKVALLIGNMNYREHPKLKAPLVDVYELTNLLRQLDFKVVSLLDLTEYEMRNAVDEFLLLLDKGVYGLLYYAGHGYENFGNSFMVPVDAPNPYRSENCLCVQNILKLMQEKETGLNVFLLDMCRKRNDYDDTIPILDALKVTANIVFGYATCQGAEAFEIQHSGLANGIFMKFLKDRLLEDKKITVLLDEVAEDMGKCHLTKGKQALEIRSSLSEKRALTDPIQGTEYSAESLVRNLQWAKAHELPESMCLKFDCGVQIQLGFAAEFSNVMIIYTSIVYKPPEIIMCDAYVTDFPLDLDIDPKDANKGTPEETGSYLVSKDLPKHCLYTRLSSLQKLKEHLVFTVCLSYQYSGLEDTVEDKQEVNVGKPLIAKLDMHRGLGRKTCFQTCLMSNGPYQSSAATSGGAGHYHSLQDPFHGVYHSHPGNPSNVTPADSCHCSRTPDAFISSFAHHASCHFSRSNVPVETTDEIPFSFSDRLRISEK

SEQ ID NO: 251017 - DNA, 2442 bp, Artificial Sequence
  derived and/or modified sequence
atgtctctgctgggcgatcccctgcaggctctcccgccatccgctgcaccaactggccccttgttggccccaccggcgggggccacactgaaccggctgagggaaccactgctgcggcgactgtctgaactcctcgaccaagcgccagagggaagaggctggcgcaggttagcggagctggctggttcccgcggccgcttgcgactctcctgcctcgacctggagcagtgctccctgaaagtgctggaacccgaagggagccctagcctttgcttgctcaagctgatgggtgagaagggctgcactgtgaccgagctctcggatttcctccaagctatggagcacaccgaggtgctgcagttgctctctcctcccggtatcaaaatcacggtgaaccctgagtctaaggcggtgttagcaggtcagttcgtgaagctatgttgtagggcaactggccatcccttcgtccagtatcagtggtttaaaatgaacaaagaaatccctaatggcaatacatctgagctgattttcaatgccgttcacgtgaaagatgccgggttttacgtttgccgtgtcaacaacaatttcacattcgagttttcacagtggtcccagctcgacgtttgtgacattcctgaaagctttcaacgttcggtcgatggtgtcagtgagtcaaaacttcagatctgcgtggaaccaacatcacagaaactcatgcctggttcaaccctggtgcttcagtgtgtggccgtaggatcacctatacctcattatcagtggtttaaaaacgagttaccactcacacacgagactaaaaagctttacatggtcccttacgtcgacctggaacaccaggggacctactggtgccatgtgtacaatgatagggactcgcaggacagcaagaaagtcgaaatcatcatcgatgagctcaacaatctgggacaccccgataataaggagcagaccacagaccagcctttggcgaaagataaagttgcactgctgatagggaacatgaattatcgcgagcatccaaagctcaaggctcccctcgtcgacgtctatgagctgaccaatcttttacgccagctcgacttcaaggtagtgagcctgctcgatctcactgaatacgaaatgcgcaatgcagtggatgagtttttacttctgctggacaaaggggtatacgggctcttgtattacgctggccacggctatgaaaatttcggcaacagtttcatggtgcccgtcgacgcccccaatccatacagaagcgagaactgtctgtgtgtccaaaacattttgaaactcatgcaggagaaggaaactggtctgaatgtgttcctgctcgatatgtgtcggaagaggaacgactacgacgatactatccctattctcgatgctctgaaggtgacagcgaacatagtgtttggctacgccacctgtcagggggccgaggccttcgagatacagcacagcggattagcaaacgggatcttcatgaagttcctgaaagacaggctgttggaagataagaaaattactgtgttgttagacgaagttgcggaagatatggggaagtgtcaccttacaaaaggcaagcaggcgctggaaatccggtcgagcctctctgaaaagagggccctcaccgaccctatccagggcactgaatacagcgctgagagcctggtgcgcaatctgcagtgggcgaaggctcatgaactgcccgagtccatgtgcctcaaattcgactgcggggtgcaaattcaactcgggtttgccgcagagttttccaacgtcatgatcatctatactagcatcgtgtataaacctcctgaaatcatcatgtgtgatgcttacgtgacagacttccctctcgatctggacatcgatcccaaggacgctaacaagggtactcccgaggaaaccggaagttatcttgtgtccaaggacctccctaagcactgtctgtacactagactgagctcacttcaaaagctgaaggaacatttggtgttcaccgtttgcctttcttatcagtattctggtctggaggatacagtggaagacaaacaggaggttaacgtgggcaagcctctgattgcgaagcttgacatgcatagaggactaggccggaagacttgtttccaaacttgtctgatgtccaacgggccatatcaatcatccgcggcaacatctgggggagccggccattatcatagccttcaggaccccttccatggcgtctaccacagtcatccaggtaatccgagcaacgtgaccccggctgacagctgccactgttctcggacccccgatgcttttatatctagcttcgcccaccatgcctcttgccacttctcccgatctaacgtacctgtcgagaccaccgatgaaattcctttctccttttccgatcgactgcgcatttcagagaaatag

SEQ ID NO: 251018 - DNA, 2442 bp, Artificial Sequence
  derived and/or modified sequence
atgagcctgctgggggaccccctgcaggccctgccccccagcgctgcccccaccggccccctgctggcccccccagctggggccaccctgaaccggctgcgggagcccctgctgcggcggctgtctgagctgctggaccaggcccctgagggccggggctggaggcggctggccgagctggccggcagccggggccgcctgcggctgagctgcctggacctggagcagtgcagcctgaaggtgctggagcctgagggcagccccagcctgtgcctgctgaagctgatgggagagaagggctgcaccgtgacagagctgagtgacttcctgcaggccatggagcacacagaggtgctgcagctgctgagccccccaggcatcaagatcaccgtgaaccctgagagcaaggctgtgctggccggccagtttgtgaagctgtgctgccgggccaccggccacccctttgtgcagtaccagtggttcaagatgaacaaggagatccccaatggaaacaccagcgagctgatcttcaatgctgtgcacgtgaaggatgctggcttctacgtgtgccgggtgaacaacaacttcacctttgagttcagccagtggagccagctggatgtgtgtgacatccctgagagcttccagaggtctgtggatggagtgtctgagagcaagctgcagatctgtgtggagcccaccagccagaagctgatgcctggcagcaccctggtgctgcagtgtgtggccgtgggcagccccatcccccactaccagtggttcaagaatgagctgcccctgacccatgagaccaagaagctgtacatggtgccctacgtggacctggagcaccagggcacctactggtgccacgtgtacaatgaccgggacagccaggacagcaagaaggtggagatcatcattgatgagctgaacaacctgggccacccagacaacaaggagcagaccacagaccagcccctggccaaggacaaggtggccctgctgattggcaacatgaactaccgggagcaccccaagctgaaggcccccctggtggatgtgtatgagctgaccaacctgctgcggcagctggacttcaaggtggtgtccctgctggacctgacagaatatgagatgagaaatgctgtggatgagttcctgctgctgctggacaagggcgtgtatggcctgctgtactatgccggccacggctatgaaaattttggaaacagcttcatggtgcctgtggatgcccccaacccctacagaagtgagaactgcctgtgtgtgcagaacatcctgaagctgatgcaggagaaggagaccggcctgaatgtgttcctgctggacatgtgcaggaagagaaatgactatgatgacaccatccccatcctggatgccctgaaggtgacagccaacatcgtgtttggctacgccacctgccagggcgctgaggcctttgagatccagcacagcggcctggccaacggcatcttcatgaagttcctgaaggaccggctgctggaggacaagaagatcaccgtgctgctggatgaggtggccgaggacatgggcaagtgccacctgaccaagggcaagcaggccctggagatccgcagcagcctgtctgagaagagggccctgacagaccccatccagggcacagagtacagcgctgagagcctggtgaggaacctgcagtgggccaaggcccacgagctgcctgagagcatgtgcctgaagtttgactgtggggtgcagatccagctgggctttgctgctgagttcagcaatgtgatgatcatctacaccagcatcgtgtacaagcccccagagatcatcatgtgtgatgcctacgtgacagacttccccctggacctggacatcgaccccaaggatgccaacaagggcaccccagaggagaccggcagctacctggtgtccaaggacctgcccaagcactgcctgtacacccggctgagcagcctgcagaagctgaaggagcacctggtgttcaccgtgtgcctgagctaccagtacagcggcctggaggacacagtggaggacaagcaggaggtgaatgtgggcaagcccctgattgccaagctggacatgcaccggggcctgggcaggaagacctgcttccagacctgcctgatgagcaatggcccctaccagagcagcgctgccaccagcggcggggccggccactaccacagcctgcaggaccccttccatggagtgtaccacagccaccctggcaaccccagcaatgtgaccccagctgacagctgccactgcagcaggaccccagatgccttcatcagcagctttgcccaccacgccagctgccacttcagccgcagcaatgtgcctgtggagaccacagatgagatccccttctccttcagtgaccggctgcgcatcagcgagaagtag

SEQ ID NO: 251019 - DNA, 2819 bp, Artificial Sequence
  derived and/or modified sequence
ccggggccgaggcccgtgacggggcgggcgggagccccggcagtccggggtcgccggcgagggccatgtcgctgttgggggacccgctacaggccctgccgccctcggccgcccccacggggccgctgctcgcccctccggccggcgcgaccctcaaccgcctgcgggagccgctgctgcggaggctcagcgagctcctggatcaggcgcccgagggccggggctggaggagactggcggagctggcggggagtcgcgggcgcctccgcctcagttgcctagacctggagcagtgttctcttaaggtactggagcctgaaggaagccccagcctgtgtctgctgaagttaatgggtgaaaaaggttgcacagtcacagaattgagtgatttcctgcaggctatggaacacactgaagttcttcagcttctcagccccccaggaataaagattactgtaaacccagagtcaaaggcagtcttggctggacagtttgtgaaactgtgttgccgggcaactggacatccttttgttcaatatcagtggttcaaaatgaataaagagattccaaatggaaatacatcagagcttatttttaatgcagtgcatgtaaaagatgcaggcttttatgtctgtcgagttaataacaatttcacctttgaattcagccagtggtcacagctggatgtttgcgacatcccagagagcttccagagaagtgttgatggcgtctctgaatccaagttgcaaatctgtgttgaaccaacttcccaaaagctgatgccaggcagcacattggttttacagtgtgttgctgttggaagccctattcctcactaccagtggttcaaaaatgaattaccattaacacatgagaccaaaaagctatacatggtgccttatgtggatttggaacaccaaggaacctactggtgtcatgtatataatgatcgagacagtcaagatagcaagaaggtagaaatcatcatagatgaattaaataatcttggtcatcctgataataaagagcaaacaactgaccagcctttggcgaaggacaaggttgcccttttgataggaaatatgaattaccgggagcaccccaagctcaaagctcctttggtggatgtgtacgaattgactaacttactgagacagctggacttcaaagtggtttcactgttggatcttactgaatatgagatgcgtaatgctgtggatgagtttttactccttttagacaagggagtatatgggttattatattatgcaggacatggttatgaaaattttgggaacagcttcatggtccccgttgatgctccaaatccatataggtctgaaaattgtctgtgtgtacaaaatatactgaaattgatgcaagaaaaagaaactggacttaatgtgttcttattggatatgtgtaggaaaagaaatgactacgatgataccattccaatcttggatgcactaaaagtcaccgccaatattgtgtttggatatgccacgtgtcaaggagcagaagcttttgaaatccagcattctggattggcaaatggaatctttatgaaatttttaaaagacagattattagaagataagaaaatcactgtgttactggatgaagttgcagaagatatgggtaagtgtcaccttaccaaaggcaaacaggctctagagattcgaagtagtttatctgagaagagagcacttactgatccaatacagggaacagaatattctgctgaatctcttgtgcggaatctacagtgggccaaggctcatgaacttccagaaagtatgtgtcttaagtttgactgtggtgttcagattcaattaggatttgcagctgagttttccaatgtcatgatcatctatacaagtatagtttacaaaccaccggagataataatgtgtgatgcctacgttactgattttccacttgatctagatattgatccaaaagatgcaaataaaggcacacctgaagaaactggcagctacttggtatcaaaggatcttcccaagcattgcctctataccagactcagttcactgcaaaaattaaaggaacatctagtcttcacagtatgtttatcatatcagtactcaggattggaagatactgtagaggacaagcaggaagtgaatgttgggaaacctctcattgctaaattagacatgcatcgaggtttgggaaggaagacttgctttcaaacttgtcttatgtctaatggtccttaccagagttctgcagccacctcaggaggagcagggcattatcactcattgcaagacccattccatggtgtttaccattcacatcctggtaatccaagtaatgttacaccagcagatagctgtcattgcagccggactccagatgcatttatttcaagtttcgctcaccatgcttcatgtcattttagtagaagtaatgtgccagtagagacaactgatgaaataccatttagtttctctgacaggctcagaatttctgaaaaatgacctccttgtttttgaaagttagcataattttagatgcctgtgaaatagtactgcacttacataaagtgagacattgtgaaaaggcaaatttgtatatgtagagaaagaatagtagtaactgtttcatagcaaacttcaggactttgagatgttgaaattacattatttaattacagacttcctctttctaagattttgtgaattggttgaatagttctatacaaatgaagtatggaggtgtgtatgtttatatgtatataacaaaatattttcattgtgaccactctgaagtaagagcaatgggaatggcat

SEQ ID NO: 251020 - DNA, 2442 bp, Artificial Sequence
  derived and/or modified sequence
atgagcctgctgggcgaccccctgcaggccctgccccccagcgccgctccaaccgggccgctgttggccccaccagcaggcgcgacactgaaccggctccgggaacccctactccggagactcagcgagctgttggatcaggcccccgaagggagagggtggcgacgactggccgagctcgcaggctcacggggcagacttcgcttgtcatgtctggatctggaacagtgtagcctcaaagtgctggagcctgagggaagccccagcctttgcctgctcaagctgatgggagaaaagggatgcaccgtgactgaactgagtgacttccttcaagctatggaacatactgaggtgttacagcttttatctccgcctgggataaaaataacagtgaacccagagagtaaggctgtgctggccgggcagtttgtcaagctgtgctgtcgagcaacaggccacccttttgtccaataccagtggtttaagatgaataaagagatccccaacggaaacacaagtgaattgatttttaatgctgtgcacgttaaggacgccggattctacgtgtgcagggttaataataatttcacgttcgagttctcgcagtggagtcagctcgacgtatgcgacatcccggaatcgttccagaggtcagtggatggagttagcgagagtaagttgcagatatgtgtggagccaacatcacaaaagctcatgcctggatcaactttggtcttacagtgcgtcgccgtgggctcgccaattccacactatcaatggtttaaaaacgagttgccattgacccatgagacgaagaaactgtatatggtcccatacgtcgacctggagcatcaaggtacctactggtgccatgtgtacaacgatagagatagtcaagacagcaagaaagtggagataatcattgatgagctaaataacctgggccacccagacaataaggagcagacaacagaccagccgctggccaaggataaggtggccctgctgatcggaaatatgaattaccgcgaacatcccaagcttaaggccccacttgtagacgtgtatgaactaaccaaccttcttagacaacttgatttcaaggttgtttcactgttggatctgacagagtacgagatgagaaatgccgtagacgagttcttgctccttctcgacaaaggtgtatacggactcctttattatgcaggacacggttacgagaattttggtaacagctttatggtgccagttgacgctcctaatccgtatagaagcgagaactgtctatgtgttcagaatattctcaaacttatgcaagagaaggagaccggtctgaacgtgtttctcctggatatgtgccggaagcgaaatgactacgatgataccattcccattctggatgccctgaaagtgacagcaaacatcgtgtttggatatgcaacatgtcagggagccgaagcctttgagatccagcacagcggcctcgcaaacgggatcttcatgaaatttctgaaggatcggctactcgaagacaaaaagattacagttctacttgacgaggtggccgaggatatgggcaaatgtcatctgactaagggcaaacaggctctggagatacggtccagcttgagtgagaagcgagccctgaccgacccaattcaaggcacagaatactcagcagagtcattggtccggaatcttcaatgggctaaggcccacgagctcccagagagcatgtgcttgaaattcgactgtggcgttcagatccaactcggcttcgcagccgagttctccaatgtcatgatcatctatacatcaatcgtctataagcctccggagattattatgtgcgacgcctacgtgacagattttcccttggatctcgacatcgatcctaaggacgcaaacaaaggtactcctgaggagactggaagctacctggtttccaaagatttgccgaagcattgtctctacactaggctcagctccttgcaaaagctgaaagagcatttagtgtttactgtttgtctcagctaccagtatagcggactggaggacaccgtggaggacaaacaggaagttaacgtcggtaagccacttatcgccaaactggacatgcacaggggactcggccggaaaacctgtttccagacatgtctcatgtcaaacggcccttaccaatccagcgctgccacgtcagggggcgctggacactaccattcactacaggacccctttcatggggtgtatcacagtcaccccggcaacccctcaaacgtgacaccagcagacagttgccactgttccaggactcctgacgccttcatttcatcatttgcccaccatgcctcatgccacttctctcgcagcaacgtccccgtagaaactaccgacgagattccattttctttcagtgatcggctccgcatctccgagaagtag

SEQ ID NO: 251021 - DNA, 2442 bp, Artificial Sequence
  derived and/or modified sequence
atgagtctgttgggtgatcccctccaggcactcccaccgtccgctgctcccacaggccctcttctcgcgccaccagctggagccactttgaatagattaagggagcccttgctcagacggctctcagagctcctggaccaggcaccagagggtaggggctggaggcgactggctgaactggccggttcccgcggaagactccggctgtcttgtctagacttggaacagtgctccttgaaagtcttggaaccagaaggaagccctagcctgtgtctactgaagctcatgggcgaaaaggggtgtaccgtcaccgaactgtccgattttctgcaggccatggagcatactgaggtgttacagttactgtcacctccgggtatcaaaatcactgttaacccggagtcgaaggccgtcctggcaggacaattcgtcaagttatgttgccgggcaacagggcaccctttcgtccagtaccaatggtttaagatgaataaagaaatccccaacggaaacacaagcgagctgatttttaatgcagtccacgtgaaagatgccggattttatgtgtgcagggtcaataataatttcaccttcgagttcagtcagtggagccagttggacgtttgtgatatacccgagagctttcagcgatcagttgatggggtgtcggaaagcaagctgcaaatctgtgtggagcctacaagtcagaaactgatgccagggtccactttggttctgcagtgtgttgcagtgggatcccctatcccacactaccagtggtttaaaaatgagctgcccctgacccatgagaccaaaaagctctacatggtgccctatgttgacctagagcatcagggaacttactggtgccatgtatataatgatagagatagtcaggactctaagaaagtggaaataataatcgatgaactgaacaatctggggcaccctgataacaaggaacagaccacagatcaaccacttgccaaggacaaggtggctttgttgatcggcaacatgaattaccgcgagcatcctaagcttaaggctcctcttgtggacgtatatgagctgacgaacttgctccgacagttagactttaaggtcgtgtcccttcttgacctcacagaatacgaaatgagaaatgccgtggatgaattcttattactcctggacaagggagtctacggcctcctatactatgctgggcatggttacgaaaactttggtaatagctttatggtgccagtcgacgcccctaacccctaccggtcggagaactgcctatgcgttcagaatattctgaaactgatgcaggagaaggaaaccggcctgaatgtgtttttacttgacatgtgtagaaaacgcaatgactatgacgatactattcccattcttgatgctttgaaggtcaccgcaaacattgtgttcgggtacgcgacctgtcagggcgctgaagcttttgaaattcagcactcaggactagcgaatgggatcttcatgaaatttctgaaggaccgcctgctggaggataaaaagatcaccgtgctccttgatgaggtcgcggaggatatgggaaagtgtcacctgacaaagggcaagcaggctctggaaattcgtagctccctctctgagaaacgggcacttactgacccaattcagggtactgagtactccgccgaaagtctagtcaggaatctccaatgggcgaaagcccacgaactgccagaatcgatgtgtttgaagtttgactgcggcgtgcagattcagctgggttttgccgctgaattcagcaacgtgatgataatttacactagcatcgtatataagccaccggaaataataatgtgtgacgcctacgtgacggacttcccccttgacctcgacatagatcctaaggacgctaataagggaacaccagaggagacaggctcgtacctcgtctccaaggatcttccaaagcactgcttgtacacaagattgtcttcgctgcagaagctgaaggaacatttggtattcacagtgtgtctgagttatcagtattctggacttgaggacacagtggaagataagcaggaggtgaatgtagggaagccgttaatcgctaagttagacatgcaccgcggacttggccgtaagacctgttttcagacgtgcttgatgtccaacgggccatatcaaagttctgccgctacttccggtggcgctggccattatcactcactccaagaccccttccatggcgtgtaccattctcatccgggaaatccatctaatgtgacaccagccgactcttgccattgcagtaggacacccgatgcctttatcagttcatttgcacatcacgcttcgtgccatttctctagaagcaatgtgcctgtggagacaaccgacgagattccgtttagtttctctgacaggttacgtatctctgagaagtag

SEQ ID NO: 251022 - DNA, 2442 bp, Artificial Sequence
  derived and/or modified sequence
atgagcctgctgggcgaccccctgcaggccctgccccccagcgccgcccccaccggccccctgctggccccccccgccggcgccaccctgaacagactgagagagcccctgctgagaagactgagcgagctgctggaccaggcccccgagggcagaggctggagaagactggccgagctggccggcagcagaggcagactgagactgagctgcctggacctggagcagtgcagcctgaaggtgctggagcccgagggcagccccagcctgtgcctgctgaagctgatgggcgagaagggctgcaccgtgaccgagctgagcgacttcctgcaggccatggagcacaccgaggtgctgcagctgctgagcccccccggcatcaagatcaccgtgaaccccgagagcaaggccgtgctggccggccagttcgtgaagctgtgctgcagagccaccggccaccccttcgtgcagtaccagtggttcaagatgaacaaggagatccccaacggcaacaccagcgagctgatcttcaacgccgtgcacgtgaaggacgccggcttctacgtgtgcagagtgaacaacaacttcaccttcgagttcagccagtggagccagctggacgtgtgcgacatccccgagagcttccagagaagcgtggacggcgtgagcgagagcaagctgcagatctgcgtggagcccaccagccagaagctgatgcccggcagcaccctggtgctgcagtgcgtggccgtgggcagccccatcccccactaccagtggttcaagaacgagctgcccctgacccacgagaccaagaagctgtacatggtgccctacgtggacctggagcaccagggcacctactggtgccacgtgtacaacgacagagacagccaggacagcaagaaggtggagatcatcatcgacgagctgaacaacctgggccaccccgacaacaaggagcagaccaccgaccagcccctggccaaggacaaggtggccctgctgatcggcaacatgaactacagagagcaccccaagctgaaggcccccctggtggacgtgtacgagctgaccaacctgctgagacagctggacttcaaggtggtgagcctgctggacctgaccgagtacgagatgagaaacgccgtggacgagttcctgctgctgctggacaagggcgtgtacggcctgctgtactacgccggccacggctacgagaacttcggcaacagcttcatggtgcccgtggacgcccccaacccctacagaagcgagaactgcctgtgcgtgcagaacatcctgaagctgatgcaggagaaggagaccggcctgaacgtgttcctgctggacatgtgcagaaagagaaacgactacgacgacaccatccccatcctggacgccctgaaggtgaccgccaacatcgtgttcggctacgccacctgccagggcgccgaggccttcgagatccagcacagcggcctggccaacggcatcttcatgaagttcctgaaggacagactgctggaggacaagaagatcaccgtgctgctggacgaggtggccgaggacatgggcaagtgccacctgaccaagggcaagcaggccctggagatcagaagcagcctgagcgagaagagagccctgaccgaccccatccagggcaccgagtacagcgccgagagcctggtgagaaacctgcagtgggccaaggcccacgagctgcccgagagcatgtgcctgaagttcgactgcggcgtgcagatccagctgggcttcgccgccgagttcagcaacgtgatgatcatctacaccagcatcgtgtacaagccccccgagatcatcatgtgcgacgcctacgtgaccgacttccccctggacctggacatcgaccccaaggacgccaacaagggcacccccgaggagaccggcagctacctggtgagcaaggacctgcccaagcactgcctgtacaccagactgagcagcctgcagaagctgaaggagcacctggtgttcaccgtgtgcctgagctaccagtacagcggcctggaggacaccgtggaggacaagcaggaggtgaacgtgggcaagcccctgatcgccaagctggacatgcacagaggcctgggcagaaagacctgcttccagacctgcctgatgagcaacggcccctaccagagcagcgccgccaccagcggcggcgccggccactaccacagcctgcaggaccccttccacggcgtgtaccacagccaccccggcaaccccagcaacgtgacccccgccgacagctgccactgcagcagaacccccgacgccttcatcagcagcttcgcccaccacgccagctgccacttcagcagaagcaacgtgcccgtggagaccaccgacgagatccccttcagcttcagcgacagactgagaatcagcgagaagtag

SEQ ID NO: 251023 - protein, 41 aa, Artificial Sequence
  derived and/or modified sequence
MVSALRGAPLIRVHSSPVSSPSVSGPAALVSCLSSQSSALS

SEQ ID NO: 251024 - protein, 215 aa, Artificial Sequence [sequence omitted]

SEQ ID NO: 251025 - protein, 208 aa, Artificial Sequence
  derived and/or modified sequence
MIQEDHEGSQDGGVHSSPVSSPSVSGPRRLVSCLSSQSSALSQSGGGSTSAAGIEARSRALRRRWCPAGIMLLALVCLLSCLLPSSEAKLYGRCELARVLHDFGLDGYRGYSLADWVCLAYFTSGFNAAALDYEADGSTNNGIFQINSRRWCSNLTPNVPNVCRMYCSDLLNPNLKDTVICAMKITQEPQGLGYWEAWRHHCQGKDLT

SEQ ID NO: 251026 - DNA, 648 bp, Artificial Sequence
  derived and/or modified sequence
atggtgagcgccctgagaggcgcccccctgatcagagtgcacagcagccccgtgagcagccccagcgtgagcggccccagaagactggtgagctgcctgagcagccagagcagcgccctgagccagagcggcggcggcagcaccagcgccgccggcatcgaggccagaagcagagccctgagaagaagatggtgccccgccggcatcatgctgctggccctggtgtgcctgctgagctgcctgctgcccagcagcgaggccaagctgtacggcagatgcgagctggccagagtgctgcacgacttcggcctggacggctacagaggctacagcctggccgactgggtgtgcctggcctacttcaccagcggcttcaacgccgccgccctggactacgaggccgacggcagcaccaacaacggcatcttccagatcaacagcagaagatggtgcagcaacctgacccccaacgtgcccaacgtgtgcagaatgtactgcagcgacctgctgaaccccaacctgaaggacaccgtgatctgcgccatgaagatcacccaggagccccagggcctgggctactgggaggcctggagacaccactgccagggcaaggacctgaccgagtgggtggacggctgcgacttctag

SEQ ID NO: 251027 - DNA, 627 bp, Artificial Sequence
  derived and/or modified sequence
atgatccaggaggaccacgagggcagccaggacggcggcgtgcacagcagccccgtgagcagccccagcgtgagcggccccagaagactggtgagctgcctgagcagccagagcagcgccctgagccagagcggcggcggcagcaccagcgccgccggcatcgaggccagaagcagagccctgagaagaagatggtgccccgccggcatcatgctgctggccctggtgtgcctgctgagctgcctgctgcccagcagcgaggccaagctgtacggcagatgcgagctggccagagtgctgcacgacttcggcctggacggctacagaggctacagcctggccgactgggtgtgcctggcctacttcaccagcggcttcaacgccgccgccctggactacgaggccgacggcagcaccaacaacggcatcttccagatcaacagcagaagatggtgcagcaacctgacccccaacgtgcccaacgtgtgcagaatgtactgcagcgacctgctgaaccccaacctgaaggacaccgtgatctgcgccatgaagatcacccaggagccccagggcctgggctactgggaggcctggagacaccactgccagggcaaggacctgacctag

SEQ ID NO: 251028 - DNA, 648 bp, Artificial Sequence
  derived and/or modified sequence
atggtctctgccttaagaggcgctccccttatccgggtgcattccagtcccgtgtcctcaccttcagttagcggccctcgccgactggtgagctgcctcagtagccaatcaagcgctctgtcacagtccggggggggctcgacttccgccgcggggatcgaggctagatctagagcactgcgtagaagatggtgtcccgccggaataatgttgttagcactcgtgtgtcttcttagctgcctcctcccctccagtgaggcgaaactctatgggcggtgcgaactggctcgagtcctgcacgatttcgggttggacggctatcgcgggtactccctggcagattgggtgtgcctcgcatacttcacgtccggttttaatgccgccgcacttgactatgaggctgacggtagtacaaacaacgggatatttcagattaatagccgaagatggtgtagtaatttgactcccaacgtgccaaacgtctgtaggatgtattgctccgacctgctgaatcctaacttaaaggataccgtgatttgcgccatgaaaatcacacaggagccacagggcctggggtactgggaagcctggcgccaccattgtcaggggaaggatctgactgagtgggtggatgggtgcgatttttag

SEQ ID NO: 251029 - DNA, 627 bp, Artificial Sequence
  derived and/or modified sequence
atgatccaggaggaccatgagggaagccaggatggtggagtgcactcctcccccgtcagcagcccctctgtgagtgggcctaggcgactcgtatcttgcctttccagccagagcagtgccttgagccaatccggagggggctccacctctgccgcaggcatagaagcgcgaagtcgggctctcaggcggaggtggtgccctgccggaataatgctcctggcactcgtgtgcctactcagctgcctgcttccatcctcagaggcaaagttatacgggcgctgcgagttagctcgcgtcctgcatgattttggattagacggctataggggatacagcctggctgactgggtctgtcttgcttacttcacgtcaggttttaatgcggctgcgcttgattatgaggcggacggatctaccaataatggaatcttccaaatcaactccagaagatggtgttcgaacctgacccctaatgtccctaatgtctgccggatgtactgcagcgatttgctgaatccgaacttaaaggacacagtgatctgcgcaatgaaaatcactcaggagcctcaaggccttgggtactgggaggcctggcgccatcattgccaggggaaggacctgacatag

SEQ ID NO: 251030 - DNA, 648 bp, Artificial Sequence
  derived and/or modified sequence
atggtgtctgccctgcggggggcccccctcatccgggtgcacagcagccctgtgagcagccccagcgtgtctggcccccggcggctggtgtcctgcctgagcagccagagcagcgccctgagccagagcggcggcggcagcaccagcgctgctggcatcgaggcccggagccgggccctgcggcggcgctggtgcccagctggcatcatgctgctggccctggtgtgcctgctgagctgcctgctgcccagcagcgaggccaagctgtatggccgctgtgagctggcccgggtgctgcatgactttggcctggatggctaccggggctacagcctggccgactgggtgtgcctggcctacttcaccagcggcttcaatgctgctgccctggactatgaagcagatggcagcaccaacaacggcatcttccagatcaacagccgccgctggtgcagcaacctgaccccaaatgtgcccaacgtgtgcaggatgtactgcagcgacctgctgaaccccaacctgaaggacaccgtcatctgtgccatgaagatcacccaggagccccagggcctgggctactgggaggcctggaggcaccactgccagggcaaggacctgacagagtgggtggatggctgtgacttctag

SEQ ID NO: 251031 - DNA, 627 bp, Artificial Sequence
  derived and/or modified sequence
atgatccaggaggaccacgagggcagccaggatggaggagtgcacagcagccctgtgagcagccccagcgtgtctggcccccggcggctggtgtcctgcctgagcagccagagcagcgccctgagccagagcggcggcggcagcaccagcgctgctggcatcgaggcccggagccgggccctgcggcggcgctggtgcccagctggcatcatgctgctggccctggtgtgcctgctgagctgcctgctgcccagcagcgaggccaagctgtatggccgctgtgagctggcccgggtgctgcatgactttggcctggatggctaccggggctacagcctggccgactgggtgtgcctggcctacttcaccagcggcttcaatgctgctgccctggactatgaagcagatggcagcaccaacaacggcatcttccagatcaacagccgccgctggtgcagcaacctgacccccaacgtgcccaacgtgtgcaggatgtactgcagcgacctgctgaaccccaacctgaaggacaccgtcatctgtgccatgaagatcacccaggagccccagggcctgggctactgggaggcctggaggcaccactgccagggcaaggacctgacctag

SEQ ID NO: 251032 - DNA, 648 bp, Artificial Sequence
  derived and/or modified sequence
atggtgagcgccctgcggggcgcccccctgatccgggtgcacagcagcccagtgtctagcccaagtgtgtccggcccccgtcgcctggtatcctgtctgtcatcccagtcatcggcactgtcccagagcgggggcggaagcacctccgctgccggcatcgaggccagatcccgagcgctgagaagacggtggtgcccagcagggattatgctgctcgcgctggtatgtcttctgagttgcttattaccatcatccgaagccaaactctatggcaggtgtgagttggcccgagttctccacgactttgggcttgatggttatagaggttactctctggcagactgggtgtgccttgcctatttcacctcaggctttaatgcagcggcccttgattacgaggcagacggatcaactaacaatggcattttccagatcaacagtcggcgatggtgtagtaacttaactcccaacgttcccaatgtgtgccgtatgtattgctccgacttactcaacccaaacctgaaggatactgttatctgtgctatgaaaatcacacaggaaccccaggggctgggatactgggaagcctggagacatcattgccagggcaaggatctgactgaatgggttgacggatgtgacttctag

SEQ ID NO: 251033 - DNA, 627 bp, Artificial Sequence
  derived and/or modified sequence
atgatccaggaggaccacgagggcagccaggacggcggcgtgcacagcagtcccgtcagcagccccagcgtgtcagggccacgaaggcttgtcagctgcctttccagccagtcttccgccctcagtcaatccggcggcggaagcaccagtgccgccgggatcgaggcccggtccagagcactgcggcgtcggtggtgccctgcaggtattatgctcctcgcactggtctgcttgttgtcttgtttgttgcctagttcagaagcaaagctttacgggaggtgtgagttggcccgggtcctccatgacttcggtctcgacggttaccgaggctactctctcgccgattgggtgtgtttggcttactttactagtgggtttaacgccgccgctttagattacgaggccgatgggtctacaaataatggtatctttcagattaacagccgtaggtggtgtagtaacctgactccaaatgtccccaacgtctgtagaatgtattgcagtgatctgctgaacccaaatcttaaggacacagtgatttgcgctatgaagatcactcaagagccccaagggcttggatattgggaggcctggcgccaccactgtcaaggcaaagaccttacgtag

SEQ ID NO: 251034 - DNA, 648 bp, Artificial Sequence
  derived and/or modified sequence
atggtttccgcactaaggggggctcccctcattcgagtgcatagctcacctgtttcttctcctagtgttagcggtccccgtagactcgtgtcatgcctgtcctcacagtccagcgccctgagccaatctggtggaggctcaacttcagccgcagggatcgaggctcgcagcagggcgctgaggagacgatggtgtccagccggaatcatgctgctagccctggtgtgtctgctgtcctgtcttcttccatcatctgaagccaaactatacgggagatgtgaacttgctcgcgttctgcacgatttcggactggacggctacagaggctattcactggcggactgggtgtgccttgcctatttcacttctggatttaatgcggctgccctggactacgaagcagatggctccacaaacaatggcatctttcagattaatagcaggagatggtgctccaatttaacacccaatgtgccgaacgtttgtagaatgtactgttctgaccttctaaatccgaacttgaaggacactgtaatctgcgctatgaagattacacaggagccacagggtctgggctattgggaggcatggagacaccactgtcagggcaaggatttgacagaatgggtcgacgggtgtgacttctag

SEQ ID NO: 251035 - DNA, 627 bp, Artificial Sequence
  derived and/or modified sequence
atgattcaggaagatcacgagggaagtcaagatggcggagttcatagctctcccgtgtcttcacccagcgtttccggacctagaaggcttgtgagctgcctgagttcgcagtctagcgctctaagtcagagcggcggagggtccactagcgccgctggcattgaggccaggtccagagcactgcgacgaagatggtgtcctgcgggaataatgctattagcactagtttgcctgctgtcgtgcctgctgcctagtagcgaagccaagttgtacggaagatgcgagctggcgagggtgcttcacgacttcgggctggacgggtatcgcggttatagtctggccgattgggtttgtcttgcatacttcacttccggttttaatgcagccgctctggattatgaggccgatggtagcacaaacaatgggatttttcaaattaacagtaggagatggtgttctaacctgacccccaatgttcctaacgtgtgccggatgtattgctccgatctgctgaatcctaacttaaaggatacggtcatctgcgcgatgaagattacccaggaaccacagggacttggctactgggaggcctggagacaccactgtcagggaaaagacctgacctag

SEQ ID NO: 251036 - DNA, 817 bp, Artificial Sequence
  derived and/or modified sequence
ggcaaggttgtgggggacatcttgagctgaagcagggttttgagccactgctgctgctgccattgtcaccatggtctcagctctgcggggagcacccctgatcagggtgcactcaagccctgtttcttctccttctgtgagtggaccacggaggctggtgagctgcctgtcatcccaaagctcagctctgagccagagtggtggtggctccacctctgccgccggcatagaagccaggagcagggctctcagaaggcggtggtgcccagctgggatcatgttgttggccctggtctgtctgctcagctgcctgctaccctccagtgaggccaagctctacggtcgttgtgaactggccagagtgctacatgacttcgggctggacggataccggggatacagcctggctgactgggtctgccttgcttatttcacaagcggtttcaacgcagctgctttggactacgaggctgatgggagcaccaacaacgggatcttccagatcaacagccggaggtggtgcagcaacctcaccccgaacgtccccaacgtgtgccggatgtactgctcagatttgttgaatcctaatctcaaggataccgttatctgtgccatgaagataacccaagagcctcagggtctgggttactgggaggcctggaggcatcactgccagggaaaagacctcactgaatgggtggatggctgtgacttctaggatggacggaaccatgcacagcaggctgggaaatgtggtttggttcctgacctaggcttgggaagacaagccagcgaataaaggatggttgaacgtgaa

SEQ ID NO: 251037 - DNA, 744 bp, Artificial Sequence
  derived and/or modified sequence
ggacctcgaaggggcagttatggtgggagccatccaaggtgtcacagggctgggcttttcatttaacaaatttgttctgatggatgtgtatagaatagcttggaagagtggttgagacatgatacaagaagaccatgaaggaagccaggatggaggggtgcactcaagccctgtttcttctccttctgtgagtggaccacggaggctggtgagctgcctgtcatcccaaagctcagctctgagccagagtggtggtggctccacctctgccgccggcatagaagccaggagcagggctctcagaaggcggtggtgcccagctgggatcatgttgttggccctggtctgtctgctcagctgcctgctaccctccagtgaggccaagctctacggtcgttgtgaactggccagagtgctacatgacttcgggctggacggataccggggatacagcctggctgactgggtctgccttgcttatttcacaagcggtttcaacgcagctgctttggactacgaggctgatgggagcaccaacaacgggatcttccagatcaacagccggaggtggtgcagcaacctcaccccgaacgtccccaacgtgtgccggatgtactgctcagatttgttgaatcctaatctcaaggataccgttatctgtgccatgaagataacccaagagcctcagggtctgggttactgggaggcctggaggcatcactgccagggaaaagacctcactga

SEQ ID NO: 251038 - protein, 257 aa, Artificial Sequence
  derived and/or modified sequence
MPASMFSIDNILAARPRCKDSVLPVAHSAAAPVVFPALHGDSLYGASGGASSDYGAFYPRPVAPGGAGLPAAVSGSRLGYNNYFYGQLHVQAAPVGPACCGAVPPLGAQQCSCVPTPPGYEGPGSVLVSPVPHQMLPYMNVGTLSRTELQLLNQLHCRRKRRHRTIFTDEQLEALENLFQETKYPDVGTREQLARKVHLREEKVEVWFKNRRAKWRRQKRSSSEESENAEKWNKTSSSKASPEKREEEGKSDLDSDS

SEQ ID NO: 251039 - DNA, 1217 bp, Artificial Sequence
  derived and/or modified sequence
agggggcggggaggggcgcagggctgcgcgctcgccggcgctctctttcggtttggtcggcggctggaggagagtggacccccccactttaaggctctgtcctcggcgcgttcccgccgccccccggtcccgacgcggggctcggggatgcccgccagcatgttcagcatcgacaacatcctagccgcccggccgcgctgcaaggactcggtgttgccggtggcgcacagcgcggcggctcccgtcgtcttcccggccctgcacggggactcgctctacggcgccagcggcggcgcctcctcggactatggcgccttctacccgcgccccgtggcccccggcggcgcgggcctcccggccgcggtcagcggctcccgcctcggctacaacaactacttctacgggcagctgcacgtgcaggcggcgcccgtgggcccggcctgctgcggggccgtgccgccgctgggcgcccagcagtgctcctgcgtcccgacgcccccaggctacgagggccccggttcggtgctggtgtccccggtaccgcaccagatgctgccctacatgaacgtgggcacgctgtcgcgcaccgagctgcagcttctcaaccagctgcactgtcggcggaagcggcggcaccgcaccatcttcactgacgagcagctcgaagctctcgagaacctcttccaggagaccaagtacccggacgtgggcacgcgcgagcagctggcccggaaagtgcacctccgcgaggagaaagtggaggtctggtttaagaaccgccgcgccaaatggaggcggcagaagcggtcctcatcagaggagtcggagaacgcggagaagtggaacaagacgtcgtcgtcgaaggcgtcaccggagaagagggaagaggaaggtaaaagcgatttggactcggacagctgacggccgcgggacacttgcccgtattacttacctaactcgaaggacttgcacagacagacgatgctactttcttgcacacgcgctgccttgcgggagggggtcgagaaagaggaacgaggagctgtaaatagtgtacagagccgggagggtcggcgtctggggtcagggcgcgcacagcccagcagcccgaggccgcccgcgactagcccccaccgtagtatttatagttaaattaagggtgacagtacaataaagtgatggcgatgtaaaaaaaaaaaaaaaaaaaaaaaaaaaaa

SEQ ID NO: 251040 - DNA, 774 bp, Artificial Sequence
  derived and/or modified sequence
atgcccgccagcatgttcagcatcgacaacatcctggccgccagacccagatgcaaggacagcgtgctgcccgtggcccacagcgccgccgcccccgtggtgttccccgccctgcacggcgacagcctgtacggcgccagcggcggcgccagcagcgactacggcgccttctaccccagacccgtggcccccggcggcgccggcctgcccgccgccgtgagcggcagcagactgggctacaacaactacttctacggccagctgcacgtgcaggccgcccccgtgggccccgcctgctgcggcgccgtgccccccctgggcgcccagcagtgcagctgcgtgcccaccccccccggctacgagggccccggcagcgtgctggtgagccccgtgccccaccagatgctgccctacatgaacgtgggcaccctgagcagaaccgagctgcagctgctgaaccagctgcactgcagaagaaagagaagacacagaaccatcttcaccgacgagcagctggaggccctggagaacctgttccaggagaccaagtaccccgacgtgggcaccagagagcagctggccagaaaggtgcacctgagagaggagaaggtggaggtgtggttcaagaacagaagagccaagtggagaagacagaagagaagcagcagcgaggagagcgagaacgccgagaagtggaacaagaccagcagcagcaaggccagccccgagaagagagaggaggagggcaagagcgacctggacagcgacagctag

SEQ ID NO: 251041 - DNA, 774 bp, Artificial Sequence
  derived and/or modified sequence
atgcccgcctccatgtttagtatagataacatccttgccgcgaggccacgttgtaaggattccgtactcccagtcgcccattctgcggctgcaccagttgtttttccagctctccacggggattcactgtatggagcaagcggcggtgcatcatccgattatggcgctttttacccaaggccagtcgcccccgggggtgctgggctgcctgcagctgtgtcgggttcacggctgggctacaacaattatttctatggccagcttcacgtccaggcagcacctgttggaccggcttgctgtggtgcagtgccacctcttggagctcaacaatgctcatgtgttccgaccccaccaggctacgagggccctggaagcgtgttggtgtcacccgtcccccaccagatgctcccttatatgaatgtggggactctatcaagaaccgagctccaattactgaatcagttacattgtagacgaaagaggcgccaccgaacaatttttaccgacgagcagctagaggctctggaaaatctcttccaggaaacgaagtatccagacgtcgggacacgagagcagttagctagaaaggttcacctgagggaagaaaaagtggaagtctggttcaagaaccgtcgcgccaaatggagaagacaaaaaaggagctcgtccgaggagtcagagaacgctgagaaatggaataagactagttcaagcaaggcctctcccgaaaaaagagaggaagaaggaaagtctgacctagactcagatagctag

SEQ ID NO: 251042 - DNA, 1259 bp, Artificial Sequence
  derived and/or modified sequence
cccgcgggttgagttcagcgaacgctgcggctaggggagggcgggaggagggagagcggacgcagggggcggggaggggcgcagggctgcgcgctcgccggcgctctctttcggtttggtcggcggctggaggagagtggacccccccactttaaggctctgtcctcggcgcgttcccgccgccccccggtcccgacgcggggctcggggatgcccgccagcatgttcagcatcgacaacatcctagccgcccggccgcgctgcaaggactcggtgttgccggtggcgcacagcgcggcggctcccgtcgtcttcccggccctgcacggggactcgctctacggcgccagcggcggcgcctcctcggactatggcgccttctacccgcgccccgtggcccccggcggcgcgggcctcccggccgcggtcagcggctcccgcctcggctacaacaactacttctacgggcagctgcacgtgcaggcggcgcccgtgggcccggcctgctgcggggccgtgccgccgctgggcgcccagcagtgctcctgcgtcccgacgcccccaggctacgagggccccggttcggtgctggtgtccccggtaccgcaccagatgctgccctacatgaacgtgggcacgctgtcgcgcaccgagctgcagcttctcaaccagctgcactgtcggcggaagcggcggcaccgcaccatcttcactgacgagcagctcgaagctctcgagaacctcttccaggagaccaagtacccggacgtgggcacgcgcgagcagctggcccggaaagtgcacctccgcgaggagaaagtggaggtctggtttaagaaccgccgcgccaaatggaggcggcagaagcggtcctcatcagaggagtcggagaacgcggagaagtggaacaagacgtcgtcgtcgaaggcgtcaccggagaagagggaagaggaaggtaaaagcgatttggactcggacagctgacggccgcgggacacttgcccgtattacttacctaactcgaaggacttgcacagacagacgatgctactttcttgcacacgcgctgccttgcgggagggggtcgagaaagaggaacgaggagctgtaaatagtgtacagagccgggagggtcggcgtctggggtcagggcgcgcacagcccagcagcccgaggccgcccgcgactagcccccaccgtagtatttatagttaaattaagggtgacagtacaataaagtgatggcgatgtagacgggc

SEQ ID NO: 251043 - DNA, 774 bp, Artificial Sequence
  derived and/or modified sequence
atgcctgcctccatgttcagcattgacaacatcctggccgcccggccccgctgcaaggacagcgtgctgcctgtggcccacagcgctgctgcccctgtggtgtttcctgccctgcatggagacagcctgtatggagccagcggcggggccagcagtgactatggagccttctaccccaggcctgtggcccctgggggcgccggcctgcctgctgctgtgtctggcagccggctgggctacaacaactacttctacggccagctgcacgtgcaggccgcccctgtgggccctgcctgctgcggggctgtgccccccctgggcgcccagcagtgcagctgtgtgcccaccccacctggctatgagggccctggctctgtgctggtgtcccctgtgccccaccagatgctgccctacatgaatgtgggcaccctgagcaggacagagctgcagctgctgaaccagctgcactgcaggaggaagagaagacacaggaccatcttcacagatgagcagctggaggccctggagaacctcttccaggagaccaagtacccagatgtgggcacccgggagcagctggccaggaaggtgcacctgcgggaggagaaggtggaggtgtggttcaagaacagaagagccaagtggaggcggcagaagaggagcagcagcgaggagagtgaaaatgctgagaagtggaacaagaccagcagcagcaaggccagccctgagaagcgggaggaggagggcaagagtgacctggacagcgacagctag

SEQ ID NO: 251044 - DNA, 774 bp, Artificial Sequence
  derived and/or modified sequence
atgcccgccagcatgttcagcatcgacaacatcctggccgcccggcccaggtgcaaagattcagttctacccgtggctcatagcgccgctgccccagtcgtgttccccgcactgcacggtgatagcctatacggagctagtggcggcgcatcaagtgactacggcgctttctatccccgacctgtcgcccccggaggggctggcttgccggccgcggtatcaggttctcgactgggctacaacaattatttctacggccaactgcatgtgcaggctgcaccggtgggccctgcgtgctgtggagcagtgcccccattgggcgcccagcagtgttcgtgcgttccaacgccccccggttacgaggggccagggagtgtgctcgtttcgcccgtaccccatcagatgctgccatatatgaatgtgggaactctgagcagaaccgaacttcagctgctcaatcaactacattgtcggcggaagaggcgtcacagaactattttcacagacgaacagctggaagctctggagaaccttttccaggagaccaaatatcctgacgtgggaacacgggaacaactggctcgcaaagtacaccttcgcgaggagaaggtggaggtgtggttcaaaaaccgacgcgctaagtggaggagacaaaagaggagctctagcgaagaaagtgaaaacgctgagaagtggaataagacatcatcatcaaaagcgtcccctgagaagagggaagaagaaggaaaatcagatctagacagtgattcctag

SEQ ID NO: 251045 - DNA, 774 bp, Artificial Sequence
  derived and/or modified sequence
atgcccgcatccatgttctccatcgacaatatcctcgcggcaagacccaggtgcaaggactcagtcttgccggttgcacatagtgccgctgcccctgttgtgtttcctgctttgcacggggatagcctatatggggcttcgggcggtgcaagtagcgattacggggcattctaccctaggcccgtcgccccaggaggagccggtctgcctgccgctgtcagcggcagccgtcttggctacaataattacttctacgggcagttacacgtgcaagctgcacctgtggggcctgcttgctgtggcgcagtgcctcccctcggcgcacagcagtgcagttgtgtccccactcccccaggctatgagggacctggttccgtactcgtgtcacctgtgcctcaccaaatgctgccatacatgaacgtgggcaccctgagccggaccgaactgcagttgctgaaccagcttcattgcaggaggaagcggaggcacagaacaattttcacggatgaacagcttgaagccctcgagaacctgtttcaggaaaccaagtaccctgacgtcggcacacgcgagcagctggcacggaaggtgcacctccgggaagaaaaggtcgaagtctggtttaagaatcgcagggccaaatggcgtagacaaaagcggagctctagcgaggaatctgaaaacgccgagaagtggaataagacttcctcatccaaagctagccccgagaaaagggaggaggaaggcaagtcagacttggattctgactcctag

SEQ ID NO: 251046 - DNA, 2164 bp, Artificial Sequence
  derived and/or modified sequence
aaaatgatggctatgtggacatgagcagcttcaacacctttaagaacaatcagcagagcacagaccaggacgcagaaagacagagtcttgccctgttgcccaggctggagtatagtagtgcagtggtgtgatcatagctcactgtaacttcgaccacctgggctcaaacaatccttcttcctctgcctcccaagtagctgggactacagagcaggacccaggatgcaagaccctaggcatccccaaggccttccactgtccccaggccttccaaagagacagcggcaggaccgcacaatctacaactggaaacagcaggaagtgctagaaaatcactttaaggaggaacagtacccagactatgacacacgacaagagctggcggagatgctcaatctcagggagtaccaagtgcaggtgtggttcaagaatcgccgggccaaacgctctcgggagcggtggttccagaagcagctccagcagctccagaagcatcctcagcagcagcatcctcagcagcagcatccccagcagcagctccagcagcagcagccccagcagcagccccagcagcagcagccccagcagcagccacagcagcagcagccccagcagcagcagctccaccagcagccccagtagcagctctagcagcagcagcagcagccccagcagcagcaactccagtagcagctccagcagcagcagccccagcagtagctccagcagcagcagcagcagccccagtagcagctccagcagccccagtagcagctccagcagcagcagcagcagccccagtagcagctccagcagccccagtagcagctctagcagcagcagctccagcagcagcagtcccagcagcagcagccccagtagcagcggcagcagccccagtagcagcaacagcagccccagtagtagcagcagcagccccagtagcagcagcagcagccccagcccccgtagcagcagccccagcagcagcagctccagcaccagcagtcccagcagcagcagtcccagcagcagcagccccagcagcagctgccccagtgcagccctgggcaggaggccacagagcccacagagctcgcactgtgccccctttccctgaagctgcggcctctgccccccatcagcctggcctcttgggaattctcccacagggagaggccccgtgggtattctcccacaatctgcagcctccaccaggccttgagtagctttgggtgcagagccaggagggcgtttggctgtcctaggtctagcccctggcccaatcccagccccattccaggcccactcaaaagccaaggcccaatcccaggtccaggctcaatcctaggccctggcctgattccaagccaggcttactcccaggcccaggcttagtcctagccccaatcccaggtcctggcccaatcccaaacttaggatccctcccagccccagccctagtccccttgtgacctcagagcacttatgcctccaatttcttgccagacagtcattccctgacttcacagagctcctcccacccctagaccagttcgaggaatccttggtctccaccacgacatctcagtaccaagagggggatggctctatggacaaaaagactcgggccccaagtgattaatggatttatagggggcctgtgtctgcaaagtcctgcggataccagtggacctggagtggctggttggtctacactgctggtgaatgcaccaccaccatttaaccaccctgccgctggtgggcatttgctgtcttcactgtgtggccatcacgactagctctgctatgaatgcacctgccctcatttgagttgagcctgagcatttcgcagctgggattggagtcgctgctcatggggatgtttggcattagtggatgctacttgagagctttgtaaagagctttactcagcacttctgatagtcagcattctccctgacacttaggattgtgagactttttaatgtttgtggatccaatggcttatggcttccctgatgactgagaggttgagaagttctcacatgttaattgaaccttagaaatcctcatatgtgtccatttgtttgcccatttttcttcatttatttgaatgtatttttatattctcttgataattaaagtgctgcaaacacccccc

SEQ ID NO: 251047 - DNA, 2250 bp, Artificial Sequence
  derived and/or modified sequence
ggacccctgtgagataagtcagaggtgactttcctggggacccagagaacccacaaggcttttcccactgcttactgtattttgctcggctctctaaattgaatcaattgcaggtaagtcagggatttcttcttggtttggatccactgctggtgagcagacagagtcttgccctgttgcccaggctggagtatagtagtgcagtggtgtgatcatagctcactgtaacttcgaccacctgggctcaaacaatccttcttcctctgcctcccaagtagctgggactacagaacagagcaggacccaggatgcaagaccctaggcatccccaaggccttccactgtccccaggccttccaaagagacagcggcaggaccgcacaatctacaactggaaacagcaggaagtgctagaaaatcactttaaggaggaacagtacccagactatgacacacgacaagagctggcggagatgctcaatctcagggagtaccaagtgcaggtgtggttcaagaatcgccgggccaaacgctctcgggagcggtggttccagaagcagctccagcagctccagaagcatcctcagcagcagcatcctcagcagcagcatccccagcagcagctccagcagcagcagccccagcagcagccccagcagcagcagccccagcagcagccacagcagcagcagccccagcagcagcagctccaccagcagccccagtagcagctctagcagcagcagcagcagccccagcagcagcaactccagtagcagctccagcagcagcagccccagcagtagctccagcagcagcagcagcagccccagtagcagctccagcagccccagtagcagctccagcagcagcagcagcagccccagtagcagctccagcagccccagtagcagctctagcagcagcagctccagcagcagcagtcccagcagcagcagccccagtagcagcggcagcagccccagtagcagcaacagcagccccagtagtagcagcagcagccccagtagcagcagcagcagccccagcccccgtagcagcagccccagcagcagcagctccagcaccagcagtcccagcagcagcagtcccagcagcagcagccccagcagcagctgccccagtgcagccctgggcaggaggccacagagcccacagagctcgcactgtgccccctttccctgaagctgcggcctctgccccccatcagcctggcctcttgggaattctcccacagggagaggccccgtgggtattctcccacaatctgcagcctccaccaggccttgagtagctttgggtgcagagccaggagggcgtttggctgtcctaggtctagcccctggcccaatcccagccccattccaggcccactcaaaagccaaggcccaatcccaggtccaggctcaatcctaggccctggcctgattccaagccaggcttactcccaggcccaggcttagtcctagccccaatcccaggtcctggcccaatcccaaacttaggatccctcccagccccagccctagtccccttgtgacctcagagcacttatgcctccaatttcttgccagacagtcattccctgacttcacagagctcctcccacccctagaccagttcgaggaatccttggtctccaccacgacatctcagtaccaagagggggatggctctatggacaaaaagactcgggccccaagtgattaatggatttatagggggcctgtgtctgcaaagtcctgcggataccagtggacctggagtggctggttggtctacactgctggtgaatgcaccaccaccatttaaccaccctgccgctggtgggcatttgctgtcttcactgtgtggccatcacgactagctctgctatgaatgcacctgccctcatttgagttgagcctgagcatttcgcagctgggattggagtcgctgctcatggggatgtttggcattagtggatgctacttgagagctttgtaaagagctttactcagcacttctgatagtcagcattctccctgacacttaggattgtgagactttttaatgtttgtggatccaatggcttatggcttccctgatgactgagaggttgagaagttctcacatgttaattgaaccttagaaatcctcatatgtgtccatttgtttgcccatttttcttcatttatttgaatgtatttttatattctcttgataattaaagtgctgcaaacacccccc

SEQ ID NO: 251048 - DNA, 539 bp, Artificial Sequence
  derived and/or modified sequence
gattttttgtataaggtgagagatgaggatccagttttggtctcctacacgtggctagccaattatcccagcaccatttgtggaaaaggatgccctttccccactttatgattttgtttgctttgttgaagatcagttggctacagagtcttgccctgttgcccaggctggagtatagtagtgcagtggtgtgatcatagctcactgtaacttcgaccacctgggctcaaacaatccttcttcctctgcctcccaagtagctgggactacagagcaggacccaggatgcaagaccctaggcatccccaaggccttccactgtccccaggccttccaaagagacagcggcaggaccgcacaatctacaactggaaacagcaggaagtgctagaaaatcactttaaggaggaacagtacccagactatgacacacgacaagagctggcggagatgctcaatctcagggagtaccaagtgcaggtgtggttcaagaatcgccgggccaaacgctctcgggagcggtggttccagaagcagct

SEQ ID NO: 251049 - DNA, 932 bp, Artificial Sequence
  derived and/or modified sequence
tctggagatctgttttctggttttggctgtgccataaacgattatttatgaaaactgcaatagtcatcatttaaagttatggaactgtgtccggaattggtgggttcttggtctcactgacttcaagaatgaagccgcggacccttgcggtaagtcagggatttcttcttggtttggatccactgctggtgagcagacagagtcttgccctgttgcccaggctggagtatagtagtgcagtggtgtgatcatagctcactgtaacttcgaccacctgggctcaaacaatccttcttcctctgcctcccaagtagctgggactacagaacagagcaggacccaggatgcaagaccctaggcatccccaaggccttccactgtccccaggccttccaaagagacagcggcaggaccgcacaatctacaactggaaacagcaggaagtgctagaaaatcactttaaggaggaacagtacccagactatgacacacgacaagagctggcggagatgctcaatctcagggagtaccaagtgcaggtgtggttcaagaatcgccgggccaaacgctctcgggagcggtggttccagaagcagctccagcagctccagaagcatcctcagcagcagcatcctcagcagcagcatccccagcagcagctccagcagcagcagccccagcagcagccccagcagcagcagccccagcagcagccacagcagcagcagccccagcagcagcagctccaccagcagccccagtagcagctctagcagcagcagcagcagccccagcagcagcaactccagtagcagctccagcagcagcagccccagcagtagctccagcagcagcagcagcagccccagtagcagctccagcagccccagtagcagctccagcagcagcagcagcagccccagtagcagctc

SEQ ID NO: 251050 - protein, 395 aa, Artificial Sequence
  derived and/or modified sequence
MTHTLYPTPFALYPINISAAWHLGPLPVSCFVSNKYQCSLAFGATTGLRVLVVVVPQTQLSFLSSLCLVSLFLHSLVSAHGEKPTKPVGLDPTLFQVVVGILGNFSLLYYYMFLYFRGYKPRSTDLILRHLTVADSLVILSKRIPETMATFGLKHFDNYFGCKFLLYAHRVGRGVSIGSTCLLSVFQVITINPRNSRWAEMKVKAPTYIGLSNILCWAFHMLVNAIFPIYTTGKWSNNNITKKGDLGYCSAPLSDEVTKSVYAALTSFHDVLCLGLMLWASSSIVLVLYRHKQQVQHICRNNLYPNSSPGNRAIQSILALVSTFALCYALSFITYVYLALFDNSSWWLVNTAALIIACFPTISPFVLMCRDPSRSRLCSICCRRNRRFFHDFRKM

SEQ ID NO: 251051 - DNA, 1188 bp, Artificial Sequence
  derived and/or modified sequence
atgacccacaccctgtaccccacccccttcgccctgtaccccatcaacatcagcgccgcctggcacctgggccccctgcccgtgagctgcttcgtgagcaacaagtaccagtgcagcctggccttcggcgccaccaccggcctgagagtgctggtggtggtggtgccccagacccagctgagcttcctgagcagcctgtgcctggtgagcctgttcctgcacagcctggtgagcgcccacggcgagaagcccaccaagcccgtgggcctggaccccaccctgttccaggtggtggtgggcatcctgggcaacttcagcctgctgtactactacatgttcctgtacttcagaggctacaagcccagaagcaccgacctgatcctgagacacctgaccgtggccgacagcctggtgatcctgagcaagagaatccccgagaccatggccaccttcggcctgaagcacttcgacaactacttcggctgcaagttcctgctgtacgcccacagagtgggcagaggcgtgagcatcggcagcacctgcctgctgagcgtgttccaggtgatcaccatcaaccccagaaacagcagatgggccgagatgaaggtgaaggcccccacctacatcggcctgagcaacatcctgtgctgggccttccacatgctggtgaacgccatcttccccatctacaccaccggcaagtggagcaacaacaacatcaccaagaagggcgacctgggctactgcagcgcccccctgagcgacgaggtgaccaagagcgtgtacgccgccctgaccagcttccacgacgtgctgtgcctgggcctgatgctgtgggccagcagcagcatcgtgctggtgctgtacagacacaagcagcaggtgcagcacatctgcagaaacaacctgtaccccaacagcagccccggcaacagagccatccagagcatcctggccctggtgagcaccttcgccctgtgctacgccctgagcttcatcacctacgtgtacctggccctgttcgacaacagcagctggtggctggtgaacaccgccgccctgatcatcgcctgcttccccaccatcagccccttcgtgctgatgtgcagagaccccagcagaagcagactgtgcagcatctgctgcagaagaaacagaagattcttccacgacttcagaaagatgtag

SEQ ID NO: 251052 - DNA, 1188 bp, Artificial Sequence
  derived and/or modified sequence
atgactcacaccctctatcctacccctttcgcattgtatcccattaacataagcgcagcttggcatttgggaccactgccagtctcctgcttcgtcagcaacaagtaccagtgttctctagcattcggcgctaccaccggtttgcgagtcctggttgtggtggtcccacagacgcagctgtctttcctgtctagcctatgcttagtgagtctgttcctccacagcctcgtctcagctcatggagaaaaaccaacgaagccggtcgggctggacccaacccttttccaggtggttgttgggatcctaggtaacttttccctcctgtactattacatgttcctttacttccgcggttataagcctagatcaaccgacctcatcctgcggcatctgactgttgccgactccctagtcattctgtccaagagaatccctgaaacaatggccaccttcggactgaagcacttcgacaattacttcgggtgcaaattcctattgtatgcccaccgcgtgggacggggcgtcagcatcggaagcacttgtttacttagtgtgttccaggtgatcactataaatccgaggaactctagatgggcagaaatgaaggtgaaggcaccaacctacatcggcttgagtaatattctgtgttgggcatttcacatgctggtaaacgccatcttccccatctacactaccggcaaatggagtaacaataatatcaccaagaagggcgatctaggatattgttcagcccccctaagcgacgaggtgactaagtccgtgtatgctgccctgactagcttccatgacgtcttatgcttggggttaatgctgtgggcctcgagtagtattgtgttggtactctacagacacaaacagcaggtacaacacatctgtagaaacaacctctatcccaactcctctccaggcaaccgggctatccagtcaatcttggccctcgtgagcactttcgccctctgttatgctctgtctttcataacttacgtgtaccttgcattatttgacaactccagctggtggttggttaataccgctgccctaatcattgcttgcttcccaaccattagcccctttgtgctcatgtgcagagatccctcccgctcaagactttgctccatatgttgtcgccggaatcgccgattctttcacgattttaggaagatgtag

SEQ ID NO: 251053 - DNA, 1188 bp, Artificial Sequence
  derived and/or modified sequence
atgacccacaccctgtaccccaccccatttgccctgtaccccatcaacatctctgctgcctggcacctgggccccctgcctgtgtcctgctttgtgagcaacaagtaccagtgcagcctggccttcggggccaccaccggcctgcgggtgctggtggtggtggtgccccagacccagctgtccttcctgagcagcctgtgcctggtgtccctcttcctgcacagcctggtgtctgcccacggggagaagcccaccaagcctgtgggcctggaccccaccctcttccaggtggtggtgggcatcctgggcaacttcagcctgctgtactactacatgttcctgtacttccggggctacaagcccaggagcacagacctgatcctgcggcacctgactgtggccgacagcctggtgatcctgagcaagagaattcctgagaccatggccaccttcggcctgaagcactttgacaactacttcggctgcaagttcctgctgtatgcccaccgggtgggccggggcgtgtccatcggcagcacctgcctgctgagcgtcttccaggtgatcaccatcaaccccaggaacagccgctgggccgagatgaaggtgaaggcccccacctacatcggcctgagcaacatcctgtgctgggccttccacatgctggtgaatgccatcttccccatctacaccaccgggaagtggagcaacaacaacatcaccaagaagggggacctgggctactgcagcgcccccctgagtgatgaggtgaccaagtctgtgtatgctgccctgaccagcttccatgatgtgctgtgcctgggcctgatgctgtgggccagcagcagcatcgtgctggtgctgtaccgccacaagcagcaggtgcagcacatctgcaggaacaacctgtaccccaacagcagccctggcaacagagccatccagagcatcctggccctggtgtccacctttgccctgtgctacgccctgtccttcatcacctacgtgtacctggccctgtttgacaacagctcctggtggctggtgaacacagctgccctgatcatcgcctgcttccccaccatcagcccctttgtgctgatgtgccgggaccccagccgcagccggctgtgcagcatctgctgcagaagaaacagacgcttcttccatgacttcaggaagatgtag

SEQ ID NO: 251054 - DNA, 1188 bp, Artificial Sequence
  derived and/or modified sequence
atgacccacaccctgtaccccacccccttcgccctgtaccccatcaacatttctgccgcttggcacctgggacccctaccggtgagctgcttcgtgtcaaataagtaccagtgctcactcgcatttggggccacaaccgggttacgcgtgctggtggtggtagtgccccagacccagttaagcttcctgtcctcactgtgtctggtgtccctgtttttgcactcacttgttagtgctcatggagaaaagccaaccaagccagtgggactcgaccccacactgttccaggtagtagtcggtatcctggggaacttttcgctgctgtattactacatgtttctttatttcagaggctacaaacccagatcaaccgacctgatcctcagacacctgacagtagcagatagcttggtcatccttagtaagcgcatcccagagacgatggcaacattcgggctcaaacatttcgacaactatttcgggtgtaaattcctgctgtacgcccaccgtgtgggcagaggcgtgtccattggaagcacatgccttttatccgtgttccaggtcataacgattaatccccggaattctcgctgggcagagatgaaggtgaaggcacctacctatatcggcctgtcaaacatcttgtgctgggccttccacatgctggtgaatgcaatttttccaatctacactactggaaagtggtcaaacaacaatatcactaagaaaggggacctcggatattgctccgctccattatcagacgaggtgacaaagagtgtctatgctgccctgaccagctttcacgatgttctatgccttggcctgatgttatgggcaagctcctcaatagttctggtcctctaccgccataagcagcaggtgcagcacatctgtagaaacaatctgtatccaaactcctctccaggcaatcgggccatccagtctatcctggcacttgtgtctactttcgccctgtgttatgccctctcctttatcacctacgtttatttggcgctgttcgacaactcctcttggtggctggttaatacagccgccctgatcattgcctgctttcctaccatttctccattcgtgttgatgtgccgggatccttctcgcagcagattatgttctatttgctgcagacgcaatcggcgtttctttcatgacttcaggaagatgtag

SEQ ID NO: 251055 - DNA, 1188 bp, Artificial Sequence
  derived and/or modified sequence
atgacccacacattgtacccgacacccttcgcactctatccaatcaacattagcgccgcttggcacctgggtccacttccagtgtcctgttttgtgtctaataagtatcagtgttctctcgcttttggcgctacgacaggtctgagggtgctggttgttgtggttcctcagactcagctaagtttcctttcgtccctttgcctggtctcgctgtttctccactctcttgtgagcgcccatggggagaagccaactaaaccggttggtctcgatcctaccctgttccaagttgtcgtggggattttggggaactttagccttctgtattattatatgtttttgtattttcggggatataaacctcgttctaccgacttgatactgaggcatctgacagtagccgattccctggtcattctttcaaagcgcatccccgagaccatggcaacctttggcctgaaacacttcgataattacttcggatgcaagttcctgctttatgcacacagggtcggcagaggagttagcatagggagcacatgtctactgagcgtgttccaggtgattacaatcaatcctagaaatagcaggtgggccgagatgaaagttaaggcccctacatacatcggtcttagcaacattctctgctgggctttccacatgctagtgaatgccattttccccatttacaccaccgggaagtggtctaataataacataacaaagaaaggtgatttgggctactgctctgcacctttgtcagatgaagtgacgaaatcagtctacgcggctctgaccagcttccacgatgtcctgtgcctgggtctgatgctgtgggcaagctcctccattgtgctagtgctttaccgtcacaagcagcaggtgcagcatatctgccgaaataatctgtatccgaattcttcacccggtaacagggccatccaatcaattcttgccttggtgtccactttcgccctgtgctatgctctgagcttcattacgtacgtttaccttgctctgtttgacaacagtagttggtggctggtgaacacggcagcactgattattgcctgctttcctactatcagcccatttgtgttgatgtgccgcgatcccagccgtagtaggctgtgctcaatctgttgtaggcgtaacagacgtttttttcatgacttccgaaaaatgtag

SEQ ID NO: 251056 - DNA, 1311 bp, Artificial Sequence
  derived and/or modified sequence
tctctctctgccttggctgccaggcagggaagggccccctgtccagtggacacgtgacccacgtgaccttacctatcattggagatgactcacactctttaccctaccccttttgctttgtatccaataaatatcagcgcagcctggcatttggggccactaccagtctcctgctttgtatccaataaatatcagtgcagcctggcattcggggccactaccggtctccgcgtcttggtggtagtggtcccccagacacagctgtcttttctttcatctctttgtcttgtgtctttatttctacactctcttgtctctgcacacggagagaaacccaccaaacctgtggggctggaccctacactattccaggtagttgttggaatcctggggaatttttcactcttatattattatatgttcctttactttaggggatacaagccaagatccacagatttgattctcaggcacctgactgtagctgactccttggttatcctatctaaaagaatcccagagaccatggcaacttttgggttgaaacattttgacaattattttggatgcaaatttcttttgtatgcacacagggtaggcaggggtgtgtccattggaagcacctgcctcttgagtgtcttccaggtgatcaccatcaaccctaggaactccaggtgggcagagatgaaagtaaaagccccgacatacattggtctctccaatatcctgtgctgggccttccacatgctggtaaatgccatttttcctatttatacaactggcaaatggagcaacaacaacatcacaaagaaaggagatttgggatattgttctgccccacttagtgatgaagtcacaaagtcagtatatgcagcattgacatccttccatgatgttttgtgtctggggctcatgctctgggccagcagctccatcgttttggtcttgtacaggcacaaacagcaggtacaacacatctgtaggaacaatctctaccccaactcttctcctgggaacagagccatccaaagcatccttgcattggtgagcacctttgcattatgttacgccctttccttcatcacctacgtttatttagctctcttcgataattccagttggtggctagtgaacactgctgcactaatcattgcctgttttccaactattagcccttttgttctcatgtgccgtgaccccagcagatccaggctctgcagtatctgctgcagaagaaatagacgattctttcatgatttcaggaaaatgtgaattggctgtcttggtttatgttcggccactgatgcactc

SEQ ID NO: 251057 - protein, 301 aa, Artificial Sequence
  derived and/or modified sequence
MASRYVAVGMILSQTVVGVLGSFSVLLHYLSFYCTGCRLRSTDLIVKHLIVANFLALRCKGVPQTMAAFGVRYFLNALGCKLVFYLHRVGRGVSIGTTCLLSVFQVITVSSRKSRWAKLKEKAPKHVGFSVLLCWIVCMLVNIIFPMYVTGKWNYTNITVNEDLGYCSGGGNNKIAQTLRAMLLSFPDVLCLGLMLWVSSSMVCILHRHKQRVQHIDRSNLSPRASPENRATQSILILVSTFVSSYTLSCLFQVCMALLDNPNSLLVNTSALMSVCFPTLSPFVLMSCDPSVYRFCFAWKR

SEQ ID NO: 251058 - DNA, 906 bp, Artificial Sequence
  derived and/or modified sequence
atggccagcagatacgtggccgtgggcatgatcctgagccagaccgtggtgggcgtgctgggcagcttcagcgtgctgctgcactacctgagcttctactgcaccggctgcagactgagaagcaccgacctgatcgtgaagcacctgatcgtggccaacttcctggccctgagatgcaagggcgtgccccagaccatggccgccttcggcgtgagatacttcctgaacgccctgggctgcaagctggtgttctacctgcacagagtgggcagaggcgtgagcatcggcaccacctgcctgctgagcgtgttccaggtgatcaccgtgagcagcagaaagagcagatgggccaagctgaaggagaaggcccccaagcacgtgggcttcagcgtgctgctgtgctggatcgtgtgcatgctggtgaacatcatcttccccatgtacgtgaccggcaagtggaactacaccaacatcaccgtgaacgaggacctgggctactgcagcggcggcggcaacaacaagatcgcccagaccctgagagccatgctgctgagcttccccgacgtgctgtgcctgggcctgatgctgtgggtgagcagcagcatggtgtgcatcctgcacagacacaagcagagagtgcagcacatcgacagaagcaacctgagccccagagccagccccgagaacagagccacccagagcatcctgatcctggtgagcaccttcgtgagcagctacaccctgagctgcctgttccaggtgtgcatggccctgctggacaaccccaacagcctgctggtgaacaccagcgccctgatgagcgtgtgcttccccaccctgagccccttcgtgctgatgagctgcgaccccagcgtgtacagattctgcttcgcctggaagagatag

SEQ ID NO: 251059 - DNA, 906 bp, Artificial Sequence
  derived and/or modified sequence
atggcatccagatacgtggccgtgggtatgattcttagtcagaccgtcgtgggagttcttggctcattctcggtgctgctccactacttgagtttctactgcaccggttgtaggctcagatccacagacctcatagttaaacacctcatcgtagccaacttcttagccctcagatgtaagggcgtgcctcagaccatggccgccttcggagtcaggtatttcttgaacgcactgggctgcaaacttgtgttttatttacacagagtggggcggggagtttcaatcgggaccacatgcttgctgtccgtatttcaggtcattacggtttcatcacgcaagagcagatgggccaagctcaaagagaaggccccaaagcatgtggggtttagcgtgctcttgtgctggattgtgtgcatgctggtgaacattatttttcccatgtatgtaacgggaaagtggaactacacgaatatcacagtcaacgaagacctgggctattgttcagggggcgggaataataagatcgctcaaaccctgagggccatgctgctatcctttcctgacgtgctgtgcctgggtctgatgttgtgggtgtcatcttcgatggtgtgcattctgcacaggcataagcagagggtgcagcacatcgatcgttcgaacctgtcaccccgggcctcccctgaaaaccgtgctacacagtcaatcctgattctggtctcgactttcgtgtcaagctatacgctttcttgcctatttcaggtctgcatggcactgttagacaatccaaactcattgctggtcaacacgtcagcccttatgagtgtatgctttcctacgctttcccctttcgtgctcatgagctgcgacccaagcgtgtatagattttgcttcgcatggaaaaggtag

SEQ ID NO: 251060 - DNA, 906 bp, Artificial Sequence
  derived and/or modified sequence
atggccagccgctacgtggccgtgggcatgatcctgagccagacagtggtgggcgtgctgggcagcttctctgtgctgctgcactacctgtccttctactgcaccggctgccgcctgcggagcacagacctgattgtgaagcacctgattgtggccaacttcctggccctgcgctgcaagggcgtgccccagaccatggccgcctttggagtgcgctacttcctgaatgccctgggctgcaagctggtgttctacctgcaccgggtgggccggggcgtgtccatcggcaccacctgcctgctgagcgtcttccaggtgatcaccgtgagcagcaggaagagccgctgggccaagctgaaggagaaggcccccaagcacgtgggcttctctgtgctgctgtgctggatcgtgtgcatgctggtgaacatcatcttccccatgtatgtgacaggcaagtggaactacaccaacatcaccgtgaatgaagacctgggctactgcagcggcggcggcaacaacaagatcgcccagaccctgcgggccatgctgctgtccttcccagatgtgctgtgcctgggcctgatgctgtgggtgagcagctccatggtgtgcatcctgcaccgccacaagcagagggtgcagcacatcgacaggagcaacctgagcccccgggccagccctgagaacagagccacccagagcatcctgatcctggtgtccacctttgtgtcctcctacaccctgagctgcctcttccaggtgtgcatggccctgctggacaaccccaacagcctgctggtgaacaccagcgccctgatgtctgtgtgcttccccaccctgagcccctttgtgctgatgagctgtgaccccagcgtgtaccgcttctgctttgcctggaagaggtag

SEQ ID NO: 251061 - DNA, 423 bp, Artificial Sequence
  derived and/or modified sequence
atgctgaccatcatgtgcggcttccagatgcagagccacctggccgctggcgatatgaaaaggctcgggtatgatttcgatcacttacttagccctgccctgccgatatctaccagtgtcgccagggaggggcccagcctgataacactgcgggccacccgagacgccgaatgcgcgctttcatctggagctggccagggcgcaggtcggggggagaaaactccagcttcgcctaccaaccagcaccctgggttggaagaattgcagcaagcagctgacagggagtttcacccccagcccgattctaggaattccgaagtccaggatagagcctcctgccggtgggaaccagggatggttggcgccgcttcctctgcggctggagaatctgtgtgtgtgcagggctgtcgcgtagcttgctag

SEQ ID NO: 251062 - DNA, 906 bp, Artificial Sequence
  derived and/or modified sequence
atggccagccggtacgtggccgtgggcatgatcctgagccagaccgtggtcggtgtgttagggtctttctccgtgttattgcactacctcagcttctactgcaccggatgtaggctcagatcaactgacctcattgtcaagcacttgatcgtggcgaattttcttgctttacggtgtaagggggtgcctcagactatggccgcctttggggtgagatactttttgaacgccttgggctgtaaactcgttttctacctacatagggtggggcggggcgttagtatagggaccacatgtctgctcagtgtgttccaggtgattactgtgagcagtcggaagagcaggtgggcaaaattgaaagagaaagctccaaagcacgtgggcttctccgttcttctctgctggattgtgtgcatgctggtcaatatcatctttccaatgtacgtcactggaaagtggaattatacgaacatcacagtcaatgaagacctgggctactgctccggaggggggaataataagatcgcacaaacactccgagcaatgttgctgagtttcccggatgtattgtgcctgggacttatgttgtgggtcagttcgagcatggtctgtattctgcacagacacaaacagcgagtccagcatatcgacaggagcaacctcagtccacgcgcatcacccgagaatagggccactcagagtatactgatcctggtgtcaaccttcgtatccagctacacgctcagttgcctatttcaggtgtgtatggctcttttggacaacccgaactccttattggttaacacgtctgcactcatgagtgtatgttttcccaccctgtcccccttcgttctgatgagctgtgacccttccgtgtatcgattctgcttcgcctggaaacgttag

SEQ ID NO: 251063 - DNA, 906 bp, Artificial Sequence
  derived and/or modified sequence
atggccagtagatacgtagcagttgggatgatcctgagtcagacagtggtaggggtgctaggttctttttccgtcctgcttcactacctttcattctattgtaccggatgtcgactgcggtccaccgatctgattgtcaaacacctgatcgttgccaactttctggcgctgcgctgcaaaggagttccccaaaccatggccgcatttggagtgagatacttcctgaacgcgcttggctgtaaacttgtgttctacctccaccgagtaggcaggggagtctcgattgggaccacctgcctgttgagcgttttccaggtgatcactgtttccagccgtaaatccaggtgggcaaaactaaaagagaaagcgccaaagcacgtcggtttctccgttctcctttgctggatcgtctgcatgctggtcaacatcatcttccctatgtacgtaacaggcaaatggaattatacaaatattacggttaatgaggacttgggatactgcagtggaggcggaaacaataaaattgctcagaccctgcgggctatgctgctgtcttttccagacgtgctctgcctggggcttatgctgtgggttagttcaagtatggtatgtatactccataggcacaaacagagagttcagcacatcgacagaagcaacttgagcccccgagcatcaccagagaacagagcgacccaatcgatcctgattcttgtgagtacctttgtttcatcctacaccttaagctgcctgttccaggtgtgtatggcactgcttgataatcctaattctcttctggttaatacttctgccctgatgagcgtatgttttcccactctgtccccgttcgtgctgatgtcttgtgatccctctgtctatcgcttctgtttcgcctggaagagatag

SEQ ID NO: 251064 - DNA, 1044 bp, Artificial Sequence
  derived and/or modified sequence
tgcaggacctcccagccctgaagacaaacatcagtgacagacatcagtggcagaatggcctcccggtatgtggcagtgggaatgatcttatcacagaccgtggtgggagtcctggggagcttctctgttcttctccattatctctccttttactgcactgggtgcaggttaaggtccacagatttgattgttaagcacctgattgtagccaacttcttagctctccgctgtaaaggagtcccccagacaatggcagcttttggggttagatattttctcaatgctcttgggtgcaaacttgttttctatctccatagagtgggcaggggagtgtccattggcaccacctgcctcttgagtgtcttccaggtgatcacggtcagctccaggaaatccaggtgggcaaaacttaaagagaaagcccccaagcatgttggcttttctgttctcctgtgctggatcgtgtgcatgttggtaaacatcatctttcccatgtatgtgactggcaaatggaactacacaaacatcacagtgaacgaggatttgggatactgttctgggggaggcaacaacaaaatcgcacagacactgcgtgcaatgttgttatcattccctgatgtgttgtgtctggggctcatgctctgggtcagcagctccatggtttgcatactgcacaggcacaagcagcgggtccagcacattgataggagcaatctctcccccagagcctccccagagaacagagctacgcagagcatcctcatcctggtgagcacctttgtgtcttcttacactctctcctgccttttccaagtttgtatggctcttttggataatcccaatagtttactggtgaacacttcagccttaatgagtgtatgtttcccaactctcagcccctttgttctcatgagctgtgaccccagtgtatacaggttttgttttgcctggaaaagatgacaagatctcctaacctcatcataaacatgtacattgtatatatttgctcatggttcaattgatgacttactcttctgtgccgca

SEQ ID NO: 251065 - protein, 282 aa, Artificial Sequence
  derived and/or modified sequence
MGEHNLLNPGFVGPLVNIHTGDTFYFPNFRASGAQLPGLPSLSYPRRDNVCSLSWPSAEPCNGYPQPYLGSPVSLNPPFGRTCELARVEDGKGYYREPCAEGGGGGLKREERGRDPGAGPGAALLPLEPSGPPALGFKYDYAAGGGGGDGGGGAGPPHDPPSCQSLESDSSSSLLNEGNKGAGAGDPGSLVSPLNPGGGLSASGAPWYPINSRSRKKRKPYSKLQLAELEGEFLVNEFITRQRRRELSDRLNLSDQQVKIWFQNRRMKKKRLLLREQALSFF

SEQ ID NO: 251066 - DNA, 142 bp, Artificial Sequence
  derived and/or modified sequence
ttgcaactggcagagctggagggcgagtttctggtcaacgagttcatcacacgccagcgccggagggaactctcagaccgcttgaatcttagtgaccagcaggtcaagatctggtttcagaaccggagaatgaaaaagaaaa

SEQ ID NO: 251067 - DNA, 849 bp, Artificial Sequence
  derived and/or modified sequence
atgggcgagcataacctacttaatccgggcttcgtggggccattggtcaacatacatacgggcgacactttctacttccctaactttcgcgcttccggcgcacaattacccgggctgccatctctgtcctacccccgcagagacaacgtctgttcactgagctggccgtccgccgagccttgtaacggatatccacagccgtatttggggtctccggtgagcctgaaccctccctttggccggacctgcgagctcgctagggttgaggacgggaaggggtattatagagaaccatgcgcggaggggggtggcggagggcttaagcgcgaagaaagaggacgtgatcccggcgccggaccgggagctgctctgttacccctggagccaagtgggcctccagctttggggttcaagtacgactatgctgcaggggggggaggaggcgacggtgggggtggagccggtcctccgcatgatccacccagctgccagtctctggagtccgacagcagcagtagcttgctgaacgagggcaacaaaggcgccggcgctggcgatcccggctctttggtgagtccgcttaatccaggtgggggccttagtgcatctggagctccttggtaccccattaattctagatctcgaaaaaagagaaagccatattctaagcttcagctcgccgaactggaaggagaattcttagtcaatgagttcatcacacggcagcgtagacgggaactgtctgaccggctgaacctgtcagatcagcaggtgaagatttggttccagaaccggcgcatgaaaaagaagaggctccttctacgggagcaggccctctcgtttttttag

SEQ ID NO: 251068 - DNA, 1041 bp, Artificial Sequence
  derived and/or modified sequence
cgtgagtggggcggccaatgggtgactggtgcagatttaactatgtttaatgtcagatagcaataaagtagaagctgccggtcgggccccgcggaaatgggcgagcataatctcctgaatcccgggtttgtggggccgctggtaaacatccacacgggagacaccttctacttccccaacttccgcgcgtccggggcgcagcttcccgggctgccttcgctgtcctacccacgccgcgacaacgtgtgctccctgtcctggccgtcggcggagccgtgcaatggctacccgcagccctacctcggcagcccagtgtctctcaaccctcccttcggccgcacgtgcgagctggcgcgcgtggaggacggcaagggttactaccgcgagccgtgcgccgagggtggcggcgggggcctgaagcgtgaggagcgcgggcgcgacccgggagccgggcccggggcagcgctgctcccgctggagccgtcggggccgcctgcgctcggcttcaagtacgactacgcggcgggcggcggcggtggcgacggcggcggcggcgcaggacctccgcacgacccgccctcctgccagtcgctggaatccgactccagttcgtccctgctcaacgagggcaacaagggcgccggcgcaggcgaccccggcagcttggtatcgccgttgaaccccggcggcgggctctcggccagcggcgcgccctggtacccgatcaacagccgctctcggaagaagcgcaagccctattcgaagttgcaactggcagagctggagggcgagtttctggtcaacgagttcatcacacgccagcgccggagggaactctcagaccgcttgaatcttagtgaccagcaggtcaagatctggtttcagaaccggagaatgaaaaagaaaagacttctgttgagggagcaagctctctccttcttttaaggtgcaggacacgggcgccagccccagactgagcctgtccctggcagagagcaaaagagggcgccgcctagaacacagtccccacttagaacgcca

SEQ ID NO: 251069 - DNA, 849 bp, Artificial Sequence
  derived and/or modified sequence
atgggagagcacaacctgctgaaccctggctttgtgggccccctggtgaacatccacactggagacaccttctacttccccaacttccgggccagcggggcccagctgcccggcctgcccagcctgagctacccccggcgggacaacgtgtgcagcctgtcctggcccagcgctgagccctgcaatggctacccccagccctacctgggcagccctgtgtccctgaaccccccatttggaagaacctgtgagctggcccgggtggaggatggcaagggctactaccgggagccctgtgccgagggcggcggcggcggcctgaagcgggaggagcggggccgggaccccggggccggccctggggccgccctgctgcccctggagcccagcggccccccagccctgggcttcaagtatgactatgctgctgggggcggcggcggagatggcggcggcggggccggcccccctcatgacccccccagctgccagagcctggagagtgacagcagcagcagcctgctgaatgaaggcaacaagggggccggggccggggaccccggcagcctggtgagccccctgaaccctgggggcggcctgagcgccagcggggccccctggtaccccatcaacagccgcagcaggaagaagaggaagccctacagcaagctgcagctggccgagctggagggggagttcctggtgaatgagttcatcacccggcagaggcggcgggagctgagtgaccggctgaacctgagtgaccagcaggtgaagatctggttccagaacagaaggatgaagaagaagaggctgctgctgcgggagcaggccctgtccttcttctag

SEQ ID NO: 251070 - DNA, 849 bp, Artificial Sequence
  derived and/or modified sequence
atgggcgagcacaacctgctgaaccccggcttcgtgggccccctggtgaacattcacactggagacaccttctacttcccaaactttcgggccagcggagcacagctgcctggactcccctcactttcttacccccgacgcgataacgtctgcagtctgtcctggccaagcgctgagccgtgtaacggatacccccagccataccttggatccccagtgtctctgaatccaccgtttgggagaacatgcgaactggcccgtgtggaagatgggaagggatactatagggaaccatgcgccgagggcggggggggcgggctcaagagggaggaacgtggcagggatccaggagccggccccggcgccgcactgctgcccctggagccctcgggaccaccagcactcggcttcaagtacgattacgccgccggaggaggcggcggtgatggcggtggtggggccggtccaccacacgatccccctagctgccaatcattggaatctgacagtagtagtagcctcctaaacgagggaaataaaggtgccggcgcaggagatcctggatccctggtctcaccccttaatcccgggggggggctttctgcgtccggagccccatggtatcccattaacagtcggagcagaaaaaagcggaaaccttactccaaactgcaactggcggaactcgagggcgaattcctcgtcaatgaatttataacaagacagagacgcagggaactgagcgatagactgaatttgtcagaccagcaagtgaaaatctggtttcaaaatcgtaggatgaaaaagaaacgccttcttttgagggagcaagctctaagtttcttttag

SEQ ID NO: 251071 - DNA, 849 bp, Artificial Sequence
  derived and/or modified sequence
atgggggaacacaacttgcttaatccaggctttgtggggcctctcgtaaatattcatacaggagatacgttttacttccccaatttcagggcatctggcgcacaactgcccggattgcctagtctgtcctatccccgtcgggataacgtttgttcactgagttggccgagcgctgagccttgcaatggttacccccagccatatctcggatctcctgtgtctctgaatccacctttcgggcgaacctgcgaacttgcacgagtggaagacgggaaaggctattacagagaaccttgtgctgaggggggagggggtggtctgaagcgagaggagcggggtagggatcctggggctggcccaggcgctgctctgttgcctctggagccgtccgggccacctgctctggggtttaagtacgattacgctgctggagggggaggaggtgacgggggtggaggggctgggcctccccacgatccacccagctgccaaagcctcgaatcagattcctcatcctctctgctgaacgaaggcaacaagggagccggagctggggacccaggttcactggtgagtccactgaatcccggaggagggctgtctgcgagcggcgctccatggtatcctatcaacagcagaagtcggaagaagaggaagccttattctaaactccaactagccgagctcgaaggcgagttcctggtgaacgagtttattaccaggcagcggaggcgggaactctcagatagattaaatttatcagaccaacaagttaaaatctggttccagaataggaggatgaagaaaaagcgcttgttgctcagagaacaagccctgtccttcttttag

SEQ ID NO: 251072 - DNA, 849 bp, Artificial Sequence
  derived and/or modified sequence
atgggcgagcacaacctgctgaaccccggcttcgtgggccccctggtgaacatccacaccggcgacaccttctacttccccaacttcagagccagcggcgcccagctgcccggcctgcccagcctgagctaccccagaagagacaacgtgtgcagcctgagctggcccagcgccgagccctgcaacggctacccccagccctacctgggcagccccgtgagcctgaacccccccttcggcagaacctgcgagctggccagagtggaggacggcaagggctactacagagagccctgcgccgagggcggcggcggcggcctgaagagagaggagagaggcagagaccccggcgccggccccggcgccgccctgctgcccctggagcccagcggcccccccgccctgggcttcaagtacgactacgccgccggcggcggcggcggcgacggcggcggcggcgccggccccccccacgacccccccagctgccagagcctggagagcgacagcagcagcagcctgctgaacgagggcaacaagggcgccggcgccggcgaccccggcagcctggtgagccccctgaaccccggcggcggcctgagcgccagcggcgccccctggtaccccatcaacagcagaagcagaaagaagagaaagccctacagcaagctgcagctggccgagctggagggcgagttcctggtgaacgagttcatcaccagacagagaagaagagagctgagcgacagactgaacctgagcgaccagcaggtgaagatctggttccagaacagaagaatgaagaagaagagactgctgctgagagagcaggccctgagcttcttctag

SEQ ID NO: 251073 - protein, 866 aa, Artificial Sequence
  derived and/or modified sequence
MESEQLFHRGYYRNSYNSITSASSDEELLDGAGVIMDFQTSEDDNLLDGDTAVGTHYTMTNGGSINSSTHLLDLLDEPIPGVGTYDDFHTIDWVREKCKDRERHRRINSKKKESAWEMTKSLYDAWSGWLVVTLTGLASGALAGLIDIAADWMTDLKEGICLSALWYNHEQCCWGSNETTFEERDKCPQWKTWAELIIGQAEGPGSYIMNYIMYIFWALSFAFLAVSLVKVFAPYACGSGIPEIKTILSGFIIRGYLGKWTLMIKTITLVLAVASGLSLGKEGPLVHVACCCGNIFSYLFPKYSTNEAKKREVLSAASAAGVSVAFGAPIGGVLFSLEEVSYYFPLKTLWRSFFAALVAAFVLRSINPFGNSRLVLFYVEYHTPWYLFELFPFILLGVFGGLWGAFFIRANIAWCRRRKSTKFGKYPVLEVIIVAAITAVIAFPNPYTRLNTSELIKELFTDCGPLESSSLCDYRNDMNASKIVDDIPDRPAGIGVYSAIWQLCLALIFKIIMTVFTFGIKVPSGLFIPSMAIGAIAGRIVGIAVEQLAYYHHDWFIFKEWCEVGADCITPGLYAMVGAAACLGGVTRMTVSLVVIVFELTGGLEYIVPLMAAVMTSKWVGDAFGREGIYEAHIRLNGYPFLDAKEEFTHTTLAADVMRPRRNDPPLAVLTQDNMTVDDIENMINETSYNGFPVIMSKESQRLVGFALRRDLTIAIESARKKQEGIVGSSRVCFAQHTPSLPAESPRPLKLRSILDMSPFTVTDHTPMEIVVDIFRKLGLRQCLVTHNGIVLGIITKKNILEHLEQLKQHVEPLAPPWHYNKKRYPPAYGPDGKPRPRFNNVQLNLTDEEREETEEEVYLLNSTTL

SEQ ID NO: 251074 - DNA, 2601 bp, Artificial Sequence
  derived and/or modified sequence
atggaaagcgagcaactcttccaccggggatattacaggaattcctacaattccattacatccgcatccagcgatgaggaactgttagatggcgccggcgtgatcatggactttcagactagtgaagacgacaatctcctggatggggatacggccgtcggcactcactacaccatgactaatggcgggagtatcaattcatcaacccatctgcttgatctcttggacgagcctatccccggagtagggacctacgacgacttccacactattgactgggtgcgggagaaatgcaaggatcgagagcgccataggcgtatcaacagcaagaagaaggaatctgcttgggagatgaccaaaagtttgtacgacgcctggtccggctggctggttgtcaccctgacagggctcgcctcgggggctctggcggggcttattgatattgcagctgattggatgacagacctgaaagagggcatatgtctgtctgccttatggtacaatcacgaacagtgctgctggggatctaatgagactaccttcgaagaacgcgacaagtgtccacaatggaaaacatgggctgaactgataatcggacaggcagagggcccggggtcatacataatgaattacataatgtacatcttttgggctttgtcgtttgcttttttggccgtttcactggtgaaggttttcgccccttacgcctgcggcagcggcatccccgagatcaagactattctatcggggtttatcatcagaggatatctcggcaagtggacactgatgatcaaaaccattacgctcgtgctagccgtggccagtggactgagtctggggaaggaaggacccctagtccacgtggcgtgctgctgcggcaatattttcagttatttgtttcccaaatattccacaaatgaagccaaaaaacgggaagtgttaagcgctgccagcgcggcgggggtttctgtcgctttcggagcccctatcggtggtgtccttttttctttggaagaggtctcctactattttcccttgaagactctgtggagatccttcttcgccgcgctggtcgccgcctttgttctgcgatccataaatccattcggaaactccagactcgtcctgttttacgtggagtatcacacaccgtggtacttgttcgagctgttcccattcattctgctgggcgtttttgggggactctggggcgccttcttcatcagagcaaacatcgcctggtgtaggaggaggaaaagcaccaagttcgggaaatacccggtcctagaggttattattgtggccgccatcactgccgtgatagcatttcccaacccctacactagactgaataccagtgaactgattaaggagctatttactgattgtggccctctagagtcctcctcattgtgcgactatcggaacgacatgaatgctagcaagatcgtcgatgatattcccgacagaccagctggaattggcgtgtacagcgcaatttggcagctgtgtctggctcttatctttaagataatcatgactgtgttcacattcggcatcaaggtgccgtccgggctttttatcccttccatggccattggtgctatagcaggaaggattgtcggaatcgcggtggaacaactggcctactaccaccatgattggtttatattcaaagagtggtgtgaagtgggcgccgattgcattacccctggtctgtacgcaatggtgggagccgccgcttgtttgggaggagttacgcggatgaccgtgtctctggtcgtcatcgtcttcgaattgaccggcggtctggagtacatcgtccccctaatggctgctgtgatgacttccaagtgggtgggcgacgccttcggtcgcgagggaatttatgaggcccacatccgcctcaatggctatcccttcctggacgcgaaggaggagttcacccatactaccctcgcggcagacgtgatgaggcctcgccgcaacgacccaccactggcagtgctgacccaggacaatatgaccgtcgacgacatcgagaacatgatcaacgaaacgagctacaatggtttcccagttataatgtccaaggagtctcaacgactggtaggctttgcccttcgcagggatctgactatcgccatagaatctgcgcgcaagaaacaggagggaatagttgggagttcccgtgtctgtttcgcccagcataccccttcgcttccagccgaaagtccacggcctttgaagcttaggagcattctcgatatgtcccctttcaccgtcaccgaccatacccctatggaaatcgtggtcgacatttttcgaaaacttgggctgaggcagtgtttggtcacacacaatggcatcgtgctgggcatcatcacaaagaagaacatcctggagcacctcgaacagttaaaacagcacgtggagcctcttgctcctccatggcactataacaagaaaaggtatcctcctgcgtacggacccgatgggaaacctcgcccacgctttaataacgtccagttaaacctgacagacgaagagagggaggaaaccgaagaggaagtgtacctgctcaattcaactaccctctag

SEQ ID NO: 251075 - DNA, 2601 bp, Artificial Sequence
  derived and/or modified sequence
atggagagcgagcagctgttccaccggggctactacagaaattcctacaacagcatcaccagcgccagcagtgatgaggagctgctggatggagctggggtcatcatggacttccagaccagtgaagatgacaacctgctggatggagacacagctgtgggcacccactacaccatgaccaatggaggcagcatcaacagcagcacccacctgctggacctgctggatgagcccatccctggggtgggcacctatgatgacttccacaccatcgactgggtgcgggagaagtgcaaggaccgggagcggcaccggcgcatcaacagcaagaagaaggagagcgcctgggagatgaccaagagcctgtatgatgcctggagcggctggctggtggtgaccctgaccggcctggccagcggggccctggccggcctgattgatattgctgctgactggatgacagacctgaaggagggcatctgcctgagcgccctgtggtacaaccacgagcagtgctgctggggcagcaatgagaccacctttgaggagcgggacaagtgcccccagtggaagacctgggccgagctgatcatcggccaggccgagggccctggcagctacatcatgaactacatcatgtacatcttctgggccctgagctttgccttcctggccgtgtccctggtgaaggtgtttgccccctatgcctgtggcagcggcatccctgagatcaagaccatcctgagcggcttcatcatccggggctacctgggcaagtggaccctgatgatcaagaccatcaccctggtgctggccgtggccagcggcctgagcctgggcaaggagggccccctggtgcacgtggcctgctgctgcggcaacatcttctcctacctgttccccaagtacagcaccaatgaggccaagaagcgggaggtgctgtctgctgccagcgctgctggggtgtctgtggccttcggggcccccatcggcggcgtgctcttcagcctggaggaggtgtcctactacttccccctgaagaccctgtggaggagcttctttgctgccctggtggccgcctttgtgctgcggagcatcaacccctttggaaacagccggctggtgctcttctacgtggagtaccacaccccctggtacctgtttgagctgttccccttcatcctgctgggcgtgtttggaggcctgtggggcgccttcttcatccgggccaacatcgcctggtgcagaagaaggaagagcaccaagtttgggaagtaccctgtgctggaggtgatcatcgtggccgccatcacagctgtgattgccttccccaacccctacacccggctgaacaccagcgagctgatcaaggagctgttcacagactgtggccccctggagagcagcagcctgtgtgactacagaaatgacatgaatgccagcaagatcgtggatgacatcccagacaggcctgctggcatcggcgtgtacagcgccatctggcagctgtgcctggccctgatcttcaagatcatcatgaccgtcttcaccttcggcatcaaggtgcccagcggcctcttcatccccagcatggccatcggggccatcgccggccgcatcgtgggcattgctgtggagcagctggcctactaccaccacgactggttcatcttcaaggagtggtgtgaggtgggcgctgactgcatcaccccaggcctgtatgccatggtgggcgccgccgcctgcctgggcggcgtgaccaggatgacagtgtccctggtggtgattgtgtttgagctgactggaggcctggagtacatcgtgcccctgatggctgctgtgatgaccagcaagtgggtgggagatgccttcggccgggagggcatctatgaggcccacatccggctgaatggctaccccttcctggatgccaaggaggagttcacccacaccaccctggccgcagatgtgatgaggcccaggagaaatgacccccccctggccgtgctgacccaggacaacatgacagtggatgacatcgagaacatgatcaatgagaccagctacaacggcttccctgtgatcatgagcaaggagagccagaggctggtgggctttgccctgcggcgggacctgaccatcgccatcgagagcgccaggaagaagcaggagggcatcgtgggcagcagccgggtgtgctttgcccagcacacccccagcctgcctgctgagagcccccggcccctgaagctgcggagcatcctggacatgagccccttcaccgtgacagaccacacccccatggagatcgtggtggacatcttcaggaagctgggcctgcggcagtgcctggtgacccacaacggcatcgtgctgggcatcatcaccaagaagaacatcctggagcacctggagcagctgaagcagcacgtggagcccctggccccaccctggcactacaacaagaagcgctaccccccagcctacggcccagatggcaagccccggccccgcttcaacaacgtgcagctgaacctgacagatgaggagcgggaggagacagaggaggaggtgtacctgctgaacagcaccaccctgtag

SEQ ID NO: 251076 - DNA, 2601 bp, Artificial Sequence
  derived and/or modified sequence
atggagagcgagcagctgttccaccggggctactaccggaacagctacaatagtatcacatcagcctctagcgatgaagagctgctggatggcgccggggttatcatggattttcagacttctgaggatgacaacctgcttgacggcgataccgctgtgggcacccactatacgatgacaaatggaggcagcatcaattcctcaacccatctgctggatctgcttgacgagccaatacccggcgtagggacctacgacgacttccatacaatcgattgggtgagggagaaatgcaaggatcgcgaaagacaccgaagaatcaacagcaaaaagaaggagtccgcgtgggagatgaccaaatctctgtatgacgcttggtctggatggttagtggtcaccctgacggggttggctagtggggcacttgctgggttgatagacattgcggcagactggatgacggacctgaaagagggtatctgcctttctgctttatggtataaccatgagcagtgttgctggggctccaacgaaacaacttttgaggaaagggataagtgtccgcagtggaagacctgggcagaactgatcattggtcaagccgagggcccggggagctatatcatgaattacattatgtatatattttgggctctgtcctttgccttcctggctgtgagtcttgtcaaggttttcgccccatacgcatgcggatctgggatccccgaaattaagactatcttgagtgggtttatcatccgcggctatctgggtaaatggactctcatgatcaaaaccataactctggtcctggctgtggcctcaggcttgtctcttggcaaggaggggcccttagtgcacgttgcttgttgctgcggtaatattttcagctacttattccccaaatacagtaccaatgaagcaaagaaacgcgaggtcctttcagccgcttccgccgcaggagtgagcgtcgcttttggcgcacctatcggaggagtgctgttttctctagaggaagtaagctactactttccactgaagactctttggcggagtttctttgccgcactggtcgccgcttttgtgctacggtcaatcaatccattcggaaatagccgccttgtgctgttttacgtggaataccacactccgtggtatctgtttgaactattcccattcatcctcctgggcgtattcggagggttgtggggagcttttttcattcgggctaatatcgcatggtgtaggagaagaaagtccacgaaattcggcaaataccccgtgcttgaagtgattatcgtggccgccataactgcagtgatcgcattccctaacccgtatacacgcctcaacacctcggagttaataaaagagctattcactgattgcggacctctggaaagctcatcattatgcgattatcgaaatgacatgaatgcctcaaaaatcgtggatgacatccccgatcggcccgcaggaataggcgtgtacagcgctatttggcaactgtgtctcgcccttatcttcaagatcattatgacggtatttacatttgggataaaagtaccttctggcctgtttataccctcgatggctatcggcgctatagcgggccggattgttgggattgccgttgagcagcttgcatattatcaccatgattggtttatttttaaggagtggtgtgaggtgggcgctgactgcattacacccgggctctacgctatggtgggagcagcggcctgtctgggaggcgtaaccagaatgactgtttcactcgtggtaatagtgttcgagctgaccggaggactggaatatattgtgccactgatggcagccgtgatgaccagcaaatgggtgggggacgcctttgggagagagggaatctacgaagctcacatccgcctgaatggatacccctttctcgatgctaaagaggagtttacgcacaccacgctggccgctgatgtgatgcggcctaggcgcaacgacccacctctggcagtgctcacacaggataacatgacagtagatgacattgaaaatatgatcaatgagacaagctataatggatttccggtgatcatgagcaaagagtcccagagactggttggctttgccttacgcagggatttgactattgccattgagtctgccaggaagaagcaagaggggatcgtgggctccagccgcgtgtgtttcgcacagcataccccatctttaccggccgaatcccctaggcctctaaagcttaggtcgatacttgatatgtcaccttttacagtgactgatcatacaccgatggaaattgtagtcgacattttccgcaaactcggactacgccagtgtcttgtgacccacaacggcatcgttttgggcatcattacaaaaaaaaatattcttgaacatctcgaacagctgaaacaacatgtcgagccattagctcctccctggcactacaacaagaagcgttatccccctgcctatggcccggatggtaagcccagaccccggtttaataacgtccagttaaacctcaccgatgaggagagggaagagacggaagaagaagtgtatctgttaaatagcactactctctag

SEQ ID NO: 251077 - DNA, 2601 bp, Artificial Sequence
  derived and/or modified sequence
atggagtctgagcagttatttcaccgcggatattacaggaactcatataactcgattacatccgctagctccgatgaagaactgttagatggtgcaggagttattatggacttccagacatcagaggatgacaacttgctagacggcgataccgctgtaggaacccactacaccatgaccaacggcggatccattaatagttcaacccaccttctagacctcctcgatgaacctattcctggcgtcggtacctatgatgacttccacacaattgactgggtcagagagaagtgcaaagaccgcgagcgccatcgtagaataaattccaagaaaaaagaatcagcatgggaaatgaccaagagcctctacgatgcttggagcggttggctggtggttacattgaccggcttagcttcaggggcactcgcaggactcattgacatcgctgccgattggatgactgatctgaaggagggcatctgtctttctgctctgtggtacaaccacgagcagtgctgctgggggtccaatgagacaactttcgaagagcgcgacaagtgcccccagtggaagacctgggcggaattgatcataggccaggccgagggacctggttcatacattatgaactatattatgtatatcttttgggctctctcatttgctttcctggctgtcagcctggtgaaggtgtttgccccttatgcctgcggatcaggcatacccgaaataaaaaccatcttgagcggctttataataagagggtacttagggaaatggaccctgatgatcaagacaattacgttagtgttggccgtagcctcaggcctctccctcgggaaggagggaccactcgttcatgtggcatgctgctgcggcaatatattttcctatctatttccaaaatactccacaaacgaggctaaaaagcgcgaggtgctgagcgccgctagtgccgctggggtctcagtcgcattcggtgcccctattggcggagtgctcttcagcctcgaggaggtatcttactatttcccactcaagacactgtggcgaagttttttcgcggctctagtcgctgctttcgtactcaggtcaataaaccccttcggcaatagccggctggtgctgttttacgtggaataccacactccatggtatttatttgaactcttccccttcatactattgggcgtctttggaggcctttggggagcattcttcattcgcgctaacattgcatggtgtcgccgtcgcaagagcactaagttcgggaagtacccggtgctggaagtgattattgtggcagccattactgctgtgattgcttttcctaacccctacacccggctcaacacttccgagctgattaaagagctgtttactgactgtggacctctcgagagctccagcctctgcgattatcgcaacgatatgaacgcgagtaagatcgtagatgatatccccgataggccagccggaattggggtgtactcagccatttggcagctgtgcctcgcgctcatcttcaagattatcatgaccgtcttcacatttggtatcaaggtcccctctgggttattcatccccagcatggctatcggtgccatcgcaggaaggatcgttggcatagctgtggagcagctggcctactatcaccatgattggtttatctttaaggagtggtgcgaggtgggtgcagattgtattacacccggactgtatgccatggtcggcgctgcagcttgcctcgggggtgtgacaagaatgaccgtcagcctggtggtaatcgtctttgagctgactggaggcttagagtacatcgtgccgttgatggcagccgtgatgacatctaaatgggtaggagatgccttcgggagagaggggatctacgaagcgcacatacgccttaatggctaccccttcctcgacgccaaggaggagttcacacacacaaccttggccgctgacgtcatgaggccccgtagaaacgaccccccacttgctgtgctaacccaggacaatatgacggtcgacgatattgagaacatgattaacgagacttcctataatggatttcccgtcatcatgtccaaggagagtcagcggcttgtcggttttgccctgcgacgagacctcactatcgcaatcgaaagcgcaaggaagaagcaggagggcatcgtggggtcttcccgagtctgttttgcccaacacacaccctccctgccggcagagtcccctaggcctctgaagttgcgttctatcctggatatgtctccctttactgtgacagaccacacccccatggagatcgttgtggatatattcagaaagctgggtctgcggcaatgtctcgtcacacacaacgggatcgtgctgggcataattacgaagaagaacatcttggaacatctggaacagttgaaacaacacgtggaacctcttgctccaccatggcattacaacaaaaaaaggtaccctcccgcatacggtccagacggaaaaccaaggccccgatttaacaatgtgcaactgaacctaacagacgaggagcgtgaggagacagaagaggaggtgtacctgttgaacagcacaacgttgtag

SEQ ID NO: 251078 - DNA, 3635 bp, Artificial Sequence
  derived and/or modified sequence
gtcacgcgtcgacgctggggcgtacctttcgggctcctgactcctgccgcttctcttccccttccgtgggtcagggccggtccggtccggaacctgcagcccctttcccagtgttctagttcgcccgtgacccggaataatgagcaaggagggtgtggtgggttgaaagccatcctactttactcccgagttagagcatggattcagttttagtcttaagggggaagtgagattggagatttttatttttaattttgggcagaagcaggttgactctagggatctccagagcgagaggatttaacttcatgttgctcccgtgtttgaaggaggacaataaaagtcccaccgggcaaaattttcgtaacctctgcggtagaaaacgtcaggtatcttttaaatcgcgatagttttcgctgtgtcaggctttcttcggtggagctccgagggtagctaggttctaggtttgaaacagatgcagaatccaaaggcagcgcaaaaaacagccaccgattttgctatgtctctgagctgcgagataatcagacagctaaatggagtctgagcagctgttccatagaggctactatagaaacagctacaacagtataacaagtgcaagtagtgatgaggaacttttagatggagcaggtgttattatggactttcaaacatctgaagatgacaatttattagatggtgacactgcagttggaactcattatacaatgacaaatggaggcagcattaacagttctacacatttactggatcttttggatgaaccaattccaggtgttggtacatatgatgatttccatactattgattgggtgcgagaaaaatgtaaagacagagaaaggcatagacggatcaacagcaaaaagaaagaatcagcatgggaaatgacaaaaagtttgtatgatgcgtggtcaggatggctagtagtaacactaacaggattggcatcaggggcactggccggattaatagacattgctgccgattggatgactgacctaaaggagggcatttgccttagtgcgttgtggtacaaccacgaacagtgctgttggggatctaatgaaacaacatttgaagagagggataaatgtccacagtggaaaacatgggcagaattaatcataggtcaagcagagggtcctggttcttatatcatgaactacataatgtacatcttctgggccttgagttttgcctttcttgcagtttccctggtaaaggtatttgctccatatgcctgtggctctggaattccagagattaaaactattttaagtggattcatcatcagaggttacttgggaaaatggactttaatgattaaaaccatcacattagtcctggctgtggcatcaggtttgagtttaggaaaagaaggtcccctggtacatgttgcctgttgctgcggaaatatcttttcctacctctttccaaagtatagcacaaacgaagctaaaaaaagggaggtgctatcagctgcctcagctgcaggggtttctgtagcttttggtgcaccaattggaggagttctttttagcctggaagaggttagctattattttcctctcaaaactttatggagatcattttttgctgctttagtggctgcatttgttttgaggtccatcaatccatttggtaacagccgtctggtccttttttatgtggagtatcatacaccatggtacctttttgaactgtttccttttattcttctaggggtatttggagggctttggggagcctttttcattagggcaaatattgcctggtgtcgtcgacgcaagtccacgaaatttggaaagtatcccgttctggaagtcattattgttgcagccattactgctgtgatagccttccctaatccatacactaggctaaacaccagtgaactgatcaaagagctttttacagactgtggtcccctggaatcctcttctctttgtgactacagaaatgacatgaatgccagtaaaattgtcgatgacattcctgatcgtccagcaggcattggagtatattcagctatatggcagttatgcctggcactcatatttaaaatcataatgacagtattcacttttggcatcaaggttccatcaggcttgttcatccccagcatggccattggagcgatcgcaggaaggattgtggggattgcggtggagcagcttgcctactatcaccacgactggtttatctttaaggagtggtgtgaggtcggggctgattgcattacacctggcctttatgccatggttggtgctgctgcatgcttaggtggtgtgacaagaatgactgtctccctggtggttattgtttttgagcttactggaggcttggaatatattgttccccttatggctgcagtcatgaccagtaaatgggttggagatgcctttggcagggaaggcatttatgaagcacacatccgattaaatggataccctttcttggatgcaaaagaagaattcactcataccaccctggctgctgacgttatgagacctcgaaggaatgatcctcccttagctgtcctgacacaggacaatatgacagtggatgatatagaaaacatgattaatgaaaccagctacaatggatttcctgtcataatgtcaaaagaatctcagagattagtgggatttgccctcagaagagacctgacaattgcaatagaaagtgccaggaaaaaacaagaaggtatcgttggcagttctcgggtgtgttttgcacagcacaccccatctcttccagcagaaagtcctcggccattgaagcttcgaagcattcttgacatgagcccttttacagtgacagaccacaccccaatggagatcgtggtggatattttccgaaagctgggactgaggcagtgccttgtaactcacaatgggattgtcttggggatcatcacaaagaagaacatattagagcatctcgagcaactaaagcagcacgtcgaacccttggcgcctccttggcattataacaaaaaaagatatcctccggcatatggcccagacggcaaaccaagaccccgcttcaataatgttcaactgaatctcacagatgaggagagagaagaaacggaagaggaagtttatttgttgaatagcacaactctttaacctgagggagtcatctacttttttttcctcctttacaaaaaaagaaaggaaatataaaagccgggtttttgcaacatggtttgcaaataatgctggtggaatggaggagttgtttggggagggaaaggagagagaaggaaaggagtgaggtatttcccgtctaacagaaagcagcgtatcaactcctattgttctgcactggatgcattcagctgaggatgtgcctgatagtgcaggcttgcgcctcaacagagatgacagcagagtcctcgagcacctggcctgttgctccaacattgcaaagacacattatcagtccctatttctagagggattactttgaattgagccatctataaaactgcaaggtcttgcccttttttttaatcaaaactgttctgtttaattcatgaattgtatagttaagcattacctttctacattccagaagagcctttatttctctctctctctctctct

SEQ ID NO: 251079 - DNA, 2601 bp, Artificial Sequence
  derived and/or modified sequence
atggagagcgagcagctgttccacagaggctactacagaaacagctacaacagcatcaccagcgccagcagcgacgaggagctgctggacggcgccggcgtgatcatggacttccagaccagcgaggacgacaacctgctggacggcgacaccgccgtgggcacccactacaccatgaccaacggcggcagcatcaacagcagcacccacctgctggacctgctggacgagcccatccccggcgtgggcacctacgacgacttccacaccatcgactgggtgagagagaagtgcaaggacagagagagacacagaagaatcaacagcaagaagaaggagagcgcctgggagatgaccaagagcctgtacgacgcctggagcggctggctggtggtgaccctgaccggcctggccagcggcgccctggccggcctgatcgacatcgccgccgactggatgaccgacctgaaggagggcatctgcctgagcgccctgtggtacaaccacgagcagtgctgctggggcagcaacgagaccaccttcgaggagagagacaagtgcccccagtggaagacctgggccgagctgatcatcggccaggccgagggccccggcagctacatcatgaactacatcatgtacatcttctgggccctgagcttcgccttcctggccgtgagcctggtgaaggtgttcgccccctacgcctgcggcagcggcatccccgagatcaagaccatcctgagcggcttcatcatcagaggctacctgggcaagtggaccctgatgatcaagaccatcaccctggtgctggccgtggccagcggcctgagcctgggcaaggagggccccctggtgcacgtggcctgctgctgcggcaacatcttcagctacctgttccccaagtacagcaccaacgaggccaagaagagagaggtgctgagcgccgccagcgccgccggcgtgagcgtggccttcggcgcccccatcggcggcgtgctgttcagcctggaggaggtgagctactacttccccctgaagaccctgtggagaagcttcttcgccgccctggtggccgccttcgtgctgagaagcatcaaccccttcggcaacagcagactggtgctgttctacgtggagtaccacaccccctggtacctgttcgagctgttccccttcatcctgctgggcgtgttcggcggcctgtggggcgccttcttcatcagagccaacatcgcctggtgcagaagaagaaagagcaccaagttcggcaagtaccccgtgctggaggtgatcatcgtggccgccatcaccgccgtgatcgccttccccaacccctacaccagactgaacaccagcgagctgatcaaggagctgttcaccgactgcggccccctggagagcagcagcctgtgcgactacagaaacgacatgaacgccagcaagatcgtggacgacatccccgacagacccgccggcatcggcgtgtacagcgccatctggcagctgtgcctggccctgatcttcaagatcatcatgaccgtgttcaccttcggcatcaaggtgcccagcggcctgttcatccccagcatggccatcggcgccatcgccggcagaatcgtgggcatcgccgtggagcagctggcctactaccaccacgactggttcatcttcaaggagtggtgcgaggtgggcgccgactgcatcacccccggcctgtacgccatggtgggcgccgccgcctgcctgggcggcgtgaccagaatgaccgtgagcctggtggtgatcgtgttcgagctgaccggcggcctggagtacatcgtgcccctgatggccgccgtgatgaccagcaagtgggtgggcgacgccttcggcagagagggcatctacgaggcccacatcagactgaacggctaccccttcctggacgccaaggaggagttcacccacaccaccctggccgccgacgtgatgagacccagaagaaacgacccccccctggccgtgctgacccaggacaacatgaccgtggacgacatcgagaacatgatcaacgagaccagctacaacggcttccccgtgatcatgagcaaggagagccagagactggtgggcttcgccctgagaagagacctgaccatcgccatcgagagcgccagaaagaagcaggagggcatcgtgggcagcagcagagtgtgcttcgcccagcacacccccagcctgcccgccgagagccccagacccctgaagctgagaagcatcctggacatgagccccttcaccgtgaccgaccacacccccatggagatcgtggtggacatcttcagaaagctgggcctgagacagtgcctggtgacccacaacggcatcgtgctgggcatcatcaccaagaagaacatcctggagcacctggagcagctgaagcagcacgtggagcccctggcccccccctggcactacaacaagaagagatacccccccgcctacggccccgacggcaagcccagacccagattcaacaacgtgcagctgaacctgaccgacgaggagagagaggagaccgaggaggaggtgtacctgctgaacagcaccaccctgtag

SEQ ID NO: 251080 - protein, 383 aa, Artificial Sequence
  derived and/or modified sequence
MAALSGVRWLTRALVSAGNPGAWRGLSTSAAAHAASRSQAEDVRVEGSFPVTMLPGDGVGPELMHAVKEVFKAAAVPVEFQEHHLSEVQNMASEEKLEQVLSSMKENKVAIIGKIHTPMEYKGELASYDMRLRRKLDLFANVVHVKSLPGYMTRHNNLDLVIIREQTEGEYSSLEHESARGVIECLKIVTRAKSQRIAKFAFDYATKKGRGKVTAVHKANIMKLGDGLFLQCCEEVAELYPKIKFETMIIDNCCMQLVQNPYQFDVLVMPNLYGNIIDNLAAGLVGGAGVVPGESYSAEYAVFETGARHPFAQAVGRNIANPTAMLLSASNMLRHLNLEYHSSMIADAVKKVIKVGKVRTSDMGGYATCHDFTEAVIAALPHP

SEQ ID NO: 251081 - DNA, 1152 bp, Artificial Sequence
  derived and/or modified sequence
atggccgctctgagcggcgtgcgctggctgacccgggcactcgtgagtgccggcaacccgggcgcgtggcgtggactgtccacgtctgcggcagctcacgccgcaagtagaagtcaggcagaagacgtgcgtgtcgagggaagtttcccagtgacaatgctgcccggcgacggagtgggaccggaactgatgcacgccgttaaagaggtttttaaagcggccgccgtccccgtggaattccaggaacaccatctttctgaggtgcagaatatggcctcagaggaaaaactcgaacaggtgctatcctctatgaaagagaataaggtggcaatcatcggaaagattcatacccctatggaatataagggcgagctggcttcctatgacatgagactgaggcggaagttggatttgtttgccaacgtggtgcatgtgaaatccctgcccgggtacatgacccgccacaataatctggatctagtcataattagggagcagaccgagggcgaatacagttccctcgagcacgaaagcgctaggggggtaatcgaatgtcttaagattgtcactcgtgccaaaagtcagaggattgccaaatttgctttcgactatgccacaaaaaaaggtaggggtaaggtcaccgcggtgcataaggccaacattatgaagctgggggatggactctttctgcagtgttgcgaagaggtggctgaactctatcccaagattaagtttgagaccatgatcattgacaactgttgcatgcaattagtgcagaacccctatcagtttgacgtcttagtgatgccaaatctctacggaaacatcattgataatctggccgcaggcctcgttggaggcgccggagtcgtgccgggagagagctactctgccgagtatgccgtttttgaaacaggagcaagacaccctttcgcgcaggctgttggtagaaacatcgctaatccaactgcaatgctgctctctgcgtccaacatgctgcgtcatctaaatctggaatatcactcttccatgatagctgacgcagtgaaaaaagtgatcaaggtgggaaaggtaaggacttctgacatgggtgggtacgccacctgtcacgattttacagaggccgtaatcgctgctctgccacatccatag

SEQ ID NO: 251082 - DNA, 1230 bp, Artificial Sequence
  derived and/or modified sequence
gtcacttcccacgcgacttcctgcgggaaacatggcggcattgagcggagtccgctggctgacccgagcgctggtctccgccgggaaccctggggcatggagaggtctgagtacctcggccgcggcgcacgctgcatcgcggagccaggccgaggacgtgagggtggagggctcctttcccgtgaccatgcttccgggagacggtgtggggcctgagctgatgcacgccgtcaaggaggtgttcaaggctgccgctgtcccagtggagttccaggagcaccacctgagtgaggtgcagaatatggcatctgaggagaagctggagcaggtgctgagttccatgaaggagaacaaagtggccatcattggaaagattcataccccgatggagtataagggggagctagcctcctatgatatgcggctgaggcgtaagttggacttatttgccaacgtagtccatgtgaagtcacttcctgggtatatgactcggcacaacaatctagacctggtgatcattcgagagcagacagaaggggagtacagctctctggaacatgagagtgcaaggggtgtgattgagtgtttgaagattgtcacacgagccaagtctcagcggattgcaaagttcgcctttgactatgccaccaagaaggggcggggcaaggtcactgctgtccacaaggccaacatcatgaaacttggggatgggttgttcctgcagtgctgtgaggaagttgctgaactgtaccccaaaatcaaatttgagacaatgatcatagacaactgctgcatgcagctggtgcagaatccttaccagtttgatgtgcttgtgatgcccaatctctatgggaacattattgacaatctggctgctggcctggttgggggagctggtgtggtccctggtgagagctatagtgcagaatacgcagtctttgagacgggtgcccggcacccatttgcccaggcagtgggcaggaatatagccaatcccacggccatgctgctgtcggcttccaacatgctgcggcatcttaatcttgagtatcactccagcatgatcgcagatgcggtgaagaaggtgatcaaagttggcaaggttcgaacctctgacatgggtggctatgctacttgccatgacttcactgaggctgtcattgctgccttgccccacccataggccctgtccatacccatgtaaggtgttcaataaagaacatgaaccaa

SEQ ID NO: 251083 - DNA, 1152 bp, Artificial Sequence
  derived and/or modified sequence
atggccgccctgtctggagtgcgctggctgacccgggccctggtgtctgctggcaaccctggggcctggaggggcctgagcaccagcgctgctgcccacgccgccagccgcagccaggctgaagatgtgcgggtggagggcagcttccctgtgaccatgctgcctggagatggagtgggccctgagctgatgcatgctgtgaaggaggtgttcaaggctgctgctgtgcctgtggagttccaggagcaccacctgtctgaggtgcagaacatggccagcgaggagaagctggagcaggtgctgagctccatgaaggagaacaaggtggccatcatcggcaagatccacacccccatggagtacaagggggagctggccagctatgacatgaggctgcggaggaagctggacctgtttgccaacgtggtgcacgtgaagagcctgcccggctacatgaccaggcacaacaacctggacctggtgatcatccgggagcagacagaaggagagtacagcagcctggagcacgagagcgcccggggcgtgattgagtgcctgaagatcgtgacccgggccaagagccagagaattgccaagtttgcctttgattatgccaccaagaagggccggggcaaggtgacagctgtgcacaaggccaacatcatgaagctgggagatggcctcttcctgcagtgctgtgaggaggtggccgagctgtaccccaagatcaagtttgagaccatgatcatcgacaactgctgcatgcagctggtgcagaacccctaccagtttgatgtgctggtgatgcccaacctgtatggcaacatcatcgacaacctggccgccggcctggtgggcggggccggcgtggtgcctggagagagctacagcgcagaatatgctgtgtttgaaacaggagcccggcacccctttgcccaggccgtgggcagaaatattgccaaccccacagccatgctgctgagcgccagcaacatgctgcggcacctgaacctggagtaccacagctccatgattgctgatgctgtgaagaaggtgatcaaggtgggcaaggtgaggaccagtgacatgggcggctacgccacctgccacgacttcacagaagctgtgattgctgccctgccccacccctag

SEQ ID NO: 251084 - DNA, 1152 bp, Artificial Sequence
  derived and/or modified sequence
atggccgccctgagcggcgtgcggtggctgacccgggccctggtgtccgctgggaacccaggagcatggcggggcttatcaacaagtgcggcggctcatgcagcttctcggagtcaggccgaggatgtgcgagtggagggcagttttccagttaccatgctgccgggcgatggcgtaggacccgagctcatgcacgcagtgaaagaggtgttcaaggcggccgccgtgcctgtcgagttccaagaacaccacttgtccgaagtgcagaatatggcaagcgaagagaagttggaacaggtgttgtcttccatgaaggagaacaaggtcgctatcattggcaaaattcacacacccatggagtacaaaggtgaacttgccagctacgatatgaggctgaggagaaagctcgacttgtttgcaaacgtcgttcacgtgaaatcactgcccggatatatgacccgccataacaacctggacctcgttattatccgggaacaaacagaaggagaatactccagcctcgagcacgaatcagcaaggggggttattgaatgcctcaagattgtcactcgcgcgaagagccagcgcatagccaagtttgctttcgattacgcaacaaaaaaaggaagaggcaaggtcacagcggtccataaagctaacattatgaagctaggtgatggcctgttccttcagtgctgcgaagaggtcgctgagttgtatcccaagattaaatttgagactatgatcatcgacaactgttgtatgcaactggtccagaacccctaccagtttgatgtgcttgtaatgcccaatctatatggcaacatcattgataacctcgccgccggcctagttggaggagccggcgtcgtgcccggtgagtcatactccgcagagtacgcggtgttcgagacaggcgcccggcatccttttgcccaggctgtcggccggaacatagccaaccctaccgccatgctgttatctgcctctaatatgctgcgacacttgaatctcgagtatcactcctctatgattgcggatgccgtgaagaaggttataaaggttggcaaagttaggacaagtgacatgggtggttacgctacctgccacgacttcacagaagcagtcattgctgctctcccgcacccctag

SEQ ID NO: 251085 - DNA, 1152 bp, Artificial Sequence
  derived and/or modified sequence
atggccgctctttccggcgttcggtggttaactcgagcactagtgagcgctggcaacccaggagcctggcggggtttatcgactagtgcagccgcacacgctgcctcacgtagccaggctgaggatgtgcgtgtggaagggagcttccctgtgaccatgcttcctggggacggagtgggccctgagcttatgcatgctgtaaaggaggtttttaaggctgccgcagttcctgtggaattccaggagcaccacctctctgaggtgcagaacatggcgtcggaagagaagcttgaacaggtcttaagttctatgaaagagaacaaggtcgcaatcattggaaagattcatacacccatggagtacaagggagaactcgctagctacgacatgcgtcttcgcaggaagcttgacctatttgcaaatgttgtgcatgttaaatccctgccaggatacatgactagacacaataaccttgatctagtgattatccgcgagcagacagaaggtgaatattccagtctcgagcacgagagcgctcgaggggtgatcgagtgccttaagatcgtgactcgggcaaagtcacagaggattgctaagttcgccttcgattacgctaccaagaagggaagagggaaggtaaccgcggtccacaaggctaatatcatgaaacttggcgatggactgtttctccagtgctgcgaagaggtcgcggaactttatcccaagatcaaatttgaaacaatgatcatagataactgctgcatgcagttagtgcagaacccttaccagttcgatgtactggttatgcctaacctgtatggtaatataatcgataacctggctgccggactggtgggtggcgctggcgtagtgcccggtgaaagctatagcgccgaatatgctgtcttcgagaccggagcccgacatccatttgcccaggcagttggcaggaatattgcaaatcctacagccatgctcttgtcagccagtaatatgctcaggcatttgaacttagaatatcactcaagcatgatcgctgacgccgttaaaaaggtgatcaaagtgggaaaagtccggactagcgatatgggcggatacgccacatgtcacgacttcacagaggccgtgattgcggctctgccacacccatag

SEQ ID NO: 251086 - DNA, 1152 bp, Artificial Sequence
  derived and/or modified sequence
atggccgccctgagcggcgtgagatggctgaccagagccctggtgagcgccggcaaccccggcgcctggagaggcctgagcaccagcgccgccgcccacgccgccagcagaagccaggccgaggacgtgagagtggagggcagcttccccgtgaccatgctgcccggcgacggcgtgggccccgagctgatgcacgccgtgaaggaggtgttcaaggccgccgccgtgcccgtggagttccaggagcaccacctgagcgaggtgcagaacatggccagcgaggagaagctggagcaggtgctgagcagcatgaaggagaacaaggtggccatcatcggcaagatccacacccccatggagtacaagggcgagctggccagctacgacatgagactgagaagaaagctggacctgttcgccaacgtggtgcacgtgaagagcctgcccggctacatgaccagacacaacaacctggacctggtgatcatcagagagcagaccgagggcgagtacagcagcctggagcacgagagcgccagaggcgtgatcgagtgcctgaagatcgtgaccagagccaagagccagagaatcgccaagttcgccttcgactacgccaccaagaagggcagaggcaaggtgaccgccgtgcacaaggccaacatcatgaagctgggcgacggcctgttcctgcagtgctgcgaggaggtggccgagctgtaccccaagatcaagttcgagaccatgatcatcgacaactgctgcatgcagctggtgcagaacccctaccagttcgacgtgctggtgatgcccaacctgtacggcaacatcatcgacaacctggccgccggcctggtgggcggcgccggcgtggtgcccggcgagagctacagcgccgagtacgccgtgttcgagaccggcgccagacaccccttcgcccaggccgtgggcagaaacatcgccaaccccaccgccatgctgctgagcgccagcaacatgctgagacacctgaacctggagtaccacagcagcatgatcgccgacgccgtgaagaaggtgatcaaggtgggcaaggtgagaaccagcgacatgggcggctacgccacctgccacgacttcaccgaggccgtgatcgccgccctgccccacccctag

SEQ ID NO: 251087 - protein, 436 aa, Artificial Sequence
  derived and/or modified sequence
MADGGSERADGRIVKMEVDYSATVDQRLPECAKLAKASDMVSTSRILVAVVKMCYEAKEWDLLNENIMLLSKRRSQLKQAVAKMVQQCCTYVEEITDLPIKLRLIDTLRMVTEGKIYVEIERARLTKTLATIKEQNGDVKEAASILQELQVETYGSMEKKERVEFILEQMRLCLAVKDYIRTQIISKKINTKFFQEENTEKLKLKYYNLMIQLDQHEGSYLSICKHYRAIYDTPCIQAESEKWQQALKSVVLYVILAPFDNEQSDLVHRISGDKKLEEIPKYKDLLKLFTTMELMRWSTLVEDYGMELRKGSLESPATDVFGSTEEGEKRWKDLKNRVVEHNIRIMAKYYTRITMKRMAQLLDLSVDESEAFLSNLVVNKTIFAKVDRLAGIINFQRPKDPNNLLNDWSQKLNSLMSLVNKTTHLIAKEEMIHNLQ

SEQ ID NO: 251088 - DNA, 1311 bp, Artificial Sequence
  derived and/or modified sequence
atggccgacggcggcagcgagagagccgacggcagaatcgtgaagatggaggtggactacagcgccaccgtggaccagagactgcccgagtgcgccaagctggccaaggccagcgacatggtgagcaccagcagaatcctggtggccgtggtgaagatgtgctacgaggccaaggagtgggacctgctgaacgagaacatcatgctgctgagcaagagaagaagccagctgaagcaggccgtggccaagatggtgcagcagtgctgcacctacgtggaggagatcaccgacctgcccatcaagctgagactgatcgacaccctgagaatggtgaccgagggcaagatctacgtggagatcgagagagccagactgaccaagaccctggccaccatcaaggagcagaacggcgacgtgaaggaggccgccagcatcctgcaggagctgcaggtggagacctacggcagcatggagaagaaggagagagtggagttcatcctggagcagatgagactgtgcctggccgtgaaggactacatcagaacccagatcatcagcaagaagatcaacaccaagttcttccaggaggagaacaccgagaagctgaagctgaagtactacaacctgatgatccagctggaccagcacgagggcagctacctgagcatctgcaagcactacagagccatctacgacaccccctgcatccaggccgagagcgagaagtggcagcaggccctgaagagcgtggtgctgtacgtgatcctggcccccttcgacaacgagcagagcgacctggtgcacagaatcagcggcgacaagaagctggaggagatccccaagtacaaggacctgctgaagctgttcaccaccatggagctgatgagatggagcaccctggtggaggactacggcatggagctgagaaagggcagcctggagagccccgccaccgacgtgttcggcagcaccgaggagggcgagaagagatggaaggacctgaagaacagagtggtggagcacaacatcagaatcatggccaagtactacaccagaatcaccatgaagagaatggcccagctgctggacctgagcgtggacgagagcgaggccttcctgagcaacctggtggtgaacaagaccatcttcgccaaggtggacagactggccggcatcatcaacttccagagacccaaggaccccaacaacctgctgaacgactggagccagaagctgaacagcctgatgagcctggtgaacaagaccacccacctgatcgccaaggaggagatgatccacaacctgcagtag

SEQ ID NO: 251089 - DNA, 2437 bp, Artificial Sequence
  derived and/or modified sequence
ctgagcgggtgcgcgggcaacttccggtgtgggtgacgagtggtggccgaagcagggggacagcaagggacgctcaggcggggaccatggcggacggcggctcggagcgggctgacgggcgcatcgtcaagatggaggtggactacagcgccacggtggatcagcgcctacccgagtgtgcgaagctagccaaggcttccgatatggtatcgacatcccgtatcttagttgcagtagtgaagatgtgctatgaggctaaagaatgggatttacttaatgaaaatattatgcttttgtccaaaaggcggagtcagttaaaacaagctgttgccaaaatggttcaacagtgctgtacttatgttgaggaaatcacagaccttcctatcaaacttcgattaattgatactctacgaatggttaccgaaggcaagatttatgttgaaattgagcgtgcgcgactgactaaaacattagcaactataaaagaacaaaatggtgatgtgaaagaggcagcctccattttacaggagttacaggtggaaacctacgggtcaatggaaaagaaagagcgagtggaatttattttggagcaaatgaggctctgcctagctgtgaaggattacattcgaacacaaatcatcagcaagaaaattaacaccaaatttttccaggaagaaaatacagagaaattaaagttgaagtactataatttaatgattcagctggatcaacatgagggatcctatttgtctatttgtaagcactacagagcaatatatgatactccctgtatacaggcagaaagtgaaaaatggcagcaggctctgaagagtgttgtactctatgttatcctggctccttttgacaatgaacagtcagatttggttcaccgaataagtggtgacaagaagttagaagaaattcccaaatacaaggatcttttaaagctttttaccacaatggagttgatgcgttggtccacacttgttgaggactatggaatggaattaagaaaaggttcccttgagagtcctgcaacggatgtttttggttctacagaggaaggtgaaaaaaggtggaaagacttgaagaacagagttgttgaacataatattagaataatggccaagtattatactcggataacaatgaaaaggatggcacagcttctggatctatctgttgatgagtccgaagcctttctctcaaatctagtagttaacaagaccatctttgctaaagtagacagattagcaggaattatcaacttccagagacccaaggatccaaataatttattaaatgactggtctcagaaactgaactcattaatgtctctggttaacaaaactacgcatctcatagccaaagaggagatgatacataatctacaataagggtcttagtgctttagaaaaaagttaaaattggaagtcattaaaaaaagactgttataatggtgtatatgttggggttttttttctaagcttctttgtcttaaattttaaaatagtgaatatgtttgagactccctttgacctttcagttccccaagttcattgttaactttgcatttgcaattggtgcaaaaatacagatttctgtcgtctgaatacacaaaaagttgtgtcataacttacccagatatgtttttctatcatttgaaacctttttagctactgtttgttttcattcaactaacaaacatattccaataataaaagcagtatatacatatttcctttctacagttacctctgattctcaacattttgtggggtagtgatttggcaagtgttttttaaataaaacaaatctcattgtaaagctatcagtcatttagtagaatagaaaagcaacatagagcatacaagaacatttgggatagagttgtgatttgtgaagaatttgtactttgatattgtggcggaaagtctagactgagtgtgtatgctggtaaactgtagacttttttttttttttttttgagtccggctggttccaatcacagtagcttgattgctttcagccctcatcctctcacttgatcagttgttcaacagaatcagctgacataattgacacagtttattgggtgttaagtccgctctatagggatagtgactactttttttttttttttttttttgctcttcttcctctcccctttctttatatgggtttaaatttaacataaagttgtttttataaggcttatttgtggctttaacttgtaagtctgattacatcattattgttccaaattcattatctctgtaggaacttttagttccattatatgaacactggataacctaattttttttaatgctttaaaaaaatggcaaaaagacgtcaggccaccctcatagtaagtggtgtagtattaaaatattttcacggaattaaaagtagcttgctgtcaaagaaacacctg

SEQ ID NO: 251090 - DNA, 1311 bp, Artificial Sequence
  derived and/or modified sequence
atggctgacggcgggtccgagcgggctgatggtcgcatcgtaaagatggaggtcgattatagtgcgacagttgaccagcgcctcccagagtgcgccaagcttgcaaaagcctctgatatggtgagcacttcccggatccttgttgctgtcgtgaagatgtgctacgaagctaaggaatgggacctgcttaacgagaacatcatgctgctgagtaaacgacggagccagttgaagcaggccgtggcgaagatggtacagcagtgttgcacctacgtggaggagattacggatctgccgattaagttaaggcttatcgataccctgcggatggttacagaagggaagatatatgtggagattgagcgcgcccggctgactaaaacccttgccacaatcaaggaacagaacggcgacgtcaaggaggctgcaagtattctgcaggagctgcaggtggaaacgtacggctccatggaaaaaaaggaacgggtggagttcatattggagcaaatgagactgtgcctcgctgtcaaagactacatacgaacccagattatctccaaaaagatcaacactaagttttttcaggaggaaaacacagagaagctgaaattgaaatactataaccttatgatccagctggaccaacatgagggctcttatctatcaatctgtaagcactatcgcgccatatatgacaccccatgtattcaagccgaatcagagaagtggcagcaggccctcaagtccgtagttctttacgtgattttagcaccatttgacaatgaacagagcgatctcgtgcataggatcagcggggacaaaaaactggaggagattcctaaatataaggatctgctgaaactgttcacaacgatggagctaatgaggtggtcaactctggttgaggactacggcatggagcttaggaaaggcagcttggagtcccccgccacagatgtcttcggttctacagaagaaggcgaaaaaagatggaaagacctgaagaatcgagtcgtcgagcacaacattaggataatggctaagtattatactaggatcaccatgaagcggatggcacagctcctggacctatccgtcgacgagtccgaggcttttttgtccaatctggtggtgaacaaaacaatttttgctaaggtggaccgacttgcgggcattataaatttccagcgcccaaaggacccaaacaatctgcttaacgactggagccagaaactcaatagtttaatgtccctagtgaacaagacgactcatctgatagcgaaagaggaaatgattcataatctgcaatag

SEQ ID NO: 251091 - DNA, 1311 bp, Artificial Sequence
  derived and/or modified sequence
atggctgatggcggcagcgagcgggcagatggaagaattgtgaagatggaggtggactacagcgccaccgtggaccagaggctgcctgaatgtgccaagctggccaaggccagtgacatggtgtccaccagccgcatcctggtggccgtggtgaagatgtgctatgaggccaaggagtgggacctgctgaatgaaaacatcatgctgctgagcaagagaagaagccagctgaagcaggccgtggccaagatggtgcagcagtgctgcacctacgtggaggagatcacagacctgcccatcaagctgcggctgattgacaccctgaggatggtgacagagggcaagatctacgtggagattgaaagagcccggctgaccaagaccctggccaccatcaaggagcagaatggagatgtgaaggaggccgccagcatcctgcaggagctgcaggtggagacctacggctccatggagaagaaggagcgggtggagttcatcctggagcagatgaggctgtgcctggccgtgaaggactacatccgcacccagatcatcagcaagaagatcaacaccaagttcttccaggaggagaacacagagaagctgaagctgaagtactacaacctgatgatccagctggaccagcacgagggcagctacctgagcatctgcaagcactaccgggccatctatgacaccccctgcatccaggccgagagcgagaagtggcagcaggccctgaagtctgtggtgctgtatgtgatcctggccccctttgacaatgagcagagcgacctggtgcaccgcatcagcggggacaagaagctggaggagatccccaagtacaaggacctgctgaagctgttcaccaccatggagctgatgcgctggagcaccctggtggaggactatggcatggagctgaggaagggcagcctggagagccctgccacagatgtgtttggcagcacagaggagggggagaagcgctggaaggacctgaagaacagagtggtggagcacaacatccgcatcatggccaagtactacacccgcatcaccatgaagaggatggcccagctgctggacctgtctgtggatgaaagtgaggccttcctgagcaacctggtggtgaacaagaccatctttgccaaggtggaccggctggccggcatcatcaacttccagaggcccaaggaccccaacaacctgctgaatgactggagccagaagctgaacagcctgatgagcctggtgaacaagaccacccacctgattgccaaggaggagatgatccacaacctgcagtag

SEQ ID NO: 251092 - DNA, 1311 bp, Artificial Sequence
  derived and/or modified sequence
atggccgacggcggcagcgagcgggccgacggccggatcgtgaagatggaagtggattattctgcaacagtggatcagaggctgcccgagtgtgctaagctagctaaagcttcggacatggtgtccacgtcccgcattttggtggctgtcgttaagatgtgttacgaggcgaaggagtgggacctgctcaacgaaaacatcatgctgctttccaagagacggtctcaacttaagcaggcggtggctaagatggtgcagcaatgctgcacttacgtggaagagatcacggatctacctataaagttgagactgatagatacccttcgcatggtgaccgagggaaaaatttacgtagagatagaacgagcacggctgaccaagaccttggctacgatcaaagagcaaaacggcgatgtcaaggaagccgcctccattcttcaggaactgcaggtcgagacatacggctccatggaaaaaaaggagcgcgtggaatttattctcgagcaaatgcggctgtgtcttgccgttaaagattacatcaggacgcagattatctcaaagaagattaatacaaaattttttcaggaggaaaacacagaaaagctaaagctcaaatactacaacctgatgatccaactggaccagcacgagggctcctacctgagcatctgcaagcactatagagctatctatgatacaccatgtatccaggccgagtctgagaaatggcagcaagccctcaagtcggtcgtgctctatgtgatactagcaccttttgataatgaacagtccgacctcgtgcacagaatcagcggggataagaaactagaagagattccaaaatacaaggatctcctgaagctctttactacgatggagcttatgcggtggagtacacttgtggaggactacggaatggagctgcgtaaagggagcttggaaagtcctgcaaccgacgtttttgggagcacagaggaaggagagaagcgctggaaggacttgaagaatcgagtggtggagcacaatattcggattatggcaaagtactatacccgcattactatgaagcgaatggcccagttactggacttatcggttgacgagtctgaggcctttctgagcaacttggtggtgaacaagacaatatttgcaaaagtggatcgcttggctggaatcataaacttccagcggcccaaggatccaaacaatctgctgaacgactggtcgcaaaaattaaatagccttatgagcctcgtgaataaaactacacaccttattgccaaagaagaaatgatccataacctccagtag

SEQ ID NO: 251093 - DNA, 1311 bp, Artificial Sequence
  derived and/or modified sequence
atggctgacgggggatcagaaagagcagatggaaggatcgtcaagatggaggtggactacagtgctacagtggaccaacgactgcccgagtgtgcgaagttggcaaaggcctctgacatggtgtcaacatctcggatactcgtcgccgtcgttaaaatgtgctacgaagcgaaagaatgggatctgctcaatgagaatatcatgctgctctcgaagcggcgatctcagctcaagcaggcggtggctaaaatggttcagcagtgctgcacatatgtggaagagattacggatctaccgatcaagcttaggctcatcgacactctgaggatggtgactgagggcaagatctatgtcgagattgaaagggctcgccttactaagactttagctaccattaaagagcagaacggagacgtaaaggaggctgcatctattttgcaagaactccaggtggagacatacggatccatggagaagaaagaaagagtcgagtttatcctggagcagatgaggctttgcctcgcagtgaaggactacattcgaacccaaatcatctcaaaaaaaattaacaccaaattcttccaggaggagaacaccgagaaactcaagctgaagtactacaatctgatgatccagcttgatcaacacgaaggatcatacctgtcgatttgtaaacactaccgagcaatctacgacacgccatgtatccaggccgaaagtgagaaatggcaacaggctttaaaatcagttgtgctgtacgtcatcctagcacctttcgataatgagcagtctgatttggtccaccggatctctggagacaagaagctcgaggaaatccctaaatacaaagacttgctgaagcttttcacaacaatggagctgatgcggtggtccacgttggtcgaggattatggcatggaattgcgtaagggctccctagagagtccagccaccgacgtgttcgggagtacagaggaaggtgaaaaaagatggaaagacttaaagaaccgagtggtggagcataatatcaggatcatggccaagtactacacacggattactatgaaacggatggcccagctgctggacttgagcgttgatgaaagcgaggcgtttctctctaacctggttgtgaacaaaaccatttttgctaaggtcgatagactggcgggtattattaattttcaacggccaaaggatcccaataatctccttaatgactggagtcagaaactgaactctctgatgtctcttgttaataaaaccacgcatctgattgcaaaggaggagatgatccacaatcttcaatag

SEQ ID NO: 251094 - protein, 379 aa, Artificial Sequence
  derived and/or modified sequence
MAAAQPKYPAGATARRLARGCWSALWDYETPKVIVSIRVHNATCLSDADCVAGELDMLGNGLRTGRCVPYYQGPSKTCEVFGWCPVEDGASVSQFLGTMAPNFTILIKNSIHYPKFHFSKGNIADRTDGYLKRCTFHEASDLYCPIFKLGFIVEKAGESFTELAHKGGVIGVIINWDCDLDLPASECNPKYSFRRLDPKHVPASSGYNFRFAKYYKINGTTTRTLIKAYGIRIDVIVHGQAGKFSLIPTIINLATALTSVGVGSFLCDWILLTFMNKNKVYSHKKFDKVCTPSHPSGSWPVTLARVLGQAPPEPGHRSEDQHPSPPSGQEGQQGAECGPAFPPLRPCPISAPSEQMVDTPASEPAQASTPTDPKGLAQL

SEQ ID NO: 251095 - DNA, 1140 bp, Artificial Sequence
  derived and/or modified sequence
atggccgccgcccagcccaagtaccccgccggcgccaccgccagaagactggccagaggctgctggagcgccctgtgggactacgagacccccaaggtgatcgtgagcatcagagtgcacaacgccacctgcctgagcgacgccgactgcgtggccggcgagctggacatgctgggcaacggcctgagaaccggcagatgcgtgccctactaccagggccccagcaagacctgcgaggtgttcggctggtgccccgtggaggacggcgccagcgtgagccagttcctgggcaccatggcccccaacttcaccatcctgatcaagaacagcatccactaccccaagttccacttcagcaagggcaacatcgccgacagaaccgacggctacctgaagagatgcaccttccacgaggccagcgacctgtactgccccatcttcaagctgggcttcatcgtggagaaggccggcgagagcttcaccgagctggcccacaagggcggcgtgatcggcgtgatcatcaactgggactgcgacctggacctgcccgccagcgagtgcaaccccaagtacagcttcagaagactggaccccaagcacgtgcccgccagcagcggctacaacttcagattcgccaagtactacaagatcaacggcaccaccaccagaaccctgatcaaggcctacggcatcagaatcgacgtgatcgtgcacggccaggccggcaagttcagcctgatccccaccatcatcaacctggccaccgccctgaccagcgtgggcgtgggcagcttcctgtgcgactggatcctgctgaccttcatgaacaagaacaaggtgtacagccacaagaagttcgacaaggtgtgcacccccagccaccccagcggcagctggcccgtgaccctggccagagtgctgggccaggccccccccgagcccggccacagaagcgaggaccagcaccccagcccccccagcggccaggagggccagcagggcgccgagtgcggccccgccttcccccccctgagaccctgccccatcagcgcccccagcgagcagatggtggacacccccgccagcgagcccgcccaggccagcacccccaccgaccccaagggcctggcccagctgtag

SEQ ID NO: 251096 - DNA, 1140 bp, Artificial Sequence
  derived and/or modified sequence
atggctgcagcccagcctaagtacccagctggcgccaccgctcgccgcttggctcggggctgttggtccgctctttgggactatgaaactcccaaagtgattgtgtctattcgggttcacaatgccacttgtctcagcgacgcagattgcgtggcgggagagcttgatatgcttggcaatgggctgaggactggccgctgtgtaccttactatcaagggcccagtaaaacatgtgaagtgtttggttggtgccccgtcgaggacggagccagcgtgagtcagtttctgggtaccatggcgcccaattttacgattctaataaaaaattcaatccattaccccaagtttcatttctccaaaggaaacattgcagaccgcaccgacggctatctgaagcggtgcacttttcacgaagctagtgatctttactgtcctattttcaaactcggatttatagtggagaaggcaggcgagagctttaccgaacttgcgcacaaaggcggcgtgatcggagtgatcatcaactgggattgcgatctggatcttcccgctagcgaatgtaaccccaagtatagctttcggagacttgaccccaaacacgttcctgccagctccggatataacttcagatttgcaaagtattataagataaacggaactactactcggacccttattaaagcgtatggaatccgtatcgatgtcattgtccatggccaggctgggaaattctctctcatcccaacaattattaacctcgctactgccctaaccagcgttggtgtggggagttttttgtgcgactggattcttctcacgtttatgaataaaaataaggtttacagccacaagaaattcgataaagtgtgtactcctagccatccatccggctcctggcctgtaactctagccagggttctcggtcaggcccccccagagccaggccaccggtcagaagaccagcatccctcacctccgtctggacaggaggggcagcagggtgccgaatgcgggccagcgttcccaccactgcggccctgccccatcagtgcccccagcgaacaaatggtggacactccggcctccgagcctgcccaagcttcaacaccgactgacccaaagggtttggcgcagctctag

SEQ ID NO: 251097 - DNA, 1140 bp, Artificial Sequence
  derived and/or modified sequence
atggctgctgcccagcccaagtacccagctggggccacagcccggcggctggcccggggctgctggagcgccctgtgggactatgagacccccaaggtgattgtgtccatccgggtgcacaatgccacctgcctgagtgatgctgactgtgtggccggggagctggacatgctgggcaatggcctgaggacaggccgctgtgtgccctactaccagggccccagcaagacctgtgaggtgtttggctggtgccctgtggaggatggagcctctgtgtcccagttcctgggcaccatggcccccaacttcaccatcctgatcaagaacagcatccactaccccaagttccacttcagcaagggcaacattgctgacagaacagatggctacctgaagcgctgcaccttccacgaggccagtgacctgtactgccccatcttcaagctgggcttcatcgtggagaaggccggggagagcttcacagagctggcccacaagggcggcgtcatcggggtcatcatcaactgggactgtgacctggacctgcctgccagcgagtgcaaccccaagtacagcttccggcggctggaccccaagcacgtgcctgccagcagcggctacaacttccgctttgccaagtactacaagatcaatggcaccaccaccaggaccctcatcaaggcctacggcatcagaattgatgtgattgtgcacggccaggccggcaagttcagcctcatccccaccatcatcaacctggccacagccctgacctctgtgggcgtgggcagcttcctgtgtgactggatcctgctgaccttcatgaacaagaacaaggtgtacagccacaagaagtttgacaaggtgtgcacccccagccaccccagcggctcctggcctgtgaccctggcccgggtgctgggccaggcccctcctgagcccggccacagaagtgaggaccagcaccccagccccccatctggccaggagggccagcagggcgcagaatgtggccctgccttcccccccctgcggccctgccccatcagcgcccccagcgagcagatggtggacaccccagccagcgagcccgcccaggccagcacccccacagaccccaagggcctggcccagctgtag

SEQ ID NO: 251098 - DNA, 1140 bp, Artificial Sequence
  derived and/or modified sequence
atggccgccgcccagcccaagtaccccgccggcgccaccgcccggcgtctcgcccgaggttgttggtctgccctctgggattacgagacacccaaggttattgtgtctatcagagttcacaacgctacttgtctgagtgatgctgattgtgtggccggggaacttgatatgctcggaaatggactccggacaggaagatgtgtcccttactatcaggggccatccaagacgtgtgaagtgttcgggtggtgtcctgtcgaggacggcgcttcagtctcgcagttcctcggtactatggcacccaacttcactattctgattaaaaactctatacactaccctaagtttcacttttcaaagggtaatatcgccgaccgcaccgatggctatctcaaacgctgcacattccatgaggcctcagatctgtactgtcccattttcaaacttggcttcattgtggaaaaggccggagaatccttcaccgaacttgctcacaagggaggcgtaattggagtaatcattaactgggattgcgacctcgatcttcccgcctctgagtgcaaccctaagtacagctttcggaggcttgaccctaagcacgtaccagcaagcagcgggtacaactttagattcgctaaatactacaaaattaatgggacaacaacccgaacactcataaaggcttacggtatcaggatcgatgtgattgtgcatggacaggccgggaaatttagcctgatccccacaattatcaatttggccacggcattgaccagcgttggtgtcgggtctttcctctgtgactggattctgctcaccttcatgaacaagaataaggtctactcacacaagaagtttgacaaggtgtgcacgccaagccatccttctggctcctggcccgtaacgttggcaagggtgttgggtcaggccccaccggagcccggacacagatccgaggatcagcatccttccccccccagtggacaggaaggccaacagggtgccgaatgtgggcctgccttccccccactgcggccctgcccaatctccgctcccagtgaacagatggtcgacacccctgctagcgaaccagcacaggcttccactccgacagatcctaagggcctggcccagctgtag

SEQ ID NO: 251099 - DNA, 1140 bp, Artificial Sequence
  derived and/or modified sequence
atggccgccgcccagcccaagtaccccgccggggcgaccgcccggcgcctggcccggggctgctggtccgccctctgggactacgagacgcccaaggtgatcgtgagcataagggtccacaacgccacctgcctctccgacgccgactgcgtggctggggagctggacatgctgggaaacggcctgaggactgggcgctgtgtgccctattaccaggggccctccaagacctgcgaggtgttcggctggtgcccggtggaagatggggcctctgtcagccaatttctgggtacgatggccccaaatttcaccatcctcatcaagaacagcatccactaccccaaattccacttctccaagggcaacatcgccgaccgcacagacgggtacctgaagcgctgcacgttccacgaggcctccgacctctactgccccatcttcaagctgggctttatcgtggagaaggctggggagagcttcacagagctcgcacacaagggtggtgtcatcggggtcattatcaactgggactgtgacctggacctgcctgcatcggagtgcaaccccaagtactccttccggaggcttgaccccaagcacgtgcctgcctcgtcaggctacaacttcaggtttgccaaatactacaagatcaatggcaccaccacccgcacgctcatcaaggcctacgggatccgcattgacgtcattgtgcatggacaggccgggaagttcagcctgattcccaccattattaatctggccacagctctgacttccgtcggggtgggctccttcctgtgcgactggatcttgctaacattcatgaacaaaaacaaggtctacagccataagaaatttgacaaggtgtgtacgccgagccacccctcaggtagctggcctgtgacccttgcccgtgtattgggccaggcccctcccgaacccggccaccgctccgaggaccagcaccccagccctccatcaggccaggagggccaacaaggggcagagtgtggcccagccttcccgcccctgcggccttgccccatctctgccccttctgagcagatggtggacactcctgcctccgagcctgcccaagcctccacacccacagaccccaaaggtttggctcaactctga

SEQ ID NO: 251100 - DNA, 1140 bp, Artificial Sequence
  derived and/or modified sequence
atggctgcagctcagcctaaatatcctgcaggtgctaccgctagaagacttgccaggggctgctggtctgccctatgggattatgagacaccaaaggtaatagtgagtatccgggttcataatgccacctgcctcagcgacgccgattgcgtggccggagaactcgacatgcttgggaacgggctgcgtacagggaggtgtgtaccttattaccaagggccaagtaagacctgcgaagtgttcggctggtgccctgtggaagatggggcatcagtgtcccaatttctgggcacaatggctcccaactttacaatcctaataaagaatagcatccactatcctaagttccactttagcaagggaaatattgccgaccgcaccgacggatacttgaaaaggtgcactttccacgaagctagcgacctttattgtcctatatttaaattgggcttcatcgtagagaaagctggggagtcgtttaccgagctggcccataaaggcggagtcattggtgtgatcattaattgggattgcgatttggatttgcctgcctcggagtgcaatccgaagtactcatttcggagactggaccctaaacacgtgcccgcaagctccggctataacttccgatttgctaagtactacaagatcaatggaaccaccaccaggaccctcattaaagcatatgggatacggatagatgtgattgttcacgggcaggctgggaaatttagtttgattccaacaattattaacctcgctaccgccctcacaagcgtcggggtggggtcctttctgtgcgactggattctcttaaccttcatgaataagaataaagtatacagccacaagaaattcgataaagtctgtacaccatcccatcctagcggatcctggcccgtcaccctcgctcgggttctgggtcaagcaccacctgaacctgggcatcgatccgaggatcaacaccctagcccaccatccgggcaagaaggccaacagggcgctgagtgcggaccagcttttccaccgctcaggccctgtcctatttcggccccttccgaacaaatggttgacactcctgcaagtgagcccgcacaagcttcaaccccgaccgatcccaagggcctcgctcaactgtag

SEQ ID NO: 251101 - protein, 404 aa, Artificial Sequence
  derived and/or modified sequence
MAAAQPKYPAGATARRLARGCWSALWDYETPKVIVVRNRRLGVLYRAVQLLILLYFVWYVFIVQKSYQESETGPESSIITKVKGITTSEHKVWDVEEYVKPPEGGSVFSIITRVEATHSQTQGTCPESIRVHNATCLSDADCVAGELDMLGNGLRTGRCVPYYQGPSKTCEVFGWCPVEDGASVSQFLGTMAPNFTILIKNSIHYPKFHFSKGNIADRTDGYLKRCTFHEASDLYCPIFKLGFIVEKAGESFTELAHKGGVIGVIINWDCDLDLPASECNPKYSFRRLDPKHVPASSGYNFRFAKYYKINGTTTRTLIKAYGIRIDVIVHGQAGKFSLIPTIINLATALTSVGVGSFLCDWILLTFMNKNKVYSHKKFDKMVDTPASEPAQASTPTDPKGLAQL

SEQ ID NO: 251102 - DNA, 1215 bp, Artificial Sequence
  derived and/or modified sequence
atggccgccgcccagcccaagtaccccgccggcgccaccgccagaagactggccagaggctgctggagcgccctgtgggactacgagacccccaaggtgatcgtggtgagaaacagaagactgggcgtgctgtacagagccgtgcagctgctgatcctgctgtacttcgtgtggtacgtgttcatcgtgcagaagagctaccaggagagcgagaccggccccgagagcagcatcatcaccaaggtgaagggcatcaccaccagcgagcacaaggtgtgggacgtggaggagtacgtgaagccccccgagggcggcagcgtgttcagcatcatcaccagagtggaggccacccacagccagacccagggcacctgccccgagagcatcagagtgcacaacgccacctgcctgagcgacgccgactgcgtggccggcgagctggacatgctgggcaacggcctgagaaccggcagatgcgtgccctactaccagggccccagcaagacctgcgaggtgttcggctggtgccccgtggaggacggcgccagcgtgagccagttcctgggcaccatggcccccaacttcaccatcctgatcaagaacagcatccactaccccaagttccacttcagcaagggcaacatcgccgacagaaccgacggctacctgaagagatgcaccttccacgaggccagcgacctgtactgccccatcttcaagctgggcttcatcgtggagaaggccggcgagagcttcaccgagctggcccacaagggcggcgtgatcggcgtgatcatcaactgggactgcgacctggacctgcccgccagcgagtgcaaccccaagtacagcttcagaagactggaccccaagcacgtgcccgccagcagcggctacaacttcagattcgccaagtactacaagatcaacggcaccaccaccagaaccctgatcaaggcctacggcatcagaatcgacgtgatcgtgcacggccaggccggcaagttcagcctgatccccaccatcatcaacctggccaccgccctgaccagcgtgggcgtgggcagcttcctgtgcgactggatcctgctgaccttcatgaacaagaacaaggtgtacagccacaagaagttcgacaagatggtggacacccccgccagcgagcccgcccaggccagcacccccaccgaccccaagggcctggcccagctgtag

SEQ ID NO: 251103 - DNA, 1215 bp, Artificial Sequence
  derived and/or modified sequence
atggctgccgcccaacccaaatatccagccggcgctaccgcacgaagactcgcccgtggctgttggagcgcactttgggactacgagaccccaaaagtgattgttgtcaggaatcgacgcctgggagtgttgtatagagctgtgcagctgctgatcctcctgtacttcgtctggtatgtatttatagttcagaagtcctaccaggaatctgaaaccggtcccgaaagtagcattatcacgaaagtgaagggcatcaccaccagtgaacacaaagtatgggatgtcgaggaatatgtcaaacctcctgagggaggatccgtgttctccattatcacccgcgtggaagccacgcatagccagactcaaggaacctgtccagaatcaattcgggtccacaatgccacgtgcctctcggatgccgactgtgtggccggtgagctggacatgttgggaaacgggctgagaaccggcagatgtgtgccatactatcagggcccctccaaaacctgcgaggtgtttggctggtgccccgtggaggacggcgcttcagtctcccaatttctcggcacgatggcgccgaacttcaccatcttaatcaagaattccatccattatcccaaattccattttagcaagggcaacattgcagaccggactgatgggtatctcaagcggtgcacctttcacgaagcctccgatttgtactgtcccatatttaagttgggtttcattgtggagaaggctggtgagtccttcactgaattggcccataagggcggggtgataggagtaatcatcaattgggattgtgaccttgacctgccggcctcggaatgcaacccaaaatactcatttcgaagactggaccctaaacacgttcccgcatcatccggttataatttccgcttcgccaaatactacaaaattaacggaaccactactcgtactctgattaaggcgtacggcattagaattgacgtgatcgtgcatggccaagcaggtaagttttcactgatcccaacgattattaatctggccacggcgctgaccagcgtcggagtggggagcttcctatgcgattggattctgctgactttcatgaacaagaacaaggtctattctcataaaaaatttgataagatggtagatactccagcctccgagccagcccaggcctccaccccaacagaccctaaggggctggcacagctgtag

SEQ ID NO: 251104 - DNA, 1215 bp, Artificial Sequence
  derived and/or modified sequence
atggctgctgcccagcccaagtacccagctggggccacagcccggcggctggcccggggctgctggagcgccctgtgggactatgagacccccaaggtgattgtggtgaggaacagaaggctgggcgtgctgtacagagctgtgcagctgctgatcctgctgtactttgtgtggtacgtgttcatcgtgcagaagagctaccaggagagcgagaccggccctgagagcagcatcatcaccaaggtgaagggcatcaccaccagcgagcacaaggtgtgggatgtggaggagtatgtgaagcccccagagggcggcagcgtcttcagcatcatcaccagggtggaggccacccacagccagacccagggcacctgcccagagagcatccgggtgcacaatgccacctgcctgagtgatgctgactgtgtggccggggagctggacatgctgggcaatggcctgaggacaggccgctgtgtgccctactaccagggccccagcaagacctgtgaggtgtttggctggtgccctgtggaggatggagcctctgtgtcccagttcctgggcaccatggcccccaacttcaccatcctgatcaagaacagcatccactaccccaagttccacttcagcaagggcaacattgctgacagaacagatggctacctgaagcgctgcaccttccacgaggccagtgacctgtactgccccatcttcaagctgggcttcatcgtggagaaggccggggagagcttcacagagctggcccacaagggcggcgtcatcggggtcatcatcaactgggactgtgacctggacctgcctgccagcgagtgcaaccccaagtacagcttccggcggctggaccccaagcacgtgcctgccagcagcggctacaacttccgctttgccaagtactacaagatcaatggcaccaccaccaggaccctcatcaaggcctacggcatcagaattgatgtgattgtgcacggccaggccggcaagttcagcctcatccccaccatcatcaacctggccacagccctgacctctgtgggcgtgggcagcttcctgtgtgactggatcctgctgaccttcatgaacaagaacaaggtgtacagccacaagaagtttgacaagatggtggacaccccagccagcgagcccgcccaggccagcacccccacagaccccaagggcctggcccagctgtag

SEQ ID NO: 251105 - DNA, 1215 bp, Artificial Sequence
  derived and/or modified sequence
atggccgccgcccagcccaagtaccccgccggcgccaccgcccggagattagctcgtggatgttggtcggctctttgggactacgaaacacccaaagttatcgtggtaagaaataggaggctgggagtattgtatcgagccgttcaactgctgatcctgctgtatttcgtctggtacgttttcattgtgcaaaaaagctatcaggaatcagagaccggcccagaatcctctatcattacaaaagtcaaggggattactaccagcgagcacaaggtgtgggacgtggaggaatatgtgaaacccccagaaggagggtctgtgttctccattattaccagagttgaagccactcatagccagacccaggggacatgcccagagtccataagggtacacaatgcaacctgtctgtcagacgctgactgtgtagcaggcgagctcgatatgctcggcaacgggctccgaacaggtaggtgcgtgccttattaccagggcccctctaagacatgcgaggtgttcggatggtgtcctgtagaggatggggcatctgtgagccaatttcttggtacaatggcccctaattttactattctgattaaaaattcaatacattacccaaagtttcacttttctaaaggcaacattgccgacaggaccgacggctatttgaaacggtgcacgtttcatgaagcatcggatctgtattgcccgatttttaagctgggtttcattgtcgagaaggccggcgagtctttcaccgaattggctcacaaaggcggggtgataggcgtcatcataaactgggattgcgatctcgacttacctgcctcggaatgtaacccaaaatactcatttaggcgcctagacccaaagcatgtgcccgctagttcaggatacaatttccggtttgctaagtactacaaaattaacgggaccaccacaagaactcttattaaagcttatggcatccgaatcgacgtcatcgtgcatggacaggccggtaaattcagtttgatccccaccattataaatcttgctactgcgctgacaagcgtcggggtaggcagtttcctctgtgattggatccttctgacattcatgaacaaaaataaggtctattctcacaaaaaattcgataaaatggtcgatacgcctgctagtgagcccgcccaagcctctacccccaccgaccccaaaggcctggctcagctctag

SEQ ID NO: 251106 - DNA, 1222 bp, Artificial Sequence
  derived and/or modified sequence
atggccgccgcccagcccaagtaccccgccggggcgaccgcccggcgcctggcccggggctgctggtccgccctctgggactacgagacgcccaaggtgatcgtggtgaggaaccggcgcctgggggtcctgtaccgcgccgtgcagctgctcatcctgctctacttcgtgtggtacgtattcatcgtgcagaaaagctaccaggagagcgagacgggccccgagagctccatcatcaccaaggtcaaggggatcaccacgtccgagcacaaagtgtgggacgtggaggagtacgtgaagccccccgaggggggcagcgtgttcagcatcatcaccagggtcgaggccacccactcccagacccagggaacctgccccgagagcataagggtccacaacgccacctgcctctccgacgccgactgcgtggctggggagctggacatgctgggaaacggcctgaggactgggcgctgtgtgccctattaccaggggccctccaagacctgcgaggtgttcggctggtgcccggtggaagatggggcctctgtcagccaatttctgggtacgatggccccaaatttcaccatcctcatcaagaacagcatccactaccccaaattccacttctccaagggcaacatcgccgaccgcacagacgggtacctgaagcgctgcacgttccacgaggcctccgacctctactgccccatcttcaagctgggctttatcgtggagaaggctggggagagcttcacagagctcgcacacaagggtggtgtcatcggggtcattatcaactgggactgtgacctggacctgcctgcatcggagtgcaaccccaagtactccttccggaggcttgaccccaagcacgtgcctgcctcgtcaggctacaacttcaggtttgccaaatactacaagatcaatggcaccaccacccgcacgctcatcaaggcctacgggatccgcattgacgtcattgtgcatggacaggccgggaagttcagcctgattcccaccattattaatctggccacagctctgacttccgtcggggtgggctccttcctgtgcgactggatcttgctaacattcatgaacaaaaacaaggtctacagccataagaaatttgacaagatggtggacactcctgcctccgagcctgcccaagcctccacacccacagaccccaaaggtttggctcaactctgagctcctt

SEQ ID NO: 251107 - DNA, 1215 bp, Artificial Sequence
  derived and/or modified sequence
atggcggctgcacagcccaagtaccccgcaggcgctactgcccgtcgacttgctaggggatgttggtcagcactgtgggactacgagactccaaaagtaatcgttgttcgcaaccgaagactcggtgtcctgtaccgagcggtccagctcctgattttattatactttgtctggtatgtgtttatcgtgcagaaaagctaccaggagagtgagacgggtcctgagagcagcatcattactaaggtgaaaggcatcaccactagtgagcataaggtctgggatgttgaggagtatgtgaagccgcctgagggaggttccgtttttagtattattacccgtgtcgaggccacccatagccagacccaaggaacctgccccgagagtatccgcgtgcacaacgccacttgcctgtccgatgctgattgcgttgccggtgagctcgacatgctgggaaatggactacggaccggcaggtgtgttccttactatcagggaccctctaaaacctgtgaggtctttggctggtgccctgtggaggacggggctagcgtgtcccaattcctgggaaccatggcccctaactttactatcctcatcaagaattctatacactacccaaaattccattttagcaagggaaatatagctgaccgaaccgacgggtatctgaaacggtgtactttccacgaggcgagtgatctgtactgtcctattttcaaactgggtttcatcgtagagaaagccggagagtcattcacggagctagctcacaaaggcggtgtgataggtgtcattatcaattgggattgcgatctcgacctgcccgctagtgaatgcaatcctaagtacagcttccgacgcctggatcccaagcacgttcctgccagttctggctacaattttcgattcgcgaagtactataagattaacggaaccacgactcgcaccctcatcaaagcctatggcatcaggattgacgtgattgttcacggccaggcaggtaaatttagcctcattccgacaatcatcaatctcgcgacagcactcacttccgtcggggtagggagttttctttgtgattggatattactgactttcatgaacaagaataaggtgtacagtcataagaagttcgataaaatggttgacactcccgcttccgagcccgcacaggccagcaccccaactgaccccaaggggttggctcagttatag

SEQ ID NO: 251108 - protein, 232 aa, Artificial Sequence
  derived and/or modified sequence
MPSQQKKIIFCMAGVFSFACALGVVTALGTPLWIKATVLCKTGALLVNASGQELDKFMGEMQYGLFHGEGVRQCGLGARPFRFSFFPDLLKAIPVSIHVNVILFSAILIVLTMVGTAFFMYNAFGKPFETLHGPLGLYLLSFISGSCGCLVMILFASEVKIHHLSEKIANYKEGTYVYKTQSEKYTTSFWVIFFCFFVHFLNGLLIRLAGFQFPFAKSKDAETTNVAADLMY

SEQ ID NO: 251109 - DNA, 699 bp, Artificial Sequence
  derived and/or modified sequence
atgcccagccagcagaagaaaataatcttctgtatggccggcgtctttagtttcgcctgtgcactgggcgtcgtgactgcgctaggaacgccactctggattaaggcgaccgtgttatgcaaaacaggcgctcttttggtgaacgcttccggccaggaacttgataaattcatgggcgaaatgcagtacggtctgttccacggtgagggtgtccgacagtgcggtctcggggctagaccatttagatttagcttctttcccgacttgctcaaggccattcctgtgtcaatccacgttaacgtgatcctgttctctgccatcctgattgtcctgacgatggtgggcacagccttttttatgtacaacgcattcggcaagccttttgaaacgctacacggccctttgggcctgtaccttctgagcttcatcagtggctcctgcggatgcctggtaatgatactcttcgcatccgaggtcaaaatccatcatctgagcgagaaaatcgccaactacaaagagggaacttacgtgtataagacacagtctgaaaagtacacaactagcttttgggtgatttttttttgcttttttgtccattttctaaatggactgctgatccgcttagcaggattccagtttcctttcgctaagagtaaagacgctgagaccaccaacgtcgctgctgacttgatgtattag

SEQ ID NO: 251110 - DNA, 699 bp, Artificial Sequence
  derived and/or modified sequence
atgcccagccagcagaagaagatcatcttctgcatggccggggtcttctcctttgcctgtgccctgggcgtggtgacagccctgggcacccccctgtggatcaaggccaccgtgctgtgcaagacaggagccctgctggtgaatgccagcggccaggagctggacaagttcatgggagagatgcagtatggcctcttccatggagagggcgtgcggcagtgtggcctgggcgcccggcccttccgcttctccttcttcccagacctgctgaaggccatccctgtgtccatccacgtgaatgtcatcctcttcagcgccatcctgattgtgctgaccatggtgggcacagccttcttcatgtacaatgccttcggcaagccctttgagaccctgcacggccccctgggcctgtacctgctgtccttcatcagcggcagctgtggctgcctggtgatgatcctgtttgccagcgaggtgaagatccaccacctgtctgagaagatcgccaactacaaggagggcacctacgtgtacaagacccagagcgagaagtacaccaccagcttctgggtgatcttcttctgcttctttgtgcacttcctgaatggcctgctgatccggctggccggcttccagttcccctttgccaagagcaaggatgctgagaccaccaacgtggccgctgacctgatgtactag

SEQ ID NO: 251111 - DNA, 699 bp, Artificial Sequence
  derived and/or modified sequence
atgcccagccagcagaagaagatcatcttctgcatggccggcgtgttctccttcgcctgtgcacttggggtggtcacagcgctcggcacacctctctggatcaaggccacagtcctgtgcaagaccggtgccttgctcgtcaacgcttctgggcaggaactggataagtttatgggtgagatgcagtacggacttttccatggagagggcgtaagacaatgcgggctgggagcacggcccttcagattttctttcttcccagacttgctcaaggccatccctgtgagcatacatgtaaacgtgatcctctttagtgctatattaatcgtgctcactatggtcgggactgcttttttcatgtacaatgccttcggtaaaccatttgagaccctgcatggtcctctcggtttgtatctcctctccttcatatcaggctcctgcggatgcctggtcatgatactgtttgcttccgaggttaaaattcaccacctgtccgagaaaatagccaattataaggagggcacatatgtctacaagacgcagtccgagaagtacaccaccagcttttgggtaatcttcttctgcttcttcgtgcatttcctgaatggactgttgattagactggcaggcttccaattcccttttgcgaaatcaaaagacgccgaaaccacaaacgtggctgccgaccttatgtactag

SEQ ID NO: 251112 - DNA, 699 bp, Artificial Sequence
  derived and/or modified sequence
atgcccagtcagcagaagaaaattattttctgcatggcaggtgtgttctcctttgcatgcgcccttggcgttgtgaccgcccttgggacccctctgtggattaaggccaccgttctgtgtaaaacaggcgctttactcgtgaatgccagcggacaggagttggataaattcatgggtgaaatgcagtatggcctttttcacggcgaaggcgtgcgacagtgtggtcttggcgcaaggccctttcggttctctttttttccggatctgcttaaagctatccctgtctcaatccacgtcaacgtcatcctgttttcagcgatcctgatcgtgctgacgatggtggggacagcatttttcatgtataatgcattcgggaaacccttcgagacgctccacggtcccctcggcctgtacctgctttccttcatcagcggttcttgcgggtgtctggtgatgattttattcgctagcgaggtgaaaatccaccacctgagcgaaaaaatagcaaactataaggagggtacatacgtgtacaagactcaaagcgagaaatacactacaagtttttgggtgattttcttctgtttcttcgtgcatttcttgaacgggctccttatccggctcgccggtttccagttccctttcgccaaaagcaaagatgccgagacgacaaatgtggccgctgacctgatgtattag

SEQ ID NO: 251113 - DNA, 2359 bp, Artificial Sequence
  derived and/or modified sequence
aggagatacttgaaggcagtttgaaagacttgttttacagattcttagtccaaagatttccaattagggagaagaagcagcagaaaaggagaaaagccaagtatgagtgatgatgaggccttcatctactgacatttaacctggcgagaaccgtcgatggtgaagttgccttttcagctgggagctgtccgttcagcttccgtaataaatgcagtcaaagaggcagtcccttcccattgctcacaaaggtcttgtttttgaacctcgccctcacagaagccgtttctcatcatgccaagccaacagaagaaaatcattttttgcatggccggagtgttcagttttgcatgtgccctcggagttgtgacagccttggggacaccgttgtggatcaaagccactgtcctctgcaaaacgggagctctgctcgtcaatgcctcagggcaggagctggacaagtttatgggtgaaatgcagtacgggcttttccacggagagggtgtgaggcagtgtgggttgggagcaaggccctttcggttctcattttttccagatttgctcaaagcaatcccagtgagcatccacgtcaatgtcattctcttctctgccatccttattgtgttaaccatggtggggacagccttcttcatgtacaatgcttttggaaaaccttttgaaactctgcatggtcccctagggctgtaccttttgagcttcatttcaggctcctgtggctgtcttgtcatgatattgtttgcctctgaagtgaaaatccatcacctctcagaaaaaattgcaaattataaagaagggacttatgtctacaaaacgcaaagtgaaaaatataccacctcattctgggtcattttcttttgcttttttgttcattttctgaatgggctcctaatacgacttgctggatttcagttcccttttgcaaaatctaaagacgcagaaacaactaatgtagctgcagatctaatgtactgaaaggcaaacctttctataattttacaagggagtagacttgctttggtcacttttagatgtggttaattttgcatatccttttagtctgcatatattaaagcatcaggacccttcgtgacaatgtttacaaattacgtactaaggatacaggctggaaagtaagggaagcagaaggaaggctttgaaaagttgttttatctggtgggaaattgcttgacccaggtagtcaaaggcagttgactagaatcgacaaattgttactccatatatatatatgtgtgtgtgtgtgtgtgtgtgtgtgtgtaagatgtcttcctatcaaaaagatatcaaaggcacatggaatatattttaataaaaacaaataatatctctaatatatccacacatttgttgccagatttcagaaaactgagctgcaatcgctttcctaaaacagtagtgtattaaatgaacatctataaaatgtatcaacacacattttaaaaaatttgtttaaagtatactcttaggccaggcgtggtgactcacacctgtaattccagcacttcaggaggccaaggtgggaagatcatttgagttcaggagttcgagttacagcctgggcaataaagtgagaccctgtcactaacaaaattaaaaaataaaataaatataaaatataggctttaaaaaagcatagtcttattaaccatgtctgttggtcaaaatctgcaaactctaaaagaagaaaagaagaaaaaaccaagcttagggtatttttcctcccgtgcctgagtcccaattacattcacgacagtactttcaatgaacataattgttaggaccactgaggaatcatgaaaaatgatctctgcttagtacatttgatgcaaaatgacttattaggggctgtttttctagctatagtgtctcgagtactaatatgcaattatgaaaattatattaaatctgggattatgacggtatcactgtatcatcttggtcttgttctggctgtcaccaagcatgacccaggtcaactttttttttcccctgaattacccatcaaattgatctgcagctgactaaaggccacagctgagcctggaactgacccttccttcatcctcaacctgctgtcctccagaaagcaccaaggaaaaagcagagaatgacagcaaacagatcactaggcctctgaccacaggtgctgagtactcagcagccctcatataataggtttgaaagtactccttaaaataaaacactgtttccctttggaactatttacaaggatgaaacaaccgtatacctgagaaataacttgctctggtgtcaattcgctattcgccagcagacatcagaacacaccgagtttccagatgct

SEQ ID NO: 251114 - DNA, 699 bp, Artificial Sequence
  derived and/or modified sequence
atgcccagccagcagaagaagatcatcttctgcatggccggcgtgttcagcttcgcctgcgccctgggcgtggtgaccgccctgggcacccccctgtggatcaaggccaccgtgctgtgcaagaccggcgccctgctggtgaacgccagcggccaggagctggacaagttcatgggcgagatgcagtacggcctgttccacggcgagggcgtgagacagtgcggcctgggcgccagacccttcagattcagcttcttccccgacctgctgaaggccatccccgtgagcatccacgtgaacgtgatcctgttcagcgccatcctgatcgtgctgaccatggtgggcaccgccttcttcatgtacaacgccttcggcaagcccttcgagaccctgcacggccccctgggcctgtacctgctgagcttcatcagcggcagctgcggctgcctggtgatgatcctgttcgccagcgaggtgaagatccaccacctgagcgagaagatcgccaactacaaggagggcacctacgtgtacaagacccagagcgagaagtacaccaccagcttctgggtgatcttcttctgcttcttcgtgcacttcctgaacggcctgctgatcagactggccggcttccagttccccttcgccaagagcaaggacgccgagaccaccaacgtggccgccgacctgatgtactag

SEQ ID NO: 251115 - protein, 123 aa, Artificial Sequence
  derived and/or modified sequence
MANPGLGLLLALGLPFLLARWGRAWGQIQTTSANENSTVLPSSTSSSSDGNLRPEAITAIIVVFSLLAALLLAVGLALLVRKLREKRQTEGTYRPSSEEQFSHAAEARAPQDSKETVQGCLPI

SEQ ID NO: 251116 - DNA, 372 bp, Artificial Sequence
  derived and/or modified sequence
atggccaatcccgggctgggcctcctgttagctttagggttgccgttcctgctcgcacggtggggcagggcatggggacaaatccagacgactagcgcaaatgaaaacagcaccgtgctgcctagctctacaagtagtagcagcgatggcaatctgagaccagaggctatcacggccatcatagtggtgttcagcctgcttgctgcactcctgctcgccgtgggcttggctctcttggtccgcaagttgcgggagaagcgtcagacagagggcacctaccgaccgtccagcgaggagcagttcagccacgccgccgaggcaagagccccccaagactccaaagaaaccgttcagggatgcctgcccatttag

SEQ ID NO: 251117 - DNA, 372 bp, Artificial Sequence
  derived and/or modified sequence
atggccaaccctggcctgggcctgctgctggccctgggcctgcccttcctgctggcccgctggggccgggcctggggccagatccagaccaccagcgccaatgaaaacagcacagtgctgcccagcagcaccagcagcagcagtgatggcaacctgcggcctgaggccatcacagccatcatcgtggtgttcagcctgctggccgccctgctgctggccgtgggcctggccctgctggtgaggaagctgcgggagaagaggcagacagagggcacctaccggcccagcagcgaggagcagttcagccacgccgctgaggcccgggccccccaggacagcaaggagaccgtgcagggctgcctgcccatctag

SEQ ID NO: 251118 - DNA, 372 bp, Artificial Sequence
  derived and/or modified sequence
atggccaaccccggcctgggcctgctgctggccctgggcctgcccttcttgcttgccagatgggggcgggcctggggccagatccagactacctccgccaatgagaattcaactgtattaccctctagcacgtctagttcctcggatggcaacctgcgcccggaagctattacggccatcattgtcgtgttcagtctgctggcagccttgcttcttgctgtcgggctcgcactgctggtacgcaaactgagagagaagcgacaaactgaaggcacatatagacccagttccgaagagcaatttagtcatgcggccgaggcccgagcaccgcaggatagtaaggaaactgtgcaaggctgcctgcctatctag

SEQ ID NO: 251119 - DNA, 372 bp, Artificial Sequence
  derived and/or modified sequence
atggcaaaccctgggctcggtctcttgctggccttaggcctgccattcttgctcgccagatggggcagagcatggggccaaattcaaacaacctccgccaacgaaaacagtacggtcctccccagtagcactagctcttcatccgacggcaatctgagaccagaagcgattacagctatcatcgtcgtgttcagcctgctcgccgctctgctactggcagtcggcttggcgctcttggtgaggaagctgagagaaaagcgccagactgagggcacttataggccatccagtgaggagcagttttcgcacgccgctgaggcacgcgctcctcaagattctaaagagacagtccagggctgcttacctatttag

SEQ ID NO: 251120 - DNA, 760 bp, Artificial Sequence
  derived and/or modified sequence
cggagccggtggggtcggacccacagaacgaccgacggaccgagggttcgagggagggacacggaccaggaacctgagctaggtcaaagacgcccgggccaggtgccccgtcgcaggtgcccctggccggagatgcggtaggaggggcgagcgcgagaagccccttcctcggcgctgccaacccgccacccagcccatggcgaaccccgggctggggctgcttctggcgctgggcctgccgttcctgctggcccgctggggccgagcctgggggcaaatacagaccacttctgcaaatgagaatagcactgttttgccttcatccaccagctccagctccgatggcaacctgcgtccagaagccatcactgctatcatcgtggtcttctccctcttggctgccttgctcctggctgtggggctggcactgttggtgcggaagcttcgggagaagcggcagacggagggcacctaccggcccagtagcgaggagcagttctcccatgcagccgaggcccgggcccctcaggactccaaggagacggtgcagggctgcctgcccatctaggtcccctctcctgcatctgtctcccttcattgctgtgtgaccttggggaaaggcagtgccctctctgggcagtcagatccacccagtgcttaatagcagggaagaaggtacttcaaagactctgcccctgaggtcaagagaggatggggctattcacttttatatatttatataaaattagtagtgagatgt

SEQ ID NO: 251121 - DNA, 372 bp, Artificial Sequence
  derived and/or modified sequence
atggccaaccccggcctgggcctgctgctggccctgggcctgcccttcctgctggccagatggggcagagcctggggccagatccagaccaccagcgccaacgagaacagcaccgtgctgcccagcagcaccagcagcagcagcgacggcaacctgagacccgaggccatcaccgccatcatcgtggtgttcagcctgctggccgccctgctgctggccgtgggcctggccctgctggtgagaaagctgagagagaagagacagaccgagggcacctacagacccagcagcgaggagcagttcagccacgccgccgaggccagagccccccaggacagcaaggagaccgtgcagggctgcctgcccatctag

SEQ ID NO: 251122 - protein, 169 aa, Artificial Sequence
  derived and/or modified sequence
MGWSQDLFRALWRSLSREVKEHVGTDQFGNKYYYIPQYKNWRGQTIREKRIVEAANKKEVDYEAGDIPTEWEAWIRRTRKTPPTMEEILKNEKHREEIKIKSQDFYEKEKLLSKETSEELLPPPVQTQIKGHASAPYFGKEEPSVAPSSTGKTFQPGSWMPRDGKSHNQ

SEQ ID NO: 251123 - DNA, 510 bp, Artificial Sequence
  derived and/or modified sequence
atgggatggagccaggacctcttccgcgctttatggcgtagtttatctagggaggtcaaggaacatgtgggaacagatcaatttgggaacaagtactactatatcccccaatacaaaaactggagaggtcagactatccgcgagaaacggatcgtggaggctgcaaacaaaaaggaagtggattatgaagccggggacatccctaccgagtgggaagcatggataaggcggacgaggaaaacaccgcccacaatggaagagatcctcaagaacgagaaacatagagaggaaatcaagatcaagtcgcaggatttttacgagaaggagaagttactctcgaaggagaccagcgaggagctactgcccccccccgtgcaaacccagataaagggccatgcctcagccccttatttcggtaaggaggagcccagtgtcgcgccatctagtacaggaaagaccttccaacctggatcttggatgccccgggacggcaagtcacacaaccagtag

SEQ ID NO: 251124 - DNA, 510 bp, Artificial Sequence
  derived and/or modified sequence
atgggctggagccaggacctcttccgggccctgtggaggagcctgagccgggaggtgaaggagcacgtgggcacagaccagtttggaaacaagtactactacatcccccagtacaagaactggaggggccagaccatccgggagaagagaattgtggaggccgccaacaagaaggaggtggactatgaggccggggacatccccacagagtgggaggcctggatccggaggaccaggaagaccccacccaccatggaggagatcctgaagaatgagaagcaccgggaggagatcaagatcaagagccaggacttctatgagaaggagaagctgctgagcaaggagaccagcgaggagctgctgcccccacctgtgcagacccagatcaagggccacgccagcgccccctactttgggaaggaggagcccagcgtggcccccagcagcacaggcaagaccttccagcccggctcctggatgcccagagatggcaagagccacaaccagtag

SEQ ID NO: 251125 - DNA, 708 bp, Artificial Sequence
  derived and/or modified sequence
gttactagaagggctccaggatggaggccgacctgacttctccgcctcggtgggctgggtcggcggctggagcattacccctactgcgggtcccgctgctggcagcgctggaaactgggtggacggcatgggttggtctcaggatttgttccgcgccttgtggagatcgctgtcaagggaagtgaaggagcacgtgggcacggaccaattcgggaacaaatactactacatcccgcagtacaagaactggagaggacaaactattcgagagaaaagaattgtagaagcagcaaataaaaaagaagtagactatgaagcaggggatattccaacagaatgggaagcttggattagaagaacaagaaagactccacctactatggaggaaatactaaagaatgaaaaacacagagaagaaatcaaaataaaaagccaagatttttatgaaaaagaaaaactccttagtaaagagaccagtgaggaactcctgcctccaccagttcaaactcaaattaaaggccatgcctctgctccatactttggaaaggaagaaccctcagtggctcccagcagcactggtaaaacctttcagccaggatcctggatgccacgagatggcaagagccacaatcaatgaatgcattatggtcaaatcttttcatgtatatggatgtgactattttaacaaataaaagaagtgaaaagtta

SEQ ID NO: 251126 - DNA, 510 bp, Artificial Sequence
  derived and/or modified sequence
atgggctggagccaggacctgttccgggccctgtggcggagcctgagcagagaagtgaaggaacatgtaggaaccgatcagtttgggaacaaatactactacattccacagtacaaaaattggcgaggacaaactatacgcgagaagagaatcgtggaggccgcaaataagaaagaggtggactatgaagccggcgacattcctaccgagtgggaagcttggattcgcaggacgcggaagaccccgcctactatggaggaaatattaaagaatgaaaagcacagagaggagatcaagattaagtctcaggacttctacgaaaaggaaaaactgctgagcaaagagacctctgaagaattgctgccgccgcccgttcagacgcagataaagggccacgcgtccgctccttatttcgggaaagaagaaccatcagtcgccccaagctcaacaggcaaaactttccagcctggctcctggatgcccagagatgggaaaagccataaccagtag

SEQ ID NO: 251127 - DNA, 510 bp, Artificial Sequence
  derived and/or modified sequence
atgggctggtcccaggatctgtttagggctctgtggcgctccctgtcacgagaggtgaaggagcacgtgggtacagatcagttcgggaacaagtactattacatcccccagtacaaaaactggcgcggacagacaatccgcgagaagcggatcgtcgaggccgctaataaaaaggaggtggattatgaggcaggcgatatcccgacggaatgggaagcttggattcggcgaacccggaagacccctcccacaatggaggagatcctgaagaatgaaaagcatagggaagaaataaagatcaagtcccaggacttttacgagaaggagaaattactcagtaaagaaacctccgaggaactgctgccgccaccagtgcagacccaaattaaagggcatgcatccgcaccttacttcgggaaagaagagccatccgtcgctcccagctccactggcaaaactttccagcccggtagctggatgcctcgagacggaaagtctcacaatcagtag

SEQ ID NO: 251128 - DNA, 510 bp, Artificial Sequence
  derived and/or modified sequence
atgggctggagccaggacctgttcagagccctgtggagaagcctgagcagagaggtgaaggagcacgtgggcaccgaccagttcggcaacaagtactactacatcccccagtacaagaactggagaggccagaccatcagagagaagagaatcgtggaggccgccaacaagaaggaggtggactacgaggccggcgacatccccaccgagtgggaggcctggatcagaagaaccagaaagaccccccccaccatggaggagatcctgaagaacgagaagcacagagaggagatcaagatcaagagccaggacttctacgagaaggagaagctgctgagcaaggagaccagcgaggagctgctgcccccccccgtgcagacccagatcaagggccacgccagcgccccctacttcggcaaggaggagcccagcgtggcccccagcagcaccggcaagaccttccagcccggcagctggatgcccagagacggcaagagccacaaccagtag

SEQ ID NO: 251129 - protein, 136 aa, Artificial Sequence
  derived and/or modified sequence
MMDQEEKTEEGSGPCAEAGSPDQEGFFNLLSHVQGDRMEGQRCSLQAGPGQTTKSQSDPTPEMDSLMDMLASTQGRRMDDQRVTVSSLPGFQPVGSKDGAQKRAGTLSPQPLLTPQDPTALGFRRNSSPQPPTQAP

SEQ ID NO: 251130 - DNA, 411 bp, Artificial Sequence
  derived and/or modified sequence
atgatggaccaggaggagaagaccgaggagggcagcggcccctgcgccgaggccggcagccccgaccaggagggcttcttcaacctgctgagccacgtgcagggcgacagaatggagggccagagatgcagcctgcaggccggccccggccagaccaccaagagccagagcgaccccacccccgagatggacagcctgatggacatgctggccagcacccagggcagaagaatggacgaccagagagtgaccgtgagcagcctgcccggcttccagcccgtgggcagcaaggacggcgcccagaagagagccggcaccctgagcccccagcccctgctgaccccccaggaccccaccgccctgggcttcagaagaaacagcagcccccagccccccacccaggccccctag

SEQ ID NO: 251131 - DNA, 411 bp, Artificial Sequence
  derived and/or modified sequence
atgatggaccaagaggagaagaccgaggaggggtctggcccatgtgctgaagccgggagtcccgaccaggagggtttttttaatttgctaagccacgtacaaggcgacagaatggagggccaaaggtgtagtctgcaggccggcccagggcaaaccacaaagagccaaagcgaccctacaccagagatggatagcttaatggatatgctggcatccactcaaggtcggaggatggatgaccagagggtgacggtgtccagtttgcccgggttccagcccgtggggagtaaagacggcgcgcagaaacgagccggaacactctccccccaaccactattgacccctcaagacccgacagcactgggattcaggagaaacagctctcctcagcctcctacccaggctccgtag

SEQ ID NO: 251132 - DNA, 411 bp, Artificial Sequence
  derived and/or modified sequence
atgatggaccaggaggagaagacagaggagggcagcggcccctgtgccgaggccggcagcccagaccaggagggcttcttcaacctgctgagccacgtgcagggcgacaggatggagggccagcgctgcagcctgcaggccggccctggccagaccaccaagagccagagcgaccccaccccagagatggacagcctgatggacatgctggccagcacccagggccgcaggatggatgaccagagggtgacagtgagcagcctgcccggcttccagcctgtgggcagcaaggatggagcccagaagagagctggcaccctgagcccccagcccctgctgaccccccaggaccccacagccctgggcttcagaagaaacagcagcccccagccccccacccaggccccctag

SEQ ID NO: 251133 - DNA, 411 bp, Artificial Sequence
  derived and/or modified sequence
atgatggaccaggaggagaagaccgaggagggcagcggcccctgcgccgaggcagggagcccagatcaggagggcttcttcaatctgctttcccacgtgcagggagaccgaatggagggacagaggtgctctctgcaggcaggtcctggtcagacgactaaaagtcaatcggatcccaccccagaaatggattctttgatggacatgctggcctcgacccagggcagacgaatggacgaccagcgggtcactgtgtctagcttgcccggctttcagccggtcgggagtaaagatggcgcccagaaacgcgccggcacactgtcaccccaaccattattaaccccccaggaccctaccgccctgggatttagacgcaacagctccccccaacctcccacacaggccccctag

SEQ ID NO: 251134 - DNA, 411 bp, Artificial Sequence
  derived and/or modified sequence
atgatggaccaagaagaaaagactgaagaaggttccggaccgtgcgccgaggccggtagcccggaccaggagggtttctttaacctcctctctcacgtccagggtgacaggatggagggacagcggtgttcgctccaagcgggtccagggcagacaactaaatcgcaatcagacccgacccctgagatggattcccttatggacatgctggcttcgacgcagggcagaagaatggatgatcagagggtcaccgtctccagcctgccgggattccaacctgtgggttctaaggacggggcacagaaacgagccggaacgcttagcccacagccacttctaaccccacaggatccgactgcactgggcttccgcaggaactcctctccacagccacccacgcaggccccttag

SEQ ID NO: 251135 - DNA, 704 bp, Artificial Sequence
  derived and/or modified sequence
aggtcgccctgccccctacccaccatgccagatccagcatcgttgtgggcaaacaattatctggatgatctttatggggcttaagcttgggtgggagcagatggggcatgagctggggatttggggatggggggaatccacacccccacgtcctggacgtttaaaaggccctctctggcactgggccggggcagaggccagcagaaaagtgactggagtccagggacatgatggatcaggaggagaagacggaggaaggctcaggcccctgtgccgaggcgggctccccagaccaggagggcttcttcaatctgctgagccacgtgcagggcgaccggatggagggacagcgctgttcactgcaagccgggccgggccagaccaccaagagccagagcgaccccacccccgagatggacagcctcatggacatgctggccagtacccagggccgccgcatggatgaccaacgtgtgacagtcagcagcctgcccggcttccagcccgtggggtccaaggacggagcacagaaacgagctgggaccctcagtccccaacccctgctcacccctcaggacccgaccgctctcggcttccgtcggaacagcagcccccagcccccgacacaagccccctgagggcctgaggcatcctgggtctcactcggcccccaaaaactgataaaagaataaaacacttaaatg

SEQ ID NO: 251136 - protein, 345 aa, Artificial Sequence
  derived and/or modified sequence
MWLLGPLCLLLSSAAESQLLPGNNFTNECNIPGNFMCSNGRCIPGAWQCDGLPDCFDKSDEKECPKAKSKCGPTFFPCASGIHCIIGRFRCNGFEDCPDGSDEENCTANPLLCSTARYHCKNGLCIDKSFICDGQNNCQDNSDEESCESSQEPGSGQVFVTSENQLVYYPSITYAIIGSSVIFVLVVALLALVLHHQRKRNNLMTLPVHRLQHPVLLSRLVVLDHPHHCNVTYNVNNGIQYVASQAEQNASEVGSPPSYSEALLDQRPAWYDLPPPPYSSDTESLNQADLPPYRSRSGSANSASSQAASSLLSVEDTSHSPGQPGPQEGTAEPRDSEPSQGTEEV

SEQ ID NO: 251137 - protein, 155 aa, Artificial Sequence
  derived and/or modified sequence
MWLLGPLCLLLSSAAESQLLPGNNFTNECNIPGNFMCSNGRCIPGAWQCDGLPDCFDKSDEKECPKAKSKCGPTFFPCASGIHCIIGRFRCNGFEDCPDGSDEENCKNGLCIDKSFICDGQNNCQDNSDEESCESSQGLRGMTFLHRPTLLTRNL

SEQ ID NO: 251138 - DNA, 1038 bp, Artificial Sequence
  derived and/or modified sequence
atgtggctgctgggccccctgtgcctgctgctgagcagcgccgccgagagccagctgctgcccggcaacaacttcaccaacgagtgcaacatccccggcaacttcatgtgcagcaacggcagatgcatccccggcgcctggcagtgcgacggcctgcccgactgcttcgacaagagcgacgagaaggagtgccccaaggccaagagcaagtgcggccccaccttcttcccctgcgccagcggcatccactgcatcatcggcagattcagatgcaacggcttcgaggactgccccgacggcagcgacgaggagaactgcaccgccaaccccctgctgtgcagcaccgccagataccactgcaagaacggcctgtgcatcgacaagagcttcatctgcgacggccagaacaactgccaggacaacagcgacgaggagagctgcgagagcagccaggagcccggcagcggccaggtgttcgtgaccagcgagaaccagctggtgtactaccccagcatcacctacgccatcatcggcagcagcgtgatcttcgtgctggtggtggccctgctggccctggtgctgcaccaccagagaaagagaaacaacctgatgaccctgcccgtgcacagactgcagcaccccgtgctgctgagcagactggtggtgctggaccacccccaccactgcaacgtgacctacaacgtgaacaacggcatccagtacgtggccagccaggccgagcagaacgccagcgaggtgggcagcccccccagctacagcgaggccctgctggaccagagacccgcctggtacgacctgcccccccccccctacagcagcgacaccgagagcctgaaccaggccgacctgcccccctacagaagcagaagcggcagcgccaacagcgccagcagccaggccgccagcagcctgctgagcgtggaggacaccagccacagccccggccagcccggcccccaggagggcaccgccgagcccagagacagcgagcccagccagggcaccgaggaggtgtag

SEQ ID NO: 251139 - DNA, 468 bp, Artificial Sequence
  derived and/or modified sequence
atgtggctgctgggccccctgtgcctgctgctgagcagcgccgccgagagccagctgctgcccggcaacaacttcaccaacgagtgcaacatccccggcaacttcatgtgcagcaacggcagatgcatccccggcgcctggcagtgcgacggcctgcccgactgcttcgacaagagcgacgagaaggagtgccccaaggccaagagcaagtgcggccccaccttcttcccctgcgccagcggcatccactgcatcatcggcagattcagatgcaacggcttcgaggactgccccgacggcagcgacgaggagaactgcaagaacggcctgtgcatcgacaagagcttcatctgcgacggccagaacaactgccaggacaacagcgacgaggagagctgcgagagcagccagggcctgagaggcatgaccttcctgcacagacccaccctgctgaccagaaacctgtag

SEQ ID NO: 251140 - DNA, 1038 bp, Artificial Sequence
  derived and/or modified sequence
atgtggctgctgggacctctctgtctgcttttaagctccgccgcagagtcacaactgctcccgggaaataacttcacaaatgagtgtaacatcccagggaacttcatgtgttctaatggtcggtgcattcccggtgcctggcagtgtgacggtctgccggattgcttcgataaaagcgacgagaaagagtgtccaaaagccaagtccaagtgcggaccgacattttttccctgcgcaagcggaattcattgtattataggcagattccgatgcaacgggtttgaagactgcccggatggctccgatgaggagaattgcactgcgaacccactactgtgttcaaccgctcggtaccactgcaagaacggcctgtgtatagacaagtctttcatttgcgatggacagaataattgtcaagataattcagacgaggagagttgcgagtcgtctcaagagcctgggtccggccaggtgttcgtgacttcagaaaatcagttggtgtattatccctctattacatacgcaataatcggatcctctgtcatcttcgtgctagtggtggcgctgctggctctggtgctgcatcatcagcggaagcggaacaaccttatgactttacccgtccataggttgcagcaccctgtcctactttctcgcttagtggtcctcgaccatcctcaccactgtaacgtgacctataacgtgaacaatggcatccagtatgtggctagccaggcggaacaaaatgccagcgaggtgggaagccccccgagttacagcgaggctttgttggatcagagaccggcctggtacgacctgcctcctccaccttatagtagtgacacagaaagcctgaatcaggctgacctccctccatatagatctagatccggcagtgcaaacagtgcatcctctcaggccgcctctagcctgttgtcggtggaggatacaagccatagtcctggacagcctggtcctcaggagggtactgcggaacctagggacagcgagccgtctcaggggactgaagaagtttag

SEQ ID NO: 251141 - DNA, 468 bp, Artificial Sequence
  derived and/or modified sequence
atgtggctgctgggacctctctgcttactgttgtcctccgccgccgagagtcagttactgcctggtaacaacttcacaaacgagtgtaacatcccagggaatttcatgtgctcgaacggccgctgcattcctggggcctggcaatgtgatggtttgccagattgtttcgataagtctgatgaaaaggaatgcccaaaggcaaaatcaaaatgcggccctacatttttcccatgcgcaagcggcatccattgcatcatcgggcggtttcggtgtaacggatttgaagattgtccggatgggtctgatgaagaaaattgtaagaatggactgtgcattgataagagctttatatgtgatggacagaataactgtcaggacaactcagatgaagagtcttgcgagtcctcccagggcctccggggcatgactttcctccacaggccaacacttcttactcgcaacttatag

SEQ ID NO: 251142 - DNA, 3798 bp, Artificial Sequence
  derived and/or modified sequence
agcgggagcggcggccgcgccatgtggctgctggggccgctgtgcctgctgctgagcagcgccgcggagagccagctgctccccgggaacaacttcaccaatgagtgcaacataccaggcaacttcatgtgcagcaatggacggtgcatcccgggcgcctggcagtgtgacgggctgcctgactgcttcgacaagagtgatgagaaggagtgccccaaggctaagtcgaaatgtggcccaaccttcttcccctgtgccagcggcatccattgcatcattggtcgcttccggtgcaatgggtttgaggactgtcccgatggcagcgatgaagagaactgcacagcaaaccctctgctttgctccaccgcccgctaccactgcaagaacggcctctgtattgacaagagcttcatctgcgatggacagaataactgtcaagacaacagtgatgaggaaagctgtgaaagttctcaagaacccggcagtgggcaggtgtttgtgacttcagagaaccaacttgtgtattaccccagcatcacctatgccatcatcggcagctccgtcatttttgtgctggtggtggccctgctggcactggtcttgcaccaccagcggaagcggaacaacctcatgacgctgcccgtgcaccggctgcagcaccctgtgctgctgtcccgcctggtggtcctggaccacccccaccactgcaacgtcacctacaacgtcaataatggcatccagtatgtggccagccaggcggagcagaatgcgtcggaagtaggctccccaccctcctactccgaggccttgctggaccagaggcctgcgtggtatgaccttcctccaccgccctactcttctgacacggaatctctgaaccaagccgacctgcccccctaccgctcccggtccgggagtgccaacagtgccagctcccaggcagccagcagcctcctgagcgtggaagacaccagccacagcccggggcagcctggcccccaggagggcactgctgagcccagggactctgagcccagccagggcactgaagaagtataagtcccagttattccaaagtccatatgggttaatctgctctgacttgttgccattctaacaatttgtgctcatgggaagctctttaagcacctgtaagggtgtctcaagttacagtttgggatattaactatctctgcattcccctcctcccccagacttcagagatgtttttctggcgtctcagttgacatgatctgttgtgcgtcttttctgtcaggtcactcttcccttgggacccgagatcacaccctcatttttcacattattctgtttctgttggagagacagcatataaaacagtattgaaataggctgggagagagcaatgtttctgtgctatattggatgctcagaagtgcaggagacgctggacccaattctctctgctgggtagttaccttatagcatttggggatttgggttagatgatctaaccaggaggccatcactggatggtcacccccccaaaaaaattccatttgagcatcaaaacctgctttgcacaatcctatttgatgcccccagttcagcagagtcagtggccaaagaaaactttggacgtgagtaacacccttcagcagtcgcaacgttattttggttttgtgaaggactctgaaaccatctaccctgtataaattctggctttagaaatttgcccaagaatgctcattctgagagctttcctcagcagcatatatcatcagcctcatcctaaaataggcagggagcccctcccatgagtttatccaagttctcagctcctaaaatgcaggctgccaagaccctacacctgccctggctctacagccacttacctggtttctggactgtcaccctcccagctgacctgcccgtagccaaggaatgaggacctaacttgagttggcccaaagtctgacctggctgtatgtccctgtggcccacacccagcctgtcttgctcattcatgcagcctcaacactggcctccaaagttcccttaacacttgcaaagtcctttttacctgtgcatttggacttgaggacactggtttctatcacaggtgagagccatgttcaatacctccagcaagctctcctggctccctgcactgtgcacgctcctcttcccaaggtcccaataccagcacctctagttagagttagggtcagggtcaggcctctcccaacatcccagtagtttctcctctgagacacatgggcaagagacaatttggagtcaagattttccatttggatctattttaaatcttttagaaatgcatttgaaacagtgtgtttgttttttcccttctagttaagggactatttatatgtgtataggaaagctgtctctttttttgtttttcctttaacaaggtccaaagaaagatgcaaaaggagatcacacccttgccccgctgagccccgtgataacaagtcactccagactaacctgtgtgccagacatttgtgcattgttgcactttgaggttattatttatcaagttcttgaaggaagcagaaagagggactcctctctccctccgtgtatagtctctatgtttgtgctagtttttcttttttttctctgtgtccagtcagccacagggcccgcctccctgcaggaataaggggtaaaacgttaggtgttgtttggcaagaaaccacactgactgatgaggggtaaaatggaaccaggtagagccactccgggcagctgtcacccattcagaacttctttccgcagctgaagaaatgttcagtaacctgtttgacgctaattaaaacagagcctgcaggaagtggggctaaagtggcattcagtgatcctgttctgtagacttttctttctttttttaaccaaatccaaaggatgttacagaaaagctagccactggtattttgttttgtttaaaaaaaaaaagaaagaaagaaagaaagaaaaacggaaaggaacctagctgcctgtatctttcatttttaaaatagcacttgagttattttctgagtaatccaataaagaacttttgatgacagccagaatgtgttagaactctggctgaacatttcatctcctgtgagtcagaagggctttatttctccctttgatggggccccttcttctttctggtgctctggaagttgtttagaggaaagaattctaattttaattaattgcgcagtgagttaatctcactcgcttttctgcttccaggcatcttaggaaaaacaaatggttttagtagataagggatgcctactaatgcttttttaaaacaaacagggacatttttattatagatttgatttttttaatgaatgtttttaaaaatatataaataggacaccaaagcggcagggtttttttgggggggagggggtttgttttccaactcaagatggcacattagtggccagcaatattttttaactcattccaaccaggaagcttttttatacattgcctaaatctacgccaaccagaaaatagtctcatctctttttttctcaaatgagatccgtgttttattttagcattaaattagttacactgtgatgactggcctattacctgactcagctccctctaccttgaaattgacatttttaaaaaatgcaactaagtggttaatagtgtgtgacgctcaaagttaatgtaaactggaaaggttgtgtgtcgttgctttttgtgttttggttaggcttggttttgttttttaatttttatactttctaataaatttgcagtttcattctt

SEQ ID NO: 251143 - DNA, 965 bp, Artificial Sequence
  derived and/or modified sequence
agcaacgacgccgggcagcgggagcggcggccgcgccatgtggctgctggggccgctgtgcctgctgctgagcagcgccgcggagagccagctgctccccgggaacaacttcaccaatgagtgcaacataccaggcaacttcatgtgcagcaatggacggtgcatcccgggcgcctggcagtgtgacgggctgcctgactgcttcgacaagagtgatgagaaggagtgccccaaggctaagtcgaaatgtggcccaaccttcttcccctgtgccagcggcatccattgcatcattggtcgcttccggtgcaatgggtttgaggactgtcccgatggcagcgatgaagagaactgcaagaacggcctctgtattgacaagagcttcatctgcgatggacagaataactgtcaagacaacagtgatgaggaaagctgtgaaagttctcaaggcctgcgtggtatgaccttcctccaccgccctactcttctgacacggaatctctgaaccaagccgacctgcccccctaccgctcccggtccgggagtgccaacagtgccagctcccaggcagccagcagcctcctgagcgtggaagacaccagccacagcccggggcagcctggcccccaggagggcactgctgagcccagggactctgagcccagccagggcactgaagaagtataagtcccagttattccaaagtccatatgggttaatctgctctgacttgttgccattctaacaatttgtgctcatgggaagctctttaagcacctgtaagggtgtctcaagttacagtttgggatattaactatctctgcattcccctcctcccccagacttcagagatgtttttctggcgtctcagttgacatgatctgttgtgcgtcttttctgtcaggtcactcttcccttgggacccgagatcacaccctcatttttcacattattctgtttctgtt

SEQ ID NO: 251144 - DNA, 1038 bp, Artificial Sequence
  derived and/or modified sequence
atgtggctgctgggccccctgtgcctgctgctgagcagcgctgctgagagccagctgctgcccggcaacaacttcaccaatgaatgcaacatccctggcaacttcatgtgcagcaatggccgctgcatccctggggcctggcagtgtgatggcctgcctgactgctttgacaagagtgatgagaaggaatgtcccaaggccaagagcaaatgtggccccaccttcttcccctgtgccagcggcatccactgcatcatcggccgcttccgctgcaatggatttgaggactgcccagatggcagtgatgaggagaactgcacagccaaccccctgctgtgcagcacagcccgctaccactgcaagaatggcctgtgcatcgacaagagcttcatctgtgatggccagaacaactgccaggacaacagtgatgaggagagctgtgagagcagccaggagcccggcagcggccaggtgtttgtgaccagcgagaaccagctggtgtactaccccagcatcacctacgccatcatcggcagcagcgtcatctttgtgctggtggtggccctgctggccctggtgctgcaccaccagaggaagaggaacaacctgatgaccctgcctgtgcaccggctgcagcaccctgtgctgctgagccggctggtggtgctggaccacccccaccactgcaatgtgacctacaacgtgaacaacggcatccagtatgtggccagccaggccgagcagaatgccagcgaggtgggcagcccccccagctacagcgaggccctgctggaccagaggcctgcctggtatgacctgcccccaccaccctacagcagtgacacagagagcctgaaccaggccgacctgcccccctaccgcagccgcagcggcagcgccaacagcgccagcagccaggccgccagcagcctgctgtctgtggaggacaccagccacagccctggccagcccggcccccaggagggcacagctgagccccgggacagcgagcccagccagggcacagaggaggtgtag

SEQ ID NO: 251145 - DNA, 468 bp, Artificial Sequence
  derived and/or modified sequence
atgtggctgctgggccccctgtgcctgctgctgagcagcgctgctgagagccagctgctgcccggcaacaacttcaccaatgaatgcaacatccctggcaacttcatgtgcagcaatggccgctgcatccctggggcctggcagtgtgatggcctgcctgactgctttgacaagagtgatgagaaggaatgtcccaaggccaagagcaaatgtggccccaccttcttcccctgtgccagcggcatccactgcatcatcggccgcttccgctgcaatggatttgaggactgcccagatggcagtgatgaggagaactgcaagaatggcctgtgcatcgacaagagcttcatctgtgatggccagaacaactgccaggacaacagtgatgaggagagctgtgagagcagccagggcctgcggggcatgaccttcctgcaccggcccaccctgctgaccaggaacctgtag

SEQ ID NO: 251146 - DNA, 1038 bp, Artificial Sequence
  derived and/or modified sequence
atgtggctgctgggccccctgtgcctgctgctgagcagcgccgccgaaagtcagctgctgcctggtaacaacttcactaatgaatgtaatattcctggaaattttatgtgtagtaatgggcgttgcatccccggcgcgtggcaatgcgacggactccctgactgctttgacaagtctgacgagaaagagtgccctaaggccaagtccaaatgcggtcccacttttttcccctgtgccagcgggatacattgcataattgggaggttccggtgtaatggattcgaagactgcccggacgggagtgacgaggagaactgcacagctaatcccttactctgcagtacagcgcgataccattgtaagaatggcctttgtatcgacaagagctttatttgtgatggacaaaacaactgtcaggacaacagtgatgaggagtcttgcgaaagctcccaggagcctgggtctgggcaggtgtttgtcacatcggaaaaccaactcgtgtattacccatctatcacatatgcaataattggtagtagtgtcatcttcgttctcgtggtggctctgctggcactggtgctgcaccatcagagaaagagaaacaacttgatgacattaccagtccacaggttacagcacccagtgctgctgtccaggctggtggttctggaccacccacaccactgcaatgtcacgtacaacgtgaacaatggaatccaatatgtggcaagccaagctgagcagaatgccagcgaggtcggctctcctccctcatatagtgaggcacttctcgatcagaggcccgcatggtacgatctgccgccaccaccgtactcttctgacaccgaaagcctgaatcaggctgacttacctccatatcggagccggtccggctccgctaattccgcgtcaagccaagccgcaagttctctcctgtccgtagaagacacttcccatagccctggacagcctgggccacaggagggaactgcggagccccgagactccgagccaagccagggcacagaagaagtctag

SEQ ID NO: 251147 - DNA, 468 bp, Artificial Sequence
  derived and/or modified sequence
atgtggctgctgggccccctgtgcctgctgctgagcagcgccgccgaatctcagctgctgcctggaaataactttacgaatgaatgtaacatccctggtaacttcatgtgctcgaacggcaggtgcatccctggagcttggcagtgcgatgggctccctgactgtttcgataagtcggatgagaaggaatgccccaaagccaaatccaagtgcggccctacattttttccctgcgcgtctggcattcactgtattatcgggagattcaggtgtaatggatttgaagattgtcccgacggctctgacgaagagaactgtaagaatggcctctgcattgacaagtcatttatttgtgacggccagaacaactgtcaagataatagcgatgaggagagttgtgaaagcagccagggactgagagggatgactttcctgcaccgaccaactttactgactcgcaatttgtag

SEQ ID NO: 251148 - DNA, 1038 bp, Artificial Sequence
  derived and/or modified sequence
atgtggctgctgggccctctgtgcttgcttctctccagcgccgctgagagccagctccttccagggaacaactttaccaacgaatgcaacatacctgggaacttcatgtgttcaaacggccgttgcatccctggagcttggcagtgcgacgggctgcccgattgttttgataaaagtgacgaaaaagaatgccccaaggcaaagtccaagtgtggccctaccttttttccttgcgcatctggaatccactgcatcattggcaggttcaggtgcaatggatttgaggattgtcccgacggaagtgatgaggagaactgtaccgctaacccgctgctgtgctcaaccgccaggtatcattgcaagaacggcctgtgcattgataagagctttatctgtgacggtcaaaataactgtcaagacaatagcgatgaggaaagctgcgaaagcagccaggagcccggtagtgggcaagtgttcgtaacttccgagaaccagctagtttattatccttccatcacatacgcaattattggttcctccgtcattttcgtgttagtggtggctctccttgcattagtactccatcatcagcgcaagcggaacaacttgatgacactccccgttcaccgcctccagcatccagtcctgctctcccggctggttgtcctggaccatccccatcactgtaatgtgacttacaacgtgaataacggaatccagtacgtggcctcccaggcagaacagaacgcaagtgaggtggggtctccaccatcttatagcgaagctctgttggatcaacggcctgcttggtatgacttgccccctcccccttactccagcgatacagaaagtctaaatcaggctgacctgcccccatatcgatcaaggtctggcagcgctaatagcgccagctctcaggctgcctcttctctgctgagcgtagaggacaccagccatagtccgggacagcctggcccacaggagggtaccgccgagcccagagacagcgagccttctcaagggacggaggaagtatag

SEQ ID NO: 251149 - DNA, 468 bp, Artificial Sequence
  derived and/or modified sequence
atgtggctgctgggacctttatgtctactattgtcaagcgccgcagagagccagctcctgcccggaaacaattttactaatgagtgtaatattcctggcaattttatgtgtagtaacggccgatgcatcccaggagcttggcagtgtgacggcttacctgattgcttcgataagtccgacgagaaggagtgccccaaggctaaatccaagtgcggacctaccttttttccctgtgcgtccggaatccactgcatcatcggtcgatttcgatgcaacggctttgaggactgccctgacggctctgatgaggaaaactgcaagaacggactgtgtatcgacaagagcttcatctgtgacggccagaacaactgtcaagacaatagcgacgaagaatcttgtgagagtagccaagggctgcgcggaatgacgtttctgcaccgaccaaccctacttaccagaaacctctag

SEQ ID NO: 251150 - protein, 306 aa, Artificial Sequence
  derived and/or modified sequence
MAEVSIDQSKLPGVKEVCRDFAVLEDHTLAHSLQEQEIEHHLASNVQRNRLVQHDLQVAKQLQEEDLKAQAQLQKRYKDLEQQDCEIAQEIQEKLAIEAERRRIQEKKDEDIARLLQEKELQEEKKRKKHFPEFPATRAYADSYYYEDGGMKPRVMKEAVSTPSRMAHRDQEWYDAEIARKLQEEELLATQVDMRAAQVAQDEEIARLLMAEEKKAYKKAKEREKSSLDKRKQDPEWKPKTAKAANSKSKESDEPHHSKNERPARPPPPIMTDGEDADYTHFTNQQSSTRHFSKSESSHKGFHYKH

SEQ ID NO: 251151 - DNA, 921 bp, Artificial Sequence
  derived and/or modified sequence
atggctgaggtatctatcgaccagtccaaattgccgggagtgaaggaagtctgtcgggactttgctgtgctcgaggatcatactctggctcattctctgcaggagcaggagatcgagcatcatctagcgtctaacgtgcagcgcaatcgcctggtgcagcacgacctgcaggtcgccaaacagttgcaggaagaagacttaaaagcccaggcccagttgcagaagagatataaggatctcgagcagcaggactgcgagatcgcccaggagatccaagagaaactggcgattgaggcagaaagaagaagaattcaggaaaaaaaagatgaggatattgcgcggctgctgcaggaaaaggagctccaggaagaaaaaaagcgcaaaaaacacttccctgagtttccggccacacgggcctatgccgattcatattactatgaggatgggggcatgaaaccacgagtaatgaaggaagccgtgtctactccctcacgcatggctcaccgtgaccaggaatggtacgacgccgagattgcaaggaaattgcaggaggaggagctccttgctacccaggtggacatgcgagcagctcaggtggcacaagacgaggagatagctaggctgctgatggctgaggagaagaaggcctacaaaaaggcaaaggaaagggagaagtccagcttggataagcgaaagcaagatcctgagtggaagccaaagacggctaaagctgccaactcgaaatctaaagagagcgacgaaccacaccattcgaagaacgagcggcccgcgcgcccccctcccccaataatgaccgacggcgaggacgccgattatacccattttaccaaccagcaaagttccacacggcatttttccaagagcgagtcatcccataaaggcttccactacaaacactag

SEQ ID NO: 251152 - DNA, 921 bp, Artificial Sequence
  derived and/or modified sequence
atggccgaggtgtccattgaccagagcaagctgcccggggtgaaggaggtgtgccgggactttgctgtgctggaggaccacaccctggcccacagcctgcaggagcaggagattgagcaccacctggccagcaatgtgcagaggaaccggctggtgcagcacgacctgcaggtggccaagcagctgcaggaggaggacctgaaggcccaggcccagctgcagaagcgctacaaggacctggagcagcaggactgtgaaattgcccaggagatccaggagaagctggccattgaagctgagcggcggcgcatccaggagaagaaggatgaggacatcgcccggctgctgcaggagaaggagctgcaggaggagaagaagaggaagaagcacttccctgagttccctgccacccgggcctatgctgacagctactactatgaagatggcggcatgaagccccgggtgatgaaggaggccgtgtccacccccagcaggatggcccaccgggaccaggagtggtatgatgctgagatcgccaggaagctgcaggaggaggagctgctggccacccaggtggacatgagagctgcccaggtggcccaggatgaggagatcgcccggctgctgatggccgaggagaagaaggcctacaagaaggccaaggagcgggagaagagcagcctggacaagaggaagcaggaccctgagtggaagcccaagacagccaaggccgccaacagcaagagcaaggagagtgatgagccccaccacagcaagaatgaaagacctgcccggcccccaccacccatcatgacagatggagaagatgctgactacacccacttcaccaaccagcagagcagcaccaggcacttcagcaagtctgagagcagccacaagggcttccactacaagcactag

SEQ ID NO: 251153 - DNA, 921 bp, Artificial Sequence
  derived and/or modified sequence
atggccgaggtgagcatcgaccagagcaagctgcccggcgtgaaggaggtctgtagagatttcgcagttctcgaagatcacaccctcgcccactccctgcaggagcaggaaatagagcaccacttagcgagtaacgtgcagcggaacagacttgttcaacacgacctccaggtggctaagcagcttcaggaggaagatctgaaggcgcaggctcagctccagaagcgttacaaagatctcgagcagcaagactgtgagatcgcacaggagatccaggagaagctggctatcgaagcagaaaggaggcggatacaggaaaagaaagacgaagatattgctcggctgctgcaggagaaggaactccaggaggagaagaaaagaaaaaaacactttcccgagtttcctgctactcgcgcctatgccgactcctactattatgaagatggcgggatgaaaccacgagttatgaaggaggctgtatccaccccaagcagaatggcacaccgcgatcaggaatggtatgatgccgaaatcgccagaaagttacaggaggaagaactcctagccacccaggtggatatgcgcgctgcccaagtggcccaggacgaggagattgccaggttactcatggctgaggaaaagaaggcatataagaaggccaaggaacgcgaaaagtctagccttgacaagcgaaaacaggaccccgaatggaaaccaaagacagccaaggctgcaaacagcaagtcaaaagagtccgacgagccacaccattctaaaaacgagcgaccagccagacctccaccaccaatcatgaccgacggggaggacgccgactacacccactttactaaccaacagtcttccacacggcacttttctaaaagcgaaagctcacataagggctttcactataaacactag

SEQ ID NO: 251154 - DNA, 921 bp, Artificial Sequence
  derived and/or modified sequence
atggcagaggtatccatagatcagtccaaattgccgggagtcaaggaagtttgtagggactttgcagtgcttgaggaccacacactggcccactctctgcaggagcaggagattgagcatcacttagcgtccaatgtccagcgaaataggttggtccagcatgaccttcaggtcgcgaagcagcttcaggaggaggaccttaaggcccaggctcaactccagaagaggtacaaggacctcgagcagcaggattgtgaaattgctcaggagatacaggagaagctggcaattgaggcagagcggaggcgtatccaggagaagaaagatgaggacatcgcaagattgctgcaggagaaagaactgcaggaggagaagaagcgtaaaaagcacttcccagaattccccgcaacacgggcttacgcagattcctattactacgaagacggaggcatgaagccacgagttatgaaagaagcagtgtccactccctcgcgcatggcgcatcgtgaccaggagtggtacgacgcagagattgcgaggaaactccaggaggaagagctgctggccacacaggtagacatgcgggcagctcaagtggcccaggatgaggagattgcgcgacttcttatggcggaggagaagaaggcgtataagaaagccaaggagcgagagaagtcctcgttagacaaaaggaaacaagaccccgagtggaaaccaaagacagcaaaggccgctaatagcaaatctaaggaatcagatgagccccatcatagcaaaaacgagcgcccagccaggccccctcccccaatcatgacggatggggaggacgcggactatacacattttaccaatcagcagtcttccactaggcacttttctaaatccgaatcctcacacaagggctttcactacaagcattag

SEQ ID NO: 251155 - DNA, 8429 bp, Artificial Sequence
  derived and/or modified sequence
cgctcacgggaaagactatgttttaggtgacccgtgtggcctttttgttgaggcctttaggatacaaggcccccacctaaagacgcgaccctcccgtaggaggggggcagggcccgggggcgggagcacagcggggccccagcctcaggcggcgcgtcactgagcacaaaggagacaacagcgaggcggcagcgggcgctgatcttcgctcgccagccactcgcaattgcggttacagacctgcagctccccctcccccagccggcccgcccgcctttctgtctcctctctccctccgtactggacggccccggtccatttccgggctccggatatttggtatcgattggggccggggacgcggagcaggtggccgcggcggggcagctgggccgccagcttggtgcctcggggaccgtctcccgctgctttggtcaccagcccctgcccgcccgacccgctccgttctccggcctgcgagccctgccggccggactttgcgccgcgtccggcgctgctgctgcgctcggggccccgctcggcgccggcggtgaccgggaagcccgcgttaaaggggcaaccgggaccctggcccggtatggctgaagtcagcatcgaccagtccaagctgcctggagtcaaggaagtatgccgagattttgctgtcctggaggaccacaccctggctcacagcctgcaggaacaagagattgagcatcatttggcatcgaacgttcagcggaaccgtttggtccagcatgatctccaggtggctaagcagctccaagaggaagatctgaaagcgcaggcccagctccagaagcgctacaaagaccttgaacaacaagactgtgaaattgctcaggaaattcaggagaagctggctattgaggcagagagacgacgcattcaggagaagaaggatgaggacatagctcgccttttgcaagaaaaggagttacaggaagagaaaaagagaaagaaacactttccagagttccctgcaacccgtgcttatgcagatagttactattatgaagatggaggaatgaagccaagagtgatgaaagaagctgtatctactccatcacgaatggcccacagggatcaggaatggtatgatgctgaaattgccagaaaactgcaagaagaagaacttttggctacccaggtggacatgagagccgctcaagtagctcaagatgaagaaatcgctcgacttctaatggctgaagaaaagaaagcttacaaaaaagccaaggagcgggagaaatcatctttggacaaaagaaagcaagaccccgagtggaagccaaaaacagctaaagcagcaaattccaagtcaaaagagagtgatgaacctcaccattctaagaatgaaaggccagcacggccaccaccacctatcatgacagatggtgaagatgcggattacactcattttacaaaccagcagagttccacacggcatttctcaaaatcagagtcctctcataaaggttttcattacaaacattaaaaacctaggaatctgccttgaaaatggactcactatagcaaatattactgggtgatacagaatgaattctacacttactttttttctcctgtgtttgcattcctgggatttatcctcaagtgcatttctgaccataagtaattttaattcatttcaaatgttttggttattcatgatcacttgggcagtataagaaaatgtagcttctgaatattggccacctctatgctgcatatacttcttgggatatagtatctaagacctttgtaaactgccattttgttaggtatggagtttggtatctagggagtaggccttatttagcaattcaaattttatggagatgaatgatcaaagtgaaacaatgtttggatgcaacgcagaataaaagaatataagaaatagctttttgttgcattaatgtatgatattttgaaggacagagcctttgctttttgtattctttaagaaaagcacaaccataaagtattttaaaaaaagaaacacttggagcaattgaaatatgttattctgactagatggactgtagaggttttgcatttctcagccctcctggggagattggcctagatagcattctttaacacttcctctgcttttgcctcagtagcaaggctttcctaagctcctgggcaatggaacatttattagtatttattgacaaaaatttagttctctgaaattttaactcatatatatgaaaaactttgtattccatctcttctttttcatttacttgtagagccaaggaaatggaattgaaagatgattgcataagtaatgatgccatccttctctctggctgtagactgaggcttttctcttgcttcaagtcagagcagtatttgttgataacctctcaataatgtttggtttacatgccagtaattaaattaattcaacatgaagttgaatttgatgaagtggtcatctatccaagtatttggtttttgttttgttttgttttgttttttgagttggagtctcgccctgtcacacaggctggagtgcagtggtgcaatcttggctcactgcaacctccgccacctgggctggagcaattcccctgcctcagcctcccaagtagctggaattacaggcatgtgtcaccacacccggctaatttttgtatttttagtaaagagcgggtttcaccatgttggccaggctggtctcgaacccctgacctcaagtgatccacctgccttggcctcccaaggtgctgggattacaggcttaagccaccatgtccagccagccaagtatttggttttaaacatttgtattcctttgtgcaagggattgtattcctctgtacaagacctttaagcacctcttcaagaaatttagtctttgtgtagctgctaaccttactgcaatatttattttcccttattttcccatactacttagttgacaaatggcaatcaagctcacttgttctccctctctctgtctcccccccatgtacacatatatatatcccttcagcttgacttgctattatttttcattgtataaatatgaaattcttggcatttcaatatggcatttgtttagggaaaaaatatgtaggtcactagagaaaaatgttaatttttttcccactgtgaattgccttctgtttgccttatcttttcagatagtctttaaagttgggcaatattcaggcagctatttagaacagtttctcagagtggatttgggtctctcatttgagaaagatttgtagtttcaatgaagtttgtatattataggaatttaagtaaaatcatctgagttaagttttgggcaaatgttaatcagaaagataatctacatccctactttatgtagtcattttggagaaatggaggaaaaggaaaataacaggactttttatagctgtgataaaatgggtaaagaaaaacctccatttaaataaggaaggggagacaaaatggaaggtcctggccttaagtcaaattccagatagtgctttcaatatccaaagcttaggccttgtttacttatagtaatgctatatttttctttatctgccctgtgatttcgcttcgtgtccttcaaagtttttttattgtaattttaaaggaaaaaaacaatgtatttttatttgataactaggcaaaatcatttgccattttttatttcataaatatttatttttctatctcatacaatgatcagttttactttaaaaattctgcatttctcttgcctctcatgtacttcatccagttatttattattgtaaaatgttaactggagatactgcattcaaaaaaaagtcggaccacttaacacttaccaggaatgttagtgtttcagctgttttagtaagtgaccaagtaagctatcaccttgtgatagctaattcaacatctttattgaaaatttgttactttttttaaaggtttttaaaagattacaattttaaaatattttatgtttattttatttttgtgtaaagcaaacacttttaaaataatatcagagtaattattaccctatgaataaggagatagaaatgaaattcagccagttaaatcctcatactctttctcattcaaataatataataatgtttgagactatagaagcaactcaactgtattttaatgaactgccagacacttttcactgtgttctctgctttttactttgtcatttttatataaatgtgaaagcattttgttgttgttgttgttgttcctgctgctagaacacatgcagtttaatttttaggcccacagtgtattatgctttaatgttgtgatgtaaactaatacttctggcctgggaaaacctttctgtttctgtatctttgtcctttggaggccaggcctcattaacaccagtattgttgaataagcacaatatatgacggagccttatcataaggctgcttgacatagacacccactctcctccacattttataaatcattgtttggaagtaaagttagataagagtcaaattaaatgttttgacttgaaaaatatttgacttttgcgttcaaaccactgttagacgtaagtattttattagacataagtattttattttgggactagacagttgctttacatgtatttaagggaacattgtgattttcagaaagtggctttacatactattgaattgctatttcccaagttactttacaaccagcagcagcataccaataaattacaaaagcagaaaatgaaaattaaccctaggtgttctgatgatagagaaatagctaaattagaaaagaaagatatggatagatgcttttaggaggaaaacctttttagaatggcaatgaccacttggatctaggtcaacatattccaaaatgtgtgaccttgggctttgtgtttactgaactcactctagaaaattctggacctgattcattaaccccgcttttcttctctaatgtgtcctgaagctgagctagatgatgagtaaattctttgctgactgttgctcatcactttctctcaaagttagaacttttcagtataaaaataattagcttttaactgattattaattttctttaatagtttctgtcaaaacttgtctaaaatttgtgttgtgccaaattggaaatacccactataatatggtgcattcagtttactccacaagtggttaacattttaagtcctagattttttatgtcttgcctttgtataagcatcgctttggggaataccaagatgattcattattcagtgattattttcttgaaagataactatgatgattggctgtaaaatcttcaccctaataaaggagtgagatctctgtgtaaacagctttctgaaggactgataatagaatagaacttgcagccaaaggctttttcccttttgagaagacggtatttgtgtaaggagtgctaaggtagacttcattgtacatagagtgccatattctgttgaaacgatcataacaaaatcaaaacctcatgcttcagcaaaaaggaaaaaagatttttaaattactttgtctattacttactgctcatagagaagtgactatataaaatggtccaattttctcatttctggtggtgcctgtgagtcttaaagccatatctgcttatcttactgttgatagaatactttttttctttttagcccatgataagtaatatgggcaggtagaagcaaactggagactgtcctgttaatgctgcatggggcacaatgtctttcaaattattggtggaagaatctcttttatccatggcgagaggtaagaatattaaagagtcaggatattgttgctcctggtatttaacaactgtcattagaaatgctgaaatttaattgtagagaagtcaagaaagaaagagtaaactgagaaaatcttactactacagagtcacttttacaatgagacctgcactttatgccagcactgtttgtgaggagcagtactgccttaaattagtttgactctgactgatgtcagtgtacgttacttcctttatgtgactgacagtcagctttccattgagatataacattcacagatgatccccaagtatccttgtcatcagaagctttggaccttttctgccactgacttgtggctgatctgtaacacaataaatacataattttatttcatgttgtctgtccacctctgaataagcagtggcatgaccaaaaagactggtagaaggagagaatttcttggccaaatccttcataccaggtaccacttcttgagtaactgagagttgactgtcttctatggtgactacatagaagatatttccaaaggttctgttatgcagtgaagacattcagattatttgtaagaatttcaccaacacccttgtgtattgaaatgcttaaccattaacagggaaaaaaaaggagaaaaccgaacaaaacagagacatttacttgaaatgggaggtttgctaatgtgaagagtgtttctgttttattacttataagagaaaagcaggaaaacttttgctttgataagaaagacaccagagtggtgattctgtttgatgccacaggctaacacaatcgtgtaatcatgttgagttgtagaaatatatggccctaaaaaccattctctttcccttatatatataaatatgtgaacactgcctagtaacattttaatagatttaagatgcatttgtacattctcagcaaactagaagaaaatgttttttctctttttgagttaacttcatagcatagagaaccagcactgtgcaggtttcagcatttcagataagggcataattaattgtgtaacttaatgccctgttattcattgctgaggttcatataaagaatagaaaaattgaaagatgggtttgggcgacattttcttcccaaaagatcaagtaaggagtaagaacaagtaagggaagacagctaagagaacatactatgacatatcatagaattgggatacatttttgttgcactggatttcaggctatactgctaaaataatttctacctgttaaattttgtgagagggtttttgacatcagaatttttgtatttctggtcaaattggtcttggaaatccctatggtctctaatttcagctcttgctgtaaactgcaagccaaatgctctttctcagaaagagctatatttttctcttcttacaggcaacccaatatttatttcataaagtgttataaatattgagaagatacactggggagatagcatataaaaatgatgctccaaaatgagaattctatatggggctttccctaagaagaatccatcccagcacatattttgaaaaggtgctgaattaaaaagtacaagagtttgctcatataaatcaagttgcccaggaaacctgaggtgatgctatcatttgtctcataatttagaaacgtgatctcttgagagagagactacgcattgcctgggcactttcagattccttaggaagtgcccctttgatatttggaatgtggatatatttataaaacaaatggattgttattccaaatccacatggatttataaccaagccccagaagaataggcagctttgaaatagctagttcgtggaattgaacagaaccttgatggaatgcagttgcctgtgtgaggacagaaaacaaagaggctgcctcagaccacatgcctatctagagattaagtgaatttgtgagggacattttgtggatgccttaaagatgaccagtggtgggttctgatgggaatatatacactcatctggactaggccaatggaagcagtctctttcagttcacctccgtacagcacaagttgttcctgctcatgacctcattgaggaaaatgagaattgtggtgctggtgactttcatgtgtcttgggaggttgaggtgttcaacatcgttaaggcactcccaaaacgcaaacctccttttttaaatgccaattgtacatctacattaattcatctatgcaaacttgtgttttcatggtttgttttttacactatatttctcattaggttctttaaacatcaggtttaatattgatattatgaataatttttaaaccaaagtattctataagtctgtgtgctttgttttcctggatggtttgaccaaggtaaacatcagtcttgtccttctctcttaataaagtcatccatttgttaagtcagtggtctctgtctcatgtttttgttttgtttctttacagcattcaaggacagggaaacttacgagagtcttattataattattattatttacaaaatgaccctaataggtctgtttagtaacagtgaaattttttcttactccatttccatacactttctgtaaatatgtataacatgataatgatgcctggtgtattgaaatcctcaataaatactgccaagtgtggatcagttgga

SEQ ID NO: 251156 - DNA, 921 bp, Artificial Sequence
  derived and/or modified sequence
atggccgaggtgagcatcgaccagagcaagctgcccggcgtgaaggaggtgtgcagagacttcgccgtgctggaggaccacaccctggcccacagcctgcaggagcaggagatcgagcaccacctggccagcaacgtgcagagaaacagactggtgcagcacgacctgcaggtggccaagcagctgcaggaggaggacctgaaggcccaggcccagctgcagaagagatacaaggacctggagcagcaggactgcgagatcgcccaggagatccaggagaagctggccatcgaggccgagagaagaagaatccaggagaagaaggacgaggacatcgccagactgctgcaggagaaggagctgcaggaggagaagaagagaaagaagcacttccccgagttccccgccaccagagcctacgccgacagctactactacgaggacggcggcatgaagcccagagtgatgaaggaggccgtgagcacccccagcagaatggcccacagagaccaggagtggtacgacgccgagatcgccagaaagctgcaggaggaggagctgctggccacccaggtggacatgagagccgcccaggtggcccaggacgaggagatcgccagactgctgatggccgaggagaagaaggcctacaagaaggccaaggagagagagaagagcagcctggacaagagaaagcaggaccccgagtggaagcccaagaccgccaaggccgccaacagcaagagcaaggagagcgacgagccccaccacagcaagaacgagagacccgccagaccccccccccccatcatgaccgacggcgaggacgccgactacacccacttcaccaaccagcagagcagcaccagacacttcagcaagagcgagagcagccacaagggcttccactacaagcactag

SEQ ID NO: 251157 - protein, 310 aa, Artificial Sequence
  derived and/or modified sequence
MGNQVEKLTHLSYKEVPTADPTGVDRDDGPRIGVSYIFSNDDEDVEPQPPPQGPDGGGLPDGGDGPPPPQPQPYDPRLHEVECSVFYRDECIYQKSFAPGSAALSTYTPENLLNKCKPGDLVEFVSQAQYPHWAVYVGNFQVVHLHRLEVINSFLTDASQGRRGRVVNDLYRYKPLSSSAVVRNALAHVGAKERELSWRNSESFAAWCRYGKREFKIGGELRIGKQPYRLQIQLSAQRSHTLEFQSLEDLIMEKRRNDQIGRAAVLQELATHLHPAEPEEGDSNVARTTPPPGRPPAPSSEEEDGEAVAH

SEQ ID NO: 251158 - DNA, 5404 bp, Artificial Sequence
  derived and/or modified sequence
ttgttgctcgcccggcccaagcgggagctgttgccgccaggctgcgaggctgccgtcctctcctcctcgcgccccacctcccccgagagctggctgaggaggggcagcagccccagctggcgggaggaagcgcggtgtgaacagggattgccccccgccttcaagtatcggggcgctacgcagccgcgggggaaagacatgcccctagtctgcccgctgcgctgccctctgcccagcctcgctgccgcccgcgccgggagaggagggactgccgagcctacaccttcaaactcgccctagaagtctcggggcgcggcagggagcccttccccaggccccacggccttcacctctccgcgggtagcctcagcccctgtccggggacctgtgcaaatgaccctggagttggtttcgctttctccccttgcggcggtgtgaacgtgtgtccgcagcgtgatgggcaaccaggtggagaaattgacccacctaagttacaaggaagttcccacggccgacccgactggcgtggaccgggacgacgggccccgcattggggtctcctacattttctccaatgacgatgaggacgtggagccgcagccgccgcctcaggggccagatggcggcggcttgcccgacggtggggacgggccgccgccgccccagccgcagccctacgatccgcggctgcacgaggtggaatgctccgtgttctaccgggacgaatgcatctaccagaagagcttcgcgccgggctcggcggcgctgagtacctacacgcccgagaacctgctcaacaagtgcaagccgggcgatctggtggagttcgtgtcgcaggctcagtacccgcactgggccgtatatgtgggtaacttccaggtggtgcacctgcaccggctggaggtgattaacagcttcctgactgacgccagccagggccgtcgcggccgcgtggtcaacgatctgtaccgctacaagccgctaagctccagcgccgtggtgcgcaacgcgctggcgcacgtgggtgccaaggagcgcgagctgagctggcgcaactcggagagtttcgccgcctggtgccgctacggcaagcgcgagttcaagatcggcggcgagctgcgcatcggcaagcagccctaccggctgcagattcagctgtcggcgcagcgcagccacacgctcgagttccagagtctagaggacctgatcatggagaagcgacgcaacgaccagatcgggcgcgcggccgtgctgcaggagctcgccacgcacctgcacccggcggagccggaggagggcgacagcaacgtggcgcggactacgccgcctcccgggcgcccccctgcgcccagctccgaggaggaggacggagaggcagtggcacactgatgggcgagctgagcgcagagctgcgaaggggaactgtttgcagtagcagccgctgctccctttctccctctcttcctccctcttttgccactgtctgggccccatctgggattcctgggccctttggaaaagagttggtgaaatgcgcagccggctgtggacgggggaggaggaaggggacagagggagcaggtaggaaacactttagttgggggtggggggcgtctccctctggccccctgtctgtcttcctctccgcggtggagcaaactgtggacttgcctggcacttaaaccttggtagatctgggtttataatcggccattcttaagcacgtggggttgggggaaagttcggagtacccattcctgccgttgcttcctatcctgggcttggaagaatcctggtagaaaggccagagtgggtttgtggagtcgccactgcgggaccagcacgaaagctgcttgtctgctttggcggagctgagctgtgtatgggatccaggaggctggggtgatttattttatgggattcctggagcgcagggctggtgaatccatgacaaggtccgggagcagcagaccaaaaccacagcagcctcctattaagtgtaacaaatagttaagcaaactcgggctacaaacaaagactttgctacctccctcctccacaacccccaagtaattagccttctggagctggctcttagctgaggctcctgctacctcctgctccacccgccccttcctaggttacaagtaaatcattgtcaagggccagccaggggaaggtttcaattaaggttctgttctgctgcctttgtttctcccctgctgttgtaggcacttacagctgcgttgttatgaaaggagggaatagccctttgtgtctttgatctaattaaacctgcttggctgtgtttatccgcagggcaggtcacagatagggttggctgtgccactccataaagtatctattgtggaagcagccaaaaagggctgctgtggcaggaattggttaatttctccttccacttcccttcctgaatagtgaagggagcccttttaaaacaaggctttggtggtaatcctgtgatttttttttctcccccatcccctcactggcccatccctctcaccctcacttttgttctgctggtgggtaaaatcttaggctgaacacatatttcaatggtaagatacttattttgctatccacacttgatgcaattgaattcaaggtgcaaagtcttgtactgaagcagtctccttgttgcttggagaacacctccttcagagccctttgttaaataagaggggcgacgttgatcatagatgccacctggttagcaccgaatctgactttggtgacagtcctaaagcacagttggtgattgtgagatctgttagcggcaggctgagcagatactacttggttttgcttggtatgagatactactgtttgcttagtatgagattttttccagcctgtctcttaaactcctgtgacatcttcaatgatatgtgccctcagttgcagcatagcttctctgctgcctattgccattgctgtctcaaaagttgagtgaattttgaggcgtctttttttttttttcctctcttgggagtcgttgtaaactactgtgtacaagtcattttgtgatatgattctgaacagttggaatagaatcatagttaagtggtacagccatggctatcgtcaggcctgttgcctggagatctctaagttaaggcaacaagacttaaagaattttctaatacacttgtttcacacatggacgttgaggccatagtctttaaaagcttggacctttgtagcacctcaacatgaaagggcattagctatgtttcctgtttttacagtgatcaccaaacagatcttgccactttgattgttaaaaatgaaccacattctagccctggtctgggactttggagggagatgaatttcttgttggaaatgtaaatctagtgtccatatttaatactctcacagctttgtgtttattctctttgctcatggaatagcagaacaagataaacatgggttaagacatttaggagaacctgctgtatctaacccagttggattttctttcatgcttaacacagtagtgaaaatagaaggtaggccgggcacagtggctcatgcctgtaatcccagcactttgggaggctgaggcaggtagatcacctgaagttaggagttcgagaccagcctggccaacatggcgaaaccctgtctctaccacaaatacagaaaattagctgggcgtggtggcaggcgcctgtaatgcctgctacttgggagcctgaggcagaagaattgcttgaagctgggaagcagaggttgcagtgagccgagatcgcaccactgcactccagcctgggcagcagagcaagtagtaataaccaccgtgtagacaagtgggagggaagaatagaatggcactgtccagctctgggctagccagatcaactcccccacccgtcttcttcctctgtcccagaatggaaaatgatgtatggtcagtcacgctgaagtatagcagcgactgtgttaagagagagcagtgactctctcttctagagaagaggttttcaataacagggcttggaaatgaactagaataggaaatagatcttttcagatgctgctttcccatgtaatacaagcgtttctacagggtaccagaggtgtgaaatatgtgacacttaagaacagtgatttttattgggaattttcttagggttattacacttaaagcaacaaccaactagtaacagctccaggaaaggggaatgaatcaactcttggttctttcctgaagacggcagtgttgtggataagtgagtttttaatgccctggcagtggctacatttgacactttagaaaaaataaacatatttaataatttttgtttctccttaggaataagactgtagaactgttttgtactgtgaattacggatgctctttgaaggaaagaaatatcgattctaatgttcttcagaagttctggcagggataagcaggacatcgactggaacgtatgctaaatgaaagcagacaaatttctattttcttacctgagcaaatattttattgaaactgcttatgtatgtcaaaggagcccacaacttcagctacacaactttttgtattgaaagaactcatactttttgtagcttttatttcacatttaatttaaagtgacttttagcactaaaatgcctagaagattttactccagacctataaggaaatgtttagtttttatgaaaaatgacaagtcgatggttaaacttctcatgtctttggtgctttggccctaatagcactggacaacaccacgaccacatggaaacatatttttggaagcaaaactttaattttatataacgtatgctatggagagctaagacaatttaaggactacttgttttctattttttttcttaataaaatggaatccactgtgttgaagactcttgatatcatgtgcttgtctaaccattttttgttttataaattagaataaaatatagttgtgataatggtcatcgaatggatttgtttggaaagctacatcttatttgtgaaatgttttttaaatcagagtaactatcaactgattcagctttttgttgttttgttcttggctataatacttgtgactcatgaagaattatgttgacaaacaggataaattccacatgcattttatttcccagtgagttgtataaactttatttttgttgaaggttgtatgttaaatcaatgttacattcttatatcacttcttgagaaggaagttccgatttgaaattgtatcatttccttcaaaatgaagggcagtgcttagttaaataaaagattgatgatatcttttaagccatttcctcttcactatgtcttattaaaataaaacctgtcaagttcttttcaaaagatgctatgagcgtttccaataaaccatctattagagttcac

SEQ ID NO: 251159 - DNA, 933 bp, Artificial Sequence
  derived and/or modified sequence
atgggaaatcaggtggaaaagttgacccacctaagctacaaggaggtgcctactgccgaccccaccggagttgatagagacgatggcccccgcattggagttagttatattttcagtaatgacgacgaggatgtagaacctcaaccacccccgcagggacccgatggtggcggactgccagacggcggggatggcccgccaccgccacaaccccagccttacgacccaagacttcatgaagtggaatgttccgtgttctaccgcgacgagtgcatataccaaaagtctttcgctccaggctccgcagcactttctacctatacacctgagaatctcctcaacaagtgtaagccgggggatctcgtagagttcgttagccaagctcagtatccccactgggcagtttatgtgggaaattttcaggttgttcacctgcatcgactggaagtgataaatagcttcctcaccgatgcgagccaggggcgcaggggccgggtagtgaacgacctgtacaggtacaaacccttgtcctccagtgcagtggttcggaacgcactagcccacgtgggcgctaaggaaagagagctgtcttggcgtaatagtgagtctttcgcagcttggtgccggtatggcaagcgggagtttaaaattggcggagagctcaggatcggaaagcagccctatcgcttacagatccagctcagcgcgcagcggagccacactctcgaatttcaatccctggaggatcttatcatggaaaagagaagaaacgaccagattggcagagccgctgtgctccaggaactcgcaacccacctgcatccggccgaacctgaagagggcgacagcaatgttgcacggactacacccccaccagggaggccaccagctccgtcatccgaagaggaggacggagaggctgtggcgcattag

SEQ ID NO: 251160 - DNA, 933 bp, Artificial Sequence
  derived and/or modified sequence
atgggcaaccaggtggagaagctgacccacctgagctacaaggaggtgcccacagctgaccccaccggggtggacagagatgatggcccccgcatcggcgtgtcctacatcttcagcaatgatgatgaagatgtggagccccagcccccaccccagggcccagatggcggcggcctgcctgatggaggagatggccccccaccaccccagccccagccctatgacccccggctgcacgaggtggagtgcagcgtcttctacagagatgagtgcatctaccagaagagctttgcccctggcagcgctgccctgagcacctacaccccagagaacctgctgaacaagtgcaagccaggggacctggtggagtttgtgtcccaggcccagtacccccactgggccgtgtatgtgggcaacttccaggtggtgcacctgcaccggctggaggtgatcaacagcttcctgacagatgccagccagggccggcggggccgggtggtgaatgacctgtaccgctacaagcccctgagcagcagcgctgtggtgagaaatgccctggcccacgtgggcgccaaggagcgggagctgtcctggagaaattctgagagctttgctgcctggtgccgctatggcaagcgggagttcaagattggaggagagctgagaattggcaagcagccctaccgcctgcagatccagctgagcgcccagaggagccacaccctggagttccagagcctggaggacctgatcatggagaagagaagaaatgaccagatcggccgggctgctgtgctgcaggagctggccacccacctgcaccctgctgagcctgaggagggggacagcaatgtggcccggaccaccccacctcctggccggcccccagcccccagcagcgaggaggaggatggagaggccgtggcccactag

SEQ ID NO: 251161 - DNA, 933 bp, Artificial Sequence
  derived and/or modified sequence
atgggcaaccaggtggagaagctgacccacctgagctacaaggaggttccaactgcagatcctacaggggttgaccgagatgacgggccgcggattggggtatcttacattttcagcaacgatgacgaggatgtcgaaccccagcctcccccacagggacctgacggaggagggcttcctgacggcggcgacggaccgcccccaccccaaccccagccctacgaccctcggctgcacgaagtagagtgctctgtgttctaccgggatgagtgcatttaccagaagtcatttgctccagggtcagcggccctcagcacatacacaccggaaaatctcctgaacaaatgcaaacctggggacttggtagaattcgtatctcaagctcagtatccgcattgggccgtgtatgtgggtaatttccaagtggtgcacttgcatagattggaagtaatcaatagttttcttacagacgctagccaagggcggagaggcagggtggtaaacgatttataccggtacaagccacttagtagcagtgccgtggtccggaacgcactcgctcacgttggagccaaagagcgggaactttcatggcggaacagcgaatctttcgccgcatggtgtcgatatggcaagagggaattcaaaatcgggggcgaattgaggattggaaaacagccataccggctgcaaatccagctgagtgctcaacgttcgcacactttggaatttcagtctttggaggacctgattatggaaaagcgccgcaacgatcaaataggtcgcgctgccgtcttacaggagctggccacccacttgcaccccgctgaacccgaggagggagatagcaatgttgcccggactacaccgcctcctggacgccccccggccccaagttcggaggaggaagacggcgaggcagtggcccactag

SEQ ID NO: 251162 - DNA, 933 bp, Artificial Sequence
  derived and/or modified sequence
atggggaaccaggtcgagaagctgacacatctgagttacaaggaggtacccacagccgatcctaccggagtggacagagacgacgggccaaggatcggcgtatcctacatttttagcaacgatgacgaagatgtggagccccagcctccccctcagggcccagatggtgggggactgcccgacggtggagacggcccacctccgcctcagcctcagccttacgatcctcggttacacgaggttgaatgctctgtattttaccgggacgaatgtatttaccagaagtcattcgccccagggtccgccgctctgtctacttacacccccgaaaatctcctgaacaaatgcaagcctggcgatctggtggaatttgtcagccaggctcaataccctcactgggcagtgtacgtgggcaactttcaggttgtgcatcttcatcgactggaggtgatcaactctttccttacggacgcttctcaggggcgtagaggccgagttgtgaacgatctatatagatacaaaccgttgagctcgtctgctgtggttcgcaacgcattggctcacgtcggcgcaaaggaaagggaattgtcctggcgaaactctgaatccttcgctgcttggtgccgctacggtaaaagagagttcaaaataggaggagagttaaggatcggtaaacagccatatcgtctgcagattcaactgtctgctcagaggagccacactctggaattccaatctctggaagatcttattatggagaagcggcgaaatgatcagataggccgagccgcagtcctacaggaacttgcaacccatctccaccctgccgagcccgaggaaggcgacagtaacgtggccagaactacaccacccccaggccgtccccctgcacccagctctgaagaggaggacggcgaggccgtggcccactag

SEQ ID NO: 251163 - DNA, 933 bp, Artificial Sequence
  derived and/or modified sequence
atgggcaaccaggtggagaagctgacccacctgagctacaaggaggtgcccaccgccgaccccaccggcgtggacagagacgacggccccagaatcggcgtgagctacatcttcagcaacgacgacgaggacgtggagccccagccccccccccagggccccgacggcggcggcctgcccgacggcggcgacggccccccccccccccagccccagccctacgaccccagactgcacgaggtggagtgcagcgtgttctacagagacgagtgcatctaccagaagagcttcgcccccggcagcgccgccctgagcacctacacccccgagaacctgctgaacaagtgcaagcccggcgacctggtggagttcgtgagccaggcccagtacccccactgggccgtgtacgtgggcaacttccaggtggtgcacctgcacagactggaggtgatcaacagcttcctgaccgacgccagccagggcagaagaggcagagtggtgaacgacctgtacagatacaagcccctgagcagcagcgccgtggtgagaaacgccctggcccacgtgggcgccaaggagagagagctgagctggagaaacagcgagagcttcgccgcctggtgcagatacggcaagagagagttcaagatcggcggcgagctgagaatcggcaagcagccctacagactgcagatccagctgagcgcccagagaagccacaccctggagttccagagcctggaggacctgatcatggagaagagaagaaacgaccagatcggcagagccgccgtgctgcaggagctggccacccacctgcaccccgccgagcccgaggagggcgacagcaacgtggccagaaccacccccccccccggcagaccccccgcccccagcagcgaggaggaggacggcgaggccgtggcccactag

SEQ ID NO: 251164 - protein, 532 aa, Artificial Sequence
  derived and/or modified sequence
MAPSFTARIQLFLLRALGFLIGLVGRAALVLGGPKFASKTPRPVTEPLLLLSGMQLAKLIRQRKVKCIDVVQAYINRIKDVNPMINGIVKYRFEEAMKEAHAVDQKLAEKQEDEATLENKWPFLGVPLTVKEAFQLQGMPNSSGLMNRRDAIAKTDATVVALLKGAGAIPLGITNCSELCMWYESSNKIYGRSNNPYDLQHIVGGSSGGEGCTLAAACSVIGVGSDIGGSIRMPAFFNGIFGHKPSPGVVPNKGQFPLAVGAQELFLCTGPMCRYAEDLAPMLKVMAGPGIKRLKLDTKVHLKDLKFYWMEHDGGSFLMSKVDQDLIMTQKKVVVHLETILGASVQHVKLKKMKYSFQLWIAMMSAKGHDGKEPVKFVDLLGDHGKHVSPLWELIKWCLGLSVYTIPSIGLALLEEKLRYSNEKYQKFKAVEESLRKELVDMLGDDGVFLYPSHPTVAPKHHVPLTRPFNFAYTGVFSALGLPVTQCPLGLNAKGLPLGIQVVAGPFNDHLTLAVAQYLEKTFGGWVCPGKF

SEQ ID NO: 251165 - DNA, 1983 bp, Artificial Sequence
  derived and/or modified sequence
agacactggacttgtaaacgaaaagcttcataagtccctctttgcttagtacttttctcgtcctttccccagggtgcacgtaaccctcaagcactaggaccgtgcggaatccaggctgcgatggcaccttcatttaccgcccgcattcagttgttcctcttgcgggcgctaggctttctcataggcttagtaggccgagcagctttagtcttagggggtccaaagtttgcctcaaagacccctcggccggtgactgaaccattgcttctgctttcggggatgcagctggccaagctgatccgacagagaaaggtgaaatgtatagatgttgttcaggcttatatcaacagaatcaaggacgtgaacccaatgatcaatggaattgtcaagtacaggtttgaggaagcgatgaaggaggctcatgctgtagatcaaaagcttgcagagaagcaggaagatgaagccaccctggaaaataaatggcccttccttggggttcctttgacagtcaaggaagctttccagctacaaggaatgcccaattcttctggactcatgaaccgtcgtgatgccattgccaaaacagatgccactgtggtggcattactgaagggagctggtgccattcctcttggcataaccaactgtagtgagttgtgtatgtggtatgaatccagtaacaagatctatggccgatcaaacaacccatatgatttacagcatattgtaggtggaagttctggtggtgagggctgcacactggcagctgcctgctcagttattggtgtgggctctgatattggtggtagcattcgaatgcctgctttcttcaatggtatatttggacacaagccttctccaggtgtggttcccaacaaaggtcagtttcccttggctgtgggagcccaggagttgtttctgtgcactggtcctatgtgccgttatgctgaagacctggcccccatgttgaaggtcatggcaggacctgggatcaaaaggttaaaactagacacaaaggtacatttaaaagacttaaaattttactggatggaacatgatggaggctcatttttaatgtccaaagtggaccaagatctcattatgactcagaaaaaggttgtggttcaccttgaaactattctaggagcctcagttcaacatgttaaactgaagaaaatgaagtactcttttcagttgtggatcgcaatgatgtcagcaaagggacatgatgggaaggaacctgtgaaatttgtagatttgcttggtgaccatgggaaacatgtcagtcctctgtgggagttgatcaaatggtgcctgggtctgtcagtgtacaccatcccttccattggactggctttgttggaagaaaagctcagatatagcaatgagaaataccaaaagtttaaggcagtggaagaaagcctgcgtaaagagctggtggatatgctaggtgatgatggtgtgttcttatatccctcacatcccacagtggcacctaagcatcatgtccctctaacacggcctttcaactttgcttacacaggtgtcttcagtgccctgggtttgcctgtgacccaatgcccactgggactgaatgccaaaggactccctttaggcatccaggttgtggctggaccctttaatgatcatctgaccctggctgtggcccagtacttggagaaaacttttgggggctgggtctgtccaggaaagttttaggaggaccttctgcaaggttaatgtgtgtgtgtgtttgtgttcgtgtggtggtgtttctattaattgggtgaaatcaagcaccagcagacaagcagagaaacaactggggaatttattgactcatttagttattctttctacttttatttccttctctaactgttggtcttactaaaatggtaatatttgcttcttgcttttatgttactggaaaattaggacatgtaaatggataagtgcaataaagtttcctaaatgctggaa

SEQ ID NO: 251166 - DNA, 1599 bp, Artificial Sequence
  derived and/or modified sequence
atggcccccagctttacggccagaatccagctgtttctgctgagagctctggggttcctgattgggcttgttggtcgggctgccctggtgctgggcggtcccaaatttgcaagcaagacccctcgtccagtaacggagcctttacttctattatctggaatgcagttggcaaaactcattaggcaacgtaaagtgaagtgcatcgacgttgtgcaggcatatatcaatcggatcaaagacgtgaacccgatgattaacggcattgtcaaatacagattcgaggaggctatgaaggaagcacacgccgtggaccagaagctggccgaaaagcaggaggacgaagcgacgttagagaacaaatggcccttcctgggtgttccactcacagttaaggaagctttccagttgcagggcatgccgaattcaagcgggcttatgaaccgacgggatgccattgcgaaaactgacgccacagtggtagcacttcttaaaggtgccggcgctatcccattgggtataactaattgctccgagctgtgtatgtggtatgagtctagtaataaaatatacggaaggagcaacaatccttatgatctccagcatatagtgggcgggtcatctgggggcgaggggtgcaccttggcggccgcttgctccgttataggcgtgggctccgacatcggagggtcaattcgcatgccagcctttttcaatggcatttttggccacaagccgtccccaggcgtcgtaccgaataaaggccagtttccccttgccgtgggcgctcaggagctcttcctatgcaccgggcctatgtgtcggtatgccgaagatctggccccaatgttgaaggtgatggccggacccggaatcaaaaggctaaaattggacactaaggttcacctgaaggatctgaaattttattggatggagcacgacggcggctcctttctgatgagcaaggttgaccaggatctcatcatgactcagaagaaagtggtggttcacttagagaccatcttgggggcaagtgtacagcacgtcaagcttaaaaagatgaagtacagttttcaactgtggatcgccatgatgtcagccaagggccatgacgggaaggagcctgtgaagtttgtggatttgctcggcgaccatggcaaacacgtctctcctttgtgggagctgatcaagtggtgtttaggcttaagcgtttacactattccttccatcggtctggcgctgctagaggaaaagctgaggtactcaaatgagaaataccagaagtttaaagctgtcgaagaatctttgaggaaggagttggttgatatgctgggcgacgatggggtcttcctgtaccctagtcatcccaccgtggcacccaaacaccacgtgcccttaactcggccgtttaacttcgcttataccggcgttttttccgccctgggcttgcccgtgacacaatgcccgctgggcctcaacgccaaggggctgccactgggcatccaggtcgtcgccgggcccttcaacgatcacctaacactcgctgtggctcagtacctggagaagacctttggcggctgggtgtgccccggtaagttctag

SEQ ID NO: 251167 - DNA, 1599 bp, Artificial Sequence
  derived and/or modified sequence
atggcccccagcttcaccgcccgcatccagctgttcctgctgcgggccctgggcttcctgattggcctggtgggccgggccgccctggtgctgggcggccccaagtttgccagcaagacccccaggcctgtgacagagcccctgctgctgctgagcggcatgcagctggccaagctgatccggcagaggaaggtgaagtgcattgatgtggtgcaggcctacatcaaccgcatcaaggatgtgaaccccatgatcaatggcatcgtgaagtacagatttgaggaggccatgaaggaggcccatgctgtggaccagaagctggccgagaagcaggaggatgaggccaccctggagaacaagtggcccttcctgggcgtgcccctgactgtgaaggaggccttccagctgcagggcatgcccaacagcagcggcctgatgaacagaagagatgccatcgccaagacagatgccaccgtggtggccctgctgaagggggccggggccatccccctgggcatcaccaactgcagcgagctgtgcatgtggtatgagagcagcaacaagatctacggccgcagcaacaacccctatgacctgcagcacatcgtgggcggcagcagtggaggagagggctgcaccctggccgccgcctgcagcgtgattggagtgggcagtgacattggaggcagcatccgcatgcctgccttcttcaacggcatcttcggccacaagcccagccctggggtggtgcccaacaagggccagttccccctggccgtgggcgcccaggagctgttcctgtgcaccggccccatgtgccgctatgcagaggacctggcccccatgctgaaggtgatggccggccctggcatcaagaggctgaagctggacaccaaggtgcacctgaaggacctgaagttctactggatggagcatgatggcggcagcttcctgatgagcaaggtggaccaggacctgatcatgacccagaagaaggtggtggtgcacctggagaccatcctgggcgcctctgtgcagcacgtgaagctgaagaagatgaagtacagcttccagctgtggatcgccatgatgtctgccaagggccatgatggcaaggagcctgtgaagtttgtggacctgctgggggaccacggcaagcacgtgagccccctgtgggagctgatcaagtggtgcctgggcctgtctgtgtacaccatccccagcatcggcctggccctgctggaggagaagctgcgctacagcaatgagaagtaccagaagttcaaggctgtggaggagagcctgaggaaggagctggtggacatgctgggagatgatggagtcttcctgtaccccagccaccccaccgtggcccccaagcaccacgtgcccctgacccggcccttcaactttgcctacacaggagtcttcagcgccctgggcctgcctgtgacccagtgccccctgggcctgaatgccaagggcctgcccctgggcatccaggtggtggccggccccttcaatgaccacctgaccctggccgtggcccagtacctggagaagacctttggaggctgggtgtgccctgggaagttctag

SEQ ID NO: 251168 - DNA, 1599 bp, Artificial Sequence
  derived and/or modified sequence
atggcccccagcttcaccgcccggatccagctgttcctgctgcgggctttgggctttctcatcgggctcgtaggccgagctgccctggtactcggtggccctaaattcgctagtaaaacccctaggcctgtaaccgagcctctgctactgctcagtggaatgcagctggccaagctgatccgccagagaaaggtgaaatgtatagacgtggttcaggcatacattaaccggataaaagacgttaaccctatgataaacgggatcgtaaagtatcgctttgaggaggcgatgaaggaagctcatgcagtcgatcaaaagcttgctgaaaaacaagaggatgaagccaccctcgagaataagtggcccttcctaggcgttcccctaaccgtgaaggaggcatttcagctgcaggggatgcccaattctagcggccttatgaaccggagagacgctattgccaagaccgacgctacagtagtcgcgctcctcaagggtgcaggggccatacctctgggaataaccaattgctccgaactgtgcatgtggtacgagtctagcaacaaaatttacgggaggagcaacaacccctatgacctacaacatattgttggaggttcctcaggaggagaagggtgcacccttgctgccgcgtgttctgtaattggtgtcggaagtgacatcggaggcagcatcaggatgcctgccttctttaatggcattttcggccacaaaccttcccctggtgtcgtcccaaacaagggccagttccccctggcagtgggcgcccaggaactgttcctgtgcacgggacctatgtgccggtatgccgaggatctagccccgatgctgaaggtcatggccgggccaggaattaagcgcctgaagcttgatacaaaagttcatttgaaggacttgaaattctattggatggagcacgacgggggtagctttctaatgagcaaagtcgaccaggatttaatcatgacacagaagaaggtcgtcgtgcacctggaaaccatccttggcgcaagcgtacagcacgtaaaactcaagaagatgaaatactctttccagctgtggatcgcaatgatgagcgccaagggccacgatgggaaagagcccgtcaaattcgtggacctgctgggcgatcacggcaagcatgtatctcccctctgggagttgataaagtggtgccttgggctgagtgtctacaccatcccgagcatagggctggccctgctcgaagagaaattaaggtacagtaatgaaaagtatcagaaatttaaagctgtcgaggaaagcttaaggaaggagctcgtcgatatgctgggagatgatggcgtgtttctgtacccatcccatcctaccgtggcccccaaacaccacgtgcctctgaccaggccctttaatttcgcctacactggagtcttcagtgcgcttggattaccagtcacccaatgccccctgggcctgaacgccaagggtctccccttgggtattcaggtggttgccggccccttcaatgatcatctcaccctggccgtggcccagtatttggagaagacatttggcggctgggtgtgcccaggcaagttttag

SEQ ID NO: 251169 - DNA, 1599 bp, Artificial Sequence
  derived and/or modified sequence
atggcgccttccttcactgcccgtatacagcttttcttgttacgcgctctgggattcctgatcgggcttgttgggagagccgctttagttttgggcggacccaaattcgcatcgaaaacccctagacccgtcaccgagccattgttacttctcagtgggatgcaactggcaaaattgatcagacaacgtaaagtcaagtgtattgatgtggtgcaagcatatattaaccgcatcaaagatgtgaatcccatgattaatgggatcgtgaaataccgcttcgaggaggcaatgaaagaggcacacgcagttgaccagaaactggccgagaagcaggaggacgaggcaactctggaaaacaagtggcctttcctgggcgtgcccctcactgtgaaagaggctttccagttgcagggaatgccaaattccagtggactgatgaaccgcagagacgccatcgcaaaaactgatgctactgttgtcgcccttctgaagggggcaggagccatacctctgggcataacaaactgttccgagttgtgtatgtggtacgaaagctctaacaagatctacggccgttcgaacaacccatacgacttacagcatattgtggggggtagttccggtggcgagggctgtacactggccgctgcatgttctgtgataggcgttggatccgatattgggggatcaattaggatgccggcattcttcaatggcatttttggccacaaaccgagtcctggcgtggtgccaaacaagggccagttccccctggccgtaggcgcacaagagctctttctgtgtactggacccatgtgtcgctacgccgaggacttggcacccatgttgaaagtgatggcgggaccagggattaagcgccttaaactggacaccaaagttcacttgaaggatttgaaattctactggatggagcacgatggtgggtctttcctcatgagtaaggtggatcaggacttgatcatgactcaaaagaaagtggttgtccatttagaaactatcctgggcgcatctgtacagcacgtgaaactgaagaaaatgaagtacagtttccagctttggattgctatgatgagtgcaaagggacacgatggaaaggagccagtgaaattcgtggacctgttgggcgaccatgggaagcacgtgtcgccgctatgggagttaatcaaatggtgcctcgggctgtccgtttacactatccctagtatcgggctggctcttcttgaggaaaagttgcgctattccaacgaaaagtaccagaaatttaaagctgtggaggaaagtctcagaaaagaactcgtagatatgttgggggacgacggagtatttttatatccctctcaccctacagtcgccccaaagcaccacgtaccactgactaggccgtttaattttgcctacacgggtgtgttcagcgccctggggctgcctgttacccaatgcccactgggactgaacgccaaaggcctaccactgggaattcaggtggtggctgggccattcaacgaccacctgactttagctgtagcccagtatctggagaagaccttcggcggatgggtgtgtccgggtaagttttag

SEQ ID NO: 251170 - DNA, 1599 bp, Artificial Sequence
  derived and/or modified sequence
atggcccccagcttcaccgccagaatccagctgttcctgctgagagccctgggcttcctgatcggcctggtgggcagagccgccctggtgctgggcggccccaagttcgccagcaagacccccagacccgtgaccgagcccctgctgctgctgagcggcatgcagctggccaagctgatcagacagagaaaggtgaagtgcatcgacgtggtgcaggcctacatcaacagaatcaaggacgtgaaccccatgatcaacggcatcgtgaagtacagattcgaggaggccatgaaggaggcccacgccgtggaccagaagctggccgagaagcaggaggacgaggccaccctggagaacaagtggcccttcctgggcgtgcccctgaccgtgaaggaggccttccagctgcagggcatgcccaacagcagcggcctgatgaacagaagagacgccatcgccaagaccgacgccaccgtggtggccctgctgaagggcgccggcgccatccccctgggcatcaccaactgcagcgagctgtgcatgtggtacgagagcagcaacaagatctacggcagaagcaacaacccctacgacctgcagcacatcgtgggcggcagcagcggcggcgagggctgcaccctggccgccgcctgcagcgtgatcggcgtgggcagcgacatcggcggcagcatcagaatgcccgccttcttcaacggcatcttcggccacaagcccagccccggcgtggtgcccaacaagggccagttccccctggccgtgggcgcccaggagctgttcctgtgcaccggccccatgtgcagatacgccgaggacctggcccccatgctgaaggtgatggccggccccggcatcaagagactgaagctggacaccaaggtgcacctgaaggacctgaagttctactggatggagcacgacggcggcagcttcctgatgagcaaggtggaccaggacctgatcatgacccagaagaaggtggtggtgcacctggagaccatcctgggcgccagcgtgcagcacgtgaagctgaagaagatgaagtacagcttccagctgtggatcgccatgatgagcgccaagggccacgacggcaaggagcccgtgaagttcgtggacctgctgggcgaccacggcaagcacgtgagccccctgtgggagctgatcaagtggtgcctgggcctgagcgtgtacaccatccccagcatcggcctggccctgctggaggagaagctgagatacagcaacgagaagtaccagaagttcaaggccgtggaggagagcctgagaaaggagctggtggacatgctgggcgacgacggcgtgttcctgtaccccagccaccccaccgtggcccccaagcaccacgtgcccctgaccagacccttcaacttcgcctacaccggcgtgttcagcgccctgggcctgcccgtgacccagtgccccctgggcctgaacgccaagggcctgcccctgggcatccaggtggtggccggccccttcaacgaccacctgaccctggccgtggcccagtacctggagaagaccttcggcggctgggtgtgccccggcaagttctag

SEQ ID NO: 251171 - protein, 636 aa, Artificial Sequence
  derived and/or modified sequence
MGQGPRSPHKVGRRFPAGGKRGRGAKGSGRPLPGRKRQPWPPPDGRSEPAPDSHPHLSPEALGYFRRALSALKEAPETGEERDLMVHNIMKEVETQALALSTNRTGSEMLQELLGFSPLKPLCRVWAALRSNLRTVACHRCGVHVLQSALLQLPRLLGSAAEEEEEEEEDGKDGPTETLEELVLGLAAEVCDDFLVYCGDTHGSFVVRTLLQVLGGTILESERARPRGSQSSEAQKTPAQECKPADFEVPETFLNRLQDLSSSFLKDIAVFITDKISSFCLQVALQVLHRKLPQFCAHLCNAVIGYLSTRGSSVDGSPLLLFLRDQTSSRLLEQVLLVLEPPRLQSLFEEHLQGQLQTLAAHPIANFPLQRLLDAVTTPELLSPVFEELSPVLEAVLAQGHPGVVIALVGACRRVGAYQAKVLQLLLEAFHCAEPSSRQVACVPLFATLMAYEVYYGLTEEEGAVPAEHQVAMAAARALGDVTVLGSLLLQHLLHFSTPGLVLRSLGALTGPQLLSLAQSPAGSHVLDAILTSPSVTRKLRRRVLQNLKGQYVALACSRHGSRVLDAIWSGAALRARKEIAAELGEQNQELIRDPFGHHVARNVALTTFLKRREAWEQQQGAVAKRRRALNSILED

SEQ ID NO: 251172 - DNA, 6033 bp, Artificial Sequence
  derived and/or modified sequence
aaactttgtctggataaggcgcacgcttggcgacgtcgaaggtccgtccgcagttaaggaagcttttgcagccggacaggtcgcgaagcacacatggggcagggtccgcgctctccacacaaggtggggcgccggttcccagctggtggcaaacgggggcgcggggccaaggggtcggggcgccccttaccaggccgtaagcggcaaccctggccgcctccggatgggcgctcggagccggctccagattcgcacccgcacctgagcccggaagctctgggatatttccgccgggcgctgtcagcattgaaagaggctcccgagactggggaagaacgagatctgatggtgcacaatataatgaaggaagtagagactcaggccctagctttgtccacgaacaggactggcagtgagatgctgcaggaactgttgggattcagtcccttgaaaccgctttgtcgcgtgtgggctgctctgcgctctaacttgcgcactgtggcctgtcaccgatgcggggtccatgtattacaaagtgctttgctacagctccctcgattgctggggagtgctgcagaggaggaggaggaggaggaggaggatggaaaggatggtcccacggagaccctggaggagctggtcctgggactagccgctgaggtgtgtgatgattttcttgtctactgtggagacacacatggcagcttcgtggtcagaactctgcttcaggtgttaggagggactattctggagtctgagagagccaggccccgtggttcccaatcatctgaagcacagaagaccccagctcaggaatgtaagccagctgattttgaagtccctgaaacctttttgaatcgccttcaggacctgagctcctcctttctgaaggacattgcagtgtttatcactgataagatctccagcttctgtcttcaagtggctttacaggttttacaccgcaaacttccccagttttgcgctcatctctgcaatgctgtgattggctacctgagtactcgcggttcctcagtagatggcagtcccctactgctatttctccgagatcagacgagttccagactcctggagcaggtcctgctggtgttggagcccccaagactccagagcctctttgaggagcacttgcaggggcagctgcagaccctggctgcacatcccattgccaacttccctttgcagcgcttactggatgcagtcactacccctgagctgctgtcccctgtgtttgaggagctgagccctgtcttggaagctgtattggcccagggccacccaggggtagtcattgccctggtgggggcctgtcgcagagttggggcctaccaagccaaggtcctacagctcttgttggaggcattccactgtgcagagccctcatcccggcaagtggcctgtgtgcctctctttgccactttgatggcttatgaggtgtactatggactgacggaggaggagggggcagtgcctgcagagcaccaggtggcaatggccgcagccagagccttgggggatgtgacagtccttgggtctctactgctccagcatctgctgcacttctccactcctggtcttgtacttcgaagtctgggtgccttgacgggaccacagcttctgtcccttgcccaaagtcccgctggctctcatgtgctcgatgccatcctgaccagcccctctgtgacgcgcaagctgcgccgccgtgtgctgcagaacctaaagggacaatatgtggctctggcctgtagtcgccatggcagccgtgtgctagatgccatctggagtggagcagccttgagggcccggaaggaaattgctgctgagcttggggagcagaaccaggagctgataagagaccctttcggccaccatgtggctcgaaatgtggccttgactaccttcctaaagcggcgagaggcttgggaacagcagcagggtgcggtggccaagcggaggcgggcattgaactccatacttgaagactgaggctttggatctgggactgggtgttgatgggggagggcaaaatggggtatccaccccatccctttcctggtttaaattggagtcagaagtcttagtggtaaatatttgatatttttattggaaatgtttttgttagtttgaggggaagggtatgaagacagatctcaaggtaaagtcagagagggctgtcatcagtatgctggggagtttagggacaggaggcattggtaggggattagatgtagcagcagtcaggctgggatcaagatgcctgggggacatcttgatcttggcctttcagggcaagtgggaggccagaaaggtggctaggaaagaacagcattcttcaggtaagggtatagacttgggatgtgaggcgttatgctgaaaggttctgtcacgaggggatcagaggacagtggggaaattgggtgggttatctagcctgtactgtctgcaggtcctgaaatttgatgctgtcatagtctttgcagtgggtcggttggaatgattctgggggcagaagctcagagccccttagtaggaatggaggcggcccttctgctgccactgctcagccccctccactgcatgacgaagggtggaggaaattcccagcaacatatggcccaggccttgcagcagtgtggaggtccaacgaaggagctccctgaatggcagagacaagaggaaatcagatgatttggaaaacttgggaggaagccatcaagctgggagatgaggactttccacaagcaagagctaactaggggtaggtgggtgcaagaggacgaattatggggactatccaactgtaggggatggggcagtatgacatgttgatttctgacctgagtactttctttgggccaagtccttgaaagtcacaactcatagagtagagcccgtagaatgtggctttgacattcaggctgccaaagaggtctcgagggttttgcttgtacacgtcaaaggtgaatcgggcgatgtccttgctgtgcttgggcctctcccgtcccaggccatatgacagcactccactctgtaggacacccttgtcagtgcagtagatcctcataccagacacccaccactaatctccatcagcactgggtcagaccctccctcgcttggactttctgtccactgtgtgacatccttgacaattccacaactcctcctgcacctggtccccaggatcagggttaagctagagaggaagcccgggaaagctctaaaggacaggcattggaagcagccccagtataggcctcttacccttgtagggctccagctctgaccagactgcaacaccatcaggcacgtgtcatcctccagcagctggaagaagtcctcactgtccactgcagttccatcctcctctagcaccagggttagcactccattcagcagtagggtctccaatgcctgcccaatggcaagaagcaagaagggcaggtcttatcccatgccccttccctctttagctgcccaacatccatcagttggctctagacattggtcgatgtcccactttgactttccggcactttgatacctcctaaaggttgcagctctccgtgttcttcagtttttgggggatcctagctagaggctgacctttttcctctttgctcctaccatgtcattggcatctccccttgctcccctccaagtcacttctggtttggaattggaaagcaagccaggttctcacgaagtccacccttctgtcttatctacaatgctgcacctcacttcccacaccctcaagagttctccagaagtgttttcagtaatagtgtttaacctttttgagtccttactctgtgccaggtatgaggactttacctacattatcctcttactcctttcaacaaccctaggaggtgatgtattattattgcctttttatagttgaagaaactgaggttttggtaggttgaacaacttcccaaggtttgacaggcaggaagtggcagaatcagaatttgaacttgatttgtcacacaaatcacctttccatactagcttctgaattctgtccctcgaactctccctatctcctgctaacccctgctcccatagaaaagctcactcggtggaaaatgaacaaattgaccagagctcattaggcccactccgctgcttttagccctcagagggaggggcagctgtgtgacttcagccctctgctccatcatcacaagttgccactgttgtggagccccttggctacccctgctataggaaccgaggaacttggcctacttactttggctagcagctcctggcgggtggcagctgtcaggcctttccggatggtccgcttgtgatcacagacacggaaaggtcgctggggtggtggagctgaggtccagaccctccgtccaaactccgagcttatattagatactgacctggtagttgagaagaaaagtcaagaaggggcgaggaggggcttggtgagtgtaaagggcatgatgagggtagagtggctagagggctagggagggagagatctaggtttatcgattagggatgagggagagaccatggagtgcaggtgggggcgggtggctcaggagcttgacaagcccactgtggagtggggagcaggagaggaaggggtactggttagtctcctaggggctgagtggagtattgttgccctgcctatatcccctaaaggtggagggtagagcggagggttagcagtcacctgagtaagtcactggggttcagagctgagaggtactccatggtggaccggagagttccttccctggaacttctgggctgggtggttctctcctgtgctggggctttagtggtgttttctgttacaaacctgggatctcagcccaggacaaggtgggaatgagtcaagcctggactctggcccccctgcctggccagtaagaagggcaaagtccaaggggagggatgagggaggggccagatggggtcctggaggaagaattgcctggcaaaagccattggagcttgtatgtgtgtctttggtgatgacatgtgttgtgagggtagatgggaaccatgtaaaaggatgaaatgtgacttctggtgtttttttatttctatggagggaatttctggggacggtttctggctctcaggctctgagaagctgcagtttatgagtggctctgtgtgtgctgccacctactggagaagccataagctgcagctttaggaaaagggaacccggggcagagtgtggggaagtgggatggcagcatggcagggctttggaaaatgagaggtgagactgtgtccaggaagggtgtaaggagaggatggatcctgatacatggattcaggatcattagggtcctgtctgggacactggccttcctgcttacctgctctttccttcctccttggtcggaggaggggctggctcactgctctggcttcattttccagagctgcctgctgcagtcacacttaggtcatcttctctcacttttctccttttgccgattagtggacgtgacagagatgtgaatggggcagggatgtcctttgatggcatcaagactttagcttctggtgcgctgtgtcccagctctgatttcagttgcagccgtgatggacagttgcatggaagctgagactctcactgacagtgaaaccctcaaatgaacacaatccctgctttcctgccaaggatccttgtagggtcccccagcttccccactttttttctgtgtcctgacaaagaaacacagagtaacttgattgccctgtgacctggccagttgcatttcccctgcaggcttgagcccaagccagagccttgaaaaggtattcaggttgttgcccaaaacactgaaaaaaactggccctggccctgaaccaaataccttgaaccctcgtaaactccataccctgacccccttgttttggatatacccaggtagaacaactctctctcactgtctgttgtgaggatacgctgtagcccactcattaagtacattctcctaataaatgctttggactgat

SEQ ID NO: 251173 - DNA, 1911 bp, Artificial Sequence
  derived and/or modified sequence
atgggccagggccccagaagcccccacaaggtgggcagaagattccccgccggcggcaagagaggcagaggcgccaagggcagcggcagacccctgcccggcagaaagagacagccctggcccccccccgacggcagaagcgagcccgcccccgacagccacccccacctgagccccgaggccctgggctacttcagaagagccctgagcgccctgaaggaggcccccgagaccggcgaggagagagacctgatggtgcacaacatcatgaaggaggtggagacccaggccctggccctgagcaccaacagaaccggcagcgagatgctgcaggagctgctgggcttcagccccctgaagcccctgtgcagagtgtgggccgccctgagaagcaacctgagaaccgtggcctgccacagatgcggcgtgcacgtgctgcagagcgccctgctgcagctgcccagactgctgggcagcgccgccgaggaggaggaggaggaggaggaggacggcaaggacggccccaccgagaccctggaggagctggtgctgggcctggccgccgaggtgtgcgacgacttcctggtgtactgcggcgacacccacggcagcttcgtggtgagaaccctgctgcaggtgctgggcggcaccatcctggagagcgagagagccagacccagaggcagccagagcagcgaggcccagaagacccccgcccaggagtgcaagcccgccgacttcgaggtgcccgagaccttcctgaacagactgcaggacctgagcagcagcttcctgaaggacatcgccgtgttcatcaccgacaagatcagcagcttctgcctgcaggtggccctgcaggtgctgcacagaaagctgccccagttctgcgcccacctgtgcaacgccgtgatcggctacctgagcaccagaggcagcagcgtggacggcagccccctgctgctgttcctgagagaccagaccagcagcagactgctggagcaggtgctgctggtgctggagccccccagactgcagagcctgttcgaggagcacctgcagggccagctgcagaccctggccgcccaccccatcgccaacttccccctgcagagactgctggacgccgtgaccacccccgagctgctgagccccgtgttcgaggagctgagccccgtgctggaggccgtgctggcccagggccaccccggcgtggtgatcgccctggtgggcgcctgcagaagagtgggcgcctaccaggccaaggtgctgcagctgctgctggaggccttccactgcgccgagcccagcagcagacaggtggcctgcgtgcccctgttcgccaccctgatggcctacgaggtgtactacggcctgaccgaggaggagggcgccgtgcccgccgagcaccaggtggccatggccgccgccagagccctgggcgacgtgaccgtgctgggcagcctgctgctgcagcacctgctgcacttcagcacccccggcctggtgctgagaagcctgggcgccctgaccggcccccagctgctgagcctggcccagagccccgccggcagccacgtgctggacgccatcctgaccagccccagcgtgaccagaaagctgagaagaagagtgctgcagaacctgaagggccagtacgtggccctggcctgcagcagacacggcagcagagtgctggacgccatctggagcggcgccgccctgagagccagaaaggagatcgccgccgagctgggcgagcagaaccaggagctgatcagagaccccttcggccaccacgtggccagaaacgtggccctgaccaccttcctgaagagaagagaggcctgggagcagcagcagggcgccgtggccaagagaagaagagccctgaacagcatcctggaggactag

SEQ ID NO: 251174 - DNA, 1911 bp, Artificial Sequence
  derived and/or modified sequence
atgggacagggaccgagatcaccacacaaggtggggcggcgcttccctgccggcggcaaacggggccgtggggcaaagggttcgggacggccgctacctggacgcaaacgtcagccctggccaccacccgacggccggagcgagcccgcacctgacagccatccacacttatcccccgaagccctgggctactttcggcgggcgttatcggcactaaaggaggctccggagaccggcgaggagagagacctgatggtccataatataatgaaggaagtagagacccaggctctcgccctgtcaacaaacaggacaggctccgagatgttacaagagctgcttggattttccccactgaagcccctgtgcagagtctgggccgccttgaggagcaacctgcggacagtcgcatgtcataggtgcggggtgcacgtcctccaatctgccctactccagctcccgcgcctgttggggtccgcggctgaggaggaggaagaagaggaggaagacgggaaggacggccctactgagactcttgaagaactggtccttggcctggctgcagaggtgtgcgatgacttcctagtctattgtggagacacacatggatcgttcgtggttcggaccctgttgcaggtgttaggcggcacaatcctcgaatcagagagagccaggccccgcgggtcccagagctccgaggcccagaagaccccggctcaggagtgcaagcctgccgattttgaagtgcctgagacattcctgaacagactacaggatctctcttcaagctttctgaaggacattgctgtcttcatcacagacaagatctcttcattctgcctgcaagttgcactgcaggtgcttcacagaaaattgcctcagttctgcgctcacctctgcaatgctgtgattggctatttgagtactaggggctcgtccgttgacggctccccgctgcttcttttcttgcgcgaccaaacatcgtctaggcttctggagcaggtccttctcgtgttggagccccctcgcctgcagtctttatttgaggaacacttgcagggccagctccagacgctggccgcccatccaatcgcaaactttcccttgcagcggctgctggacgccgtgaccacccccgagctcttgtctccagtgttcgaggagctgagtcccgtattggaggccgtcctggcccagggacaccccggtgtggtaattgcgctggtaggggcctgtcggagagtgggggcatatcaggccaaggtcctgcagctgctccttgaagcgtttcactgcgccgaacctagcagcagacaggtggcttgtgtcccgctgttcgcaaccctaatggcttatgaggtttactacggcttaaccgaggaagaaggtgccgttccggcagaacatcaggtggcaatggcagccgcgagggcgttgggcgacgtcaccgttctcggttcactgttactgcagcacttactacattttagcacccccggcctcgtcctgagaagtttgggtgctctgactgggccccagctgttgagcttggcacagtcgcctgccggctcacacgtccttgacgctattttgaccagccccagcgtgactagaaagttgagacgtagagtgcttcagaatcttaaggggcaatacgtggcactggcctgcagccgacatggctctagggttcttgacgccatatggtcaggcgccgccctgcgtgccagaaaggagatagccgccgagctcggtgaacagaatcaggaactcatccgggatccgtttggacaccacgtcgctagaaacgtggccctcacaacattcctaaagcgtcgggaggcctgggaacaacaacagggtgcagttgccaaaaggagaagggcgcttaactccatattagaggattag

SEQ ID NO: 251175 - DNA, 1911 bp, Artificial Sequence
  derived and/or modified sequence
atgggccagggccccaggagcccccacaaggtgggccgccgcttccctgctgggggcaagaggggccgcggggccaagggcagcggccggcccctgcccggcaggaagaggcagccctggcccccaccagatggccgctctgagcccgccccagacagccacccccacctgagccctgaggccctgggctacttccggcgggccctgagcgccctgaaggaggcccctgagaccggggaggagcgggacctgatggtgcacaacatcatgaaggaggtggagacccaggccctggccctgagcaccaacagaactggaagtgagatgctgcaggagctgctgggcttcagccccctgaagcccctgtgccgggtgtgggccgccctgcggagcaacctgaggacagtggcctgccaccgctgtggggtgcacgtgctgcagagcgccctgctgcagctgccccggctgctgggcagcgctgctgaggaggaggaggaggaggaggaggatggcaaggatggccccacagagaccctggaggagctggtgctgggcctggccgctgaggtgtgtgatgacttcctggtgtactgtggggacacccacggcagctttgtggtgaggaccctgctgcaggtgctgggcggcaccatcctggagagcgagcgggcccggccccggggcagccagagcagcgaggcccagaagaccccagcccaggagtgcaagccagctgactttgaggtgcctgagaccttcctgaaccggctgcaggacctgagcagcagcttcctgaaggacattgctgtgttcatcacagacaagatcagcagcttctgcctgcaggtggccctgcaggtgctgcacaggaagctgccccagttctgtgcccacctgtgcaatgctgtgattggctacctgagcacccggggcagctctgtggatggcagccccctgctgctcttcctgcgggaccagaccagcagccggctgctggagcaggtgctgctggtgctggagcccccccggctgcagagcctgtttgaggagcacctgcagggccagctgcagaccctggccgcccaccccatcgccaacttccccctgcagaggctgctggatgctgtgaccaccccagagctgctgagccctgtgtttgaggagctgagccctgtgctggaggccgtgctggcccagggccaccctggggtggtgattgccctggtgggcgcctgcagaagagtgggcgcctaccaggccaaggtgctgcagctgctgctggaggccttccactgtgccgagcccagcagccggcaggtggcctgtgtgcccctgtttgccaccctgatggcctatgaggtgtactacggcctgacagaggaggagggcgctgtgcctgctgagcaccaggtggccatggctgctgcccgggccctgggagatgtgacagtgctgggcagcctgctgctgcagcacctgctgcacttcagcaccccaggcctggtgctgcggagcctgggcgccctgaccggcccccagctgctgagcctggcccagagccctgctggcagccacgtgctggatgccatcctgaccagccccagcgtgaccaggaagctgcggcggcgggtgctgcagaacctgaagggccagtatgtggccctggcctgcagccgccacggcagccgggtgctggatgccatctggagcggggccgccctgcgggccaggaaggagattgctgctgagctgggggagcagaaccaggagctgatccgggaccccttcggccaccacgtggccagaaatgtggccctgaccaccttcctgaagaggcgggaggcctgggagcagcagcagggcgctgtggccaagagaagaagagccctgaacagcatcctggaggactag

SEQ ID NO: 251176 - DNA, 1911 bp, Artificial Sequence
  derived and/or modified sequence
atgggccagggcccccggagcccccacaaggtgggccggcggttccccgcaggcggaaaacggggccggggcgcgaaggggtctggccgcccgctacccggacgtaagcgccagccctggcccccccctgacggcaggtcagagcccgcccccgacagccacccacacctttctccggaagccttaggttattttcgtcgcgccttgagtgcactcaaagaggctccagaaaccggggaggagagggacctcatggttcacaacattatgaaagaagttgagacacaggctctggctctgtctacaaatcggacggggtccgaaatgctgcaggagctgctgggattcagtcccctcaagccattgtgtagggtgtgggccgccttgcggtctaatttgagaacagtagcctgtcaccgttgcggcgttcatgtgctccagtccgccctgcttcagctgcctagactgctgggatccgcggccgaagaggaggaagaggaggaggaagacggtaaagacggcccgaccgagacactggaagaactggtgttgggactggctgctgaggtgtgcgatgactttttggtgtactgcggggacacccatggttccttcgttgtacgcacactactgcaggtcctgggagggacaatcctcgagagcgagcgtgcgcggccgagggggtcccaatcatcggaggcgcagaagactcccgcgcaggaatgcaaaccagctgatttcgaggtgccagaaacatttctgaaccggctgcaagacctgagtagcagtttccttaaggatattgcagtttttattacagacaagatcagctcattctgtctgcaagtggccctgcaagtgctgcatagaaagttgccccagttctgtgctcacctgtgcaacgctgttattggctatctgtccacacgcggatcctcagtggacggttctcccttgctgctcttcctgcgcgaccagactagttctcggctcttagagcaggtgttgcttgtgcttgaacctccacggctgcagagcctgtttgaagaacacctccagggccagctgcagaccctggctgcacatccgatagcaaactttccattgcagcgcctcctggacgcagtgacaacaccggaactgttatcacccgtgttcgaagagttatcccctgtgctggaggccgtcttagcacaggggcatcccggcgttgtgatcgcactagtcggggcatgtcgccgcgtgggtgcctatcaggcaaaggtactgcagctgctcctggaagcgttccactgtgccgagcctagcagccgccaagtggcatgcgtccccctgttcgctacattaatggcctatgaagtgtactacgggctcaccgaagaggagggggccgttccggccgaacaccaggtggcaatggcggccgcacgggcattaggggatgtaacggtcctggggtccctccttctccaacatctgttgcactttagcacaccaggcttggtcctgcggagcctgggcgcattgaccgggcctcaactcctgagcctggctcagagtccagcagggagtcacgtgcttgatgccattctgaccagccctagtgtgactagaaaactcagaaggcgcgtactccagaacctgaagggccagtatgtggcattggcttgtagtcgccacggtagtcgggtgctggatgcaatctggagcggcgccgccttgagagccaggaaggagattgccgctgagctgggagagcagaaccaggaactaatacgagatcctttcggccaccacgtagcgcgaaacgtagccctgacaactttcctgaagcgacgggaggcttgggagcagcagcagggcgccgtggccaaacgcaggcgcgcactgaactcaatcctggaggactag

SEQ ID NO: 251177 - DNA, 1911 bp, Artificial Sequence
  derived and/or modified sequence
atggggcagggcccacggtccccacataaagtcggccgtaggttccctgccggaggcaagaggggaagaggagccaagggcagcggcagacctcttcctggcagaaagcgtcagccatggccccctcctgatgggcgtagcgagccagcccctgactcgcacccccatcttagtcccgaagctctggggtacttccgcagggcgcttagcgccttgaaggaggccccagaaactggcgaggagcgcgatctgatggttcacaatattatgaaggaagtcgagactcaagccctagcccttagcactaatcgcaccggatccgaaatgctacaagaattattaggcttctctcccttgaaacctctctgccgggtgtgggccgctctacgatcaaatctccgtactgtcgcgtgccaccgttgtggcgtgcacgtgctgcagagtgcgttactgcagctcccccgtctactgggctcagctgccgaggaggaagaggaggaagaagaagacggcaaggacggtccaactgagaccctggaggaactggtactgggactagctgctgaagtctgcgacgatttcctggtctactgcggagatacccatggctcttttgtggttcggacattgctgcaggtcttgggagggaccatcttggaaagcgagcgcgcacggccaagaggcagccagtcctccgaggctcagaaaacccccgctcaggaatgtaaaccagccgacttcgaagtgcccgagacgttcttaaacaggctccaggatcttagcagtagtttcctgaaggatattgccgtgttcatcactgacaaaatttctagcttctgcttacaagtggccctccaggttttgcaccgcaaattgcctcagttttgtgcccatctgtgtaatgcagttattggttacctgagcacaagaggcagctctgtcgacggcagtccgctcctcctgttcttgcgagaccagacatcctcaagactcttggagcaagtgctgctcgtgctcgaaccaccgcgtctgcagtcgttgttcgaggaacatttgcagggccagctgcagacactcgctgcacaccctatcgccaactttcccttgcaacgcctgcttgacgcagtgaccaccccagagttactgtcccccgtatttgaggagctctcccctgttctggaggctgtgctggcacagggacatcccggtgtggtgattgccttagttggagcctgcaggcgagtcggtgcctatcaggctaaggtcctgcagctattactggaagcttttcactgtgccgagcctagctcacgccaggtggcgtgtgtgcctctgttcgccactctgatggcatatgaggtctattatggcctgacagaggaggaaggcgctgtaccagctgagcaccaagtcgcgatggccgctgccagagctctgggagatgtgaccgtacttggttcactgttgttgcagcacttgcttcattttagcacacccggactggtcttgagaagtctgggggcactgactggaccacagctcctgtccttggcacaatccccagccggtagtcacgtgctggacgccatcctcacgtcaccatcggtgacaaggaagctgcgcagacgggtcctgcaaaatctgaagggccagtacgtggccttggcctgcagcagacacgggtcaagggtgcttgacgccatttggtcaggagcagccctgagagccaggaaggaaattgcagctgaacttggcgaacaaaaccaggaactgataagggatccctttggccaccacgtggccagaaatgtggcattgacaacatttctgaaaaggcgggaagcatgggaacaacagcagggcgctgttgccaaaaggcgcagagctcttaattctattctcgaggattag

SEQ ID NO: 251178 - protein, 523 aa, Artificial Sequence
  derived and/or modified sequence
MAGQRVLLLVGFLLPGVLLSEAAKILTISTVGGSHYLLMDRVSQILQDHGHNVTMLNHKRGPFMPDFKKEEKSYQVISWLAPEDHQREFKKSFDFFLEETLGGRGKFENLLNVLEYLALQCSHFLNRKDIMDSLKNENFDMVIVETFDYCPFLIAEKLGKPFVAILSTSFGSLEFGLPIPLSYVPVFRSLLTDHMDFWGRVKNFLMFFSFCRRQQHMQSTFDNTIKEHFTEGSRPVLSHLLLKAELWFINSDFAFDFARPLLPNTVYVGGLMEKPIKPVPQDLENFIAKFGDSGFVLVTLGSMVNTCQNPEIFKEMNNAFAHLPQGVIWKCQCSHWPKDVHLAANVKIVDWLPQSDLLAHPSIRLFVTHGGQNSIMEAIQHGVPMVGIPLFGDQPENMVRVEAKKFGVSIQLKKLKAETLALKMKQIMEDKRYKSAAVAASVILRSHPLSPTQRLVGWIDHVLQTGGATHLKPYVFQQPWHEQYLLDVFVFLLGLTLGTLWLCGKLLGMAVWWLRGARKVKET

SEQ ID NO: 251179 - protein, 138 aa, Artificial Sequence
  derived and/or modified sequence
MAGQRVLLLVGFLLPGVLLSEAAKILTISTVGGSHYLLMDRVSQILQDHGHNVTMLNHKRGPFMPDFKKEEKSYQVISWLAPEDHQREFKKSFDFFLEETLGGRGKFENLLNVLEYLALQCSHFLNRKDIMDSLKNEN

SEQ ID NO: 251180 - DNA, 1715 bp, Artificial Sequence
  derived and/or modified sequence
gggaaataagagagaaaagaagagtaagaagaaatataagagccaccatggctggtcagcgagtactgttgcttgtgggattccttttgcctggggtattgttgtccgaggcggcgaaaatcctgactatctccaccgtcgggggatcacactaccttttgatggacagagtctcgcaaattctccaagaccacggacataatgtgacaatgcttaaccacaagaggggtccctttatgcccgacttcaagaaagaggagaagtcctaccaggtgatcagctggctggccccagaggaccaccagagggagtttaagaaatcgtttgatttcttccttgaggaaacgctgggcggaagggggaaatttgaaaacttgttgaatgtactggagtacttggcgctgcagtgtagccacttccttaaccggaaagacatcatggactcgctgaaaaatgagaattttgatatggtgattgtagaaacgttcgattattgcccctttttgatcgcggagaagttgggaaagcccttcgtcgccattctctcgacgtcattcgggtcgctggaattcgggctccccattcctctgagctatgtccctgtattccggtcattgctgacagaccacatggatttttgggggagagtaaagaattttctcatgttcttttccttttgtcggagacagcaacacatgcagtcgacctttgacaacactatcaaggaacattttacggaaggctcacggcccgtgctgtcgcatctcctgttgaaagccgagctctggtttatcaattcggattttgcattcgacttcgcaagacctcttcttccaaacacagtgtatgtcggtggactgatggagaaaccgatcaaaccggtaccccaagatctcgagaatttcatcgccaaattcggagatagcgggtttgtccttgtgacgcttggttccatggtgaacacatgtcagaatcccgaaatcttcaaggagatgaacaacgccttcgcacatctgcctcagggagtcatttggaagtgccagtgcagccactggcccaaagacgtgcacttggctgcgaacgtcaaaatcgtggattggttgccgcagtcggacctgttggcgcatccgtcaatccgcctcttcgtcactcatggcggtcagaattcgattatggaagcaatccagcatggagtccccatggtagggattccgctttttggagatcagccagaaaacatggtcagggtagaggccaagaaattcggtgtgagcatccagctcaaaaagcttaaggcggaaacattggcgctcaagatgaaacaaatcatggaagataaaaggtacaagagcgcagcggtcgcggcatcggtcatcttgcgcagccatccgttgtccccgactcagcgcctcgtggggtggattgaccacgtacttcagaccggtggagctacccacttgaagccctatgtgttccaacagccctggcatgagcagtacctgtttgacgtgtttgtgttcctgttgggactcactcttggtacgctctggctctgcgggaagttgcttggaatggctgtgtggtggctcagaggggcacggaaagtcaaggagacatgataagctgccttctgcggggcttgccttctggccatgcccttcttctctcccttgcacctgtacctcttggtctttgaataaagcctgagtaggaag

SEQ ID NO: 251181 - DNA, 1572 bp, Artificial Sequence
  derived and/or modified sequence
atggccggccagagagtgctgctgctggtgggcttcctgctgcccggcgtgctgctgagcgaggccgccaagatcctgaccatcagcaccgtgggcggcagccactacctgctgatggacagagtgagccagatcctgcaggaccacggccacaacgtgaccatgctgaaccacaagagaggccccttcatgcccgacttcaagaaggaggagaagagctaccaggtgatcagctggctggcccccgaggaccaccagagagagttcaagaagagcttcgacttcttcctggaggagaccctgggcggcagaggcaagttcgagaacctgctgaacgtgctggagtacctggccctgcagtgcagccacttcctgaacagaaaggacatcatggacagcctgaagaacgagaacttcgacatggtgatcgtggagaccttcgactactgccccttcctgatcgccgagaagctgggcaagcccttcgtggccatcctgagcaccagcttcggcagcctggagttcggcctgcccatccccctgagctacgtgcccgtgttcagaagcctgctgaccgaccacatggacttctggggcagagtgaagaacttcctgatgttcttcagcttctgcagaagacagcagcacatgcagagcaccttcgacaacaccatcaaggagcacttcaccgagggcagcagacccgtgctgagccacctgctgctgaaggccgagctgtggttcatcaacagcgacttcgccttcgacttcgccagacccctgctgcccaacaccgtgtacgtgggcggcctgatggagaagcccatcaagcccgtgccccaggacctggagaacttcatcgccaagttcggcgacagcggcttcgtgctggtgaccctgggcagcatggtgaacacctgccagaaccccgagatcttcaaggagatgaacaacgccttcgcccacctgccccagggcgtgatctggaagtgccagtgcagccactggcccaaggacgtgcacctggccgccaacgtgaagatcgtggactggctgccccagagcgacctgctggcccaccccagcatcagactgttcgtgacccacggcggccagaacagcatcatggaggccatccagcacggcgtgcccatggtgggcatccccctgttcggcgaccagcccgagaacatggtgagagtggaggccaagaagttcggcgtgagcatccagctgaagaagctgaaggccgagaccctggccctgaagatgaagcagatcatggaggacaagagatacaagagcgccgccgtggccgccagcgtgatcctgagaagccaccccctgagccccacccagagactggtgggctggatcgaccacgtgctgcagaccggcggcgccacccacctgaagccctacgtgttccagcagccctggcacgagcagtacctgctggacgtgttcgtgttcctgctgggcctgaccctgggcaccctgtggctgtgcggcaagctgctgggcatggccgtgtggtggctgagaggcgccagaaaggtgaaggagacctag

SEQ ID NO: 251182 - DNA, 417 bp, Artificial Sequence
  derived and/or modified sequence
atggccggccagagagtgctgctgctggtgggcttcctgctgcccggcgtgctgctgagcgaggccgccaagatcctgaccatcagcaccgtgggcggcagccactacctgctgatggacagagtgagccagatcctgcaggaccacggccacaacgtgaccatgctgaaccacaagagaggccccttcatgcccgacttcaagaaggaggagaagagctaccaggtgatcagctggctggcccccgaggaccaccagagagagttcaagaagagcttcgacttcttcctggaggagaccctgggcggcagaggcaagttcgagaacctgctgaacgtgctggagtacctggccctgcagtgcagccacttcctgaacagaaaggacatcatggacagcctgaagaacgagaactag

SEQ ID NO: 251183 - DNA, 1572 bp, Artificial Sequence
  derived and/or modified sequence
atggctggtcaaagggtactcctgctcgtggggttcctactgcccggtgtgctcctatccgaggccgcaaagattctcacaattagtactgtcggtggctcacactatctgctcatggacagggtttcccagattttacaggaccatggccacaacgtcactatgttaaatcacaagagggggcccttcatgcccgactttaaaaaagaggagaagtcttatcaggtgatctcttggctcgcccccgaggaccaccagcgcgaattcaagaagagttttgacttcttcctggaggagacactcggagggagaggcaaatttgagaatttgttaaacgtgctggaatacctggcccttcagtgcagccacttcctgaaccgcaaggacattatggatagtttaaaaaacgagaacttcgacatggtaatcgtggaaacttttgattattgtcctttcctgattgctgagaagctggggaagccgtttgttgctattttatccacatcattcggcagcctggagttcggactcccaattcctcttagctatgtcccagtctttcgatcactcctgacagaccatatggacttctgggggcgcgtcaagaatttcctgatgttctttagtttctgtagacgacagcagcatatgcagtctaccttcgataacacaataaaagagcacttcacagaaggctccagacccgtactctcacacctgctgcttaaggcagagctgtggttcattaactctgacttcgcttttgactttgctcgacccctccttccaaatactgtatacgtgggcgggctgatggagaagcctattaaaccagtccctcaggatcttgaaaactttattgctaaattcggggactccggctttgtgctggtcacactgggctcaatggtgaacacctgccagaacccagagatcttcaaggagatgaataatgccttcgctcatttaccccaaggagtaatctggaagtgccaatgctcacactggcccaaggatgttcacctggccgctaatgtgaaaatcgttgattggctgccacaaagtgacttactggcgcacccctctatccgcctctttgtgacacacggcggccagaatagcatcatggaggctatccagcacggggtccctatggtaggtatccccctttttggcgatcaaccagagaatatggttcgcgtggaggcgaaaaagttcggagtgtccattcagctcaagaaactgaaagctgaaacccttgcactaaaaatgaaacagattatggaggataagaggtacaaatccgctgcagtcgccgcctcggtcatactgagaagccaccccctcagccccactcaaaggctagtgggttggatcgatcatgtgctccagacggggggagcaacacacctgaaaccctacgtattccagcagccatggcatgagcagtatctgttggacgtgttcgtcttcctgcttggcctcacgctaggcacgctctggctctgcggcaaactgctgggcatggctgtgtggtggctgcggggcgctagaaaagtaaaagaaacgtag

SEQ ID NO: 251184 - DNA, 417 bp, Artificial Sequence
  derived and/or modified sequence
atggccggccaaagagtactgttattggtgggctttctgttgcctggggttctgctctccgaggccgctaaaatccttaccatttccaccgtgggggggagtcattatctgttgatggaccgcgtctcccagatccttcaagaccatgggcataacgtcaccatgctgaaccataagcggggtcctttcatgccagatttcaagaaagaggagaagagctaccaggtgataagctggctggcccctgaggatcaccagagggaattcaagaaatctttcgacttctttctagaagagactctgggtggaagaggaaaattcgaaaatctgctgaacgtgttggaatacctcgctctccagtgttcacatttcttgaatcgcaaggacattatggatagcctgaagaatgaaaattag

SEQ ID NO: 251185 - DNA, 1572 bp, Artificial Sequence
  derived and/or modified sequence
atggccggccagagggtgctgctgctggtgggcttcctgctgcccggggtgctgctgtctgaggccgccaagatcctgaccatcagcacagtgggcggcagccactacctgctgatggacagagtgtcccagatcctgcaggaccacggccacaacgtgaccatgctgaaccacaagaggggccccttcatgccagacttcaagaaggaggagaagagctaccaggtgatctcctggctggcccctgaggaccaccagcgggagttcaagaagagctttgacttcttcctggaggagaccctgggcggccggggcaagtttgagaacctgctgaatgtgctggagtacctggccctgcagtgcagccacttcctgaacaggaaggacatcatggacagcctgaagaatgaaaattttgacatggtgattgtggagacctttgactactgccccttcctgattgctgagaagctgggcaagccctttgtggccatcctgagcaccagctttggcagcctggagtttggcctgcccatccccctgtcctatgtgcctgtgttccgcagcctgctgacagaccacatggacttctggggccgggtgaagaacttcctgatgttcttctccttctgccggcggcagcagcacatgcagagcacctttgacaacaccatcaaggagcacttcacagagggcagcaggcctgtgctgagccacctgctgctgaaggccgagctgtggttcatcaacagcgactttgcctttgattttgcccggcccctgctgcccaacacagtgtatgtgggcggcctgatggagaagcccatcaagcctgtgccccaggacctggagaacttcatcgccaagtttggagacagcggctttgtgctggtgaccctgggctccatggtgaacacctgccagaaccctgagatcttcaaggagatgaacaatgcctttgcccacctgccccagggcgtcatctggaagtgccagtgcagccactggcccaaggatgtgcacctggccgccaacgtgaagatcgtggactggctgccccagagcgacctgctggcccaccccagcatccggctgtttgtgacccatggaggccagaacagcatcatggaggccatccagcacggcgtgcccatggtgggcatccccctgtttggagaccagcctgagaacatggtgcgggtggaggccaagaagtttggagtgtccatccagctgaagaagctgaaggccgagaccctggccctgaagatgaagcagatcatggaggacaagcgctacaagtctgctgctgtggccgccagcgtcatcctgcggagccaccccctgagccccacccagaggctggtgggctggattgaccacgtgctgcagacaggaggagccacccacctgaagccctacgtgttccagcagccctggcatgagcagtacctgctggatgtgtttgtgttcctgctgggcctgaccctgggcaccctgtggctgtgtgggaagctgctgggcatggctgtgtggtggctgcggggggccaggaaggtgaaggagacctag

SEQ ID NO: 251186 - DNA, 417 bp, Artificial Sequence
  derived and/or modified sequence
atggccggccagagggtgctgctgctggtgggcttcctgctgcccggggtgctgctgtctgaggccgccaagatcctgaccatcagcacagtgggcggcagccactacctgctgatggacagagtgtcccagatcctgcaggaccacggccacaacgtgaccatgctgaaccacaagaggggccccttcatgccagacttcaagaaggaggagaagagctaccaggtgatctcctggctggcccctgaggaccaccagcgggagttcaagaagagctttgacttcttcctggaggagaccctgggcggccggggcaagtttgagaacctgctgaatgtgctggagtacctggccctgcagtgcagccacttcctgaacaggaaggacatcatggacagcctgaagaatgaaaattag

SEQ ID NO: 251187 - DNA, 1572 bp, Artificial Sequence
  derived and/or modified sequence
atggccggccagcgggtgctgctgctggtgggcttcctgctgcccggagtccttctgtcggaagccgccaagattctgacaatttcaaccgtgggcggatctcactatttgctcatggacagagtgtcacagattctccaggatcatgggcacaatgtgacaatgttgaaccataaaagagggccgttcatgccagacttcaagaaagaggaaaagtcataccaggtgatctcatggctcgccccggaagatcaccagcgtgagttcaagaagtcttttgacttctttttggaagagacccttggcgggcgcggaaagttcgagaatcttctgaatgttctagaataccttgcactgcaatgctctcacttcctgaatcgcaaagacattatggattcactgaaaaacgagaacttcgacatggtgattgtggaaaccttcgattattgcccatttctgatcgctgaaaagcttggcaaaccgtttgtcgccattttgagcacttctttcgggagcctggaattcggcttgcccatcccccttagctacgtaccagtgtttaggagcctcctcaccgaccatatggatttctggggtcgcgtgaaaaacttcctcatgtttttctcattctgtagacgacagcagcacatgcagtccactttcgacaatacgatcaaagaacatttcacagaggggtctaggccagttttgagccacctgctcttgaaagctgagttgtggttcataaattcagactttgcctttgactttgctcgtccactactgccaaacaccgtatacgtgggaggattgatggagaagcccataaagcctgtgccgcaggacctggagaatttcatcgcaaagtttggagattcaggatttgttcttgttacgctcggaagtatggttaatacttgccagaaccctgaaatctttaaggagatgaataacgcctttgcccacctgccccagggcgtaatctggaagtgtcagtgtagccattggcccaaggatgtgcacttggcggcaaatgtgaagattgttgattggcttccccaatccgacctgctggcacatcccagcataaggttatttgttacgcacggggggcagaattccattatggaggccattcagcacggtgttcctatggtcggaatcccactgttcggagaccagccggagaatatggtgagggttgaggcaaagaagtttggagtgtcgattcagctgaagaaactcaaagcagaaacactcgccctcaaaatgaagcagatcatggaagacaagcgatataaaagcgctgctgtagccgccagcgttatcctgcggagccatccactgtctcccacgcagaggctggtggggtggatcgatcatgtgttgcagaccggcggagccacccatctgaaaccatacgtcttccaacagccgtggcatgagcagtatctcttggacgtctttgtgtttttgcttggcctgactcttggtactctgtggctatgtggaaagctccttggcatggctgtatggtggctgcgaggagcacgcaaggtgaaagaaacctag

SEQ ID NO: 251188 - DNA, 417 bp, Artificial Sequence
  derived and/or modified sequence
atggccggccagcgggtgctgctgctggtgggcttcctgctgcccggcgtgctactgagcgaggctgccaaaatcttgactattagcacagtgggtggttctcattatctgctgatggacagagtgtctcagattctccaggatcacggtcataatgtgacaatgctgaatcacaagagaggtcctttcatgcctgacttcaagaaagaggagaaatcataccaggtgatctcttggctcgcccccgaggaccaccaacgggaatttaaaaaatccttcgactttttcctcgaggaaacactgggtggccgggggaaatttgagaacctccttaatgtactcgagtatttggccttgcagtgctctcactttttgaatagaaaggatattatggactccctcaagaatgagaactag

SEQ ID NO: 251189 - DNA, 1572 bp, Artificial Sequence
  derived and/or modified sequence
atggcgggtcagagggtgctgctcttggtgggtttcctgttgcccggagtgttactgagcgaggccgcaaagatcttaacaatctccacagtgggtggctcacactatttactgatggatcgggtgtcccagatactgcaggatcacggccacaacgtgactatgttgaatcataaacgaggaccgtttatgccagattttaagaaggaggaaaaatcatatcaggtaatctcttggctggctcctgaggaccaccagcgggaatttaagaagtcattcgatttcttcctcgaggagacactcgggggaagggggaagttcgagaacttgcttaacgtgctggaatacttagctctgcaatgttctcacttcctgaaccgcaaggacatcatggacagtctcaaaaacgagaatttcgatatggtgatagtggagaccttcgactattgcccattcctcatagccgaaaagcttgggaaacctttcgtggccatactcagcactagtttcgggagtctcgagtttggattaccaatccctcttagctatgttccagtgttcagatccctcctgactgatcacatggatttttgggggagagtcaagaactttctgatgttctttagtttctgtaggagacaacagcacatgcagtctacctttgacaacacgataaaagaacattttaccgaaggtagccggcctgtgcttagtcatctgctgttgaaagctgaactctggttcattaacagcgacttcgcctttgactttgctagacctctgctcccaaacaccgtgtatgtaggaggcctcatggaaaagccgatcaagccagtgccacaggatcttgagaacttcatcgccaaattcggtgattccggctttgtgctcgttacccttggaagcatggttaatacatgccagaaccctgagatcttcaaagagatgaataatgcgtttgcacacctcccacagggcgtcatttggaagtgccaatgctctcactggccaaaagatgtgcacctcgccgcaaacgttaagattgtggactggttacctcaatccgacttgttagcacaccccagtatcagattgttcgttactcatggaggccagaacagcatcatggaagcgatccaacatggcgtgcctatggttggcattcccctattcggcgatcaacccgagaacatggtgcgcgtcgaggcaaagaaattcggtgtgagtatccagctcaaaaagctgaaagcagaaacactcgcactgaaaatgaagcagatcatggaagataaaaggtataaatccgccgcagttgccgcaagcgtcatcctccgctcgcacccactgtcccccacacagaggcttgtcgggtggattgaccacgtgcttcagacagggggtgctacgcacctaaaaccttatgtgtttcagcaaccatggcacgaacagtacttgttggacgtttttgtgttcttactggggcttaccttagggacactttggctttgtggcaagctcttgggcatggccgtgtggtggttgcggggagccaggaaagtgaaggaaacttag

SEQ ID NO: 251190 - DNA, 417 bp, Artificial Sequence
  derived and/or modified sequence
atggccggtcaacgcgtcctgcttctggtgggctttttactgcctggggtgctcttgtccgaagccgctaagatacttacgatatcgacagtcggaggtagccactacctcctgatggatagggtgtcccaaatccttcaggatcatgggcacaacgtgacaatgctcaatcataagcgaggaccgttcatgcccgacttcaaaaaggaggaaaagtcttaccaggtgatttcttggttggcaccagaggaccatcaaagagagttcaagaagagctttgacttctttctcgaagaaaccttgggcggacgcggaaaattcgaaaaccttctcaacgtccttgaatatctagccttgcagtgtagccattttctcaaccgcaaggacattatggatagccttaagaacgagaattag

SEQ ID NO: 251191 - DNA, 1572 bp, Artificial Sequence
  derived and/or modified sequence
atggcgggtcaacgcgtccttctgttagtggggtttttgttacctggggtccttttatctgaagctgccaagatcctgactatctccactgtcggtggcagtcactacctcctgatggacagagtgagtcaaatcctgcaggatcatggacacaatgtaacaatgctcaaccacaaacgagggcccttcatgccagacttcaaaaaagaggagaagagttatcaggtgatcagttggttagcccctgaagatcatcaaagagaatttaagaagagttttgactttttcctggaagaaactctgggcggacgcggaaagtttgagaacctgcttaatgttttagaatatttggctctgcagtgctcccattttcttaaccggaaagacattatggattctttgaaaaacgagaactttgacatggtgatagtcgaaacatttgactactgtccattcttaatcgcggagaaactgggtaagccctttgtggctatactcagcacctcatttgggtcactcgaattcgggctgccgatacccctgtcatatgtacctgtgttccgatcactgctcaccgatcatatggatttttgggggcgagtaaagaacttcctcatgtttttttctttttgcaggaggcagcaacacatgcagtctacatttgataacacaattaaggagcactttactgagggctcgcggcctgtgctctcccatttactgctgaaagctgagttatggttcattaattctgacttcgcttttgattttgctcggcccctcctgcctaacactgtgtacgtgggtggattgatggagaaaccaatcaagcctgttccccaggatctcgagaattttatcgctaaatttggagactctgggtttgtgctcgtaaccctgggcagtatggtgaatacttgccagaacccggaaatcttcaaggagatgaataatgccttcgcccacctcccacaaggcgtgatttggaagtgccagtgttctcattggcccaaagacgtccatctagccgccaacgtcaagattgtagactggctgccacagagtgatctcctcgcccacccatccatccgactgtttgtgacgcatggaggtcaaaattcaataatggaggcaatacaacacggtgtcccaatggtgggtatccctttgtttggggaccagcctgaaaatatggtcagggttgaagcaaaaaagtttggggtttccatccaactgaaaaagttaaaggctgagactttagcgctcaaaatgaagcagataatggaagacaaacgctacaagagcgcagcagtggccgcctccgtgattctgcggagtcatccacttagtcccacccagcggctggtcggctggatcgatcacgttctccaaacgggaggcgctacacatttaaagccgtacgtgttccagcaaccatggcatgagcagtaccttctggacgtatttgtttttttgcttggccttacattggggactctgtggctgtgcggtaagctgctcggaatggcagtctggtggttgaggggcgcgcgcaaggttaaagaaacttag

SEQ ID NO: 251192 - DNA, 417 bp, Artificial Sequence
  derived and/or modified sequence
atggctggacaacgggtacttctgctcgttggattcctgctgcccggagtcctgctatccgaagccgcaaagatcttgacaatttcaaccgtgggcggcagccactacctcctgatggacagggtctcacaaatactgcaagatcatggacacaatgtcaccatgttaaaccacaagcggggcccatttatgccagactttaaaaaagaggaaaagtcctatcaagttatcagctggctcgcccccgaggaccatcaacgggaatttaaaaagagtttcgacttctttcttgaagaaacactaggaggacggggcaaattcgaaaacctgctgaacgttctggagtatctggctctccaatgcagtcacttcctgaatagaaaagatatcatggatagccttaagaacgaaaactag

SEQ ID NO: 251193 - DNA, 1572 bp, Artificial Sequence
  derived and/or modified sequence
atggcgggtcaacgcgtccttctgttagtggggtttttgttacctggggtccttttatctgaagctgccaagatcctgactatctccactgtcggtggcagtcactacctcctgatggacagagtgagtcaaatcctgcaggatcatggacacaatgtaacaatgctcaaccacaaacgagggcccttcatgccagacttcaaaaaagaggagaagagttatcaggtgatcagttggttagcccctgaagatcatcaaagagaatttaagaagagttttgactttttcctggaagaaactttagggggtagggggaaatttgaaaatctgttgaatgtcttggaatatctggccttgcaatgttctcacttcctcaatcgtaaggatataatggactccttgaaaaacgaaaatttcgacatggtgatagtagaaacctttgactactgcccattcctgatcgcagaaaaactaggcaaaccatttgtcgctatactgtccacttcattcgggagtctagagttcggtttgcctatcccgctgagctacgtgcctgtctttcgaagcctactgactgatcacatggacttttggggccgtgtcaaaaacttcctgatgttcttctctttctgtcgccgtcaacagcacatgcaatcaacattcgataacaccattaaggagcactttacagaaggttccaggcccgtcttgagccacctactgctaaaggccgagctctggttcatcaattcggacttcgcttttgacttcgccagaccgctactgcctaacacagtttacgtgggaggactcatggaaaaacctatcaagcccgtccctcaagatctcgaaaatttcatcgccaagttcggtgatagtggctttgtccttgtgaccctgggatctatggtgaacacttgtcagaacccggagatctttaaagaaatgaataacgctttcgcacaccttcctcagggcgttatttggaaatgccaatgttcccactggcctaaggacgtccacttggcagcaaatgtgaaaatcgtggactggctaccgcagtctgatctgctggctcaccctagcataagactgtttgtgacgcacggaggtcagaactctataatggaagctattcagcacggagtacctatggtcgggattcctttatttggtgatcagcctgagaatatggtgagagtggaagctaaaaaattcggggtctctattcaattaaaaaagttgaaggccgagaccctcgcccttaagatgaaacaaattatggaagataagaggtacaaatccgctgccgtcgcggctagtgtcatactccgaagccaccccctgagcccaacccagcggctggtcggatggatcgaccatgttctgcaaaccggaggcgcaacacatctaaaaccatacgttttccaacagccatggcacgagcagtacttgttagatgtattcgtctttctcctgggactcactttgggcactctgtggttgtgtggcaaacttttaggaatggccgtttggtggctgcggggggctcggaaggtgaaagagacttag

SEQ ID NO: 251194 - DNA, 417 bp, Artificial Sequence
  derived and/or modified sequence
atggcgggccaacgggtgcttctactggtgggcttcttgttaccgggggtcctgttgtcagaagctgcgaaaattttaaccatcagcacagttgggggatctcattacctacttatggacagggtgtcccaaatcctgcaagatcatggccataatgtgacaatgttaaaccataaacgaggacctttcatgcctgattttaagaaagaagagaaaagttaccaggtgatcagttggctggcgccagaggaccaccagcgcgagttcaaaaaaagcttcgatttttttctcgaggaaaccttggggggccgaggaaaatttgagaatttactcaatgtactggaatatcttgcattgcaatgctcacacttcctaaatcgaaaagacataatggactctttgaagaatgaaaattag

SEQ ID NO: 251195 - DNA, 2355 bp, Artificial Sequence
  derived and/or modified sequence
cccacagccagtgcctttggcgcactgaggtgcacagggtcccttagccgggcgcagggcgcgcagcccaggctgagatccgcggcttccgtagaagtgagcatggctgggcagcgagtgcttcttctagtgggcttccttctccctggggtcctgctctcagaggctgccaaaatcctgacaatatctacagtaggtggaagccattatctactgatggaccgggtttctcagattcttcaagatcacggtcataatgtcaccatgcttaaccacaaaagaggtccttttatgccagattttaaaaaggaagaaaaatcatatcaagttatcagttggcttgcacctgaagatcatcaaagagaatttaaaaagagttttgatttctttctggaagaaactttaggtggcagaggaaaatttgaaaacttattaaatgttctagaatacttggcgttgcagtgcagtcattttttaaatagaaaggatatcatggattccttaaagaatgagaacttcgacatggtgatagttgaaacttttgactactgtcctttcctgattgctgagaagcttgggaagccatttgtggccattctttccacttcattcggctctttggaatttgggctaccaatccccttgtcttatgttccagtattccgttccttgctgactgatcacatggacttctggggccgagtgaagaattttctgatgttctttagtttctgcaggaggcaacagcacatgcagtctacatttgacaacaccatcaaggaacatttcacagaaggctctaggccagttttgtctcatcttctactgaaagcagagttgtggttcattaactctgactttgcctttgattttgctcgacctctgcttcccaacactgtttatgttggaggcttgatggaaaaacctattaaaccagtaccacaagacttggagaacttcattgccaagtttggggactctggttttgtccttgtgaccttgggctccatggtgaacacctgtcagaatccggaaatcttcaaggagatgaacaatgcctttgctcacctaccccaaggggtgatatggaagtgtcagtgttctcattggcccaaagatgtccacctggctgcaaatgtgaaaattgtggactggcttcctcagagtgacctcctggctcacccaagcatccgtctgtttgtcacccacggcgggcagaatagcataatggaggccatccagcatggtgtgcccatggtggggatccctctctttggagaccagcctgaaaacatggtccgagtagaagccaaaaagtttggtgtttctattcagttaaagaagctcaaggcagagacattggctcttaagatgaaacaaatcatggaagacaagagatacaagtccgcggcagtggctgccagtgtcatcctgcgctcccacccgctcagccccacacagcggctggtgggctggattgaccacgtcctccagacagggggcgcgacgcacctcaagccctatgtctttcagcagccctggcatgagcagtacctgctcgacgtttttgtgtttctgctggggctcactctggggactctatggctttgtgggaagctgctgggcatggctgtctggtggctgcgtggggccagaaaggtgaaggagacataaggccaggtgcagccttggcggggtctgtttggtgggcgatgtcaccatttctagggagcttcccactagttctggcagccccattctctagtccttctagttatctcctgttttcttgaagaacaggaaaaatggccaaaaatcatcctttccacttgctaattttgctacaaattcatccttactagctcctgcctgctagcagaattctttccagtcctcttgtcctcctttgtttgccatcagcaagggctatgctgtgattctgtctctgagtgacttggaccactgaccctcagatttccagccttaaaatccaccttccttctcatgcgcctctccgaatcacaccctgactcttccagcctccatgtccagacctagtcagcctctctcactcctgcccctactatctatcatggaataacatccaagaaagacaccttgcatattctttcagtttctgttttgttctcccacatattctcttcaatgctcaggaagcctgccctgtgcttgagagttcagggccggacacaggctcacaggtctccacattgggtccctgtctctggtgcccacagtgagctccttcttggctgagcaggcttggagactgtaggtttccagatttcctgaaaaataaaagtttacagcgttatctctccccaacctcactaa

SEQ ID NO: 251196 - DNA, 572 bp, Artificial Sequence
  derived and/or modified sequence
acatcagctcaagattttaagcaagtctctcaggaaatagatcgcggggctggcagtatgagccagtgcctttggcgcactgaggtgcacagggtcccttagccgggcgcagggcgcgcagcccaggctgagatccgcggcttccgtagaagtgagcatggctgggcagcgagtgcttcttctagtgggcttccttctccctggggtcctgctctcagaggctgccaaaatcctgacaatatctacagtaggtggaagccattatctactgatggaccgggtttctcagattcttcaagatcacggtcataatgtcaccatgcttaaccacaaaagaggtccttttatgccagattttaaaaaggaagaaaaatcatatcaagttatcagttggcttgcacctgaagatcatcaaagagaatttaaaaagagttttgatttctttctggaagaaactttaggtggcagaggaaaatttgaaaacttattaaatgttctagaatacttggcgttgcagtgcagtcattttttaaatagaaaggatatcatggattccttaaagaatgagaact

SEQ ID NO: 251197 - RNA, 1715 nt, Artificial Sequence
  derived and/or modified sequence
gggaaauaagagagaaaagaagaguaagaagaaauauaagagccaccauggcuggucagcgaguacuguugcuugugggauuccuuuugccugggguauuguuguccgaggcggcgaaaauccugacuaucuccaccgucgggggaucacacuaccuuuugauggacagagucucgcaaauucuccaagaccacggacauaaugugacaaugcuuaaccacaagaggggucccuuuaugcccgacuucaagaaagaggagaaguccuaccaggugaucagcuggcuggccccagaggaccaccagagggaguuuaagaaaucguuugauuucuuccuugaggaaacgcugggcggaagggggaaauuugaaaacuuguugaauguacuggaguacuuggcgcugcaguguagccacuuccuuaaccggaaagacaucauggacucgcugaaaaaugagaauuuugauauggugauuguagaaacguucgauuauugccccuuuuugaucgcggagaaguugggaaagcccuucgucgccauucucucgacgucauucgggucgcuggaauucgggcuccccauuccucugagcuaugucccuguauuccggucauugcugacagaccacauggauuuuugggggagaguaaagaauuuucucauguucuuuuccuuuugucggagacagcaacacaugcagucgaccuuugacaacacuaucaaggaacauuuuacggaaggcucacggcccgugcugucgcaucuccuguugaaagccgagcucugguuuaucaauucggauuuugcauucgacuucgcaagaccucuucuuccaaacacaguguaugucgguggacugauggagaaaccgaucaaaccgguaccccaagaucucgagaauuucaucgccaaauucggagauagcggguuuguccuugugacgcuugguuccauggugaacacaugucagaaucccgaaaucuucaaggagaugaacaacgccuucgcacaucugccucagggagucauuuggaagugccagugcagccacuggcccaaagacgugcacuuggcugcgaacgucaaaaucguggauugguugccgcagucggaccuguuggcgcauccgucaauccgccucuucgucacucauggcggucagaauucgauuauggaagcaauccagcauggaguccccaugguagggauuccgcuuuuuggagaucagccagaaaacauggucaggguagaggccaagaaauucggugugagcauccagcucaaaaagcuuaaggcggaaacauuggcgcucaagaugaaacaaaucauggaagauaaaagguacaagagcgcagcggucgcggcaucggucaucuugcgcagccauccguuguccccgacucagcgccucgugggguggauugaccacguacuucagaccgguggagcuacccacuugaagcccuauguguuccaacagcccuggcaugagcaguaccuguuugacguguuuguguuccuguugggacucacucuugguacgcucuggcucugcgggaaguugcuuggaauggcugugugguggcucagaggggcacggaaagucaaggagacaugauaagcugccuucugcggggcuugccuucuggccaugcccuucuucucucccuugcaccuguaccucuuggucuuugaauaaagccugaguaggaag

SEQ ID NO: 251198 - RNA, 1572 nt, Artificial Sequence
  derived and/or modified sequence
auggcgggucaacgcguccuucuguuagugggguuuuuguuaccugggguccuuuuaucugaagcugccaagauccugacuaucuccacugucgguggcagucacuaccuccugauggacagagugagucaaauccugcaggaucauggacacaauguaacaaugcucaaccacaaacgagggcccuucaugccagacuucaaaaaagaggagaagaguuaucaggugaucaguugguuagccccugaagaucaucaaagagaauuuaagaagaguuuugacuuuuuccuggaagaaacucugggcggacgcggaaaguuugagaaccugcuuaauguuuuagaauauuuggcucugcagugcucccauuuucuuaaccggaaagacauuauggauucuuugaaaaacgagaacuuugacauggugauagucgaaacauuugacuacuguccauucuuaaucgcggagaaacuggguaagcccuuuguggcuauacucagcaccucauuugggucacucgaauucgggcugccgauaccccugucauauguaccuguguuccgaucacugcucaccgaucauauggauuuuugggggcgaguaaagaacuuccucauguuuuuuucuuuuugcaggaggcagcaacacaugcagucuacauuugauaacacaauuaaggagcacuuuacugagggcucgcggccugugcucucccauuuacugcugaaagcugaguuaugguucauuaauucugacuucgcuuuugauuuugcucggccccuccugccuaacacuguguacguggguggauugauggagaaaccaaucaagccuguuccccaggaucucgagaauuuuaucgcuaaauuuggagacucuggguuugugcucguaacccugggcaguauggugaauacuugccagaacccggaaaucuucaaggagaugaauaaugccuucgcccaccucccacaaggcgugauuuggaagugccaguguucucauuggcccaaagacguccaucuagccgccaacgucaagauuguagacuggcugccacagagugaucuccucgcccacccauccauccgacuguuugugacgcauggaggucaaaauucaauaauggaggcaauacaacacggugucccaaugguggguaucccuuuguuuggggaccagccugaaaauauggucaggguugaagcaaaaaaguuugggguuuccauccaacugaaaaaguuaaaggcugagacuuuagcgcucaaaaugaagcagauaauggaagacaaacgcuacaagagcgcagcaguggccgccuccgugauucugcggagucauccacuuagucccacccagcggcuggucggcuggaucgaucacguucuccaaacgggaggcgcuacacauuuaaagccguacguguuccagcaaccauggcaugagcaguaccuucuggacguauuuguuuuuuugcuuggccuuacauuggggacucuguggcugugcgguaagcugcucggaauggcagucuggugguugaggggcgcgcgcaagguuaaagaaacuuag

SEQ ID NO: 251199 - RNA, 417 nt, Artificial Sequence
  derived and/or modified sequence
auggcuggacaacggguacuucugcucguuggauuccugcugcccggaguccugcuauccgaagccgcaaagaucuugacaauuucaaccgugggcggcagccacuaccuccugauggacagggucucacaaauacugcaagaucauggacacaaugucaccauguuaaaccacaagcggggcccauuuaugccagacuuuaaaaaagaggaaaaguccuaucaaguuaucagcuggcucgcccccgaggaccaucaacgggaauuuaaaaagaguuucgacuucuuucuugaagaaacacuaggaggacggggcaaauucgaaaaccugcugaacguucuggaguaucuggcucuccaaugcagucacuuccugaauagaaaagauaucauggauagccuuaagaacgaaaacuag

SEQ ID NO: 251200 - RNA, 1572 nt, Artificial Sequence
  derived and/or modified sequence
auggcgggucaacgcguccuucuguuagugggguuuuuguuaccugggguccuuuuaucugaagcugccaagauccugacuaucuccacugucgguggcagucacuaccuccugauggacagagugagucaaauccugcaggaucauggacacaauguaacaaugcucaaccacaaacgagggcccuucaugccagacuucaaaaaagaggagaagaguuaucaggugaucaguugguuagccccugaagaucaucaaagagaauuuaagaagaguuuugacuuuuuccuggaagaaacuuuaggggguagggggaaauuugaaaaucuguugaaugucuuggaauaucuggccuugcaauguucucacuuccucaaucguaaggauauaauggacuccuugaaaaacgaaaauuucgacauggugauaguagaaaccuuugacuacugcccauuccugaucgcagaaaaacuaggcaaaccauuugucgcuauacuguccacuucauucgggagucuagaguucgguuugccuaucccgcugagcuacgugccugucuuucgaagccuacugacugaucacauggacuuuuggggccgugucaaaaacuuccugauguucuucucuuucugucgccgucaacagcacaugcaaucaacauucgauaacaccauuaaggagcacuuuacagaagguuccaggcccgucuugagccaccuacugcuaaaggccgagcucugguucaucaauucggacuucgcuuuugacuucgccagaccgcuacugccuaacacaguuuacgugggaggacucauggaaaaaccuaucaagcccgucccucaagaucucgaaaauuucaucgccaaguucggugauaguggcuuuguccuugugacccugggaucuauggugaacacuugucagaacccggagaucuuuaaagaaaugaauaacgcuuucgcacaccuuccucagggcguuauuuggaaaugccaauguucccacuggccuaaggacguccacuuggcagcaaaugugaaaaucguggacuggcuaccgcagucugaucugcuggcucacccuagcauaagacuguuugugacgcacggaggucagaacucuauaauggaagcuauucagcacggaguaccuauggucgggauuccuuuauuuggugaucagccugagaauauggugagaguggaagcuaaaaaauucggggucucuauucaauuaaaaaaguugaaggccgagacccucgcccuuaagaugaaacaaauuauggaagauaagagguacaaauccgcugccgucgcggcuagugucauacuccgaagccacccccugagcccaacccagcggcuggucggauggaucgaccauguucugcaaaccggaggcgcaacacaucuaaaaccauacguuuuccaacagccauggcacgagcaguacuuguuagauguauucgucuuucuccugggacucacuuugggcacucugugguuguguggcaaacuuuuaggaauggccguuugguggcugcggggggcucggaaggugaaagagacuuag

SEQ ID NO: 251201 - RNA, 417 nt, Artificial Sequence
  derived and/or modified sequence
auggcgggccaacgggugcuucuacuggugggcuucuuguuaccggggguccuguugucagaagcugcgaaaauuuuaaccaucagcacaguugggggaucucauuaccuacuuauggacagggugucccaaauccugcaagaucauggccauaaugugacaauguuaaaccauaaacgaggaccuuucaugccugauuuuaagaaagaagagaaaaguuaccaggugaucaguuggcuggcgccagaggaccaccagcgcgaguucaaaaaaagcuucgauuuuuuucucgaggaaaccuuggggggccgaggaaaauuugagaauuuacucaauguacuggaauaucuugcauugcaaugcucacacuuccuaaaucgaaaagacauaauggacucuuugaagaaugaaaauuag

SEQ ID NO: 251202 - protein, 1749 aa, Artificial Sequence
  derived and/or modified sequence
MADEEAGGTERMEISAELPQTPQRLASWWDQQVDFYTAFLHHLAQLVPEIYFAEMDPDLEKQEESVQMSIFTPLEWYLFGEDPDICLEKLKHSGAFQLCGRVFKSGETTYSCRDCAIDPTCVLCMDCFQDSVHKNHRYKMHTSTGGGFCDCGDTEAWKTGPFCVNHEPGRAGTIKENSRCPLNEEVIVQARKIFPSVIKYVVEMTIWEEEKELPPELQIREKNERYYCVLFNDEHHSYDHVIYSLQRALDCELAEAQLHTTAIDKEGRRAVKAGAYAACQEAKEDIKSHSENVSQHPLHVEVLHSEIMAHQKFALRLGSWMNKIMSYSSDFRQIFCQACLREEPDSENPCLISRLMLWDAKLYKGARKILHELIFSSFFMEMEYKKLFAMEFVKYYKQLQKEYISDDHDRSISITALSVQMFTVPTLARHLIEEQNVISVITETLLEVLPEYLDRNNKFNFQGYSQDKLGRVYAVICDLKYILISKPTIWTERLRMQFLEGFRSFLKILTCMQGMEEIRRQVGQHIEVDPDWEAAIAIQMQLKNILLMFQEWCACDEELLLVAYKECHKAVMRCSTSFISSSKTVVQSCGHSLETKSYRVSEDLVSIHLPLSRTLAGLHVRLSRLGAVSRLHEFVSFEDFQVEVLVEYPLRCLVLVAQVVAEMWRRNGLSLISQVFYYQDVKCREEMYDKDIIMLQIGASLMDPNKFLLLVLQRYELAEAFNKTISTKDQDLIKQYNTLIEEMLQVLIYIVGERYVPGVGNVTKEEVTMREIIHLLCIEPMPHSAIAKNLPENENNETGLENVINKVATFKKPGVSGHGVYELKDESLKDFNMYFYHYSKTQHSKAEHMQKKRRKQENKDEALPPPPPPEFCPAFSKVINLLNCDIMMYILRTVFERAIDTDSNLWTEGMLQMAFHILALGLLEEKQQLQKAPEEEVTFDFYHKASRLGSSAMNIQMLLEKLKGIPQLEGQKDMITWILQMFDTVKRLREKSCLIVATTSGSESIKNDEITHDKEKAERKRKAEAARLHRQKIMAQMSALQKNFIETHKLMYDNTSEMPGKEDSIMEEESTPAVSDYSRIALGPKRGPSVTEKEVLTCILCQEEQEVKIENNAMVLSACVQKSTALTQHRGKPIELSGEALDPLFMDPDLAYGTYTGSCGHVMHAVCWQKYFEAVQLSSQQRIHVDLFDLESGEYLCPLCKSLCNTVIPIIPLQPQKINSENADALAQLLTLARWIQTVLARISGYNIRHAKGENPIPIFFNQGMGDSTLEFHSILSFGVESSIKYSNSIKEMVILFATTIYRIGLKVPPDERDPRVPMLTWSTCAFTIQAIENLLGDEGKPLFGALQNRQHNGLKALMQFAVAQRITCPQVLIQKHLVRLLSVVLPNIKSEDTPCLLSIDLFHVLVGAVLAFPSLYWDDPVDLQPSSVSSSYNHLYLFHLITMAHMLQILLTVDTGLPLAQVQEDSEEAHSASSFFAEISQYTSGSIGCDIPGWYLWVSLKNGITPYLRCAALFFHYLLGVTPPEELHTNSAEGEYSALCSYLSLPTNLFLLFQEYWDTVRPLLQRWCADPALLNCLKQKNTVVRYPRKRNSLIELPDDYSCLLNQASHFRCPRSADDERKHPVLCLFCGAILCSQNICCQEIVNGEEVGACIFHALHCGAGVCIFLKIRECRVVLVEGKARGCAYPAPYLDEYGETDPGLKRGNPLHLSRERYRKLHLVWQQHCIIEEIARSQETNQMLFGFNWQLL

SEQ ID NO: 251203 - protein, 803 aa, Artificial Sequence
  derived and/or modified sequence
MADEEAGGTERMEISAELPQTPQRLASWWDQQVDFYTAFLHHLAQLVPEIYFAEMDPDLEKQEESVQMSIFTPLEWYLFGEDPDICLEKLKHSGAFQLCGRVFKSGETTYSCRDCAIDPTCVLCMDCFQDSVHKNHRYKMHTSTGGGFCDCGDTEAWKTGPFCVNHEPGRAGTIKENSRCPLNEEVIVQARKIFPSVIKYVVEMTIWEEEKELPPELQIREKNERYYCVLFNDEHHSYDHVIYSLQRALDCELAEAQLHTTAIDKEGRRAVKAGAYAACQEAKEDIKSHSENVSQHPLHVEVLHSEIMAHQKFALRLGSWMNKIMSYSSDFRQIFCQACLREEPDSENPCLISRLMLWDAKLYKGARKILHELIFSSFFMEMEYKKLFAMEFVKYYKQLQKEYISDDHDRSISITALSVQMFTVPTLARHLIEEQNVISVITETLLEVLPEYLDRNNKFNFQGYSQDKLGRVYAVICDLKYILISKPTIWTERLRMQFLEGFRSFLKILTCMQGMEEIRRQVGQHIEVDPDWEAAIAIQMQLKNILLMFQEWCACDEELLLVAYKECHKAVMRCSTSFISSSKTVVQSCGHSLETKSYRVSEDLVSIHLPLSRTLAGLHVRLSRLGAVSRLHEFVSFEDFQVEVLVEYPLRCLVLVAQVVAEMWRRNGLSLISQVFYYQDVKCREEMYDKDIIMLQIGASLMDPNKFLLLVLQRYELAEAFNKTISTKDQDLIKQYNTLIEEMLQVLIYIVGERYVPGVGNVTKEEVTMREIIHLLCIEPMPHSAIAKNLPENETRCIRPWSL

SEQ ID NO: 251204 - protein, 1013 aa, Artificial Sequence
  derived and/or modified sequence
MADEEAGGTERMEISAELPQTPQRLASWWDQQVDFYTAFLHHLAQLVPEIYFAEMDPDLEKQEESVQMSIFTPLEWYLFGEDPDICLEKLKHSGAFQLCGRVFKSGETTYSCRDCAIDPTCVLCMDCFQDSVHKNHRYKMHTSTGGGFCDCGDTEAWKTGPFCVNHEPGRAGTIKENSRCPLNEEVIVQARKIFPSVIKYVVEMTIWEEEKELPPELQIREKNERYYCVLFNDEHHSYDHVIYSLQRALDCELAEAQLHTTAIDKEGRRAVKAGAYAACQEAKEDIKSHSENVSQHPLHVEVLHSEIMAHQKFALRLGSWMNKIMSYSSDFRQIFCQACLREEPDSENPCLISRLMLWDAKLYKGARKILHELIFSSFFMEMEYKKLFAMEFVKYYKQLQKEYISDDHDRSISITALSVQMFTVPTLARHLIEEQNVISVITETLLEVLPEYLDRNNKFNFQGYSQDKLGRVYAVICDLKYILISKPTIWTERLRMQFLEGFRSFLKILTCMQGMEEIRRQVGQHIEVDPDWEAAIAIQMQLKNILLMFQEWCACDEELLLVAYKECHKAVMRCSTSFISSSKTVVQSCGHSLETKSYRVSEDLVSIHLPLSRTLAGLHVRLSRLGAVSRLHEFVSFEDFQVEVLVEYPLRCLVLVAQVVAEMWRRNGLSLISQVFYYQDVKCREEMYDKDIIMLQIGASLMDPNKFLLLVLQRYELAEAFNKTISTKDQDLIKQYNTLIEEMLQVLIYIVGERYVPGVGNVTKEEVTMREIIHLLCIEPMPHSAIAKNLPENENNETGLENVINKVATFKKPGVSGHGVYELKDESLKDFNMYFYHYSKTQHSKAEHMQKKRRKQENKDEALPPPPPPEFCPAFSKVINLLNCDIMMYILRTVFERAIDTDSNLWTEGMLQMAFHILALGLLEEKQQLQKAPEEEVTFDFYHKASRLGSSAMNIQMLLEKLKGIPQLEGQKDMITWILQMFDTVKRLREKSCLIVATTSGSESIKNDEILHH

SEQ ID NO: 251205 - DNA, 5250 bp, Artificial Sequence
  derived and/or modified sequence
atggccgacgaggaggccggcggcaccgagagaatggagatcagcgccgagctgccccagaccccccagagactggccagctggtgggaccagcaggtggacttctacaccgccttcctgcaccacctggcccagctggtgcccgagatctacttcgccgagatggaccccgacctggagaagcaggaggagagcgtgcagatgagcatcttcacccccctggagtggtacctgttcggcgaggaccccgacatctgcctggagaagctgaagcacagcggcgccttccagctgtgcggcagagtgttcaagagcggcgagaccacctacagctgcagagactgcgccatcgaccccacctgcgtgctgtgcatggactgcttccaggacagcgtgcacaagaaccacagatacaagatgcacaccagcaccggcggcggcttctgcgactgcggcgacaccgaggcctggaagaccggccccttctgcgtgaaccacgagcccggcagagccggcaccatcaaggagaacagcagatgccccctgaacgaggaggtgatcgtgcaggccagaaagatcttccccagcgtgatcaagtacgtggtggagatgaccatctgggaggaggagaaggagctgccccccgagctgcagatcagagagaagaacgagagatactactgcgtgctgttcaacgacgagcaccacagctacgaccacgtgatctacagcctgcagagagccctggactgcgagctggccgaggcccagctgcacaccaccgccatcgacaaggagggcagaagagccgtgaaggccggcgcctacgccgcctgccaggaggccaaggaggacatcaagagccacagcgagaacgtgagccagcaccccctgcacgtggaggtgctgcacagcgagatcatggcccaccagaagttcgccctgagactgggcagctggatgaacaagatcatgagctacagcagcgacttcagacagatcttctgccaggcctgcctgagagaggagcccgacagcgagaacccctgcctgatcagcagactgatgctgtgggacgccaagctgtacaagggcgccagaaagatcctgcacgagctgatcttcagcagcttcttcatggagatggagtacaagaagctgttcgccatggagttcgtgaagtactacaagcagctgcagaaggagtacatcagcgacgaccacgacagaagcatcagcatcaccgccctgagcgtgcagatgttcaccgtgcccaccctggccagacacctgatcgaggagcagaacgtgatcagcgtgatcaccgagaccctgctggaggtgctgcccgagtacctggacagaaacaacaagttcaacttccagggctacagccaggacaagctgggcagagtgtacgccgtgatctgcgacctgaagtacatcctgatcagcaagcccaccatctggaccgagagactgagaatgcagttcctggagggcttcagaagcttcctgaagatcctgacctgcatgcagggcatggaggagatcagaagacaggtgggccagcacatcgaggtggaccccgactgggaggccgccatcgccatccagatgcagctgaagaacatcctgctgatgttccaggagtggtgcgcctgcgacgaggagctgctgctggtggcctacaaggagtgccacaaggccgtgatgagatgcagcaccagcttcatcagcagcagcaagaccgtggtgcagagctgcggccacagcctggagaccaagagctacagagtgagcgaggacctggtgagcatccacctgcccctgagcagaaccctggccggcctgcacgtgagactgagcagactgggcgccgtgagcagactgcacgagttcgtgagcttcgaggacttccaggtggaggtgctggtggagtaccccctgagatgcctggtgctggtggcccaggtggtggccgagatgtggagaagaaacggcctgagcctgatcagccaggtgttctactaccaggacgtgaagtgcagagaggagatgtacgacaaggacatcatcatgctgcagatcggcgccagcctgatggaccccaacaagttcctgctgctggtgctgcagagatacgagctggccgaggccttcaacaagaccatcagcaccaaggaccaggacctgatcaagcagtacaacaccctgatcgaggagatgctgcaggtgctgatctacatcgtgggcgagagatacgtgcccggcgtgggcaacgtgaccaaggaggaggtgaccatgagagagatcatccacctgctgtgcatcgagcccatgccccacagcgccatcgccaagaacctgcccgagaacgagaacaacgagaccggcctggagaacgtgatcaacaaggtggccaccttcaagaagcccggcgtgagcggccacggcgtgtacgagctgaaggacgagagcctgaaggacttcaacatgtacttctaccactacagcaagacccagcacagcaaggccgagcacatgcagaagaagagaagaaagcaggagaacaaggacgaggccctgccccccccccccccccccgagttctgccccgccttcagcaaggtgatcaacctgctgaactgcgacatcatgatgtacatcctgagaaccgtgttcgagagagccatcgacaccgacagcaacctgtggaccgagggcatgctgcagatggccttccacatcctggccctgggcctgctggaggagaagcagcagctgcagaaggcccccgaggaggaggtgaccttcgacttctaccacaaggccagcagactgggcagcagcgccatgaacatccagatgctgctggagaagctgaagggcatcccccagctggagggccagaaggacatgatcacctggatcctgcagatgttcgacaccgtgaagagactgagagagaagagctgcctgatcgtggccaccaccagcggcagcgagagcatcaagaacgacgagatcacccacgacaaggagaaggccgagagaaagagaaaggccgaggccgccagactgcacagacagaagatcatggcccagatgagcgccctgcagaagaacttcatcgagacccacaagctgatgtacgacaacaccagcgagatgcccggcaaggaggacagcatcatggaggaggagagcacccccgccgtgagcgactacagcagaatcgccctgggccccaagagaggccccagcgtgaccgagaaggaggtgctgacctgcatcctgtgccaggaggagcaggaggtgaagatcgagaacaacgccatggtgctgagcgcctgcgtgcagaagagcaccgccctgacccagcacagaggcaagcccatcgagctgagcggcgaggccctggaccccctgttcatggaccccgacctggcctacggcacctacaccggcagctgcggccacgtgatgcacgccgtgtgctggcagaagtacttcgaggccgtgcagctgagcagccagcagagaatccacgtggacctgttcgacctggagagcggcgagtacctgtgccccctgtgcaagagcctgtgcaacaccgtgatccccatcatccccctgcagccccagaagatcaacagcgagaacgccgacgccctggcccagctgctgaccctggccagatggatccagaccgtgctggccagaatcagcggctacaacatcagacacgccaagggcgagaaccccatccccatcttcttcaaccagggcatgggcgacagcaccctggagttccacagcatcctgagcttcggcgtggagagcagcatcaagtacagcaacagcatcaaggagatggtgatcctgttcgccaccaccatctacagaatcggcctgaaggtgccccccgacgagagagaccccagagtgcccatgctgacctggagcacctgcgccttcaccatccaggccatcgagaacctgctgggcgacgagggcaagcccctgttcggcgccctgcagaacagacagcacaacggcctgaaggccctgatgcagttcgccgtggcccagagaatcacctgcccccaggtgctgatccagaagcacctggtgagactgctgagcgtggtgctgcccaacatcaagagcgaggacaccccctgcctgctgagcatcgacctgttccacgtgctggtgggcgccgtgctggccttccccagcctgtactgggacgaccccgtggacctgcagcccagcagcgtgagcagcagctacaaccacctgtacctgttccacctgatcaccatggcccacatgctgcagatcctgctgaccgtggacaccggcctgcccctggcccaggtgcaggaggacagcgaggaggcccacagcgccagcagcttcttcgccgagatcagccagtacaccagcggcagcatcggctgcgacatccccggctggtacctgtgggtgagcctgaagaacggcatcaccccctacctgagatgcgccgccctgttcttccactacctgctgggcgtgaccccccccgaggagctgcacaccaacagcgccgagggcgagtacagcgccctgtgcagctacctgagcctgcccaccaacctgttcctgctgttccaggagtactgggacaccgtgagacccctgctgcagagatggtgcgccgaccccgccctgctgaactgcctgaagcagaagaacaccgtggtgagataccccagaaagagaaacagcctgatcgagctgcccgacgactacagctgcctgctgaaccaggccagccacttcagatgccccagaagcgccgacgacgagagaaagcaccccgtgctgtgcctgttctgcggcgccatcctgtgcagccagaacatctgctgccaggagatcgtgaacggcgaggaggtgggcgcctgcatcttccacgccctgcactgcggcgccggcgtgtgcatcttcctgaagatcagagagtgcagagtggtgctggtggagggcaaggccagaggctgcgcctaccccgccccctacctggacgagtacggcgagaccgaccccggcctgaagagaggcaaccccctgcacctgagcagagagagatacagaaagctgcacctggtgtggcagcagcactgcatcatcgaggagatcgccagaagccaggagaccaaccagatgctgttcggcttcaactggcagctgctgtag

SEQ ID NO: 251206 - DNA, 2412 bp, Artificial Sequence
  derived and/or modified sequence
atggccgacgaggaggccggcggcaccgagagaatggagatcagcgccgagctgccccagaccccccagagactggccagctggtgggaccagcaggtggacttctacaccgccttcctgcaccacctggcccagctggtgcccgagatctacttcgccgagatggaccccgacctggagaagcaggaggagagcgtgcagatgagcatcttcacccccctggagtggtacctgttcggcgaggaccccgacatctgcctggagaagctgaagcacagcggcgccttccagctgtgcggcagagtgttcaagagcggcgagaccacctacagctgcagagactgcgccatcgaccccacctgcgtgctgtgcatggactgcttccaggacagcgtgcacaagaaccacagatacaagatgcacaccagcaccggcggcggcttctgcgactgcggcgacaccgaggcctggaagaccggccccttctgcgtgaaccacgagcccggcagagccggcaccatcaaggagaacagcagatgccccctgaacgaggaggtgatcgtgcaggccagaaagatcttccccagcgtgatcaagtacgtggtggagatgaccatctgggaggaggagaaggagctgccccccgagctgcagatcagagagaagaacgagagatactactgcgtgctgttcaacgacgagcaccacagctacgaccacgtgatctacagcctgcagagagccctggactgcgagctggccgaggcccagctgcacaccaccgccatcgacaaggagggcagaagagccgtgaaggccggcgcctacgccgcctgccaggaggccaaggaggacatcaagagccacagcgagaacgtgagccagcaccccctgcacgtggaggtgctgcacagcgagatcatggcccaccagaagttcgccctgagactgggcagctggatgaacaagatcatgagctacagcagcgacttcagacagatcttctgccaggcctgcctgagagaggagcccgacagcgagaacccctgcctgatcagcagactgatgctgtgggacgccaagctgtacaagggcgccagaaagatcctgcacgagctgatcttcagcagcttcttcatggagatggagtacaagaagctgttcgccatggagttcgtgaagtactacaagcagctgcagaaggagtacatcagcgacgaccacgacagaagcatcagcatcaccgccctgagcgtgcagatgttcaccgtgcccaccctggccagacacctgatcgaggagcagaacgtgatcagcgtgatcaccgagaccctgctggaggtgctgcccgagtacctggacagaaacaacaagttcaacttccagggctacagccaggacaagctgggcagagtgtacgccgtgatctgcgacctgaagtacatcctgatcagcaagcccaccatctggaccgagagactgagaatgcagttcctggagggcttcagaagcttcctgaagatcctgacctgcatgcagggcatggaggagatcagaagacaggtgggccagcacatcgaggtggaccccgactgggaggccgccatcgccatccagatgcagctgaagaacatcctgctgatgttccaggagtggtgcgcctgcgacgaggagctgctgctggtggcctacaaggagtgccacaaggccgtgatgagatgcagcaccagcttcatcagcagcagcaagaccgtggtgcagagctgcggccacagcctggagaccaagagctacagagtgagcgaggacctggtgagcatccacctgcccctgagcagaaccctggccggcctgcacgtgagactgagcagactgggcgccgtgagcagactgcacgagttcgtgagcttcgaggacttccaggtggaggtgctggtggagtaccccctgagatgcctggtgctggtggcccaggtggtggccgagatgtggagaagaaacggcctgagcctgatcagccaggtgttctactaccaggacgtgaagtgcagagaggagatgtacgacaaggacatcatcatgctgcagatcggcgccagcctgatggaccccaacaagttcctgctgctggtgctgcagagatacgagctggccgaggccttcaacaagaccatcagcaccaaggaccaggacctgatcaagcagtacaacaccctgatcgaggagatgctgcaggtgctgatctacatcgtgggcgagagatacgtgcccggcgtgggcaacgtgaccaaggaggaggtgaccatgagagagatcatccacctgctgtgcatcgagcccatgccccacagcgccatcgccaagaacctgcccgagaacgagaccagatgcatcagaccctggagcctgtag

SEQ ID NO: 251207 - DNA, 3042 bp, Artificial Sequence
  derived and/or modified sequence
atggccgacgaggaggccggcggcaccgagagaatggagatcagcgccgagctgccccagaccccccagagactggccagctggtgggaccagcaggtggacttctacaccgccttcctgcaccacctggcccagctggtgcccgagatctacttcgccgagatggaccccgacctggagaagcaggaggagagcgtgcagatgagcatcttcacccccctggagtggtacctgttcggcgaggaccccgacatctgcctggagaagctgaagcacagcggcgccttccagctgtgcggcagagtgttcaagagcggcgagaccacctacagctgcagagactgcgccatcgaccccacctgcgtgctgtgcatggactgcttccaggacagcgtgcacaagaaccacagatacaagatgcacaccagcaccggcggcggcttctgcgactgcggcgacaccgaggcctggaagaccggccccttctgcgtgaaccacgagcccggcagagccggcaccatcaaggagaacagcagatgccccctgaacgaggaggtgatcgtgcaggccagaaagatcttccccagcgtgatcaagtacgtggtggagatgaccatctgggaggaggagaaggagctgccccccgagctgcagatcagagagaagaacgagagatactactgcgtgctgttcaacgacgagcaccacagctacgaccacgtgatctacagcctgcagagagccctggactgcgagctggccgaggcccagctgcacaccaccgccatcgacaaggagggcagaagagccgtgaaggccggcgcctacgccgcctgccaggaggccaaggaggacatcaagagccacagcgagaacgtgagccagcaccccctgcacgtggaggtgctgcacagcgagatcatggcccaccagaagttcgccctgagactgggcagctggatgaacaagatcatgagctacagcagcgacttcagacagatcttctgccaggcctgcctgagagaggagcccgacagcgagaacccctgcctgatcagcagactgatgctgtgggacgccaagctgtacaagggcgccagaaagatcctgcacgagctgatcttcagcagcttcttcatggagatggagtacaagaagctgttcgccatggagttcgtgaagtactacaagcagctgcagaaggagtacatcagcgacgaccacgacagaagcatcagcatcaccgccctgagcgtgcagatgttcaccgtgcccaccctggccagacacctgatcgaggagcagaacgtgatcagcgtgatcaccgagaccctgctggaggtgctgcccgagtacctggacagaaacaacaagttcaacttccagggctacagccaggacaagctgggcagagtgtacgccgtgatctgcgacctgaagtacatcctgatcagcaagcccaccatctggaccgagagactgagaatgcagttcctggagggcttcagaagcttcctgaagatcctgacctgcatgcagggcatggaggagatcagaagacaggtgggccagcacatcgaggtggaccccgactgggaggccgccatcgccatccagatgcagctgaagaacatcctgctgatgttccaggagtggtgcgcctgcgacgaggagctgctgctggtggcctacaaggagtgccacaaggccgtgatgagatgcagcaccagcttcatcagcagcagcaagaccgtggtgcagagctgcggccacagcctggagaccaagagctacagagtgagcgaggacctggtgagcatccacctgcccctgagcagaaccctggccggcctgcacgtgagactgagcagactgggcgccgtgagcagactgcacgagttcgtgagcttcgaggacttccaggtggaggtgctggtggagtaccccctgagatgcctggtgctggtggcccaggtggtggccgagatgtggagaagaaacggcctgagcctgatcagccaggtgttctactaccaggacgtgaagtgcagagaggagatgtacgacaaggacatcatcatgctgcagatcggcgccagcctgatggaccccaacaagttcctgctgctggtgctgcagagatacgagctggccgaggccttcaacaagaccatcagcaccaaggaccaggacctgatcaagcagtacaacaccctgatcgaggagatgctgcaggtgctgatctacatcgtgggcgagagatacgtgcccggcgtgggcaacgtgaccaaggaggaggtgaccatgagagagatcatccacctgctgtgcatcgagcccatgccccacagcgccatcgccaagaacctgcccgagaacgagaacaacgagaccggcctggagaacgtgatcaacaaggtggccaccttcaagaagcccggcgtgagcggccacggcgtgtacgagctgaaggacgagagcctgaaggacttcaacatgtacttctaccactacagcaagacccagcacagcaaggccgagcacatgcagaagaagagaagaaagcaggagaacaaggacgaggccctgccccccccccccccccccgagttctgccccgccttcagcaaggtgatcaacctgctgaactgcgacatcatgatgtacatcctgagaaccgtgttcgagagagccatcgacaccgacagcaacctgtggaccgagggcatgctgcagatggccttccacatcctggccctgggcctgctggaggagaagcagcagctgcagaaggcccccgaggaggaggtgaccttcgacttctaccacaaggccagcagactgggcagcagcgccatgaacatccagatgctgctggagaagctgaagggcatcccccagctggagggccagaaggacatgatcacctggatcctgcagatgttcgacaccgtgaagagactgagagagaagagctgcctgatcgtggccaccaccagcggcagcgagagcatcaagaacgacgagatcctgcaccactag

SEQ ID NO: 251208 - DNA, 5250 bp, Artificial Sequence
  derived and/or modified sequence
atggctgatgaagaagcgggcggcaccgaacgcatggagatctctgccgaattgccacaaaccccacagaggctggccagttggtgggaccagcaggttgacttctacacagcctttttgcatcatctagcccagttagtgcccgagatctatttcgccgaaatggaccctgacctcgaaaaacaggaagagagtgttcaaatgagcatatttacgcctctcgaatggtatttgtttggagaggatcccgatatctgcctcgagaagcttaaacactccggggctttccagttgtgtggtagagtcttcaaaagcggggagacaacttatagttgcagagactgcgctatagacccaacatgcgttttgtgcatggactgtttccaggactcagttcataagaaccataggtataagatgcatacctctacaggcgggggattttgtgactgcggggacaccgaagcctggaaaaccggcccattttgtgtcaatcatgaacccggccgtgctggcacaatcaaggagaattcaagatgccccctgaatgaggaagtgatcgtgcaggcgaggaaaatctttccttcggtgattaagtacgtcgtcgagatgacgatttgggaggaggagaaagagctgcctccagagctccagattcgcgagaaaaatgaaaggtactattgcgttttatttaatgatgagcaccatagctatgatcacgtgatttatagcctccagcgagccctggactgtgaattggccgaggctcagcttcacacgacagcaatcgacaaggagggtcggcgtgcagtgaaggctggggcctacgccgcctgtcaggaggccaaggaagatatcaagagccactccgagaacgtgtctcagcaccccctgcacgttgaggtgctgcatagcgaaatcatggcacatcagaaattcgctctgagattaggaagttggatgaacaaaatcatgtcttactccagcgatttccgccagatcttttgtcaggcctgccttagagaggaacctgatagtgagaacccatgcctgatttcccgccttatgctgtgggacgctaaactgtacaagggagcacgaaaaatactgcatgagttaattttctcctcgttcttcatggaaatggagtacaaaaaactatttgccatggaatttgtgaagtattacaagcagctgcaaaaagagtacatctctgatgatcacgatagatccatctcgatcaccgcactgagtgtgcagatgtttacggtaccgacactagccaggcacttgatagaagaacagaacgtgatcagtgtgatcacagagaccttactggaagttctccccgaatatctggacaggaataataaattcaatttccagggctattcacaggacaaactgggtcgcgtgtacgcagtgatctgtgacctgaaatacatcctcatctccaagccaacgatttggaccgaaaggttacgcatgcagttccttgaggggttccgtagctttctgaagattctgacatgcatgcaaggcatggaagaaattagacgacaagtcggccagcatatagaagtggatcctgattgggaagctgcgatcgcaatccagatgcaactgaaaaacattctactgatgtttcaggaatggtgcgcttgtgacgaggaactactcttagttgcatataaagagtgtcacaaagctgtgatgaggtgctccacctcttttatttcttcgtcaaagaccgtggtgcagtcctgcggacacagccttgaaacaaaaagctatcgtgtgtcggaagatctggtctccatccatttgccgctaagccgcacactggccggtctgcatgtccgcctgtctcgactgggcgctgttagccggctgcatgagttcgtctcatttgaggattttcaggtggaagtgctggtcgaataccctcttcgctgcctggtacttgtcgcacaggtggtagctgagatgtggagacgtaatggactctctctgatttctcaggtgttttattatcaggacgtcaagtgtcgcgaagaaatgtatgacaaagatataatcatgttacaaatcggggcttccttgatggaccccaacaaattcctgctgttggtactgcaacggtacgaattagccgaggctttcaataagacgatatccacaaaagaccaggatcttatcaagcaatacaacacacttatcgaagaaatgcttcaggtactaatttacatagtaggcgagcggtacgtccctggggtggggaacgtcaccaaagaagaggtcaccatgcgcgaaatcatccatctgctctgcattgaacctatgcctcacagtgctattgccaaaaatcttccagaaaatgagaataatgaaactggtcttgaaaacgtcataaataaagtcgcgacatttaagaagcccggcgtctctggtcacggggtgtacgagctgaaagatgagtccctgaaagattttaatatgtacttctatcattactccaaaacacagcatagcaaagcggagcacatgcagaagaaacgtagaaagcaagaaaacaaggatgaagcgctgccccctccccccccccctgagttttgccccgccttttccaaggtgatcaatttgctgaactgcgatatcatgatgtatatcctgaggactgtgtttgagcgggctatcgacactgatagcaacctttggacagagggaatgctccaaatggcttttcacattctggccctaggcttgctggaagaaaagcagcaactacagaaagccccagaagaggaagtgacatttgatttctaccacaaggcttcacggctgggctcaagtgccatgaatatccaaatgctccttgagaagctgaaggggatccctcagttagagggacagaaagacatgatcacctggatactccagatgtttgacacagtgaagaggctccgggagaagagttgcctgatcgttgcgaccaccagcggctcggagtctatcaagaatgacgagatcactcatgacaaggagaaggcagagagaaagcgtaaggctgaagctgctcggctccataggcagaagatcatggctcaaatgagtgccctccagaagaacttcatcgagacccacaagttaatgtacgataatacatctgaaatgcccgggaaggaagattctataatggaagaagagtctactcctgcggtgtcagactactccaggattgccctcgggcccaagcgcggcccttctgtgaccgagaaggaagttctaacgtgcattctttgtcaggaggagcaggaggtcaagatcgagaacaatgcaatggtcctgagcgcctgcgtgcagaaatccacagccctgacgcagcatagaggtaagcctattgagctgagcggcgaagcactcgacccattatttatggaccccgacctggcatatgggacatacacaggctcctgcgggcatgtgatgcacgcggtatgctggcagaaatacttcgaagccgtgcagctttcctctcagcagcgaatccacgtggatctgttcgatctcgaatccggggagtatctgtgccctctgtgcaagtcactctgtaacacggttatccccattatccctttgcagccgcagaagataaacagcgaaaatgccgatgccctagctcagctgcttactctcgcccgttggatccagaccgtgctcgccaggatcagcggttataatatccggcatgccaagggtgagaaccccatcccgattttctttaaccaggggatgggtgattccaccctggagttccactccatacttagctttggcgttgaaagctcgattaaatattctaactctatcaaggagatggtgattcttttcgcaaccacgatctaccggatcgggctgaaggtgccacccgacgagcgcgaccctcgcgtgcctatgcttacttggtcaacctgtgccttcaccatccaggccattgagaacctgctcggggacgaaggtaaacctctcttcggcgctttacagaaccgccagcataacggcctgaaagctctcatgcagtttgccgtggcgcagcggattacttgtccacaagttctgatccagaagcacctcgttagactgctgagcgtggttctgcccaatattaagtcggaagacaccccatgcctgctgtcaatagaccttttccacgtgctggttggagccgtgctggcattcccttccctgtattgggatgaccctgtggatctccagccttctagcgtgtcatcatcttataaccacctgtatttatttcatctcatcaccatggctcacatgctccagatcttgttgacagtggacactgggttgccattggcccaagtccaggaggactctgaggaggcccattccgcttcttcattttttgccgagatatcacaatacaccagcggcagcattggctgcgacattcctgggtggtatttgtgggtgtccttaaaaaacggcataactccctatctgagatgcgcggcacttttcttccactatttactgggcgtcactccaccggaagagctgcacactaactcagctgagggagagtattcagctctgtgctcctacctaagtctgccaactaatctgtttctcctcttccaggagtactgggacacggtgaggccccttctccagagatggtgtgcagaccctgcattattgaactgcctgaagcagaagaataccgtggtgaggtatccccgcaaaaggaatagtctgatcgagctgcctgatgactattcatgtctcttgaatcaggcctcgcacttccgttgtcctcggagcgcagacgatgaacggaagcatcccgtgctttgtctgttttgtggggcgattctatgctctcaaaatatctgctgtcaagagattgtgaatggcgaggaagtgggagcgtgtatttttcatgcgttacactgtggagcaggggtttgcatcttcctgaagattagggagtgccgtgtcgttctggtggaaggcaaagctcggggttgcgcctatcccgctccctacctggacgagtatggagagaccgatcctggtttgaagcgcggcaaccctctgcatttatctagggagagatacaggaagctgcatctggtgtggcagcagcattgtataatcgaggagatcgcccgctcacaagagaccaatcagatgctgttcggttttaattggcagcttctgtag

SEQ ID NO: 251209 - DNA, 2412 bp, Artificial Sequence
  derived and/or modified sequence
atggccgatgaggaagcagggggtacagaacgcatggagatctccgccgaattgccacagaccccacagcgcctggcgagctggtgggatcaacaagtcgatttctacacagccttcctacatcatctcgcccagctggtacctgaaatatatttcgcagagatggatcccgatcttgagaaacaggaagaaagtgttcagatgagcatttttacacctctagagtggtaccttttcggagaagatccagacatatgtctagagaagctcaaacactccggtgcattccagttgtgtggtcgagtcttcaagtctggtgagaccacctactcatgtagggattgtgcgatcgaccctacttgtgtactgtgcatggactgcttccaggactctgttcacaagaaccaccggtacaagatgcatacttctacaggaggagggttttgtgactgcggtgatacggaagcatggaaaacaggacccttttgtgtgaaccatgagcctggacgggccgggaccattaaagaaaactcgcgctgcccgctgaacgaagaagtgatcgtccaggcaaggaaaatctttccctccgtgatcaaatacgtggtagagatgaccatttgggaggaggagaaagagttgccacccgaactgcagattagagagaaaaacgaaagatactactgtgtgctgtttaacgatgaacatcactcctacgatcatgtcatctactcactccaacgagctttagattgtgaactggcagaagcgcagttacataccactgcaatcgataaggaaggtcgtagagctgtgaaggctggcgcttacgccgcatgccaagaggcaaaagaagacatcaagagccactctgaaaatgtctcccagcatcccctccacgttgaggtcttgcactctgagataatggcacaccaaaaattcgctttacggctaggaagctggatgaacaagattatgagctatagttccgactttcgccagatcttttgccaggcctgcctgagagaggagccagattctgagaatccttgcctgatttccagattgatgctttgggacgccaagctgtacaagggcgcaagaaagatactgcatgagctgatctttagctcattcttcatggaaatggagtacaagaaattattcgccatggaatttgttaagtactacaagcagttgcagaaagagtatatttcagacgatcacgatagatccatctctattaccgctctgagtgtgcagatgtttactgttcccacactcgctcgccacctcatcgaggaacagaacgtgatttctgttattaccgaaactctgttggaagtcttacctgaatatctggaccgtaataataaatttaatttccaggggtactctcaggataaactcgggcgggtttatgctgttatctgcgacttgaagtatattcttatttcaaagccaactatctggaccgagcgcctgagaatgcaatttctggaggggtttaggtcttttttgaagattctgacctgcatgcagggcatggaagagatacgaaggcaggtgggccagcatattgaggtcgaccctgactgggaggcggcaattgctatacagatgcagctcaaaaatattttgctgatgttccaggaatggtgtgcatgcgacgaagaactcttattggtggcatacaaggagtgtcacaaagccgttatgcgctgtagtacttctttcatttcttcatctaagaccgtggtgcaaagctgcggccatagtctggagacgaaaagctaccgcgtatctgaggatttggtgagcattcacttacccttgtcgcgcaccttagccggcttacatgttaggcttagtcgcttgggcgccgttagccgactgcatgagttcgtttctttcgaggatttccaagtggaagtgctggtagagtacccgctgcgatgcttagtgttggttgcccaagtcgtggccgaaatgtggagacgcaacggactgtctttgatctcccaggtcttctattaccaggatgttaaatgtcgcgaggaaatgtatgataaggatattatcatgcttcagatcggcgcatctctcatggacccgaacaagttcctgcttcttgtactccagcgctatgagttggcagaagcattcaacaaaacgatttcaaccaaagaccaggatctgataaagcagtataatacactgatagaggagatgctgcaggtattaatctacattgtcggagaaagatacgtcccgggggtggggaatgtgaccaaggaggaggtgactatgagagagattatacacctgctctgtatcgaacctatgccgcactcggctattgcaaagaacctgcctgagaacgagaccaggtgcatcaggccctggagcctctag

SEQ ID NO: 251210 - DNA, 3042 bp, Artificial Sequence
  derived and/or modified sequence
atggctgatgaggaggctggtggcactgagagaatggaaatcagcgctgagctgccccagacaccgcagcgcttggcctcctggtgggaccaacaggtggacttttacaccgccttccttcatcatttggcccagcttgtgccagagatttactttgcagagatggacccagatctcgagaaacaggaggagagcgttcagatgtcaatctttacccctctcgagtggtacctgtttggggaggatcccgacatctgtttggagaaattgaagcacagtggagcctttcagctgtgcggacgagtgttcaaatcaggggagactacctattcttgcagggattgtgccattgaccccacctgcgtgctgtgtatggactgctttcaggattccgtgcacaaaaaccatcggtataagatgcatacatcaaccggtggaggtttctgcgattgcggcgacactgaggcctggaaaacaggccccttctgtgtgaatcacgagccaggcagggcagggactatcaaagagaacagccggtgtccccttaatgaagaggttatcgtgcaggctcggaagatcttcccaagtgtcattaaatatgtggtcgagatgacaatttgggaagaggaaaaggaactgccccccgagttgcagattcgcgagaaaaacgagagatactattgcgtactgtttaacgatgagcatcactcttatgatcacgtcatatacagtttacagcgggcacttgattgtgaattagccgaagcacagttgcatacgaccgctatcgacaaagagggccgtcgggctgtcaaagccggtgcttatgctgcatgccaggaggccaaggaggacatcaaaagccactctgaaaacgtctcccaacatcctttacacgtggaggtcttacattccgaaataatggcacatcagaagttcgctctgagactcggcagctggatgaacaaaattatgtcatatagctccgactttcgacagattttctgtcaggcctgtttacgggaggagccggattctgagaatccttgtttaatttcccggctaatgttatgggacgcgaaattgtacaaaggtgcacggaaaattctgcatgagctgatattttctagcttcttcatggaaatggaatacaaaaaactgttcgcaatggaattcgtaaaatactacaagcagttacagaaagagtacatctctgatgatcacgacagatcaatttccatcacagccctgtcagtccagatgtttacggtcccaaccctggccagacacctcatcgaggaacaaaacgtgattagcgtgatcaccgagaccctgctggaagtgttgcccgagtacctggacaggaacaataagtttaacttccagggttattctcaagataaactcgggcgggtgtatgctgtgatttgtgatttgaagtatattctcatatctaagccaaccatctggaccgaacgtcttcgtatgcaatttcttgagggttttagatcctttctgaagattctcacatgcatgcaggggatggaggagatccgccggcaagttggtcagcatatcgaagtggaccccgattgggaggctgccatcgcaatacagatgcagttgaagaatattttgctgatgttccaagaatggtgcgcctgtgatgaggagctactgcttgtcgcctacaaagagtgccacaaggctgtcatgcggtgttcaacgagcttcatatctagctctaaaacggtagtccaatcgtgcggtcacagccttgagactaagagttaccgggtctccgaggatctggtctccatacatctgccccttagtcgcactctggcaggactgcatgtcaggctgtccaggctgggagctgtgtcaaggctccatgagttcgtgagctttgaagacttccaggtagaggtactggtagaatacccattgcggtgcctcgtgctcgtggcccaggtggtggctgaaatgtggcggcggaatggcttgtctctgatctcgcaggtgttctattatcaagacgtgaaatgccgcgaggaaatgtatgataaagacattataatgctccagattggagctagcctaatggacccaaacaaatttctgctgttggttcttcagcgctatgagctggccgaggcattcaataagacgatctccactaaagatcaagatctcattaagcagtataacactcttattgaggaaatgctccaggtcctgatttacattgttggcgagagatatgttcctggggtgggcaacgtgaccaaggaagaagtgaccatgagagagatcatacacctgctgtgtattgagccaatgccccacagcgcaatagcaaagaacctccccgagaacgaaaacaacgagaccggcctggaaaatgtgattaacaaggtggccacatttaagaaaccaggagtgtctggccatggggtatacgagctgaaggacgagagcctgaaggacttcaacatgtacttctatcattacagcaagactcagcactccaaggcagaacacatgcagaagaaacggcgaaagcaggaaaataaagatgaggcgcttcctccaccgccccctcctgagttctgtccagctttctccaaggtgatcaatctgttaaactgcgacattatgatgtatatcctgcgcaccgtgttcgagcgggccattgatacggactccaatctgtggaccgagggcatgttacagatggcattccacattttggcactggggctgttggaggaaaagcagcagctgcaaaaagcgcccgaggaagaagttactttcgacttctaccataaggcaagcagattaggcagtagcgctatgaatatacagatgctgctggagaaattgaagggtataccccaactcgaagggcagaaagacatgatcacttggattctccaaatgttcgataccgtcaagcgtctcagggagaagtcctgcctcatcgtcgctacaacgtccggttcagagtctattaagaacgacgagatcctccatcattag

SEQ ID NO: 251211 - DNA, 5250 bp, Artificial Sequence
  derived and/or modified sequence
atggctgatgaggaggccggcggcacagagaggatggagatctctgctgagctgccccagaccccccagaggctggcctcctggtgggaccagcaggtggacttctacacagccttcctgcaccacctggcccagctggtgcctgagatctactttgctgagatggaccctgacctggagaagcaggaggagagcgtgcagatgagcatcttcacccccctggagtggtacctgtttggagaagatcctgacatctgcctggagaagctgaagcacagcggggccttccagctgtgtggccgggtcttcaagtctggagagaccacctacagctgccgggactgtgccatcgaccccacctgtgtgctgtgcatggactgcttccaggacagcgtgcacaagaaccaccgctacaagatgcacaccagcactggaggcggcttctgtgactgtggggacacagaggcctggaagacaggccccttctgtgtgaaccacgagcccggccgggccggcaccatcaaggagaacagccgctgccccctgaatgaggaggtgattgtgcaggccaggaagatcttccccagcgtcatcaagtatgtggtggagatgaccatctgggaggaggagaaggagctgcccccagagctgcagatccgggagaagaatgaaagatactactgtgtgctcttcaatgatgagcaccacagctatgaccacgtgatctacagcctgcagagggccctggactgtgagctggccgaggcccagctgcacaccacagccatcgacaaggagggccggcgggctgtgaaggccggggcctatgctgcctgccaggaggccaaggaggacatcaagagccacagtgaaaatgtgtcccagcaccccctgcacgtggaggtgctgcacagcgagatcatggcccaccagaagtttgccctgcggctgggctcctggatgaacaagatcatgagctacagcagtgacttccggcagatcttctgccaggcctgcctgcgggaggagccagacagcgagaacccctgcctgatcagccggctgatgctgtgggatgccaagctgtacaagggggccaggaagatcctgcacgagctgatcttcagcagcttcttcatggagatggagtacaagaagctgtttgccatggagtttgtgaagtactacaagcagctgcagaaggagtacatcagtgatgaccatgacaggagcatcagcatcacagccctgtctgtgcagatgttcaccgtgcccaccctggcccggcacctgattgaggagcagaatgtcatcagcgtcatcacagagaccctgctggaggtgctgcctgagtacctggacaggaacaacaagttcaacttccagggctacagccaggacaagctgggccgggtgtatgctgtgatctgtgacctgaagtacatcctgatcagcaagcccaccatctggacagagcggctgaggatgcagttcctggagggcttccgctccttcctgaagatcctgacctgcatgcagggcatggaggagatccggcggcaggtgggccagcacatcgaggtggaccctgactgggaggccgccatcgccatccagatgcagctgaagaacatcctgctgatgttccaggagtggtgtgcctgtgatgaggagctgctgctggtggcctacaaggagtgccacaaggctgtgatgcgctgcagcaccagcttcatcagcagcagcaagacagtggtgcagagctgtggccacagcctggagaccaagagctacagagtgtctgaggacctggtgtccatccacctgcccctgagcaggaccctggccggcctgcacgtgcggctgagccggctgggcgctgtgtcccggctgcacgagtttgtgtcctttgaggacttccaggtggaggtgctggtggagtaccccctgcgctgcctggtgctggtggcccaggtggtggccgagatgtggaggagaaatggcctgagcctcatcagccaggtgttctactaccaggatgtgaagtgccgggaggagatgtatgacaaggacatcatcatgctgcagattggagccagcctgatggaccccaacaagttcctgctgctggtgctgcagagatatgagctggccgaggccttcaacaagaccatcagcaccaaggaccaggacctgatcaagcagtacaacaccctcatcgaggagatgctgcaggtgctgatctacatcgtgggggagagatatgtgcctggggtgggcaatgtgaccaaggaggaggtgaccatgagggagatcatccacctgctgtgcatcgagcccatgccccacagcgccatcgccaagaacctgcctgaaaatgaaaataatgagaccggcctggagaatgtcatcaacaaggtggccaccttcaagaagccaggagtgtctggccacggcgtgtatgagctgaaggatgagagcctgaaggacttcaacatgtacttctaccactacagcaagacccagcacagcaaggccgagcacatgcagaagaagaggaggaagcaggagaacaaggatgaggccctgcccccacctcctcctcctgagttctgcccagccttcagcaaggtgatcaacctgctgaactgtgacatcatgatgtacatcctgaggacagtgtttgagcgggccatcgacacagacagcaacctgtggacagagggcatgctgcagatggccttccacatcctggccctgggcctgctggaggagaagcagcagctgcagaaggcccctgaggaggaggtgacctttgacttctaccacaaggccagccggctgggcagcagcgccatgaacatccagatgctgctggagaagctgaagggcatcccccagctggagggccagaaggacatgatcacctggatcctgcagatgtttgacacagtgaagaggctgcgggagaagagctgcctgattgtggccaccaccagcggcagcgagagcatcaagaatgatgagatcacccatgacaaggagaaggccgagaggaagaggaaggccgaggccgcccggctgcaccggcagaagatcatggcccagatgtctgccctgcagaagaacttcatcgagacccacaagctgatgtatgacaacaccagcgagatgcctgggaaggaggacagcatcatggaggaggagagcaccccagctgtgtctgactacagccgcatcgccctgggccccaagaggggccccagcgtgacagagaaggaggtgctgacctgcatcctgtgccaggaggagcaggaggtgaagattgagaacaatgccatggtgctgagcgcctgtgtgcagaagagcacagccctgacccagcaccggggcaagcccatcgagctgtctggagaggccctggaccccctcttcatggaccctgacctggcctacggcacctacacaggcagctgtggccacgtgatgcatgctgtgtgctggcagaagtactttgaggccgtgcagctgagcagccagcagaggatccacgtggacctgtttgacctggagagcggggagtacctgtgccccctgtgcaagagcctgtgcaacacagtcatccccatcatccccctgcagccccagaagatcaacagtgaaaatgctgatgccctggcccagctgctgaccctggcccgctggatccagacagtgctggcccgcatcagcggctacaacatcagacatgccaagggggagaaccccatccccatcttcttcaaccagggcatgggagacagcaccctggagttccacagcatcctgagctttggagtggagagcagcatcaagtacagcaacagcatcaaggagatggtgatcctgtttgccaccaccatctaccgcatcggcctgaaggtgcccccagatgagcgggacccccgggtgcccatgctgacctggagcacctgtgccttcaccatccaggccatcgagaacctgctgggagatgagggcaagcccctgtttggagccctgcagaaccggcagcacaacggcctgaaggccctgatgcagtttgctgtggcccagaggatcacctgcccccaggtgctgatccagaagcacctggtgcggctgctgtctgtggtgctgcccaacatcaagtctgaggacaccccctgcctgctgagcattgacctcttccacgtgctggtgggcgctgtgctggccttccccagcctgtactgggatgatcctgtggacctgcagcccagctctgtgagcagcagctacaaccacctgtacctgttccacctgatcaccatggcccacatgctgcagatcctgctgactgtggacaccggcctgcccctggcccaggtgcaggaggacagcgaggaggcccacagcgccagcagcttctttgctgagatcagccagtacaccagcggcagcatcggctgtgacatccctggctggtacctgtgggtgtccctgaagaatggcatcaccccctacctgcgctgtgccgccctcttcttccactacctgctgggcgtgaccccacctgaggagctgcacaccaacagcgctgagggggagtacagcgccctgtgcagctacctgagcctgcccaccaacctcttcctgctcttccaggagtactgggacacagtgcggcccctgctgcagcgctggtgtgccgaccctgccctgctgaactgcctgaagcagaagaacacagtggtgcgctaccccaggaagaggaacagcctgattgagctgcctgatgactacagctgcctgctgaaccaggccagccacttccgctgccccaggtctgcagatgatgagaggaagcaccctgtgctgtgcctcttctgtggggccatcctgtgcagccagaacatctgctgccaggagatcgtgaatggagaggaggtgggcgcctgcatcttccacgccctgcactgtggggccggcgtgtgcatcttcctgaagatccgggagtgccgggtggtgctggtggagggcaaggcccggggctgtgcctacccagccccctacctggatgaatatggagaaacagaccccggcctgaagaggggcaaccccctgcacctgagccgggagcgctacaggaagctgcacctggtgtggcagcagcactgcatcatcgaggagatcgcccggagccaggagaccaaccagatgctgtttggcttcaactggcagctgctgtag

SEQ ID NO: 251212 - DNA, 2412 bp, Artificial Sequence
  derived and/or modified sequence
atggctgatgaggaggccggcggcacagagaggatggagatctctgctgagctgccccagaccccccagaggctggcctcctggtgggaccagcaggtggacttctacacagccttcctgcaccacctggcccagctggtgcctgagatctactttgctgagatggaccctgacctggagaagcaggaggagagcgtgcagatgagcatcttcacccccctggagtggtacctgtttggagaagatcctgacatctgcctggagaagctgaagcacagcggggccttccagctgtgtggccgggtcttcaagtctggagagaccacctacagctgccgggactgtgccatcgaccccacctgtgtgctgtgcatggactgcttccaggacagcgtgcacaagaaccaccgctacaagatgcacaccagcactggaggcggcttctgtgactgtggggacacagaggcctggaagacaggccccttctgtgtgaaccacgagcccggccgggccggcaccatcaaggagaacagccgctgccccctgaatgaggaggtgattgtgcaggccaggaagatcttccccagcgtcatcaagtatgtggtggagatgaccatctgggaggaggagaaggagctgcccccagagctgcagatccgggagaagaatgaaagatactactgtgtgctcttcaatgatgagcaccacagctatgaccacgtgatctacagcctgcagagggccctggactgtgagctggccgaggcccagctgcacaccacagccatcgacaaggagggccggcgggctgtgaaggccggggcctatgctgcctgccaggaggccaaggaggacatcaagagccacagtgaaaatgtgtcccagcaccccctgcacgtggaggtgctgcacagcgagatcatggcccaccagaagtttgccctgcggctgggctcctggatgaacaagatcatgagctacagcagtgacttccggcagatcttctgccaggcctgcctgcgggaggagccagacagcgagaacccctgcctgatcagccggctgatgctgtgggatgccaagctgtacaagggggccaggaagatcctgcacgagctgatcttcagcagcttcttcatggagatggagtacaagaagctgtttgccatggagtttgtgaagtactacaagcagctgcagaaggagtacatcagtgatgaccatgacaggagcatcagcatcacagccctgtctgtgcagatgttcaccgtgcccaccctggcccggcacctgattgaggagcagaatgtcatcagcgtcatcacagagaccctgctggaggtgctgcctgagtacctggacaggaacaacaagttcaacttccagggctacagccaggacaagctgggccgggtgtatgctgtgatctgtgacctgaagtacatcctgatcagcaagcccaccatctggacagagcggctgaggatgcagttcctggagggcttccgctccttcctgaagatcctgacctgcatgcagggcatggaggagatccggcggcaggtgggccagcacatcgaggtggaccctgactgggaggccgccatcgccatccagatgcagctgaagaacatcctgctgatgttccaggagtggtgtgcctgtgatgaggagctgctgctggtggcctacaaggagtgccacaaggctgtgatgcgctgcagcaccagcttcatcagcagcagcaagacagtggtgcagagctgtggccacagcctggagaccaagagctacagagtgtctgaggacctggtgtccatccacctgcccctgagcaggaccctggccggcctgcacgtgcggctgagccggctgggcgctgtgtcccggctgcacgagtttgtgtcctttgaggacttccaggtggaggtgctggtggagtaccccctgcgctgcctggtgctggtggcccaggtggtggccgagatgtggaggagaaatggcctgagcctcatcagccaggtgttctactaccaggatgtgaagtgccgggaggagatgtatgacaaggacatcatcatgctgcagattggagccagcctgatggaccccaacaagttcctgctgctggtgctgcagagatatgagctggccgaggccttcaacaagaccatcagcaccaaggaccaggacctgatcaagcagtacaacaccctcatcgaggagatgctgcaggtgctgatctacatcgtgggggagagatatgtgcctggggtgggcaatgtgaccaaggaggaggtgaccatgagggagatcatccacctgctgtgcatcgagcccatgccccacagcgccatcgccaagaacctgcctgaaaatgagacccgctgcatccggccctggagcctgtag

SEQ ID NO: 251213 - DNA, 3042 bp, Artificial Sequence
  derived and/or modified sequence
atggctgatgaggaggccggcggcacagagaggatggagatctctgctgagctgccccagaccccccagaggctggcctcctggtgggaccagcaggtggacttctacacagccttcctgcaccacctggcccagctggtgcctgagatctactttgctgagatggaccctgacctggagaagcaggaggagagcgtgcagatgagcatcttcacccccctggagtggtacctgtttggagaagatcctgacatctgcctggagaagctgaagcacagcggggccttccagctgtgtggccgggtcttcaagtctggagagaccacctacagctgccgggactgtgccatcgaccccacctgtgtgctgtgcatggactgcttccaggacagcgtgcacaagaaccaccgctacaagatgcacaccagcactggaggcggcttctgtgactgtggggacacagaggcctggaagacaggccccttctgtgtgaaccacgagcccggccgggccggcaccatcaaggagaacagccgctgccccctgaatgaggaggtgattgtgcaggccaggaagatcttccccagcgtcatcaagtatgtggtggagatgaccatctgggaggaggagaaggagctgcccccagagctgcagatccgggagaagaatgaaagatactactgtgtgctcttcaatgatgagcaccacagctatgaccacgtgatctacagcctgcagagggccctggactgtgagctggccgaggcccagctgcacaccacagccatcgacaaggagggccggcgggctgtgaaggccggggcctatgctgcctgccaggaggccaaggaggacatcaagagccacagtgaaaatgtgtcccagcaccccctgcacgtggaggtgctgcacagcgagatcatggcccaccagaagtttgccctgcggctgggctcctggatgaacaagatcatgagctacagcagtgacttccggcagatcttctgccaggcctgcctgcgggaggagccagacagcgagaacccctgcctgatcagccggctgatgctgtgggatgccaagctgtacaagggggccaggaagatcctgcacgagctgatcttcagcagcttcttcatggagatggagtacaagaagctgtttgccatggagtttgtgaagtactacaagcagctgcagaaggagtacatcagtgatgaccatgacaggagcatcagcatcacagccctgtctgtgcagatgttcaccgtgcccaccctggcccggcacctgattgaggagcagaatgtcatcagcgtcatcacagagaccctgctggaggtgctgcctgagtacctggacaggaacaacaagttcaacttccagggctacagccaggacaagctgggccgggtgtatgctgtgatctgtgacctgaagtacatcctgatcagcaagcccaccatctggacagagcggctgaggatgcagttcctggagggcttccgctccttcctgaagatcctgacctgcatgcagggcatggaggagatccggcggcaggtgggccagcacatcgaggtggaccctgactgggaggccgccatcgccatccagatgcagctgaagaacatcctgctgatgttccaggagtggtgtgcctgtgatgaggagctgctgctggtggcctacaaggagtgccacaaggctgtgatgcgctgcagcaccagcttcatcagcagcagcaagacagtggtgcagagctgtggccacagcctggagaccaagagctacagagtgtctgaggacctggtgtccatccacctgcccctgagcaggaccctggccggcctgcacgtgcggctgagccggctgggcgctgtgtcccggctgcacgagtttgtgtcctttgaggacttccaggtggaggtgctggtggagtaccccctgcgctgcctggtgctggtggcccaggtggtggccgagatgtggaggagaaatggcctgagcctcatcagccaggtgttctactaccaggatgtgaagtgccgggaggagatgtatgacaaggacatcatcatgctgcagattggagccagcctgatggaccccaacaagttcctgctgctggtgctgcagagatatgagctggccgaggccttcaacaagaccatcagcaccaaggaccaggacctgatcaagcagtacaacaccctcatcgaggagatgctgcaggtgctgatctacatcgtgggggagagatatgtgcctggggtgggcaatgtgaccaaggaggaggtgaccatgagggagatcatccacctgctgtgcatcgagcccatgccccacagcgccatcgccaagaacctgcctgaaaatgaaaataatgagaccggcctggagaatgtcatcaacaaggtggccaccttcaagaagccaggagtgtctggccacggcgtgtatgagctgaaggatgagagcctgaaggacttcaacatgtacttctaccactacagcaagacccagcacagcaaggccgagcacatgcagaagaagaggaggaagcaggagaacaaggatgaggccctgcccccacctcctcctcctgagttctgcccagccttcagcaaggtgatcaacctgctgaactgtgacatcatgatgtacatcctgaggacagtgtttgagcgggccatcgacacagacagcaacctgtggacagagggcatgctgcagatggccttccacatcctggccctgggcctgctggaggagaagcagcagctgcagaaggcccctgaggaggaggtgacctttgacttctaccacaaggccagccggctgggcagcagcgccatgaacatccagatgctgctggagaagctgaagggcatcccccagctggagggccagaaggacatgatcacctggatcctgcagatgtttgacacagtgaagaggctgcgggagaagagctgcctgattgtggccaccaccagcggcagcgagagcatcaagaatgatgagatcctgcaccactag

SEQ ID NO: 251214 - DNA, 5250 bp, Artificial Sequence
  derived and/or modified sequence
atggccgacgaggaggccggcggcaccgagcggatggagatcagcgctgaactgccgcagaccccacagagacttgcctcctggtgggaccaacaggttgacttttacacagccttcctgcaccatctggcccaactcgtcccggagatatattttgccgagatggacccagatctggaaaagcaagaggagtcagtacaaatgagcatcttcacccccttagagtggtatctatttggggaagacccagacatctgtcttgagaaactgaaacactctggagccttccagctctgcggccgggtgttcaaatcaggcgagacaacgtattcctgccgtgattgtgccatcgacccgacatgtgtcctgtgtatggattgcttccaagatagtgtccacaagaatcatcgctacaaaatgcacactagcacggggggggggttttgcgactgtggggatacagaagcctggaagaccggccccttttgcgtcaatcacgagccaggccgggctggaacgatcaaggaaaacagcagatgccccctgaacgaagaagtgatcgtgcaggcccggaagatcttcccctctgtcattaagtacgttgtggagatgacaatctgggaagaggagaaggaactgccaccagaacttcagatccgagagaagaacgaaaggtactactgcgtgctctttaatgatgagcaccacagttacgaccacgttatttacagcctgcaaagagctctggactgtgagcttgcagaggcgcagctgcacaccacggcaattgacaaggagggtcgtcgcgcagtcaaggcgggcgcctacgcagcatgccaagaggccaaagaggacatcaaaagccactcagaaaacgtcagtcagcacccacttcatgtagaggtactgcacagtgagatcatggcacatcaaaagtttgctctacgactgggcagttggatgaacaagataatgagttacagcagcgatttccgtcagatcttttgtcaggcctgtcttagagaggagcccgactcggagaacccctgcctcatatcgcgcctgatgctctgggatgcaaaactgtacaagggcgcaaggaagatcctacacgagttaatcttttcttctttcttcatggagatggagtacaagaagctgtttgccatggaattcgtgaaatactacaagcagctccaaaaagagtacatctctgatgatcacgatcgctccatctcaatcacagccctgagcgttcagatgttcaccgtcccgactctcgcaagacacctaattgaagagcagaacgtcatcagcgtaataaccgaaacattacttgaagtgctccctgagtatctggatcgcaacaacaagttcaattttcagggatattcccaagataagctgggcagagtgtatgccgtaatttgtgacttgaagtatatcctgatttcgaagccaaccatttggacagagagactacggatgcagttcctcgagggattccggagttttctgaaaatcttgacatgcatgcagggcatggaggagataaggaggcaggtcggtcaacatattgaggtcgacccagactgggaagcggccatcgcaatccagatgcagctgaaaaacattttacttatgttccaggaatggtgtgcttgcgatgaagaactgcttttagttgcctacaaggagtgccataaggctgtgatgcgatgctcaacatcttttattagtagtagtaaaaccgtcgtacaatcttgcggacattcacttgaaaccaaaagctatcgagtctctgaagatctggtttccattcatctgccactgtcacggactctcgcaggattgcacgttcgtttatccaggctgggtgcagtttcacgcctgcacgaattcgtgagctttgaagactttcaagttgaggtactggtcgagtaccctttgagatgcctggtgttagttgcacaggtggtcgctgagatgtggcgacggaatggcctgtcactaatatcccaggtgttctactaccaagatgtgaaatgcagggaagaaatgtacgataaggacattataatgctccagatcggcgcttcccttatggaccccaacaaatttctactgctggtccttcagcggtatgagctcgcagaggcatttaacaagaccataagcacaaaggatcaggatctcataaaacagtacaacaccctgatcgaagagatgctgcaggtgctcatttatatcgtcggagaaaggtacgtgcctggcgtgggcaatgtaacgaaggaggaggtcaccatgcgagaaatcatccatcttttgtgtatcgagcctatgcctcacagcgccattgctaaaaacctaccagaaaacgagaataacgagactggcctggaaaatgtgataaacaaagtggccacgttcaagaagccgggggttagtggccatggtgtctatgaattgaaggatgaatccctgaaggacttcaatatgtatttttatcattactccaagacccagcattctaaagccgagcatatgcaaaagaaacgaaggaagcaggaaaataaggacgaagcattgccacctccaccacctcccgagttttgccctgcctttagcaaggtgatcaacctgctgaactgcgatattatgatgtatatcctgagaacagtattcgaacgtgcaatcgacacagactccaatctgtggaccgagggaatgctgcaaatggccttccatatcttagcgctggggctgctcgaggaaaaacagcagctacagaaggcccccgaggaggaagtgacctttgatttctatcacaaggcctctcgacttggatcctcagctatgaatattcagatgctcctagaaaaactaaagggcatccctcagctggaaggccagaaagatatgattacttggattctgcagatgttcgatacagtgaagcgtctacgggaaaaaagctgcttgatcgtcgcaaccaccagcggctcggagagcatcaaaaacgatgaaattactcacgataaagagaaggctgagagaaagcgtaaagcggaggccgcccggttgcaccgccagaaaattatggcccaaatgagcgccctacagaagaatttcattgagacccacaaactcatgtatgataatacatcagagatgcctggaaaggaggattcaatcatggaggaggaatccacccctgccgtttccgattactctcgtattgcacttggtccaaagcgcgggccgtcagttaccgaaaaggaagttctgacatgtattctttgccaagaggagcaggaggttaagatcgagaacaacgccatggtcttgtcggcttgcgtccaaaaatctacagccctgactcagcacaggggcaagccaatcgagctcagcggtgaggcattggatcccctctttatggaccccgacctggcctatggaacctatacaggatcctgcggacatgtaatgcacgctgtgtgctggcagaaatactttgaggccgtgcagctgtcatcccagcaacgaattcacgtggacctgttcgacttagagagcggcgaatatctgtgcccactgtgtaagagtctctgtaacactgtgatccccataattccactccagccccagaaaattaactcagagaatgccgacgcactggcacagctgctaactttagctcgatggatccagaccgttttagccagaatctctggctataacattcgtcacgctaaaggagagaatcctatccccattttctttaaccagggaatgggtgattcgactctggagttccactctatcctgagcttcggcgtggaatcaagcattaaatattcgaattctatcaaagaaatggtgatcctcttcgctacgaccatctaccggatcggcttgaaagtgccccccgatgagagagatccgagagtgcccatgttaacctggagtacatgcgctttcaccattcaagccattgagaatctgcttggagatgagggtaagcctctgttcggagcccttcagaatcgccagcataacggcctgaaggcactcatgcagttcgccgtggcacagagaatcacttgcccccaagtgcttattcaaaagcatctcgtgagacttctgtctgtcgtactgccaaacatcaaatctgaggacacgccatgcctgctgagtatcgacctttttcacgtgctcgtgggcgccgtattagcattcccttccctgtactgggatgacccggtggacctgcagccatcctcagtgagtagcagctacaaccacctctacctttttcatctgattacaatggcccatatgctacagattctgttgacagtggacactggactgcccttagctcaggtgcaggaagactcagaggaagcacacagcgcctccagcttttttgcagagatctctcagtatactagtggatccattgggtgcgatatccctggctggtacctgtgggtgagtctcaaaaacggcatcactccttatctaagatgtgccgctctcttctttcactacctcttgggtgtgactcctcctgaggaattgcatacaaatagcgccgagggtgaatactctgccctgtgctcatacttaagcctccccaccaatctgttcctcctattccaagaatactgggatacagtacgtccgctactgcaaagatggtgtgccgaccccgccctgctgaattgcctcaagcaaaagaacaccgtggtccgctacccccgtaaaaggaactcattaattgagctgccagacgattattcctgcctgttaaatcaagcaagtcacttccggtgccctcgctccgccgacgatgagcgcaagcaccccgtactctgcctgttctgcggagctattctctgtagtcagaacatctgttgccaggagatagtgaacggagaagaggttggggcgtgtattttccacgcgctgcattgtggagctggagtttgtatcttcctgaagatcagggagtgtagagtggtgcttgtggagggtaaagcgcgcggatgtgcttacccagccccctatctggacgagtatggtgagacagacccaggactgaagcgggggaaccccctgcacttatcacgggaaaggtaccgcaagcttcatctcgtgtggcagcagcactgcatcatcgaagaaattgcaagaagtcaggagaccaaccagatgctgtttggattcaattggcagctgctgtag

SEQ ID NO: 251215 - DNA, 2412 bp, Artificial Sequence
  derived and/or modified sequence
atggccgacgaggaggccggcggcaccgagcggatggagatcagcgctgagttgcctcagacgccgcagagacttgcgtcttggtgggaccagcaggtggatttttatacagctttccttcatcatctcgcccagcttgtgccagagatatacttcgccgagatggacccagacctggagaagcaggaggagagcgttcagatgagtatatttactccgctcgaatggtatttgtttggcgaggaccctgacatttgcctggagaagcttaagcattctggagcgttccaactgtgcggccgggtattcaagagtggcgaaacgacttacagctgtcgcgactgtgcaatcgacccaacctgcgtgctatgtatggactgtttccaggacagtgtgcacaaaaatcaccgatacaaaatgcatacgagtacagggggtggtttttgcgactgcggagatacagaagcatggaaaacaggacctttttgtgtgaatcacgagccaggtcgcgcgggaaccattaaagagaacagccgctgccctctgaacgaagaggtgatagtacaggctaggaaaattttcccttcagtgatcaagtatgtagtggaaatgaccatttgggaggaggaaaaggaacttccccctgagcttcagattcgcgagaaaaacgagagatactactgcgtattgtttaacgatgagcatcattcctatgaccatgttatctattccctgcagcgcgccttagactgcgaactggccgaggcccagctgcacacgacagcaatagacaaagaaggcaggagggctgttaaggcaggggcctatgcggcatgccaagaagctaaggaagatatcaagtcccatagcgaaaacgtctcccagcacccactacacgtagaggtcctgcactcagagatcatggctcaccagaaattcgcattacgtctaggctcctggatgaacaagattatgtcatattccagcgattttagacagatcttttgccaggcctgtctccgtgaggagcctgactcagagaacccctgcctgatctctcggttgatgctgtgggatgccaagctgtacaaaggtgcgcggaagattctgcacgaactaatcttcagcagctttttcatggagatggagtataaaaagctgtttgcgatggaattcgtgaagtactataaacagcttcaaaaagagtatatatcagacgaccatgatcgctccatatcaattacagcactgtccgtgcagatgttcactgtgccaacacttgcgcggcacttaatcgaagaacagaacgtgatcagtgtcatcacagaaacgctgctggaggtgctgcccgagtatttggataggaataataagttcaattttcaggggtattcccaagacaaactgggccgggtgtatgcagttatatgtgacctcaagtacattctaattagcaaaccaactatttggactgagaggctcaggatgcagttcctagaggggtttagatcattcctcaaaatcctaacgtgtatgcagggaatggaagagataaggcgacaagttgggcagcacattgaggttgaccctgattgggaggcagccattgctattcagatgcaactgaagaatattttgttaatgttccaggagtggtgcgcgtgtgacgaggagcttctcctggtcgcctacaaagagtgtcataaggccgtgatgcgctgcagcacctcattcatatcctctagcaagactgtggtccaaagctgcgggcactctctagagaccaaaagttatcgggtcagcgaggatcttgttagtattcatctgcccctgtcccgtactttggccggcctccacgtgaggttgagtagactaggggcagtatcacggctgcatgagttcgtctcctttgaagactttcaggtagaagtcttggtggagtatcctctccgctgcttggtgttagtggcccaagtcgtagctgagatgtggcggcgcaatggcctatcgttaatcagccaggtgttttattatcaggatgtgaagtgcagggaagaaatgtatgataaggacattattatgctgcagatcggagcttctctgatggaccctaataaattcctcctccttgtgttgcaaaggtatgagcttgcagaggccttcaataagacgataagcacaaaagaccaagaccttataaaacaatacaataccctgatcgaggaaatgcttcaggtgcttatctatatagtgggcgaacgctacgtccccggcgtgggtaatgtgacaaaggaagaagtgacaatgcgggagatcattcatctgctgtgcattgaacctatgccccattcagccattgcgaagaatctccccgagaatgagacacgctgtatcaggccctggtctctgtag

SEQ ID NO: 251216 - DNA, 3042 bp, Artificial Sequence
  derived and/or modified sequence
atggccgacgaggaggccggcggcaccgagcggatggagatcagcgctgagctgccccagactccccagaggttagcttcctggtgggatcagcaggtagacttctatacagcgttccttcaccaccttgcccagctggtccccgagatctatttcgcagagatggatccagatctggagaagcaagaggaatcagtgcagatgtccatttttactcccctggaatggtacctcttcggggaagaccccgacatctgcctggagaagctgaaacattctggagccttccaactctgcgggagggtgtttaaatccggtgagacgacctattcatgcagggactgcgccatcgatccaacctgcgtcctatgtatggactgtttccaagatagtgtacacaaaaatcaccgatataagatgcacacatcgacaggtggcgggttctgtgattgcggcgataccgaggcgtggaagacgggacctttctgcgttaaccacgaacctgggcgagcaggtacaatcaaggagaacagtcgctgccctctaaacgaagaggtgattgttcaggctaggaagattttcccttctgtgatcaaatatgtggtggagatgaccatatgggaagaggagaaagaattacccccagagctgcagattcgggagaaaaacgaaaggtactattgcgttctgtttaatgatgagcatcattcttacgaccatgtgatctattcactccagcgcgcactggactgtgaattggccgaggcgcagctgcacacaacggctatcgacaaagagggtaggcgtgccgtcaaggcaggggcctatgcggcctgccaggaagccaaagaggatattaaatcacattctgaaaacgtcagccagcacccgttgcacgttgaggtgctgcatagcgaaattatggcccatcagaaattcgctctgcggctcggaagttggatgaataaaatcatgtcatattcttccgatttccgccagatattctgtcaggcctgcctccgggaggaacctgatagcgaaaacccctgcctcatcagcagactgatgctctgggatgccaagctgtacaaaggcgccaggaaaatcctgcatgagttaattttttcttccttcttcatggaaatggaatacaagaagctattcgctatggagtttgtgaagtactataagcagctgcagaaagagtatattagcgacgaccacgatcgatctattagcatcacagctctgtcggtacagatgtttaccgtacccacactggccagacacctcattgaggagcagaacgtcatctccgtgatcacagagacattgctggaagtcttgccagagtatctggataggaataataagttcaactttcagggttatagtcaggataaactgggaagagtttatgctgtcatatgcgatctgaagtacattctgatctctaaaccaactatatggaccgagaggctccgaatgcagttcctggagggttttcggagctttctgaagattctgacgtgtatgcagggtatggaagagattagacggcaggtcggacagcacatcgaagtggatccagactgggaggcggccatcgctatccagatgcagctgaagaacattctgctgatgttccaggaatggtgcgcctgtgacgaggaattgctgctcgttgcatataaggagtgtcacaaagctgtgatgcgctgtagtacctcttttatcagctcctcgaaaaccgtcgtacagtcttgtggacatagtttagagacgaaaagctatcgcgtgtccgaagatctcgtttccatccacctgccattgtccaggacactggcagggcttcacgtcagattgtctcgactcggtgcagtgtcaagactccatgagttcgtgagttttgaggactttcaggtagaagtgctggtggagtacccacttcgctgtctcgtgcttgtggcccaggtcgtcgccgaaatgtggcgccgtaacggactgtcgctgatctctcaggtgttctactaccaagatgttaagtgtcgagaagagatgtatgacaaagacattataatgctccagatcggcgcaagtctgatggaccccaacaaatttttacttcttgtgcttcagaggtatgaactcgctgaggctttcaacaaaaccatctccaccaaggatcaggaccttatcaaacagtataatacgcttattgaggaaatgctccaggtgttgatttacatcgtcggggagaggtatgtaccaggagttggcaatgtgaccaaggaagaggtaaccatgagagagattatacatctgctgtgtattgagccaatgccacattccgctattgccaagaatttgcccgagaatgagaataacgaaacaggtctcgagaacgtaatcaataaggtggccaccttcaagaagccaggcgtgagcggccacggtgtgtacgagctcaaagacgagagtctgaaggattttaacatgtacttctaccattatagcaagacccagcactcaaaggcggagcacatgcagaagaagaggcgaaaacaagagaataaggacgaggctctgccaccccccccacccccggaattttgcccagcttttagtaaggtgataaacttgctcaattgtgatattatgatgtatatactgcgcacagttttcgagcgcgcaatagataccgacagcaacctctggacagagggtatgctccagatggcatttcatattctcgctttagggttactcgaagagaaacaacagctgcagaaagctcccgaggaggaggttacctttgatttctaccataaagcgtcccgactgggcagctctgccatgaacattcaaatgctcctcgaaaagctgaaggggataccgcagctcgagggccagaaagatatgattacttggatcttgcagatgttcgatacggtgaagcggcttagagagaagtcatgtttgatagtcgcaacgacatccggctcggaatccattaaaaatgacgagattttacaccattag

SEQ ID NO: 251217 - DNA, 5250 bp, Artificial Sequence
  derived and/or modified sequence
atggccgatgaggaggctggcggaacagagagaatggaaatctctgcggaactgccacagacaccccaacgtctagcctcctggtgggaccagcaggtggacttctacacagcatttttgcatcaccttgcacagctggtccccgaaatctacttcgcagagatggatcctgatctggagaagcaggaggaatctgtacagatgagcatctttacgccgttggaatggtacttgttcggtgaggatcccgatatttgcctggaaaagctcaagcattccggagctttccagctctgtgggcgagtgttcaagtctggtgagactacctatagctgcagagactgtgcaatcgaccctacatgcgtgttgtgcatggattgtttccaagacagcgtgcataaaaaccacagatataagatgcacactagcactgggggaggcttttgcgattgcggagataccgaagcgtggaaaacaggacccttttgcgtgaatcatgagccaggtagagctggcacaattaaggaaaactcaaggtgccctctaaacgaggaggtaatcgtgcaggccaggaagatcttcccaagcgttataaagtatgtggtggagatgacaatctgggaagaagagaaggaactgccacctgagcttcaaataagagaaaaaaatgagagatactactgcgtgctttttaatgatgaacaccattcatacgatcacgtcatttactctttgcagcgggctctggactgtgagttggcagaggcgcaactgcacacaaccgctatagataaagagggacgccgagctgtcaaagcaggtgcatatgcagcctgccaagaagcaaaagaggatatcaaatctcacagcgaaaatgttagccagcaccctctacatgttgaagtgttgcatagcgagattatggcccaccaaaagtttgctcttaggttaggttcttggatgaacaagatcatgtcttattcttccgatttccgacagatcttctgccaggcatgcctgagggaagaaccggattctgagaatccctgtctcatcagccgcctaatgctgtgggatgctaagttgtataaaggagcacgcaaaatcctgcacgaactgatattttccagtttcttcatggagatggagtacaaaaagctcttcgcgatggaattcgtcaagtactataagcagttacagaaggagtacatatctgatgaccatgatcgcagcatcagcatcaccgcgttgtcagtgcagatgtttactgttcccacgctggcaaggcacctaattgaggaacagaatgtcatctctgtgattacagagacactcctagaggtgctacccgagtatctggatcgcaacaataaattcaatttccagggatatagtcaggataagctgggcagagtttacgccgtgatctgtgacttaaagtacatcctgatctcgaagcccaccatctggaccgagagactgcggatgcagttcttggagggtttcagatccttccttaagatcctgacatgtatgcagggaatggaggaaattaggcgtcaggttgggcagcatattgaggtcgatcccgactgggaggcagccatcgctatccaaatgcaactaaaaaatatcttactcatgttccaggaatggtgtgcttgtgatgaagagctgctcctggtcgcatacaaagaatgtcataaagccgtgatgcggtgctcaactagctttatctcgtcatccaagactgttgtgcagtcctgcggacatagcttagagacaaaatcttacagagtttccgaggatctcgtttccatccacctcccccttagcaggacactggcgggactgcacgtgagattatcaaggctcggggctgtgtctcgactgcacgaatttgttagtttcgaagatttccaggtggaggtgctggtcgaatacccactgcgttgtttggtgctggtggctcaagtcgtagccgagatgtggaggcgcaacggactgtctctgatttctcaggtgttctactatcaggatgttaagtgtagagaggaaatgtacgacaaggacattataatgctgcagattggcgcttccctgatggatcctaataaattcctgctgctcgttctacagcggtatgagctggctgaggcatttaataagacaatcagcaccaaagaccaggatctaattaagcagtataatactcttatagaagagatgctccaagttttaatctacatagtcggcgaacgttacgtaccaggggttggaaatgtgacgaaagaggaagttaccatgcgcgaaattatacatctcttatgtatcgaacctatgccacacagcgctatcgctaaaaatctccccgagaatgagaataacgagaccgggctcgaaaacgtgatcaataaggtggcaaccttcaaaaaaccaggcgtgagcggacatggtgtttatgagttaaaagacgaatccttgaaggactttaacatgtatttctatcactactcaaagacccagcactcaaaagccgaacacatgcagaagaagagacggaagcaagagaacaaggacgaggcgcttcccccaccgcctcccccagaattctgcccagctttctcaaaggttataaacctcctcaattgcgacattatgatgtatattctgcggaccgtattcgaaagagcaattgatacagactccaatctgtggaccgaaggcatgctccagatggctttccatattcttgccttggggctgctggaggaaaaacagcaactgcagaaagcacctgaggaggaggtcaccttcgacttttaccacaaagcctcacgtctgggatcgtccgccatgaacatccagatgctcctggagaagctgaagggcataccccagctcgaaggccaaaaagacatgatcacatggatacttcagatgtttgacactgtgaaaagactgcgcgaaaagtcttgccttatcgtcgctacaacaagcgggtcagagtccattaagaatgatgagatcacccacgataaggagaaggccgaaaggaagcggaaggccgaggctgctcggttgcatcgacaaaagatcatggcccaaatgtccgccctgcaaaaaaacttcattgagactcacaaactgatgtacgacaacacatccgaaatgcccggtaaagaagacagcatcatggaggaggaaagcacacccgctgtgtccgattacagtagaatagcgctgggaccaaaaagaggcccttccgtaacagagaaggaagtcttgacatgtatcctgtgccaggaagagcaggaagtgaagattgagaataatgcaatggttttgtccgcttgcgtgcagaagtctacggctttgacccagcatcgcggaaaacccatcgagctgtccggggaagcattagaccctctgttcatggatcctgacctggcctatggcacgtatactggctcctgcgggcacgtgatgcatgccgtctgctggcagaaatattttgaggctgttcaactcagttcacaacagcggatccacgtggatttgtttgacctggagtctggggagtatctttgtccattatgtaaatccctgtgtaataccgtcatccctattattcccctccagccccagaagattaattcggagaacgctgacgccctggcccagctgctcactctcgcgcgatggatccagactgtactcgccagaatatcaggatacaacatcagacacgcgaaaggagagaaccctattccgatattcttcaatcagggaatgggcgattcaaccctggagttccactctatcctctccttcggcgtggagtcaagtataaagtatagcaattccatcaaggaaatggtgatattgttcgctaccaccatatacaggatcgggcttaaagtgccgccagacgaaagagaccccagagttccaatgctcacatggagtacctgcgctttcaccattcaggccatcgagaacctgctaggggatgaaggcaagcccctgttcggggctctccagaatagacagcacaacggactgaaggcactgatgcagtttgcagtggcacagcgaataacatgtccacaagtgttgatacagaagcaccttgtccgattgctgagcgttgttctccctaatatcaaatctgaagacacaccttgcctcctgagcattgacctgttccacgttctcgtcggagccgttctggctttccctagcttgtactgggacgatccagttgacctacagccttcttcagtgagcagttcatataaccatctatatctgttccatctgattaccatggctcatatgctgcaaattttgctgaccgtagataccgggctccccttagcacaggttcaggaggactcggaagaggcccatagcgccagttctttctttgcagaaatttcccaatacacatctggaagtataggttgcgacatcccaggatggtacctctgggtgagtctgaagaacggcatcacaccctatcttcgctgcgcggctctgttttttcactacttgctgggagtgaccccccctgaggagttacacacaaattcagctgagggggaatattccgctctttgctcctacctgtccttgcctacaaacctcttcctgctcttccaggagtattgggatacagtccggccacttctacagcggtggtgcgctgatccggctttgctgaattgtctaaaacaaaaaaatacggtggtccggtatccacggaaaaggaactcgttgattgaactgcccgacgactacagctgcctgctgaatcaggcctcccactttcgatgcccccgatcagccgatgatgagagaaagcatcctgtgctttgtctgttctgcggcgctatcctgtgctctcagaacatttgttgccaagagattgtcaacggcgaagaggttggtgcatgtattttccacgcactgcactgtggtgcgggagtgtgtatctttctgaagatacgtgagtgtcgcgttgtactggtggaagggaaggcacggggttgcgcctaccctgctccttacctggatgaatacggcgagactgacccgggactcaagagaggtaaccctttgcacctgagtagggaaaggtacaggaaactgcatctcgtgtggcagcagcattgtatcattgaagagatcgcaagaagccaggaaacaaaccagatgctgttcgggttcaactggcaactcctttar

SEQ ID NO: 251218 - DNA, 2412 bp, Artificial Sequence
  derived and/or modified sequence
atggctgacgaggaggccggtggcacggagcgcatggaaatcagtgcggagctgccacaaacacctcagcgcttagctagttggtgggaccagcaagttgacttctatacagccttcttacaccatctcgcacagctagtacctgaaatctatttcgcggaaatggatcctgacctggaaaaacaggaagagagcgtccagatgtccatctttactcctctggaatggtacttattcggagaggatccagatatctgtctggagaaactcaaacattctggcgctttccagctttgcgggcgagttttcaaatctggggaaaccacatacagctgtagagattgcgccatcgacccgacctgcgtcttgtgtatggactgcttccaagacagcgtacacaagaatcacaggtacaaaatgcacacttcaaccggtgggggtttctgtgactgcggtgacactgaggcttggaaaacgggtcctttctgcgtgaaccacgagccaggacgtgccggaaccataaaggaaaacagtaggtgccccttgaatgaagaggtgatcgttcaggctcggaaaatctttcctagtgtgattaaatacgtcgttgagatgaccatttgggaggaagaaaaggagctcccccctgagctgcagatcagagaaaagaatgagaggtattactgcgtgctgtttaatgatgaacaccactcttatgaccatgtgatctacagcctgcaaagggccttggattgtgaactcgcagaggcacagctacacactacagcaatcgacaaggaggggaggagagccgtgaaagcgggagcttacgccgcttgccaagaggctaaagaggatataaaatcacactcggagaatgtatcacaacacccacttcatgtggaggtcctgcactcagagatcatggcccaccagaagtttgctctgaggctcgggtcttggatgaataaaatcatgagctattcttccgacttcaggcaaatcttttgccaggcatgtctgcgcgaagagccagactccgagaacccatgtctcatttcacgccttatgctgtgggacgccaaattatataagggagctcggaagatacttcacgagctgattttttccagttttttcatggagatggagtataagaagctgtttgcaatggagtttgtaaagtattacaagcagttgcagaaagagtacatctctgacgatcatgaccgcagcatttctattaccgctctgagcgtgcagatgttcacggtcccgactctcgcacggcatctcatcgaggaacagaatgtgataagcgtaatcactgaaaccctactcgaagttttgcctgagtatttggacagaaacaacaagtttaactttcaggggtattcccaagacaaattagggagggtgtacgccgtgatctgtgacctcaagtacatcctgatctcgaagcccactatctggaccgagaggctgcgcatgcaatttctcgagggattcaggagcttcttgaaaattttaacgtgtatgcagggtatggaggagatcagaagacaggttggccagcacatcgaagtcgatcccgactgggaagctgccatagccatacagatgcagcttaagaatattcttctcatgttccaggagtggtgcgcatgcgatgaggagcttctgctcgtagcgtacaaagagtgccataaagctgtgatgcgttgcagtaccagcttcatttcctctagcaaaactgtggtccagagctgcggccatagcctcgagacaaagagttatcgtgtctccgaggacctggtttccatccacttacccctgtcacgtactctagctgggttgcacgtgcgcttatccaggctcggcgcagtcagtcgtttacatgaattcgttagctttgaggactttcaggtcgaggtactggttgaatatcccctgcgatgtctggtccttgttgctcaggttgttgcagagatgtggcgccgaaatggattgagtctcatcagtcaagtgttttattatcaggacgtcaagtgccgagaagagatgtatgacaaggatatcataatgctccagatcggagcctctctgatggacccaaacaaattcctgctactggtcctccagagatacgaattggctgaagcctttaacaagaccatttccaccaaggaccaagacttgatcaaacagtataatactctcatcgaggaaatgctgcaagtactcatttacatcgtgggtgaaaggtatgtgccgggtgtgggaaacgtgaccaaagaagaggtaactatgagggagattatccatcttctgtgcattgagcccatgcctcatagcgcgatcgcaaaaaacctgcctgagaacgaaactagatgcatacggccatggtcgctgtag

SEQ ID NO: 251219 - DNA, 3042 bp, Artificial Sequence
  derived and/or modified sequence
atggccgacgaagaggctggcggtaccgagagaatggagatatctgcagagctgcctcagacacctcagagactggcctcctggtgggaccagcaggtggacttttatactgcattcttgcaccacctagcacagctggtgccggaaatctatttcgccgaaatggaccccgaccttgaaaagcaggaggagagcgttcagatgagtatttttacccccctggagtggtatcttttcggggaggatcccgacatttgcctggagaagctgaagcattctggagctttccagctgtgcggacgagtcttcaaaagtggggagactacttattcctgcagggactgtgctatcgaccccacctgtgtgctgtgcatggattgcttccaagattcagtacacaagaatcacaggtacaagatgcacacttccactggaggagggttctgcgattgcggggacactgaagcttggaaaaccggacctttttgcgtcaatcatgagcctgggagggctggcacaatcaaagagaactctaggtgccctctcaatgaagaggtcatcgtgcaggctcggaagatctttcccagcgtgattaaatacgtcgtggagatgaccatctgggaggaggagaaagaactaccccctgagttacagatccgggagaaaaacgaaaggtattactgcgtgctcttcaacgacgaacatcatagctatgaccacgtgatttactccctgcagcgagcactcgactgtgaactggcagaggcacagctgcatacaactgcaatcgacaaagagggccgtcgcgctgtcaaagcaggagcatacgcagcatgccaggaggccaaggaggacattaagtcacattccgagaacgtgtctcaacatcctctgcatgttgaagtcttacacagcgaaataatggcccaccagaagttcgcactccggctaggatcgtggatgaacaaaatcatgagttattcctccgacttccggcaaattttttgccaggcatgtctgagggaagagccagattccgagaacccttgtctgatctcaagactgatgctgtgggacgcaaaattatacaagggagcccgaaaaatcctccatgaactgatctttagcagcttctttatggagatggagtataaaaagttattcgctatggaattcgtgaagtactacaagcagttacagaaggagtatatttccgatgaccatgatcgatcaatcagtataacagccctcagcgtacagatgtttacagtcccgacactagctcggcacctgatcgaggaacagaacgtgatctcagtgatcactgaaacccttctggaagtactgcccgagtaccttgatcgaaacaacaaattcaatttccaaggctactcacaggacaagctcggaagagtatatgccgtcatctgtgatttgaaatacattttgatcagcaagcccacaatctggaccgagcggctcaggatgcagtttctcgagggctttaggtctttcctgaaaatattgacttgtatgcaaggaatggaggagatccggcgacaagtcggtcagcacatcgaggttgaccccgactgggaggctgcaatcgccatacagatgcaacttaaaaatatacttctgatgttccaggagtggtgtgcgtgcgatgaggagcttctgctggtggcttataaggagtgtcataaggctgtgatgcgctgctccacaagcttcattagctcttcaaagaccgtcgtacagtcatgcgggcacagccttgagacgaagagctaccgcgtgtctgaggacctggtatcgatccatttaccactcagccggaccctggccggtctgcacgtgcggctgagtcggctcggcgctgtctctcgcctgcatgagtttgtatcctttgaagatttccaggtagaagtactagtggaatatccactgagatgtctggtgctcgtggcacaggtcgtggccgagatgtggaggcggaatgggttgtcgctgatcagccaggtattctactatcaggacgtgaagtgccgagaagagatgtatgataaagatatcatcatgctccagattggggctagtttaatggaccctaataagttcctgctcttggtcctgcagcgatacgagctggctgaagcttttaacaaaactatctctactaaagatcaggatctgatcaagcagtacaacaccctgatcgaggaaatgttgcaggtcctcatttatatagtgggtgaacggtatgttcctggcgtggggaacgttaccaaggaggaagtcactatgagagagattattcacctgctgtgcatcgagccgatgcctcactccgccattgccaaaaatctgcctgaaaatgagaacaatgaaacaggcctggagaacgtgataaataaagtcgctaccttcaagaaacctggcgtatccgggcacggtgtttacgaattgaaggacgaatctttgaaggactttaatatgtatttttatcattatagcaagacccagcactctaaggccgaacatatgcagaagaaaagacggaagcaggaaaataaagatgaagctctgcccccacccccaccacccgagttctgccctgccttcagcaaggtgatcaacctgctaaattgcgatatcatgatgtatattttaagaacagtgtttgagagggcaatcgacaccgattcaaacttatggaccgaaggcatgctgcagatggcgtttcatattctggcactagggcttctggaggaaaaacagcagctacaaaaggccccagaagaggaggtgacctttgatttctatcataaggcctccaggttgggatcatctgcaatgaacatccaaatgctgctggagaaattaaaaggaatccctcagttagaagggcaaaaagacatgattacctggatcctccagatgttcgacacagtgaagaggttacgtgaaaagtcatgtctcattgtggcaacaacaagcggatctgagagcattaagaatgacgagatcctgcatcactag

SEQ ID NO: 251220 - DNA, 7761 bp, Artificial Sequence
  derived and/or modified sequence
cctgtctctccgaccggccacaggtttccgcttgcctctggccgggggtcggcaactgcaggcgtcagtttccctcaagatggcggacgaggaggctggaggtactgagaggatggaaatcagcgcggagttaccccagacccctcagcgtctggcatcttggtgggatcagcaagttgatttttatactgctttcttgcatcatttggcacaattggtgccagaaatttactttgctgaaatggacccagacttggaaaagcaggaggaaagtgtacaaatgtcaatattcactccactggaatggtacttatttggagaagatccagatatttgcttagagaaattgaagcacagtggagcatttcagctttgtgggagggttttcaaaagtggagagacaacctattcttgcagggattgtgcaattgatccaacatgtgtactctgtatggactgcttccaggacagtgttcataaaaatcatcgttacaagatgcatacttctactggaggagggttctgtgactgtggagacacagaggcatggaaaactggccctttttgtgtaaatcatgaacctggaagagcaggtactataaaagagaattcacgctgtccgttgaatgaagaggtaattgtccaagccaggaaaatatttccttcagtgataaaatatgtcgtagaaatgactatatgggaagaggaaaaagaactgcctcctgaactccagataagggagaaaaatgaaagatactattgtgtccttttcaatgatgaacaccattcatatgaccacgtcatatacagcctacaaagagctcttgactgtgagctcgcagaggcccagttgcataccactgccattgacaaagagggtcgtcgggctgttaaagcgggagcttatgctgcttgccaggaagcaaaggaagatataaagagtcattcagaaaatgtctctcaacatccacttcatgtagaagtattacactcagagattatggctcatcagaaatttgctttgcgtcttggttcctggatgaacaaaattatgagctattcaagtgactttaggcagatcttttgccaagcatgccttagagaagaacctgactcggagaatccctgtctcataagcaggttaatgctttgggatgcaaagctttataaaggtgcccgtaagatccttcatgaattgatcttcagcagtttttttatggagatggaatacaaaaaactctttgctatggaatttgtgaagtattataaacaactgcagaaagaatatatcagtgatgatcatgacagaagtatctctataactgcactttcagttcagatgtttactgttcctactctggctcgacatcttattgaagagcagaatgttatctctgtcattactgaaactctgctagaagttttacctgagtacttggacaggaacaataaattcaacttccagggttatagccaggacaaattgggaagagtatatgcagtaatatgtgacctaaagtatatcctgatcagcaaacccacaatatggacagaaagattaagaatgcagttccttgaaggttttcgatcttttttgaagattcttacctgtatgcagggaatggaagaaatccgaagacaggttgggcaacacattgaagtggatcctgattgggaggctgccattgctatacagatgcaattgaagaatattttactcatgttccaagagtggtgtgcttgtgatgaagaactcttacttgtggcttataaagaatgtcacaaagctgtgatgaggtgcagtaccagtttcatatctagtagcaagacagtagtacaatcgtgtggacatagtttggaaacaaagtcctacagagtatctgaggatcttgtaagcatacatctgccactctctaggacccttgctggtcttcatgtacgtttaagcaggctgggtgctgtttcaagactgcatgaatttgtgtcttttgaggactttcaagtagaggtactagtggaatatcctttacgttgtctggtgttggttgcccaggttgttgctgagatgtggcgaagaaatggactgtctcttattagccaggtgttttattaccaagatgttaagtgcagagaagaaatgtatgataaagatatcatcatgcttcagattggtgcatctttaatggatcccaataagttcttgttactggtacttcagaggtatgaacttgccgaggcttttaacaagaccatatctacaaaagaccaggatttgattaaacaatataatacactaatagaagaaatgcttcaggtcctcatctatattgtgggtgagcgttatgtacctggagtgggaaatgtgaccaaagaagaggtcacaatgagagaaatcattcacttgctttgcattgaacccatgccacacagtgccattgccaaaaatttacctgagaatgaaaataatgaaactggcttagagaatgtcataaacaaagtggccacatttaagaaaccaggtgtatcaggccatggagtttatgaactaaaagatgaatcactgaaagacttcaatatgtacttttatcattactccaaaacccagcatagcaaggctgaacatatgcagaagaaaaggagaaaacaagaaaacaaagatgaagcattgccgccaccaccacctcctgaattctgccctgctttcagcaaagtgattaaccttctcaactgtgatatcatgatgtacattctcaggaccgtatttgagcgggcaatagacacagattctaacttgtggaccgaagggatgctccaaatggcttttcatattctggcattgggtttactagaagagaagcaacagcttcaaaaagctcctgaagaagaagtaacatttgacttttatcataaggcttcaagattgggaagttcagccatgaatatacaaatgcttttggaaaaactcaaaggaattccccagttagaaggccagaaggacatgataacgtggatacttcagatgtttgacacagtgaagcgattaagagaaaaatcttgtttaattgtagcaaccacatcaggatcggaatctattaagaatgatgagattactcatgataaagaaaaagcagaacgaaaaagaaaagctgaagctgctaggctacatcgccagaagatcatggctcagatgtctgccttacagaaaaacttcattgaaactcataaactcatgtatgacaatacatcagaaatgcctgggaaagaagattccattatggaggaagagagcaccccagcagtcagtgactactctagaattgctttgggtcctaaacggggtccatctgttactgaaaaggaggtgctgacgtgcatcctttgccaagaagaacaggaggtgaaaatagaaaataatgccatggtattatcggcctgtgtccagaaatctactgccttaacccagcacaggggaaaacccatagaactctcaggagaagccctagacccacttttcatggatccagacttggcatatggaacttatacaggaagctgtggtcatgtaatgcacgcagtgtgctggcagaagtattttgaagctgtacagctgagctctcagcagcgcattcatgttgacctttttgacttggaaagtggagaatatctttgccctctttgcaaatctctgtgcaatactgtgatccccattattcctttgcaacctcaaaagataaacagtgagaatgcagatgctcttgctcaacttttgaccctggcacggtggatacagactgttctggccagaatatcaggttataatataagacatgctaaaggagaaaacccaattcctattttctttaatcaaggaatgggagattctactttggagttccattccatcctgagttttggcgttgagtcttcgattaaatattcaaatagcatcaaggaaatggttattctctttgccacaacaatttatagaattggattgaaagtgccacctgatgaaagggatcctcgagtccccatgctgacctggagcacctgcgctttcactatccaggcaattgaaaatctattgggagatgaaggaaaacctctgtttggagcacttcaaaataggcagcataatggtctgaaagcattaatgcagtttgcagttgcacagaggattacctgtcctcaggtcctgatacagaaacatctggttcgtcttctatcagttgttcttcctaacataaaatcagaagatacaccatgccttctgtctatagatctgtttcatgttttggtgggtgctgtgttagcattcccatccttgtattgggatgaccctgttgatctgcagccttcttcagttagttcttcctataaccacctttatctcttccatttgatcaccatggcacacatgcttcagatactacttacagtagacacaggcctaccccttgctcaggttcaagaagacagtgaagaggctcattccgcatcttctttctttgcagaaatttctcaatatacaagtggctccattgggtgtgatattcctggctggtatttgtgggtctcactgaagaatggcatcaccccttatcttcgctgtgctgcattgtttttccactatttacttggggtaactccgcctgaggaactgcataccaattctgcagaaggagagtacagtgcactctgtagctatctatctttacctacaaatttgttcctgctcttccaggaatattgggatactgtaaggcccttgctccagaggtggtgtgcagatcctgccttactaaactgtttgaagcaaaaaaacaccgtggtcaggtaccctagaaaaagaaatagtttgatagagcttcctgatgactatagctgcctcctgaatcaagcttctcatttcaggtgcccacggtctgcagatgatgagcgaaagcatcctgtcctctgccttttctgtggggctatactatgttctcagaacatttgctgccaggaaattgtgaacggggaagaggttggagcttgcatttttcacgcacttcactgtggagccggagtctgcattttcctaaaaatcagagaatgccgagtggtcctggttgaaggtaaagccagaggctgtgcctatccagctccttacttggatgaatatggagaaacagaccctggcctgaagaggggcaacccccttcatttatctcgtgagcggtatcggaagctccatttggtctggcaacaacactgcattatagaagagattgctaggagccaagagactaatcagatgttatttggattcaactggcagttactgtgagctccaactctgcctcaagacaatcacaaatgacgacagtagtaaaggctgattcaaaattatggaaaactttctgagggctgggaaagtattggagggtcttttgctccatgtccaggttcacttacatcaataaaatatttcttaatggagtattgctttcaattagcaaacatatgcttcacaggaaaaaaggacatagatcaatctgttttatgtgctagtatttccaggaatttattccccttcataatttgtctcatttcattttatttcatccacttggtagatgaagtcacgtcaaacagttgtagacattttatatgttggttaactcttctgcaattttgtatttggtgttttccccccaagtttagttcaactgacattggatcactgacaaaattctaataatctgtgatagtcttccttgcagttaaagaagaattgcagaaaccatgcaatatacttgggaaagattccaaaaataaattttttattatttctcttttaaggaaatacccctaatgtgccacctgctgctatcaccacaaattaaactcaatctctatgtggacagaggatgatttctgccaatatggaaaagcttttttctcactgtaggcctcaagaaaagttagggtaatgtatttgttattcattcctgacggtacaaagagcttgcagttctcacctctgactaccagtagctttgttgagttttgaaataatacttgacattttccaaaggcaaatctcattctgcaaggagattgtggcaccatcctgtttgactctcagaaacctcttgtaattctgatgtaaaaactgtagaatgaagatgagaaaattctcgcaatgagtggatcatgacaactgtaaattagaacaatcagatttaaaccaattccgcagtcttctatatctttgtaaaagacaaatccttgatgttgtctgtgtgcaaccttttcataaactctggttttatgactagtacaaaccaccaaaaaagccatgtgatcaatagtctgtgtcctgttataacatgctgtggttgagccatcttgtttataaataatagagctctcctgaatttgtgcatagacttcttggttcctggcttttgttttttgtatcaagagattgtgatataaaacagcagaagataaatggaaaccttccattttaacttacgttgtttctggggtaatgttagaaccttgaaagatgcattcaaagactgtatcttattttgcccttggctattagtgtctcacatatgtgtgtaaatgttttcctaccttctttttgctcagcaaaggcaagcaagtaaaatatatttgctaagtgattagtgatgcacatttggggctagatttttttggtacttttatgtaaagaaaagtggattttgcagtaagggattggcatgagcaggcgtcagaatcacaatcatgattttctacttgaataattacaattcagaaggtatctggataaatagatacatgtctagtgaacaatttgtaacaataacaggtaaggatcaggaaattcagtattcagtttgtcagatttgccagaatgatgaaagtatttgaacatgtgtgtttgtttcttatataattgtattgagtggattgtttgactgggaaatctgggctagaataggaaacagaagatactgacttctaccctaatagatgggccccaatttagcaaagataaactgactttatttttagtcctttttatattaacttaataaattctggagttaggctctcaagaggacagagggactgtctggcaatggccagccagacctttactgccaaagaacccatttcatattgcgttccactgattgagattgattcagatttttgcactgtagatgagcgtatgtctcagtgctgccccaagccccagggatttctcattatgttcaaatgtcctagtgatttaccttaatcattgcaaacaattatgcttatgaagtttacttacaaacaagcaactgagtcactttattttctttagtgtagtatgtgaaggcactggttcaacaggatggctccagaactgtgtttttctaatgtttggtaaggggctagtgagaattttaatgatatggtgaagaaaaatatatctgtataattaatttattatattggtgtatgggctgtgagttcaccttttagtggtcatttgtcatttcataacaactatgcattttggttcactgtgatgatgatctatatttagtgactgcaacatgtttataccactgattcaaattccatccatgatgaagttatacaaataatgcatatattgataacttttattgcaaaaatgtaaatttaaaacttgtataatgttcttgtgctttttaaaataaaatatatgtgtatatttaaaaagaaaaa

SEQ ID NO: 251221 - DNA, 7684 bp, Artificial Sequence
  derived and/or modified sequence
ccggccacaggtttccgcttgcctctggccgggggtcggcaactgcaggcgtcagtttccctcaagatggcggacgaggaggctggaggtactgagaggatggaaatcagcgcggagttaccccagacccctcagcgtctggcatcttggtgggatcagcaagttgatttttatactgctttcttgcatcatttggcacaattggtgccagaaatttactttgctgaaatggacccagacttggaaaagcaggaggaaagtgtacaaatgtcaatattcactccactggaatggtacttatttggagaagatccagatatttgcttagagaaattgaagcacagtggagcatttcagctttgtgggagggttttcaaaagtggagagacaacctattcttgcagggattgtgcaattgatccaacatgtgtactctgtatggactgcttccaggacagtgttcataaaaatcatcgttacaagatgcatacttctactggaggagggttctgtgactgtggagacacagaggcatggaaaactggccctttttgtgtaaatcatgaacctggaagagcaggtactataaaagagaattcacgctgtccgttgaatgaagaggtaattgtccaagccaggaaaatatttccttcagtgataaaatatgtcgtagaaatgactatatgggaagaggaaaaagaactgcctcctgaactccagataagggagaaaaatgaaagatactattgtgtccttttcaatgatgaacaccattcatatgaccacgtcatatacagcctacaaagagctcttgactgtgagctcgcagaggcccagttgcataccactgccattgacaaagagggtcgtcgggctgttaaagcgggagcttatgctgcttgccaggaagcaaaggaagatataaagagtcattcagaaaatgtctctcaacatccacttcatgtagaagtattacactcagagattatggctcatcagaaatttgctttgcgtcttggttcctggatgaacaaaattatgagctattcaagtgactttaggcagatcttttgccaagcatgccttagagaagaacctgactcggagaatccctgtctcataagcaggttaatgctttgggatgcaaagctttataaaggtgcccgtaagatccttcatgaattgatcttcagcagtttttttatggagatggaatacaaaaaactctttgctatggaatttgtgaagtattataaacaactgcagaaagaatatatcagtgatgatcatgacagaagtatctctataactgcactttcagttcagatgtttactgttcctactctggctcgacatcttattgaagagcagaatgttatctctgtcattactgaaactctgctagaagttttacctgagtacttggacaggaacaataaattcaacttccagggttatagccaggacaaattgggaagagtatatgcagtaatatgtgacctaaagtatatcctgatcagcaaacccacaatatggacagaaagattaagaatgcagttccttgaaggttttcgatcttttttgaagattcttacctgtatgcagggaatggaagaaatccgaagacaggttgggcaacacattgaagtggatcctgattgggaggctgccattgctatacagatgcaattgaagaatattttactcatgttccaagagtggtgtgcttgtgatgaagaactcttacttgtggcttataaagaatgtcacaaagctgtgatgaggtgcagtaccagtttcatatctagtagcaagacagtagtacaatcgtgtggacatagtttggaaacaaagtcctacagagtatctgaggatcttgtaagcatacatctgccactctctaggacccttgctggtcttcatgtacgtttaagcaggctgggtgctgtttcaagactgcatgaatttgtgtcttttgaggactttcaagtagaggtactagtggaatatcctttacgttgtctggtgttggttgcccaggttgttgctgagatgtggcgaagaaatggactgtctcttattagccaggtgttttattaccaagatgttaagtgcagagaagaaatgtatgataaagatatcatcatgcttcagattggtgcatctttaatggatcccaataagttcttgttactggtacttcagaggtatgaacttgccgaggcttttaacaagaccatatctacaaaagaccaggatttgattaaacaatataatacactaatagaagaaatgcttcaggtcctcatctatattgtgggtgagcgttatgtacctggagtgggaaatgtgaccaaagaagaggtcacaatgagagaaatcattcacttgctttgcattgaacccatgccacacagtgccattgccaaaaatttacctgagaatgaaaccaggtgtatcaggccatggagtttatgaactaaaagatgaatcactgaaagacttcaatatgtacttttatcattactccaaaacccagcatagcaaggctgaacatatgcagaagaaaaggagaaaacaagaaaacaaagatgaagcattgccgccaccaccacctcctgaattctgccctgctttcagcaaagtgattaaccttctcaactgtgatatcatgatgtacattctcaggaccgtatttgagcgggcaatagacacagattctaacttgtggaccgaagggatgctccaaatggcttttcatattctggcattgggtttactagaagagaagcaacagcttcaaaaagctcctgaagaagaagtaacatttgacttttatcataaggcttcaagattgggaagttcagccatgaatatacaaatgcttttggaaaaactcaaaggaattccccagttagaaggccagaaggacatgataacgtggatacttcagatgtttgacacagtgaagcgattaagagaaaaatcttgtttaattgtagcaaccacatcaggatcggaatctattaagaatgatgagattactcatgataaagaaaaagcagaacgaaaaagaaaagctgaagctgctaggctacatcgccagaagatcatggctcagatgtctgccttacagaaaaacttcattgaaactcataaactcatgtatgacaatacatcagaaatgcctgggaaagaagattccattatggaggaagagagcaccccagcagtcagtgactactctagaattgctttgggtcctaaacggggtccatctgttactgaaaaggaggtgctgacgtgcatcctttgccaagaagaacaggaggtgaaaatagaaaataatgccatggtattatcggcctgtgtccagaaatctactgccttaacccagcacaggggaaaacccatagaactctcaggagaagccctagacccacttttcatggatccagacttggcatatggaacttatacaggaagctgtggtcatgtaatgcacgcagtgtgctggcagaagtattttgaagctgtacagctgagctctcagcagcgcattcatgttgacctttttgacttggaaagtggagaatatctttgccctctttgcaaatctctgtgcaatactgtgatccccattattcctttgcaacctcaaaagataaacagtgagaatgcagatgctcttgctcaacttttgaccctggcacggtggatacagactgttctggccagaatatcaggttataatataagacatgctaaaggagaaaacccaattcctattttctttaatcaaggaatgggagattctactttggagttccattccatcctgagttttggcgttgagtcttcgattaaatattcaaatagcatcaaggaaatggttattctctttgccacaacaatttatagaattggattgaaagtgccacctgatgaaagggatcctcgagtccccatgctgacctggagcacctgcgctttcactatccaggcaattgaaaatctattgggagatgaaggaaaacctctgtttggagcacttcaaaataggcagcataatggtctgaaagcattaatgcagtttgcagttgcacagaggattacctgtcctcaggtcctgatacagaaacatctggttcgtcttctatcagttgttcttcctaacataaaatcagaagatacaccatgccttctgtctatagatctgtttcatgttttggtgggtgctgtgttagcattcccatccttgtattgggatgaccctgttgatctgcagccttcttcagttagttcttcctataaccacctttatctcttccatttgatcaccatggcacacatgcttcagatactacttacagtagacacaggcctaccccttgctcaggttcaagaagacagtgaagaggctcattccgcatcttctttctttgcagaaatttctcaatatacaagtggctccattgggtgtgatattcctggctggtatttgtgggtctcactgaagaatggcatcaccccttatcttcgctgtgctgcattgtttttccactatttacttggggtaactccgcctgaggaactgcataccaattctgcagaaggagagtacagtgcactctgtagctatctatctttacctacaaatttgttcctgctcttccaggaatattgggatactgtaaggcccttgctccagaggtggtgtgcagatcctgccttactaaactgtttgaagcaaaaaaacaccgtggtcaggtaccctagaaaaagaaatagtttgatagagcttcctgatgactatagctgcctcctgaatcaagcttctcatttcaggtgcccacggtctgcagatgatgagcgaaagcatcctgtcctctgccttttctgtggggctatactatgttctcagaacatttgctgccaggaaattgtgaacggggaagaggttggagcttgcatttttcacgcacttcactgtggagccggagtctgcattttcctaaaaatcagagaatgccgagtggtcctggttgaaggtaaagccagaggctgtgcctatccagctccttacttggatgaatatggagaaacagaccctggcctgaagaggggcaacccccttcatttatctcgtgagcggtatcggaagctccatttggtctggcaacaacactgcattatagaagagattgctaggagccaagagactaatcagatgttatttggattcaactggcagttactgtgagctccaactctgcctcaagacaatcacaaatgacgacagtagtaaaggctgattcaaaattatggaaaactttctgagggctgggaaagtattggagggtcttttgctccatgtccaggttcacttacatcaataaaatatttcttaatggagtattgctttcaattagcaaacatatgcttcacaggaaaaaaggacatagatcaatctgttttatgtgctagtatttccaggaatttattccccttcataatttgtctcatttcattttatttcatccacttggtagatgaagtcacgtcaaacagttgtagacattttatatgttggttaactcttctgcaattttgtatttggtgttttccccccaagtttagttcaactgacattggatcactgacaaaattctaataatctgtgatagtcttccttgcagttaaagaagaattgcagaaaccatgcaatatacttgggaaagattccaaaaataaattttttattatttctcttttaaggaaatacccctaatgtgccacctgctgctatcaccacaaattaaactcaatctctatgtggacagaggatgatttctgccaatatggaaaagcttttttctcactgtaggcctcaagaaaagttagggtaatgtatttgttattcattcctgacggtacaaagagcttgcagttctcacctctgactaccagtagctttgttgagttttgaaataatacttgacattttccaaaggcaaatctcattctgcaaggagattgtggcaccatcctgtttgactctcagaaacctcttgtaattctgatgtaaaaactgtagaatgaagatgagaaaattctcgcaatgagtggatcatgacaactgtaaattagaacaatcagatttaaaccaattccgcagtcttctatatctttgtaaaagacaaatccttgatgttgtctgtgtgcaaccttttcataaactctggttttatgactagtacaaaccaccaaaaaagccatgtgatcaatagtctgtgtcctgttataacatgctgtggttgagccatcttgtttataaataatagagctctcctgaatttgtgcatagacttcttggttcctggcttttgttttttgtatcaagagattgtgatataaaacagcagaagataaatggaaaccttccattttaacttacgttgtttctggggtaatgttagaaccttgaaagatgcattcaaagactgtatcttattttgcccttggctattagtgtctcacatatgtgtgtaaatgttttcctaccttctttttgctcagcaaaggcaagcaagtaaaatatatttgctaagtgattagtgatgcacatttggggctagatttttttggtacttttatgtaaagaaaagtggattttgcagtaagggattggcatgagcaggcgtcagaatcacaatcatgattttctacttgaataattacaattcagaaggtatctggataaatagatacatgtctagtgaacaatttgtaacaataacaggtaaggatcaggaaattcagtattcagtttgtcagatttgccagaatgatgaaagtatttgaacatgtgtgtttgtttcttatataattgtattgagtggattgtttgactgggaaatctgggctagaataggaaacagaagatactgacttctaccctaatagatgggccccaatttagcaaagataaactgactttatttttagtcctttttatattaacttaataaattctggagttaggctctcaagaggacagagggactgtctggcaatggccagccagacctttactgccaaagaacccatttcatattgcgttccactgattgagattgattcagatttttgcactgtagatgagcgtatgtctcagtgctgccccaagccccagggatttctcattatgttcaaatgtcctagtgatttaccttaatcattgcaaacaattatgcttatgaagtttacttacaaacaagcaactgagtcactttattttctttagtgtagtatgtgaaggcactggttcaacaggatggctccagaactgtgtttttctaatgtttggtaaggggctagtgagaattttaatgatatggtgaagaaaaatatatctgtataattaatttattatattggtgtatgggctgtgagttcaccttttagtggtcatttgtcatttcataacaactatgcattttggttcactgtgatgatgatctatatttagtgactgcaacatgtttataccactgattcaaattccatccatgatgaagttatacaaataatgcatatattgataacttttattgcaaaaatgtaaatttaaaacttgtataatgttcttgtgctttttaaaataaaatatatgtgtatattt

SEQ ID NO: 251222 - DNA, 3105 bp, Artificial Sequence
  derived and/or modified sequence
ccggccacaggtttccgcttgcctctggccgggggtcggcaactgcaggcgtcagtttccctcaagatggcggacgaggaggctggaggtactgagaggatggaaatcagcgcggagttaccccagacccctcagcgtctggcatcttggtgggatcagcaagttgatttttatactgctttcttgcatcatttggcacaattggtgccagaaatttactttgctgaaatggacccagacttggaaaagcaggaggaaagtgtacaaatgtcaatattcactccactggaatggtacttatttggagaagatccagatatttgcttagagaaattgaagcacagtggagcatttcagctttgtgggagggttttcaaaagtggagagacaacctattcttgcagggattgtgcaattgatccaacatgtgtactctgtatggactgcttccaggacagtgttcataaaaatcatcgttacaagatgcatacttctactggaggagggttctgtgactgtggagacacagaggcatggaaaactggccctttttgtgtaaatcatgaacctggaagagcaggtactataaaagagaattcacgctgtccgttgaatgaagaggtaattgtccaagccaggaaaatatttccttcagtgataaaatatgtcgtagaaatgactatatgggaagaggaaaaagaactgcctcctgaactccagataagggagaaaaatgaaagatactattgtgtccttttcaatgatgaacaccattcatatgaccacgtcatatacagcctacaaagagctcttgactgtgagctcgcagaggcccagttgcataccactgccattgacaaagagggtcgtcgggctgttaaagcgggagcttatgctgcttgccaggaagcaaaggaagatataaagagtcattcagaaaatgtctctcaacatccacttcatgtagaagtattacactcagagattatggctcatcagaaatttgctttgcgtcttggttcctggatgaacaaaattatgagctattcaagtgactttaggcagatcttttgccaagcatgccttagagaagaacctgactcggagaatccctgtctcataagcaggttaatgctttgggatgcaaagctttataaaggtgcccgtaagatccttcatgaattgatcttcagcagtttttttatggagatggaatacaaaaaactctttgctatggaatttgtgaagtattataaacaactgcagaaagaatatatcagtgatgatcatgacagaagtatctctataactgcactttcagttcagatgtttactgttcctactctggctcgacatcttattgaagagcagaatgttatctctgtcattactgaaactctgctagaagttttacctgagtacttggacaggaacaataaattcaacttccagggttatagccaggacaaattgggaagagtatatgcagtaatatgtgacctaaagtatatcctgatcagcaaacccacaatatggacagaaagattaagaatgcagttccttgaaggttttcgatcttttttgaagattcttacctgtatgcagggaatggaagaaatccgaagacaggttgggcaacacattgaagtggatcctgattgggaggctgccattgctatacagatgcaattgaagaatattttactcatgttccaagagtggtgtgcttgtgatgaagaactcttacttgtggcttataaagaatgtcacaaagctgtgatgaggtgcagtaccagtttcatatctagtagcaagacagtagtacaatcgtgtggacatagtttggaaacaaagtcctacagagtatctgaggatcttgtaagcatacatctgccactctctaggacccttgctggtcttcatgtacgtttaagcaggctgggtgctgtttcaagactgcatgaatttgtgtcttttgaggactttcaagtagaggtactagtggaatatcctttacgttgtctggtgttggttgcccaggttgttgctgagatgtggcgaagaaatggactgtctcttattagccaggtgttttattaccaagatgttaagtgcagagaagaaatgtatgataaagatatcatcatgcttcagattggtgcatctttaatggatcccaataagttcttgttactggtacttcagaggtatgaacttgccgaggcttttaacaagaccatatctacaaaagaccaggatttgattaaacaatataatacactaatagaagaaatgcttcaggtcctcatctatattgtgggtgagcgttatgtacctggagtgggaaatgtgaccaaagaagaggtcacaatgagagaaatcattcacttgctttgcattgaacccatgccacacagtgccattgccaaaaatttacctgagaatgaaaataatgaaactggcttagagaatgtcataaacaaagtggccacatttaagaaaccaggtgtatcaggccatggagtttatgaactaaaagatgaatcactgaaagacttcaatatgtacttttatcattactccaaaacccagcatagcaaggctgaacatatgcagaagaaaaggagaaaacaagaaaacaaagatgaagcattgccgccaccaccacctcctgaattctgccctgctttcagcaaagtgattaaccttctcaactgtgatatcatgatgtacattctcaggaccgtatttgagcgggcaatagacacagattctaacttgtggaccgaagggatgctccaaatggcttttcatattctggcattgggtttactagaagagaagcaacagcttcaaaaagctcctgaagaagaagtaacatttgacttttatcataaggcttcaagattgggaagttcagccatgaatatacaaatgcttttggaaaaactcaaaggaattccccagttagaaggccagaaggacatgataacgtggatacttcagatgtttgacacagtgaagcgattaagagaaaaatcttgtttaattgtagcaaccacatcaggatcggaatctattaagaatgatgagattctacatcat

SEQ ID NO: 251223 - protein, 576 aa, Artificial Sequence
  derived and/or modified sequence
MLPHVVLTFRRLGCALASCRLAPARHRGSGLLHTAPVARSDRSAPVFTRALAFGDRIALVDQHGRHTYRELYSRSLRLSQEICRLCGCVGGDLREERVSFLCANDASYVVAQWASWMSGGVAVPLYRKHPAAQLEYVICDSQSSVVLASQEYLELLSPVVRKLGVPLLPLTPAIYTGAVEEPAEVPVPEQGWRNKGAMIIYTSGTTGRPKGVLSTHQNIRAVVTGLVHKWAWTKDDVILHVLPLHHVHGVVNALLCPLWVGATCVMMPEFSPQQVWEKFLSSETPRINVFMAVPTIYTKLMEYYDRHFTQPHAQDFLRAVCEEKIRLMVSGSAALPLPVLEKWKNITGHTLLERYGMTEIGMALSGPLTTAVRLPGSVGTPLPGVQVRIVSENPQREACSYTIHAEGDERGTKVTPGFEEKEGELLVRGPSVFREYWNKPEETKSAFTLDGWFKTGDTVVFKDGQYWIRGRTSVDIIKTGGYKVSALEVEWHLLAHPSITDVAVIGVPDMTWGQRVTAVVTLREGHSLSHRELKEWARNVLAPYAVPSELVLVEEIPRNQMGKIDKKALIRHFHPS

SEQ ID NO: 251224 - DNA, 1731 bp, Artificial Sequence
  derived and/or modified sequence
atgctgccacacgtcgtgctcaccttccggcgactgggctgcgctctggctagctgtagactggccccagctcgacatagaggcagcggtctcctgcatacagcccctgttgccaggagcgaccggtccgctccagtgttcacgcgcgcactggcattcggagacagaatcgcgcttgtcgatcagcacggcaggcacacctatcgagagctctactctagaagcctacggctctctcaggagatatgcaggctttgcggttgtgtgggaggggatcttcgcgaggaaagagtgtcgtttttgtgtgccaatgatgcttcatacgttgtggcacagtgggccagttggatgagcggcggtgtggccgttcccttatatcggaagcaccctgctgcgcagctcgaatacgtaatctgcgattcgcagtccagcgtagtactcgccagtcaggagtacctggaactgctcagccccgtcgtgcggaagctgggtgtgcctcttctgcccctgaccccagccatttacacaggagccgtcgaggagcccgccgaagtccccgtaccagagcagggctggagaaacaaaggagccatgatcatctacacctccggtaccaccgggcgtcctaaaggggtgctctcaactcaccagaacatcagagccgtggtgaccggtctagtgcacaagtgggcctggactaaagacgatgtcattctgcacgtgctgcccctgcaccacgttcacggggtggtaaacgccctcctatgcccgctttgggtgggagccacatgcgtgatgatgcctgagttttcccctcagcaagtttgggagaagttcctcagctctgaaactcccaggatcaacgtgttcatggccgtcccaactatctacacaaaactcatggaatattacgacaggcacttcactcagccccacgcgcaggatttcctcagggccgtatgtgaggaaaagatccggctgatggtgtctggctcggcagcactgcccctgccggtgttggaaaagtggaagaatatcacgggccacacgctgctggagaggtacggtatgacagaaatcgggatggcattgtcggggccgctgactactgctgtacgcctgcccggctccgtgggcactcctctgccaggcgtgcaagtccgcatcgtcagtgaaaaccctcagcgtgaagcctgtagctatactatccacgcggagggcgacgagcgtggaaccaaggtgacacctggattcgaggaaaaagaaggagagctgctagtccgaggtccatccgtttttagagaatactggaataagccagaagaaaccaagtctgcatttactttggacggctggtttaaaaccggcgatacagtggtctttaaagacggccaatattggattcggggacgaacttccgtggacatcattaagactggaggatacaaggtgagtgctctcgaggtggaatggcacctattggcacatccctctatcactgatgtggcagttattggtgtacctgatatgacgtggggccagcgcgtgaccgctgtggtaacacttagagaaggccattccctttctcacagggaacttaaagagtgggcacggaacgtcctggcgccatatgccgtgccatccgagctggtgctggtggaggagattccaagaaaccagatgggaaaaatcgacaaaaaggccctgattcggcacttccacccctcttag

SEQ ID NO: 251225 - DNA, 1731 bp, Artificial Sequence
  derived and/or modified sequence
atgctcccccacgtggttctcacctttcggagactcgggtgcgcgctcgccagttgccgcctggccccagcccgccacagaggatccggcttgctgcacaccgcccccgtagccagatctgaccgttctgcgccagtcttcactcgtgcactggctttcggcgatcggattgcattggtggatcagcatggccgccatacatatcgagagttatattcacggtctctacggttgagtcaggagatctgtcgcctctgcggctgcgtgggcggagacctcagagaggagagagtatcgttcctgtgcgcaaatgacgcttcctatgtcgtggcccagtgggctagctggatgtcaggcggagtggcagtacctttataccgcaaacaccccgccgcgcaactcgagtatgtaatatgtgactcccagagctctgtggttctagctagtcaagaatacttggagttactgtcaccagtagtgagaaaattaggggtcccactcctccccctcaccccagcaatttacaccggagcagtggaagaaccagcggaggttcccgtgcccgagcaggggtggaggaataagggggccatgatcatttatacttccggcactacggggcggcccaaaggcgttctaagcactcatcagaacatcagggccgtagtcaccggcttagttcataagtgggcctggactaaagacgatgtcattctccacgtcctacccctgcatcatgtgcatggcgtggtaaacgccttgctatgccctctgtgggtgggagcaacctgtgtgatgatgcccgaatttagcccacagcaagtatgggagaaattccttagctcagagacccccaggatcaatgtttttatggcagtgccaaccatttacacaaaacttatggagtactacgaccgtcatttcacccaaccccacgcgcaggacttcttgcgtgcagtgtgtgaagaaaagattagattgatggtgtctggaagcgccgccttgccactgcccgtgctcgaaaagtggaagaacatcaccgggcacacactgctggaacggtatggcatgaccgaaatcggcatggccctttctggcccgctcactacggccgtacgccttccgggcagcgtgggaacgcctctccccggagtccaggtgaggatcgtgtcagagaacccccaaagagaagcatgttcatataccattcacgcggagggtgacgagaggggaaccaaagtcacacccggcttcgaggagaaggagggagagcttttggttcgaggcccttctgtctttagagagtactggaataaaccggaagagactaagtctgcattcacgctagatggatggtttaagacaggtgacacagtggtgttcaaggacgggcagtactggattaggggccggacatccgtggatattatcaagacaggtgggtacaaagtttcggcactggaagtggagtggcatctgctggctcacccatccatcacagacgtggccgtgatcggggtgcccgatatgacatggggtcagcgcgtgaccgctgtagttactctgagagagggacactctctgtctcatcgcgagttgaaggagtgggctagaaacgtgcttgccccctacgcagtgcctagtgagctggtgttggtggaggaaatcccccgcaatcaaatgggcaaaattgacaaaaaggccctaatcaggcacttccatccatcatag

SEQ ID NO: 251226 - DNA, 1731 bp, Artificial Sequence
  derived and/or modified sequence
atgctgccccacgtggtgctgaccttccggcggctgggctgtgccctggccagctgccgcctggccccagcccggcaccggggcagcggcctgctgcacacagcccctgtggcccggagtgacagaagtgcccctgtgttcacccgggccctggcctttggagacagaattgccctggtggaccagcacggccgccacacctaccgggagctgtacagccgcagcctgcggctgagccaggagatctgccgcctgtgtggctgtgtgggcggggacctgcgggaggagcgggtgtccttcctgtgtgccaatgatgccagctatgtggtggcccagtgggcctcctggatgtctgggggcgtggccgtgcccctgtacaggaagcaccctgctgcccagctggagtatgtgatctgtgacagccagagctctgtggtgctggccagccaggagtacctggagctgctgagccctgtggtgaggaagctgggcgtgcccctgctgcccctgaccccagccatctacaccggggctgtggaggagcctgctgaggtgcctgtgcctgagcagggctggagaaataaaggagccatgatcatctacaccagcggcaccaccggccggcccaagggcgtgctgagcacccaccagaacatccgggctgtggtgacaggcctggtgcacaagtgggcctggaccaaggatgatgtgatcctgcacgtgctgcccctgcaccacgtgcacggcgtggtgaatgccctgctgtgccccctgtgggtgggcgccacctgtgtgatgatgcctgagttcagcccccagcaggtgtgggagaagttcctgagcagcgagaccccccgcatcaacgtgttcatggctgtgcccaccatctacaccaagctgatggagtactatgacagacacttcacccagccccacgcccaggacttcctgcgggctgtgtgtgaggagaagatccggctgatggtgtctggcagcgctgccctgcccctgcctgtgctggagaagtggaagaacatcaccggccacaccctgctggagagatatggcatgacagagatcggcatggccctgagcggccccctgaccacagctgtgcggctgcccggctctgtgggcacccccctgcccggggtgcaggtgagaattgtgtctgagaacccccagcgggaggcctgcagctacaccatccatgctgaaggagatgagcggggcaccaaggtgaccccaggctttgaggagaaggagggggagctgctggtgcggggccccagcgtcttccgggagtactggaacaagccagaggagaccaagagcgccttcaccctggatggctggttcaagacaggagacacagtggtgttcaaggatggccagtactggatccggggccgcacctctgtggacatcatcaagacaggaggctacaaggtgtctgccctggaggtggagtggcacctgctggcccaccccagcatcacagatgtggccgtgattggagtgcctgacatgacctggggccagagggtgacagctgtggtgaccctgcgggagggccacagcctgagccaccgggagctgaaggagtgggccagaaatgtgctggccccctatgctgtgcccagcgagctggtgctggtggaggagatccccaggaaccagatgggcaagattgacaagaaggccctgatccgccacttccaccccagctag

SEQ ID NO: 251227 - DNA, 1731 bp, Artificial Sequence
  derived and/or modified sequence
atgctgccccacgtggtgctgaccttccggcggctgggctgcgccttggcaagttgcagacttgcgccagccaggcacaggggatcggggctgctgcatacggctccggtggctcggagtgatagatcggctcccgtatttactcgtgcacttgcgttcggggatcggattgctttggtcgatcagcatgggcgtcatacctatagagagctgtatagccgctctcttcgtttgagccaggagatatgtcgtctgtgcgggtgtgttggcggagaccttagggaagagcgtgtcagcttcctgtgtgcaaacgatgctagctacgttgttgcacaatgggccagctggatgtcgggcggagtcgctgtcccattgtaccgaaaacatcctgcggcgcagctcgaatacgtcatttgtgactcgcagtctagtgtagttttggcttcccaagagtaccttgaactgctgtctccagtggtgcggaagctgggagttccattacttccactgactccagccatttacacaggggcagtggaagagcccgctgaagtgccggtccctgagcaagggtggagaaataagggcgctatgattatctatacgtcggggactacaggaaggcctaagggcgtactgagcacccatcaaaacattagagcagtggtgactgggcttgtacacaagtgggcctggaccaaggatgacgttatactgcacgtgctcccactacatcatgtacatggtgtcgtgaatgccctgctgtgcccactatgggtgggggccacctgtgtgatgatgcctgaattttctccgcagcaggtgtgggagaaattcctttcgtccgagacacctcgcatcaatgtattcatggctgtgccaactatttatacgaagcttatggaatactacgacagacacttcacccagccccacgcacaagacttcctgcgtgcagtgtgcgaggaaaagatacgtcttatggtgagcggctccgccgccctgcctttgcccgtgctggagaaatggaaaaatattacaggccataccctgctagagcgctatggcatgacggagatcggaatggccttaagcggcccattgaccaccgccgttagactgcccggcagtgtaggtacacccctcccgggagtacaggtgcggatcgtgtctgagaatccccagagagaggcttgttcatacacaatccatgccgagggtgacgaacgcgggaccaaggtgacccccgggttcgaggaaaaggagggggaactcctagtccggggcccttctgtgttcagggaatactggaacaaaccagaggagaccaagtccgcttttacgttggacggttggttcaaaacaggcgacaccgttgtgtttaaggacggccaatactggatcagaggcagaacttctgtggatataatcaaaacagggggatataaggtgagcgccctagaggtggaatggcatctgctcgcacacccgagcattactgacgtggctgtcatcggggttcctgatatgacatgggggcagagggtgaccgccgtcgtaacactccgcgagggacattccctctcacaccgagagctcaaagagtgggcccgaaatgttctagcaccttatgcggtgccctccgagctcgtgctggtagaggagataccacggaatcaaatgggcaagatcgacaagaaagccttgatcaggcactttcacccctcatag

SEQ ID NO: 251228 - DNA, 1731 bp, Artificial Sequence
  derived and/or modified sequence
atgctgccccacgtggtgctgaccttccggcggctgggctgcgcccttgcttcatgtaggttagcccccgctaggcatcgcggaagcgggctcctacacaccgcccccgtggccaggagcgatcgcagcgcccctgtgttcacccgagcacttgcttttggcgatcgaatcgctctcgtggaccagcatggacgtcatacgtacagagagttatatagtagatccctgcgtctcagccaggagatatgcagactttgcgggtgcgtcggcggggatcttcgtgaggaaagggtatccttcctgtgcgctaacgacgccagctatgtggtggctcagtgggccagctggatgagtggaggcgtggctgtgccactgtatagaaagcacccggcagcccagctggaatacgtcatttgtgattcccagtcttcggtggtgctcgcctcccaggagtatttggaactgttgagccctgttgtccggaagctcggtgttccactgctgccactgaccccagcaatctacacaggcgctgttgaagaaccagctgaagtgccagtgcccgagcagggctggcgcaacaagggcgctatgatcatttacacctccggcaccaccggtcggcccaaaggcgtcttatctacgcaccagaatataagagcagtggtgacaggactagtgcataagtgggcctggacaaaagatgacgttattctgcacgtcctgcctctgcatcacgtgcacggcgttgtaaatgctttgctctgtccattatgggtcggagccacctgcgtcatgatgcccgaattctccccacagcaagtatgggaaaagttcttatcttccgagaccccccgcatcaatgtgtttatggcagtgccaacaatctataccaagttgatggagtattacgatcgacattttactcagccccacgcccaagattttctccgcgcagtgtgcgaagaaaagataagacttatggtatctggttccgctgccctacctctcccagtgcttgagaaatggaagaacatcactgggcacaccttactggaaaggtacggaatgacggagatcggcatggctctgtcaggacccctgacaaccgccgtgcggctgcctggcagtgttgggaccccgctgcctggggttcaggtacgcatcgtctccgaaaacccacagcgggaggcgtgtagttacaccatccatgctgagggggatgaaagagggacgaaggttaccccagggtttgaggagaaggagggcgagctcctagtgcgcgggccctctgttttccgcgagtactggaataagcctgaggagactaagtccgccttcaccctagatggctggtttaaaaccggtgacactgtagtgttcaaagatggccaatactggatccggggccgaacttcggttgatattatcaagacagggggatacaaagtctctgctctcgaggtcgaatggcacctgttggctcatccaagtattaccgatgtggcagtcattggcgtgcctgacatgacatggggacaacgagtcacagccgttgtcactctgcgcgagggacactccttgagccacagggagctcaaggagtgggcccggaatgtgctggccccttacgcagtccctagtgagctcgtccttgtggaagaaatccctcgcaatcaaatggggaagatcgataaaaaggctctgattagacacttccatccttcctag

SEQ ID NO: 251229 - DNA, 1731 bp, Artificial Sequence
  derived and/or modified sequence
atgcttcctcatgtagtgttgaccttccggagactggggtgcgcccttgcaagctgccggctggccccagctagacaccggggtagcggcctgctgcataccgccccagtcgctcgtagtgatcgatctgccccagtatttaccagggctctggccttcggagataggatcgcccttgtggatcagcacggcaggcacacatatcgcgaattatacagtagaagcctgagactttcccaggaaatttgccgactttgcggctgcgttggcggagatctgagagaggagcgagtttcatttctgtgcgccaatgacgccagctacgtcgtggcacagtgggctagttggatgtcaggcggagtagccgtgcccctgtatcggaaacacccagccgcacaactcgaatacgtgatctgcgactctcagtcttccgtggttctagcaagccaagagtacctggagttactgagtccagtggtgcgtaaactcggagtccccctcctgccccttacacctgccatttatactggtgccgttgaggagcctgctgaagtacctgtgcccgaacagggatggcgaaacaagggggctatgatcatctataccagtgggactacaggacgcccaaaaggggtcctgtctactcatcagaatatccgggcagttgtgacgggactcgttcacaaatgggcctggacaaaagatgacgtgattttacatgtcctgccacttcatcacgtgcatggggtagttaacgcactgctgtgtcccttatgggtgggggctacttgcgtgatgatgcccgaattttccccccagcaggtgtgggagaaatttctctcaagcgagactcccagaattaatgtgttcatggctgtccctaccatctatacaaagctgatggagtactatgacaggcacttcacacagcctcatgctcaggactttctccgcgctgtgtgtgaggagaagatccgactaatggtgagtggatccgcggcactgcctctgcctgttctcgaaaagtggaaaaacattacaggccacactctgctcgagcggtatggcatgacagagatcggaatggcactaagtgggccactgacaacagcggtccggctcccaggttctgtcggaacgccactccccggtgtgcaggttcgaatcgtcagtgagaaccctcagcgggaagcatgttcctatactattcacgccgaaggtgacgagagaggaactaaagttaccccagggtttgaggagaaagaaggcgaattgctggtgaggggaccatctgtgtttagggagtactggaataaacctgaagagacgaagagcgcttttacgctggatggctggttcaaaaccggggacaccgtcgtgttcaaggacggacagtattggatcagaggacggacctctgttgatatcataaagaccgggggatacaaggtgtccgcgctagaggtggaatggcaccttcttgcccatcccagcataacagatgtcgcagtcattggcgtcccagatatgacctggggccagcgggtcacagctgtagtgaccctgcgggagggccacagcctgtcccacagagagctcaaagaatgggcccgaaacgttttagccccttatgccgtccctagcgagttagtcttggtagaggaaatacctcgcaaccagatgggaaagatagataagaaggctctgatccgtcactttcacccttcctag

SEQ ID NO: 251230 - DNA, 1731 bp, Artificial Sequence
  derived and/or modified sequence
atgctgccccacgtcgtgctgacttttcgccgactggggtgcgcactcgcttcatgccggttggccccagctcgacatcgaggttcaggcctcctgcatacagcaccagtggcgaggagcgaccggtctgccccagtgttcactcgggctctagcattcggcgataggatcgctctggtggatcaacacggcaggcacacctatcgcgaactgtatagcagatccctgcgtctcagccaagaaatttgtcggctgtgtggctgcgtgggcggagacctccgggaggagcgggtgagcttcctgtgtgctaatgacgcatcctatgtggtggcccagtgggcctcctggatgtccggcggtgtagccgttccattatatagaaagcatccggcagcccagcttgaatatgtcatctgcgattctcagagcagcgtagtgttagctagccaggagtacctcgagctgctgtcaccagtagttaggaaactcggtgtgccacttctgcccttgacccccgcaatttacacgggggcagtcgaggaaccagcagaggtccccgtgcccgagcagggttggaggaacaagggcgctatgattatctatacttccggaaccacgggacgacctaagggtgtgctgtccactcaccagaacattcgagctgtcgtaacagggttggtgcacaaatgggcctggacgaaggacgacgtgattcttcacgttctaccgctccaccacgttcacggagttgtcaacgctttgctttgcccactgtgggttggcgcaacctgcgtaatgatgccggaattcagccctcagcaagtctgggaaaaatttttaagctccgagaccccaagaatcaatgtatttatggcagtccccactatctacaccaagctgatggagtactatgataggcactttacccagccacatgcccaggatttcctgagagcagtgtgcgaggagaagatcaggttgatggtgagcggctccgcagcccttccactacccgtcctggaaaaatggaaaaacatcacagggcacacccttttagagcgctatggcatgactgagatcggcatggccctctccggccctctcaccaccgccgtgagacttcccggatcagtggggaccccactgcccggtgtgcaagtaaggatagtgagtgaaaacccccagagggaggcatgttcgtacactatccatgcagaaggcgatgaacgtggaactaaggtgactccaggtttcgaagagaaggaaggagagctgttagtcagaggtccttccgtgtttcgagagtattggaacaaacccgaagaaaccaagtccgcattcactctagatggctggttcaaaacgggggacaccgttgtgtttaaagacggccaatattggatccggggaagaacatctgtggatattattaagaccgggggatataaagtgtcagctctggaggtagagtggcacctgctggcccatccttcaatcaccgatgtagccgtgatcggggtgccagatatgacatggggacagagagtgacagccgtcgtaaccctccgggaaggacacagcctgagccaccgagagctgaaggaatgggctcggaacgtactggccccttatgctgtcccttctgagctagtcctggtggaagaaatccccaggaatcaaatgggcaagatcgacaaaaaagccctcatccgccacttccatcccagttag

SEQ ID NO: 251231 - DNA, 1731 bp, Artificial Sequence
  derived and/or modified sequence
atgctgccccacgtggtgctgaccttcagaagactgggctgcgccctggccagctgcagactggcccccgccagacacagaggcagcggcctgctgcacaccgcccccgtggccagaagcgacagaagcgcccccgtgttcaccagagccctggccttcggcgacagaatcgccctggtggaccagcacggcagacacacctacagagagctgtacagcagaagcctgagactgagccaggagatctgcagactgtgcggctgcgtgggcggcgacctgagagaggagagagtgagcttcctgtgcgccaacgacgccagctacgtggtggcccagtgggccagctggatgagcggcggcgtggccgtgcccctgtacagaaagcaccccgccgcccagctggagtacgtgatctgcgacagccagagcagcgtggtgctggccagccaggagtacctggagctgctgagccccgtggtgagaaagctgggcgtgcccctgctgcccctgacccccgccatctacaccggcgccgtggaggagcccgccgaggtgcccgtgcccgagcagggctggagaaacaagggcgccatgatcatctacaccagcggcaccaccggcagacccaagggcgtgctgagcacccaccagaacatcagagccgtggtgaccggcctggtgcacaagtgggcctggaccaaggacgacgtgatcctgcacgtgctgcccctgcaccacgtgcacggcgtggtgaacgccctgctgtgccccctgtgggtgggcgccacctgcgtgatgatgcccgagttcagcccccagcaggtgtgggagaagttcctgagcagcgagacccccagaatcaacgtgttcatggccgtgcccaccatctacaccaagctgatggagtactacgacagacacttcacccagccccacgcccaggacttcctgagagccgtgtgcgaggagaagatcagactgatggtgagcggcagcgccgccctgcccctgcccgtgctggagaagtggaagaacatcaccggccacaccctgctggagagatacggcatgaccgagatcggcatggccctgagcggccccctgaccaccgccgtgagactgcccggcagcgtgggcacccccctgcccggcgtgcaggtgagaatcgtgagcgagaacccccagagagaggcctgcagctacaccatccacgccgagggcgacgagagaggcaccaaggtgacccccggcttcgaggagaaggagggcgagctgctggtgagaggccccagcgtgttcagagagtactggaacaagcccgaggagaccaagagcgccttcaccctggacggctggttcaagaccggcgacaccgtggtgttcaaggacggccagtactggatcagaggcagaaccagcgtggacatcatcaagaccggcggctacaaggtgagcgccctggaggtggagtggcacctgctggcccaccccagcatcaccgacgtggccgtgatcggcgtgcccgacatgacctggggccagagagtgaccgccgtggtgaccctgagagagggccacagcctgagccacagagagctgaaggagtgggccagaaacgtgctggccccctacgccgtgcccagcgagctggtgctggtggaggagatccccagaaaccagatgggcaagatcgacaagaaggccctgatcagacacttccaccccagctag

SEQ ID NO: 251232 - DNA, 3664 bp, Artificial Sequence
  derived and/or modified sequence
gggggacgcgcttgggcgacggacgcgccgcgccggggaagctgttgggcgccggaactggtccggcccgactcacgaccccgcgggacccggccggaacccggcccgaccccggcgcgcgcgcggcggaggacgaggaagagttgtggcgaggcagatcctgccccgtggccgcggccgtctcgtgtcccaccggccttccgggttccagcgccaggcctggtgcctgccccaggaggatgagcatttgcattgcctgcaccttatcgtgcccttccacctgctgaagcagctgtgcctgccgctcttgtgaactgcgaacttccccttacctcctctctctggctcgggagctggctcggccgcctgtcagtgcaatgctgccccatgtggtgctcaccttccggcgcctgggctgcgccttggcgtcctgccggctggcgcctgcgagacacagaggaagtggtcttctgcacacagccccagtggcccgctcggacaggagcgccccggtgttcacccgtgccctggcctttggggacagaatcgccctggttgaccagcacggccgccacacgtacagggagctttattcccgcagccttcgcctgtcccaggagatctgcaggctctgcgggtgtgtcggcggggacctccgggaggagagggtctccttcctatgcgctaacgatgcctcctacgtcgtggcccagtgggcgtcatggatgagtggcggtgtggcagtccccctctacaggaagcatcccgcggcccagctggagtatgtcatctgcgactcccagagctctgtggtccttgccagccaggagtacctggagctcctgagcccggtggtcaggaagctgggggtcccgctgctgccgctcacaccagccatctacactggagcagtagaggaaccggcagaggtcccggtcccagagcagggatggaggaacaagggcgccatgatcatctacaccagtgggaccacggggaggcccaagggcgtgctgagcacgcaccaaaacatcagggctgtggtgaccgggctggtccacaagtgggcatggaccaaagacgacgtgatcctccacgtgctcccgctgcaccacgtccatggtgtggtcaacgcgctgctctgtcctctctgggtgggagccacctgtgtgatgatgcctgagttcagccctcagcaggtttgggaaaagttcttaagttctgaaacgccgcggatcaatgtctttatggcagtgcctacaatatacaccaagctgatggagtactacgacaggcattttacccagccgcacgcccaggatttcttgcgtgcagtttgtgaagaaaaaattaggctgatggtctcaggctcagctgccctgcccctcccagtgctggagaagtggaagaacatcacgggccacaccctgctggagcggtatggcatgaccgagatcggcatggctctgtccgggcccctgaccactgccgtgcgcctgccaggttccgtggggaccccactgcctggagtacaggtgcgcattgtctcagaaaacccacagagggaagcctgctcctacaccatccacgcagagggagacgagagggggaccaaggtgaccccagggtttgaagaaaaggagggggagctgctggtgaggggaccctccgtgtttcgagaatactggaataaaccagaagaaactaagagtgcattcaccctggatggctggtttaagacaggggacaccgtggtgtttaaggatggccagtactggatccgaggccggacctcagtggacatcatcaagactggaggctacaaggtcagcgccctggaggtggagtggcacctgctggcccaccccagcatcacagatgtggctgtgattggagttccggatatgacatggggccagcgggtcactgctgtggtgaccctccgagaaggacactcactgtcccacagggagctcaaagagtgggccagaaatgtcctggccccgtacgcggtgccctcggagctggtgctggtggaggagatcccgcggaaccagatgggcaagattgacaagaaggcgctcatcaggcacttccacccctcatgacccggcagactgggactgcgggtctggtggggagcagcagacgtccccttcacaccgagaaccacgggggcccgtccaagacctggcctcccttaaacctgaaccccccaaatcaggtcacgtagaatcaagaactgtttgggatgaaatcaccatgtggggtccccagcctcgggccagttgttgcagctcaaggagaccgtccctggtgtcacctctgcctggtcaccgccgacctcatctgtgcagcgcggtgcagccagcccctggccccacgtgctgaggcacctcccgccccacagtgccctgcagttgccaggctctccagggcaggtcccagaggtttcccacaaaaaacaaagactccactggaggaaacaagcccctgtcccacgccgtctgcacgtgcctgtgcctcacccagagccagtgtctcccggcccacataggaggtctgggcagccacccagggggccctcctgggaggagctgagggttcacaagcctcccagaaccagccctgtcccatgggttccgtgcatttcctggtgctgctcttggaggagagcagctcccactgtggggacacctgccaccctgcacactactgtgtgtccatcagcatgtgtcacagaaagtgcgtggacggatggccccggagctgctctgccgtgaccctgcctcaccccccagcgcagggactttccaggtcatctccacaccagcccctcagccggtgaaccctctctcccatcaccgtctccacccagacccccacctgccccatggcccccatttcatgtctgtggctcaccagcttttccccagacccagctccggagcccacaggcgtggccgatgcagaaacctcaggaaggtgtgttgtgaatgttgggtgcacccacgttgcatttacttagcggggccaattcagatgcacaggggccacatgcagaatccagaagtttctggacaattttcagaagaataggctgcctcctccccacagcctgggggaagtaacagtcatcgcccagcagtgtctggcctgaacttacccagaacattctgcccccggaatgcacgtctgaaagagtggccagaaacgagtgtgccgggcaggaggccagccccatctcaggctcacgtgcctctgacaggagaccagccccatctcaggctcacatgcctcgcggacagttggacgtggcctggggcccctgctcacttgagcatgtcgcccaccaagcttgtctgaggccacagagcagcgtcccagccctgttttccaggactggtgggtgccccagtccacggccctgccccacccgaactcctgcctcacggtgtggccttgtgcatccccatggcctgaccccgggaacagtcagaggaaggggtcccgccctcccgccagaggcctggacccaagggaacggcagtcagagactacagtccagacgtttgtgtctaggccttgctggtagctaaggaaatgccttctgttgggaaaaggtcaaatttaacatagcaaaatttttacttaattccactaa

SEQ ID NO: 251233 - DNA, 2247 bp, Artificial Sequence
  derived and/or modified sequence
acgaccccgcgggacccggccggaacccggcccgaccccggcgcgcgcgcggcggaggacgaggaagagttgtggcgaggcagatcctgccccgtggccgcggccgtctcgtagctcggccgcctgtcagtgcaatgctgccccatgtggtgctcaccttccggcgcctgggctgcgccttggcgtcctgccggctggcgcctgcgagacacagaggaagtggtcttctgcacacagccccagtggcccgctcggacaggagcgccccggtgttcacccgtgccctggcctttggggacagaatcgccctggttgaccagcacggccgccacacgtacagggagctttattcccgcagccttcgcctgtcccaggagatctgcaggctctgcgggtgtgtcggcggggacctccgggaggagagggtctccttcctatgcgctaacgatgcctcctacgtcgtggcccagtgggcgtcatggatgagtggcggtgtggcagtccccctctacaggaagcatcccgcggcccagctggagtatgtcatctgcgactcccagagctctgtggtccttgccagccaggagtacctggagctcctgagcccggtggtcaggaagctgggggtcccgctgctgccgctcacaccagccatctacactggagcagtagaggaaccggcagaggtcccggtcccagagcagggatggaggaacaagggcgccatgatcatctacaccagtgggaccacggggaggcccaagggcgtgctgagcacgcaccaaaacatcagggctgtggtgaccgggctggtccacaagtgggcatggaccaaagacgacgtgatcctccacgtgctcccgctgcaccacgtccatggtgtggtcaacgcgctgctctgtcctctctgggtgggagccacctgtgtgatgatgcctgagttcagccctcagcaggtttgggaaaagttcttaagttctgaaacgccgcggatcaatgtctttatggcagtgcctacaatatacaccaagctgatggagtactacgacaggcattttacccagccgcacgcccaggatttcttgcgtgcagtttgtgaagaaaaaattaggctgatggtctcaggctcagctgccctgcccctcccagtgctggagaagtggaagaacatcacgggccacaccctgctggagcggtatggcatgaccgagatcggcatggctctgtccgggcccctgaccactgccgtgcgcctgccaggttccgtggggaccccactgcctggagtacaggtgcgcattgtctcagaaaacccacagagggaagcctgctcctacaccatccacgcagagggagacgagagggggaccaaggtgaccccagggtttgaagaaaaggagggggagctgctggtgaggggaccctccgtgtttcgagaatactggaataaaccagaagaaactaagagtgcattcaccctggatggctggtttaagacaggggacaccgtggtgtttaaggatggccagtactggatccgaggccggacctcagtggacatcatcaagactggaggctacaaggtcagcgccctggaggtggagtggcacctgctggcccaccccagcatcacagatgtggctgtgattggagttccggatatgacatggggccagcgggtcactgctgtggtgaccctccgagaaggacactcactgtcccacagggagctcaaagagtgggccagaaatgtcctggccccgtacgcggtgccctcggagctggtgctggtggaggagatcccgcggaaccagatgggcaagattgacaagaaggcgctcatcaggcacttccacccctcatgacccggcagactgggactgcgggtctggtggggagcagcagacgtccccttcacaccgagaaccacgggggcccgtccaagacctggcctcccttaaacctgaaccccccaaatcaggtcacgtagaatcaagaactgtttgggatgaaatcaccatgtggggtccccagcctcgggccagttgttgcagctcaaggagaccgtccctggtgtcacctctgcctggtcaccgccgacctcatctgtgcagcgcggtgcagccagcccctggccccacgtgctgaggcacctcccgccccacagtgccctgcagttgccaggctctccagggcaggtcccagaggtttcccacaaaaaacaaagactccactggaggaaacaag

SEQ ID NO: 251234 - protein, 263 aa, Artificial Sequence
  derived and/or modified sequence
MAADVVGDVYVLVEHPFEYTGKDGRRVAIRPNERYRLLRRSTEHWWHVRREPGGRPFYLPAQYVRELPALGNPAAAAPPGPHPSPAAPEPLAYDYRFVSAAATAGPDGAPEESGGRTSSLCGPAQRGAATQRSSLAPGLPACLYLRPAAPVRPAQSLNDLACAAVSPPAGLLGSSGSFKACSVAGSWVCPRPLARSDSENVYEVIQDLHVPPREESAEQVPPRALGRGGGWRARDRARTEPGRKETRSAQRRARRPPLSEDFG

SEQ ID NO: 251235 - protein, 263 aa, Artificial Sequence
  derived and/or modified sequence
MAADVVGDVYVLVEHPFEYTGKDGRRVAIRPNERYRLLRRSTEHWWHVRREPGGRPFYLPAQYVRELPALGNPAAAAPPGPHPSPAAPEPLAYDYRFVSAAATAGPDGAPEESGGRASSLCGPAQRGAATQRSSLAPGLPACLYLRPAAPVRPAQSLNDLACAAVSPPAGLLGSSGSFKACSVAGSWVCPRPLARSDSENVYEVIQDLHVPPPEESAEQVPPRALGRGGGWRARDRARTEPGRKETRSAQRRARRPPLSEDFG

SEQ ID NO: 251236 - DNA, 792 bp, Artificial Sequence
  derived and/or modified sequence
atggccgccgacgtggtgggcgacgtgtacgtgctggtggagcaccccttcgagtacaccggcaaggacggcagaagagtggccatcagacccaacgagagatacagactgctgagaagaagcaccgagcactggtggcacgtgagaagagagcccggcggcagacccttctacctgcccgcccagtacgtgagagagctgcccgccctgggcaaccccgccgccgccgccccccccggcccccaccccagccccgccgcccccgagcccctggcctacgactacagattcgtgagcgccgccgccaccgccggccccgacggcgcccccgaggagagcggcggcagaaccagcagcctgtgcggccccgcccagagaggcgccgccacccagagaagcagcctggcccccggcctgcccgcctgcctgtacctgagacccgccgcccccgtgagacccgcccagagcctgaacgacctggcctgcgccgccgtgagcccccccgccggcctgctgggcagcagcggcagcttcaaggcctgcagcgtggccggcagctgggtgtgccccagacccctggccagaagcgacagcgagaacgtgtacgaggtgatccaggacctgcacgtgccccccagagaggagagcgccgagcaggtgccccccagagccctgggcagaggcggcggctggagagccagagacagagccagaaccgagcccggcagaaaggagaccagaagcgcccagagaagagccagaagaccccccctgagcgaggacttcggctag

SEQ ID NO: 251237 - DNA, 792 bp, Artificial Sequence
  derived and/or modified sequence
atggctgctgacgtggttggcgacgtatatgtactcgtggagcacccatttgaatataccggcaaggacggccggcgcgttgctatccgcccgaacgaacgttatcgtcttctgagaaggtctactgagcattggtggcacgttagaagggagcccggggggcgccccttttatctgcccgcccaatacgtgagagaactgcccgctctgggaaaccccgcagctgccgcaccaccaggtccccacccctctccagcagccccggagcccctggcctacgactatcgcttcgtgtctgccgcagccaccgctgggccagacggcgcaccagaggagtcaggtgggcgcacttcttccctgtgcggcccggcgcagagaggagccgccactcagcgctcgagcctcgccccaggcctgcccgcctgtttatatctgcgtccagctgctccagttaggcccgcacagtctctcaatgacctggcctgcgctgctgtctccccccccgccggcctactgggtagcagcggcagctttaaggcctgtagcgtcgcaggctcatgggtttgtccacgtcccttggctaggtctgactctgaaaacgtgtatgaggtgatccaagatttgcatgtcccaccccgcgaggagagcgcagaacaagtgcctccccgtgccctcgggagaggcggcggttggcgcgcccgggaccgtgcaagaactgagcctggcagaaaagagacacggtctgctcagcgaagggctcgtcggccccccctaagcgaggacttcggatag

SEQ ID NO: 251238 - DNA, 792 bp, Artificial Sequence
  derived and/or modified sequence
atggctgctgatgtggtgggagatgtgtatgtgctggtggagcacccctttgagtacaccgggaaggatggaagaagagtggccatccggcccaatgaaagataccgcctgctgcggcgcagcacagagcactggtggcacgtgagaagagagcccggcggccggcccttctacctgcctgcccagtatgtgcgggagctgcctgccctgggcaacccagctgctgctgcccctcctggcccccaccccagccctgctgcccctgagcccctggcctatgactacagatttgtgtctgctgctgccacagctggcccagatggagcccctgaggagagcggcggccgcaccagcagcctgtgtggccctgcccagagaggagctgccacccagaggagcagcctggcccctggcctgcctgcctgcctgtacctgcggcctgctgcccctgtgcggcctgcccagagcctgaatgacctggcctgtgccgctgtgtccccacctgctggcctgctgggcagcagcggcagcttcaaggcctgcagcgtggccggctcctgggtgtgcccccggcccctggcccggagtgacagtgaaaatgtgtatgaggtgatccaggacctgcacgtgcccccccgggaggagagcgctgagcaggtgcccccccgggccctgggccggggcggcggctggagggcccgggaccgggccaggacagagcccggcaggaaggagaccaggtctgcccagaggcgggcccggcggccccccctgtctgaggactttggatag

SEQ ID NO: 251239 - DNA, 792 bp, Artificial Sequence
  derived and/or modified sequence
atggccgccgacgtggtgggcgacgtgtacgtgctggtggagcacccattcgagtatacagggaaggatgggaggagggtggccatccgcccaaacgagcgatacaggcttcttcgccgaagtacggagcactggtggcacgtacgccgcgagccaggggggagaccattttacttgcccgcacagtatgtaagagagctgccagccctcgggaaccctgctgcagccgcccctcccgggccacatcccagtccagccgcaccagagcctttggcctatgactacaggtttgtctccgccgctgcaacagccggaccagatggggcccccgaagaaagcggcggacggacgtcctccctgtgcgggcctgctcagcgtggggctgcaactcagcggagctcactggcccctggactgccggcttgtctgtaccttcgtcccgcagctcccgtacgaccagcccagagcctgaatgatctggcctgcgctgccgtaagcccgccagcaggcctcctgggaagtagcggatccttcaaagcttgtagcgtggctggcagctgggtgtgtccccggcccctcgcccgatccgattcagagaacgtgtacgaggtaatccaggatctgcacgtaccacccagagaggaaagcgcagaacaggtgcccccacgcgccttgggacggggaggaggctggcgtgccagggatcgggctcgcaccgagcccggtaggaaagagacccgttcagctcaaagacgcgcccgccgcccccccctttctgaagattttggctag

SEQ ID NO: 251240 - DNA, 792 bp, Artificial Sequence
  derived and/or modified sequence
atggccgctgacgtggtgggggacgtgtacgtgttggtggaacatccttttgagtacaccggcaaggacggcaggcgtgttgccataaggcccaatgagcggtacagattgctgcggcgatcgacagaacattggtggcacgtccgcagggagcccggagggaggcctttctacctgccagctcagtatgttcgggaactccctgccctagggaaccctgctgccgcagccccacccggtccccatcctagcccagccgcaccagaacccctggcctacgattatcggtttgtatcggccgcagcaacagccggacctgatggagctccagaggaaagcgggggaagaacgtcaagcctctgcggaccagctcaaagaggtgccgcaacccaacggtcctcactggcacctggtctcccggcatgcctgtacctgcggccagctgctccagtgcgtccagcacagtcgctgaacgacctcgcctgcgccgcagtgagccctcccgcagggctgctcggctccagcgggagcttcaaagcatgctcggtagccggatcttgggtgtgtccgagacccctggcaagatccgattcggaaaacgtgtatgaggtgatacaggatcttcacgtaccaccaagagaggaatccgccgaacaggtgccgccaagggctctcggcagagggggaggttggcgcgctagggatcgggcaagaaccgaacctggacggaaggaaactaggagcgcccagcgcagggctagacggcctcctctgagcgaggactttggctag

SEQ ID NO: 251241 - DNA, 1376 bp, Artificial Sequence
  derived and/or modified sequence
ggaagttctgcccggcgctctccgccggtgcctccctggttatattgttgaacaggaaacccggcagcgcgggagccgcacagtcgaggagggagggcgggacgccgagcccacgcgcgcctgccggggcaagtggaggcgaagccggcgagcggacgccccgagggtcggggaaggaaccgaggtccggtccccttcttatccagcccgagacatcgagctccggtgggcgtccctgcgctgggaatcccgctcggagtttttccaggcccggccgggctgctccgggaaaggccctgctcctgttccgcgcagcctctccggcctcgcccctggaaaccccgcccagggcgatggtaggggcctaacctgcagccaccgccggctccgcccacccagcccatgggctccctgaggcccgcccagccgacgaaaacgccgcggccgcgatggcggcggacgtggtgggggacgtgtacgtgctggtggagcaccccttcgagtacaccggcaaggacgggcgccgcgtggccatccggccgaatgagcgctaccggctgctgcggcgcagcaccgagcactggtggcacgtgcggcgtgagcccggcggccgccccttctacctgcctgcgcagtacgtgcgcgagctgcccgcgctgggcaaccctgccgccgccgcgccgccaggtcctcacccgagccccgcggcccctgagccgctcgcctacgactaccggtttgtgagcgcggcggcgaccgcgggccccgacggcgcccccgaggagtccggaggccgaaccagctccctgtgcggccctgcgcaacgcggcgccgcgacccagcgcagcagcctggcgcccggcctgccagcctgcctgtacctgcggcccgcggcgcccgtgcggcccgcgcagtccctgaacgacctggcctgcgccgccgtctcgcctcccgccggcctcctaggaagcagcggcagcttcaaggcctgcagcgtggcgggctcctgggtgtgcccgcggcctctggcgcgcagcgactcagagaacgtctacgaggtcatccaggacttgcacgtcccgccgcgggaggagagcgcagagcaggtacctccccgggcgctggggcgcggaggcgggtggcgcgctagggaccgcgcccgcacggagccggggcgcaaggagacccgctccgctcagcgtcgggcacgacgcccacctctgtccgaagacttcggatgagctccctctccccaaccgcgaaacgtgaggggtgcacgcccgcagtccctcatcagcaattcccaagctccaaagctccctggaagcccagaggcttttcgtaatccaattggtggcaaaattgcgcttgaactg

SEQ ID NO: 251242 - DNA, 792 bp, Artificial Sequence
  derived and/or modified sequence
atggcagcagatgttgtcggggatgtctacgttctggttgaacatcccttcgaatacacaggcaaggacggtcggagggtggcaatcagaccaaacgaaagatacaggttgttgcgcaggtcgacggagcactggtggcacgtgcgtagagagcctgggggtcgaccattttacctccccgcccagtatgtgcgggagctgcctgccctgggcaatcccgccgcagcggccccccccgggcctcacccatctccagccgctcctgagccccttgcatacgactacaggttcgtgtcggcggcagccactgccggacccgacggcgcgccagaggagagcggggggagggcctcatccttgtgcggccccgcacaaagaggcgcagcaacacagaggtcgtccctggccccaggcctcccggcgtgtctgtacctgaggccggcagccccagtcagaccagctcagtcgttgaatgatctcgcctgtgctgctgtgagcccaccagctggactgctggggagctctggctcttttaaggcttgcagtgtagccggatcatgggtgtgtccgcggccactagcccgcagcgattccgaaaatgtttatgaggtgatccaggacctgcatgtgcccccacccgaggagtctgccgagcaggttccgcccagggctcttggtaggggtggcggatggcgcgcccgagaccgcgctagaacggagccaggccgcaaagagacgcgtagtgcccaaagacgtgcgaggcgaccccctctctcggaggatttcggctag

SEQ ID NO: 251243 - DNA, 792 bp, Artificial Sequence
  derived and/or modified sequence
atggccgcagacgtggtgggggatgtgtacgtgctggtcgagcacccttttgagtataccggcaaggatggcaggcgggtcgcaattagaccaaatgagagatatcggttactgaggaggagcaccgaacactggtggcatgttaggcgggaacctggtggcaggcccttttatctgccggcccagtacgtcagagagctacccgcccttggcaatccggccgctgcagctccgcctgggccccacccctctcccgccgcaccagaacccctggcatatgattaccgcttcgtcagcgcagccgccactgccggccccgatggggcacccgaggaatcaggcggacgcgcaagttcactttgtggacctgcacagaggggcgccgccacccagcgatctagtctggcgccaggcctgcccgcctgtttgtaccttcggcctgctgccccagtacggcctgctcaatccttgaacgatttggcatgtgccgccgtgtccccacccgctgggctgctcggatcttctggcagtttcaaagcctgctcagtggcaggcagttgggtctgtcccaggccactggcccgctctgatagcgaaaatgtctacgaggtgatccaagatctgcacgtcccgcctcctgaggaaagcgctgagcaggtgccgcctagagccctgggcaggggcgggggctggagagccagggatagagcacgcaccgagccaggccgcaaggaaaccagaagtgctcagaggagagcaagaagacctccactatccgaggattttggatag

SEQ ID NO: 251244 - DNA, 792 bp, Artificial Sequence
  derived and/or modified sequence
atggctgctgatgtggtgggagatgtgtatgtgctggtggagcacccctttgagtacaccgggaaggatggaagaagagtggccatccggcccaatgaaagataccgcctgctgcggcgcagcacagagcactggtggcacgtgagaagagagcccggcggccggcccttctacctgcctgcccagtatgtgcgggagctgcctgccctgggcaacccagctgctgctgcccctcctggcccccaccccagccctgctgcccctgagcccctggcctatgactacagatttgtgtctgctgctgccacagctggcccagatggagcccctgaggagagcggcggccgggccagcagcctgtgtggccctgcccagagaggagctgccacccagaggagcagcctggcccctggcctgcctgcctgcctgtacctgcggcctgctgcccctgtgcggcctgcccagagcctgaatgacctggcctgtgccgctgtgtccccacctgctggcctgctgggcagcagcggcagcttcaaggcctgcagcgtggccggctcctgggtgtgcccccggcccctggcccggagtgacagtgaaaatgtgtatgaggtgatccaggacctgcacgtgcccccacctgaggagagcgctgagcaggtgcccccccgggccctgggccggggcggcggctggagggcccgggaccgggccaggacagagcccggcaggaaggagaccaggtctgcccagaggcgggcccggcggccccccctgtctgaggactttggatag

SEQ ID NO: 251245 - DNA, 792 bp, Artificial Sequence
  derived and/or modified sequence
atggccgccgacgtggtgggcgacgtgtacgtgctggtggagcacccctttgaatatacaggtaaggatggtagacgtgttgctatcagaccaaacgagagataccgtctgttgcgacgctccactgaacattggtggcatgttcgacgtgaaccagggggtcggcccttctaccttcccgcccagtacgtccgcgagctcccggcactaggaaatcctgccgcggccgcaccccccgggccacatccttcgcccgcggcccctgagcctctggcatatgactaccggtttgttagtgcggccgctactgccgggccagatggggcgcctgaggagtcaggcggcagagcctcatccctgtgtggccccgcacagcgcggggctgctacccagagatccagcctggctcccggcctgcctgcatgcctttatttgagaccagccgcccccgtgcgaccagcccagagcctcaacgacctggcatgcgctgcagtatctccgcccgctggactcttaggatccagcggcagtttcaaggcctgcagcgtcgccggctcatgggtgtgccctagaccactggccaggagcgactcggagaatgtatacgaggtgatccaggacctgcatgtacccccacctgaggagtctgccgaacaggtgcccccccgcgcactgggacgcggtggaggatggcgagcccgcgatcgggcccgcacagagcccggtcggaaagagactcgatctgcgcagcggcgcgcccgccgaccacctttgtctgaggatttcggctag

SEQ ID NO: 251246 - DNA, 792 bp, Artificial Sequence
  derived and/or modified sequence
atggccgccgacgtggtgggcgacgtgtacgtgctggtggagcacccgtttgaatatacaggcaaggatgggcgccgggttgcaatccgtcctaacgagagataccgccttctgcgccgttccacggagcattggtggcatgtgaggcgagagccaggcggccgccctttctaccttcccgcccagtacgtaagagaactgcctgctctggggaatccagctgcggctgcaccacctggcccccaccctagtcccgcagcccctgagccccttgcctacgattacagattcgtgtcagccgccgcgacagccggaccggacggagcaccagaggagtctggaggaagagcaagtagtctttgtggccccgctcagagaggcgccgctacgcagagaagttctttggccccggggctcccggcttgcctctatctgcggccagctgctcctgtgagaccagctcagtccctgaatgatctcgcttgcgctgccgtcagcccccctgccggtctattgggttcttcaggatctttcaaagcttgcagcgttgcaggcagctgggtgtgccctagacctctcgcgaggagtgacagcgagaatgtatacgaagtgatacaagacctgcacgtacctcccccagaggaatctgccgagcaggtgcccccccgggcactggggcgaggtggtggttggagagcgcgagatcgagccagaacagagcctggaaggaaagagacacgtagtgctcagagacgggctcggagaccgcctttgagcgaagattttggctag

SEQ ID NO: 251247 - DNA, 792 bp, Artificial Sequence
  derived and/or modified sequence
atggctgccgacgttgtcggggatgtctatgtgctggttgagcatccttttgagtacacaggcaaggacggccgacgagttgccattaggcccaatgagcgctataggttgttgagacggtctactgaacactggtggcacgtccgcagagaaccaggtggccgaccattctacctgccagctcagtatgtccgggaattgcccgcattgggaaaccctgctgcggcagcccctcctggtcctcatccaagtcccgcagcccctgagcccctggcctatgattacaggttcgtctcagccgctgccactgccggaccagacggagctcctgaggagtctggtggcagagcgtcttctctgtgtggacccgcacagcgaggcgcagccacccagcgcagcagtttggcgccaggcctaccagcttgcctgtacttgcgaccggcagccccagtgcggccagcccaatctctgaatgatctcgcttgtgcagctgtgagcccccctgccggacttctgggatcatctgggagttttaaggcttgcagcgttgctgggtcatgggtctgtccgagaccactggccaggagcgatagcgaaaatgtgtacgaggtgatacaggacctgcacgtcccccctccagaggagtcagccgagcaggtcccacccagagcattgggccgagggggtgggtggcgagctagggatcgagccagaaccgagcccggaaggaaagaaacaagatcagcgcaacggagagcccgaagacccccattgagcgaagactttgggtag

SEQ ID NO: 251248 - DNA, 792 bp, Artificial Sequence
  derived and/or modified sequence
atggccgcagatgtcgtgggggatgtgtatgtgctggtggaacacccctttgagtacacgggaaaggatggtcgacgagttgctatacgacctaatgagagatacaggttgctgcgcaggtcgacagaacactggtggcacgtcaggcgggagccaggaggccgtccattttatctcccggcacagtatgttcgagagctgccagctctcggcaatcctgctgcagcagctccacctggacctcatccctcgcctgccgctcccgaaccactcgcttatgattaccgatttgttagcgctgccgctactgccggtcccgacggagcaccggaagaaagcggcggacgggctagtagcctctgcggtccagcacaacgtggcgcagccactcaacgcagctcactggctcctgggctcccggcatgcttatatctgcgcccagccgcacctgtccgtcccgctcagtcgcttaacgacctcgcctgcgccgcagtctcccctccagcagggctgctgggttcctcagggtccttcaaggcttgtagtgtcgcaggatcctgggtgtgtcctcgacccttggccaggagtgactccgagaatgtctatgaagtaattcaggatctgcacgtgcctccacctgaggagagcgctgaacaagttcctcctcgggcactgggacgcggaggcggatggagagccagagaccgtgcacgcacggaacccggaagaaaggaaacgcgaagtgcccagaggagagctcgcaggcctcccctctctgaggatttcggctag

SEQ ID NO: 251249 - DNA, 1376 bp, Artificial Sequence
  derived and/or modified sequence
ggaagttctgcccggcgctctccgccggtgcctccctggttatattgttgaacaggaaacccggcagcgcgggagccgcacagtcgaggagggagcgcgggacgccgagcccacgcgcgcctgccggggcaagtggaggcgaagccggcgagcggacgccccgagggtcggggaaggaaccgaggtccggtccccttcttatccagcccgagacatcgagctccggtgggcgtccctgcgctgggaatcccgctcggagtttttccaggcccggccgggctgctccgggaaaggccctgctcctgttccgcgcagcctctccggcctcgcccctggaaaccccgcccagggcgatggtaggggcctaacctgcagccaccgccggctccgcccacccagcccatgggctccctgaggcccgcccagccgacgaaaacgccgcggctgcgatggcggcggacgtggtgggggacgtgtacgtgctggtggagcaccccttcgagtacaccggcaaggacgggcgccgcgtggccatccggccgaatgagcgctaccggctgctgcggcgcagcaccgagcactggtggcacgtgcggcgtgagcccggcggccgccccttctacctgcctgcgcagtacgtgcgcgagctgcccgcgctgggcaaccctgccgccgccgcgccgccaggtccccacccgagccccgcggcccctgagccgctcgcctacgactaccggtttgtgagcgcggcggcgaccgcgggccccgacggcgcccccgaggagtccggaggccgagccagctccctgtgcggccctgcgcaacgcggcgccgcgacccagcgcagcagcctggcgcccggcctgccagcctgcctgtacctgcggcccgcggcgcccgtgcggcccgcgcagtccctgaacgacctggcctgcgccgccgtctcgcctcccgccggcctcctaggaagcagcggcagcttcaaggcctgcagcgtggcgggctcctgggtgtgcccgcggcctctggcgcgcagcgactcagagaacgtctacgaggtcatccaggacttgcacgtcccgccgccggaggagagcgcagagcaggtacctccccgggcgctggggcgcggaggcgggtggcgcgctagggaccgcgcccgcacggagccggggcgcaaggagacccgctccgctcagcgtcgggcacgacgcccacctctgtccgaagacttcggatgagctccctctccccaaccgcgaaacgtgaggggtgcacgcccgcagtccctcatcagcaattcccaagctccaaagctccctggaagcccagaggcttttcgtaatccaattggtggcaaaattgcgcttgaactg

SEQ ID NO: 251250 - DNA, 2319 bp, Artificial Sequence
  derived and/or modified sequence
gcactgcttagtggacctcatttaatcttcccaataatccagtgaagtgggtgttactatcccattgacaggaaagaaatctgagctgcagagataaggcagaactcccaaggtgccaccaaggctcagacacacagattctcagaggaagtgtggactcacaggtgggcaatgcctagcagaggcaaagatatagaggtaagggagttccttacttactatatcttacaaagatatagaggtaagggagttccttacttactatatcttacaaagatatagaggtaagggagttcctctgaatctgggtggccagattcagcttcccacccaaccctgggtccccaggaggtggtgtcaagagaggccatggcctgggatgcgggcccttcttcctcccagaacactggcctgaatcagccagctcttggcacacacagccaggtccacaggcacaactgttccttggggcccctgagggcagggggtgtgctggggctgtggcttgtaatgtctggagtgagtgcaggctcagatcagggcgaggctgcttgtccagagaggcagaaaattctccaacagaagacccccaaggcggagggccctggggctggactcctggaggttgttctgagcttaccctgtggacggattggagggtggccctccttccccacaaggatcaagagggggtgggggatggtgggagggcaatctggccaggcgaacctgcgggggaggctcccgccctccccagtcccaccatctcagccccgcagcctctttctccctggagacagccaggtgcggcccaggatcccgggaaaggcaggggagggggtggcgtcttcgctcctcaggcgctggcccggcccagaggggacaggaagccaggacaccggggattgtctctcgcaaccgcagcccagccccagtccgggaggaagttctgcccggcgctctccgccggtgcctccctggttatattgttgaacaggaaacccggcagcgcgggagccgcacagtcgaggagggagcgcgggacgccgagcccacgcgcgcctgccggggcaagtggaggcgaagccggcgagcggacgccccgagggtcggggaaggaaccgaggtccggtccccttcttatccagcccgagacatcgagctccggtgggcgtccctgcgctgggaatcccgctcggagtttttccaggcccggccgggctgctccgggaaaggccctgctcctgttccgcgcagcctctccggcctcgcccctggaaaccccgcccagggcgatggtaggggcctaacctgcagccaccgccggctccgcccacccagcccatgggctccctgaggcccgcccagccgacgaaaacgccgcggctgcgatggcggcggacgtggtgggggacgtgtacgtgctggtggagcaccccttcgagtacaccggcaaggacgggcgccgcgtggccatccggccgaatgagcgctaccggctgctgcggcgcagcaccgagcactggtggcacgtgcggcgtgagcccggcggccgccccttctacctgcctgcgcagtacgtgcgcgagctgcccgcgctgggcaaccctgccgccgccgcgccgccaggtccccacccgagccccgcggcccctgagccgctcgcctacgactaccggtttgtgagcgcggcggcgaccgcgggccccgacggcgcccccgaggagtccggaggccgagccagctccctgtgcggccctgcgcaacgcggcgccgcgacccagcgcagcagcctggcgcccggcctgccagcctgcctgtacctgcggcccgcggcgcccgtgcggcccgcgcagtccctgaacgacctggcctgcgccgccgtctcgcctcccgccggcctcctaggaagcagcggcagcttcaaggcctgcagcgtggcgggctcctgggtgtgcccgcggcctctggcgcgcagcgactcagagaacgtctacgaggtcatccaggacttgcacgtcccgccgccggaggagagcgcagagcaggtacctccccgggcgctggggcgcggaggcgggtggcgcgctagggaccgcgcccgcacggagccggggcgcaaggagacccgctccgctcagcgtcgggcacgacgcccacctctgtccgaagacttcggatgagctccctctccccaaccgcgaaacgtgaggggtgcacgcccgcagtccctcatcagcaattcccaagctccaaagctccctggaagcccagaggcttttcgtaatccaattggtggcaaaattgcgcttgaactga

SEQ ID NO: 251251 - DNA, 792 bp, Artificial Sequence
  derived and/or modified sequence
atggccgccgacgtggtgggcgacgtgtacgtgctggtggagcaccccttcgagtacaccggcaaggacggcagaagagtggccatcagacccaacgagagatacagactgctgagaagaagcaccgagcactggtggcacgtgagaagagagcccggcggcagacccttctacctgcccgcccagtacgtgagagagctgcccgccctgggcaaccccgccgccgccgccccccccggcccccaccccagccccgccgcccccgagcccctggcctacgactacagattcgtgagcgccgccgccaccgccggccccgacggcgcccccgaggagagcggcggcagagccagcagcctgtgcggccccgcccagagaggcgccgccacccagagaagcagcctggcccccggcctgcccgcctgcctgtacctgagacccgccgcccccgtgagacccgcccagagcctgaacgacctggcctgcgccgccgtgagcccccccgccggcctgctgggcagcagcggcagcttcaaggcctgcagcgtggccggcagctgggtgtgccccagacccctggccagaagcgacagcgagaacgtgtacgaggtgatccaggacctgcacgtgcccccccccgaggagagcgccgagcaggtgccccccagagccctgggcagaggcggcggctggagagccagagacagagccagaaccgagcccggcagaaaggagaccagaagcgcccagagaagagccagaagaccccccctgagcgaggacttcggctag

SEQ ID NO: 251252 - protein, 445 aa, Artificial Sequence
  derived and/or modified sequence
MASSKLREPVDEVFDLDLAVPETARLDSSLHKARAQLLAKGRRHRPSRSRLRDSASSAEDGEGSDGPGGKVTDGCGSPLHRLRSPLHSGPGSPAGGSFCLDPPGLRRSLDEDEPPPSPLTRYRPLHNAASHEGLAAASCSPPRSAPSSDSSPSFVRRHPRAEPHSEDDSRDASPPEPASPTIGLDKKTRRKFLDLGVTLRRASTGKSRKEKGSNRLSMGSRESVEGSGRSGGSPFLPFSWFTDSGKGSASSGSTTSPTCSPKHEGFSPKKSASQAQLLAHAQEALSNSWCLVQDFGSTQIGMESTLSDDSTPPSSSPKIPSGPWQEAKCSYPYHTLSQSSDEFLDEPLPPVHHWTSQQVGQWLQSLNLEQYAAEFAARQVDGPQLLQLDGSKLKSLGLSNSHDRALVKRKLKEMAAAAEKERKAQEKAARQREKLRRREQEAKKS

SEQ ID NO: 251253 - DNA, 1338 bp, Artificial Sequence
  derived and/or modified sequence
atggccagcagcaagctgagagagcccgtggacgaggtgttcgacctggacctggccgtgcccgagaccgccagactggacagcagcctgcacaaggccagagcccagctgctggccaagggcagaagacacagacccagcagaagcagactgagagacagcgccagcagcgccgaggacggcgagggcagcgacggccccggcggcaaggtgaccgacggctgcggcagccccctgcacagactgagaagccccctgcacagcggccccggcagccccgccggcggcagcttctgcctggacccccccggcctgagaagaagcctggacgaggacgagcccccccccagccccctgaccagatacagacccctgcacaacgccgccagccacgagggcctggccgccgccagctgcagcccccccagaagcgcccccagcagcgacagcagccccagcttcgtgagaagacaccccagagccgagccccacagcgaggacgacagcagagacgccagcccccccgagcccgccagccccaccatcggcctggacaagaagaccagaagaaagttcctggacctgggcgtgaccctgagaagagccagcaccggcaagagcagaaaggagaagggcagcaacagactgagcatgggcagcagagagagcgtggagggcagcggcagaagcggcggcagccccttcctgcccttcagctggttcaccgacagcggcaagggcagcgccagcagcggcagcaccaccagccccacctgcagccccaagcacgagggcttcagccccaagaagagcgccagccaggcccagctgctggcccacgcccaggaggccctgagcaacagctggtgcctggtgcaggacttcggcagcacccagatcggcatggagagcaccctgagcgacgacagcaccccccccagcagcagccccaagatccccagcggcccctggcaggaggccaagtgcagctacccctaccacaccctgagccagagcagcgacgagttcctggacgagcccctgccccccgtgcaccactggaccagccagcaggtgggccagtggctgcagagcctgaacctggagcagtacgccgccgagttcgccgccagacaggtggacggcccccagctgctgcagctggacggcagcaagctgaagagcctgggcctgagcaacagccacgacagagccctggtgaagagaaagctgaaggagatggccgccgccgccgagaaggagagaaaggcccaggagaaggccgccagacagagagagaagctgagaagaagagagcaggaggccaagaagagctag

SEQ ID NO: 251254 - DNA, 42 bp, Artificial Sequence
  derived and/or modified sequence
atggccagcagcaagctgagagagcccgtggacgaggtgtag

SEQ ID NO: 251255 - DNA, 1338 bp, Artificial Sequence
  derived and/or modified sequence
atggctagctccaaactccgggagccggttgatgaagtattcgacctggatctggccgtgccagagactgcccggcttgacagcagcctccacaaagccagagcacaactgctagctaaggggaggcgccaccggcctagccgatcacggctgagagactcggcttcttccgccgaagacggagaaggtagtgatggcccagggggtaaggtcactgatggctgtggttcccccctccaccgacttagaagccccctgcatagtggtcccgggtcacccgccggaggctctttctgcctggatccccctggcctgcgtcgtagtttagatgaggatgagcctcccccatcgcccttgaccaggtacagaccgctccacaacgccgctagccacgaagggctggctgcagctagttgctcgccaccaaggtcagctccatcctcagatagctcaccaagcttcgtcagaaggcacccacgagctgaaccgcacagtgaggacgatagccgcgatgcttcccctcccgaacctgccagtccaacaatcggtcttgataaaaaaacacggcgcaagttcctcgatctcggcgtaaccctacgcagggcatccacaggcaaaagcagaaaagagaagggaagcaatcgtctgtccatgggaagcagggagtctgtggaaggatccggaaggtccggggggagtccttttctgcccttttcttggttcacagattctggcaaggggagcgcctcctctggcagcacgaccagtccgacgtgtagtccaaagcatgaaggattcagccccaagaaaagtgccagccaagcccagctgctggcacacgcccaagaagcactgtctaactcttggtgcctggtgcaggacttcgggtcaacgcagattggtatggaatccacactgagcgacgattctacccctccttcatcctctccaaaaatcccttcaggaccctggcaagaggccaaatgctcctacccataccatactctgtctcagtcatccgacgagttcttagacgagccattgccaccagtgcaccattggacctctcagcaggtgggtcagtggctccagtccctgaacctcgaacagtatgccgcggagtttgcagccagacaggtggacggcccccagctactgcagttggatgggagtaaactgaaaagcctcgggctttcgaatagccatgatcgcgccctcgtaaaacgtaaattgaaagagatggccgccgccgcagaaaaggagcggaaggcccaggaaaaggctgcccgccagagagagaagctgagaagacgcgaacaggaagcgaaaaagagctag

SEQ ID NO: 251256 - DNA, 42 bp, Artificial Sequence
  derived and/or modified sequence
atggcttcctcaaagctaagagagcccgtggatgaagtctag

SEQ ID NO: 251257 - DNA, 1338 bp, Artificial Sequence
  derived and/or modified sequence
atggccagcagcaagctgcgggagcctgtggatgaggtgtttgacctggacctggccgtgcctgagacagcccggctggacagcagcctgcacaaggcccgggcccagctgctggccaagggccgccgccaccggcccagccgcagccggctgcgggacagcgccagcagcgcagaagatggagagggcagtgatggccctgggggcaaggtgacagatggctgcggcagccccctgcaccggctgcggagccccctgcacagcggccctggcagccctgctgggggcagcttctgcctggaccccccaggcctgcggcgcagcctggatgaagatgagcccccacccagccccctgacccgctaccggcccctgcacaatgctgccagccatgagggcctggccgccgccagctgcagccccccaagaagtgcccccagcagtgacagcagccccagctttgtgcggcggcaccccagggctgagccccacagtgaagatgacagcagagatgccagccccccagagcccgccagccccaccatcggcctggacaagaagaccaggaggaagttcctggacctgggcgtgaccctgcggcgggccagcacaggcaagagcaggaaggagaagggcagcaaccggctgtccatgggcagccgggagagcgtggagggcagcggccgcagcggcggcagccccttcctgcccttctcctggttcacagacagcggcaagggcagcgccagcagcggcagcaccaccagccccacctgcagccccaagcatgagggcttcagccccaagaagagcgccagccaggcccagctgctggcccacgcccaggaggccctgagcaacagctggtgcctggtgcaggactttggcagcacccagatcggcatggagagcaccctgagtgatgacagcaccccacccagcagcagccccaagatccccagcggcccctggcaggaggccaagtgcagctacccctaccacaccctgagccagagcagtgatgagttcctggatgagcccctgccccctgtgcaccactggaccagccagcaggtgggccagtggctgcagagcctgaacctggagcagtatgctgctgagtttgctgcccggcaggtggatggcccccagctgctgcagctggatggcagcaagctgaagagcctgggcctgagcaacagccatgaccgggccctggtgaagaggaagctgaaggagatggctgctgctgctgagaaggagaggaaggcccaggagaaggccgcccggcagcgggagaagctgcggcggcgggagcaggaggccaagaagagctag

SEQ ID NO: 251258 - DNA, 42 bp, Artificial Sequence
  derived and/or modified sequence
atggccagcagcaagctgcgggagcctgtggatgaggtgtag

SEQ ID NO: 251259 - DNA, 1338 bp, Artificial Sequence
  derived and/or modified sequence
atggccagcagcaagctgcgggagcccgtggacgaggtgttcgacctggacctcgccgtccccgagacagcacgactggatagcagccttcacaaggccagggcccagctgctcgccaaaggccgccggcaccgaccatccaggagtcgactgcgagattcggctagcagcgccgaagacggcgagggatctgatggtcctggcggcaaagtaacagacggatgcggcagccccttacaccgtctgagaagccctttgcattctgggcccggtagccccgcaggcggttccttttgcttggatccccctgggttacgccgtagtttggacgaggacgaacctccaccgagccccctgactcgttatcgtcccctgcacaatgccgccagccatgagggcctcgcggcagcttcgtgcagtcctcctcgatctgcgcccagttccgactcctctccaagctttgtacgcaggcatcctcgcgccgagcctcactcagaagacgatagcagggacgcttccccgccagagcctgcttctcccaccatcgggcttgacaagaagactcgacgtaaattcctggatctgggagttactcttagacgcgcatctaccggaaagtctcggaaagaaaagggcagcaatagactgtctatgggatcccgggaaagtgtagaaggatccgggcgatccggggggagtccatttctgccattttcctggttcaccgatagtggcaagggctcagccagctcaggatcaacgacttctccaacctgcagccctaaacacgaaggcttttctcccaaaaagtcggcatctcaggcccagctgctggcccacgcacaggaggcgctatccaactcatggtgtctggtacaggactttggatctacccaaattggcatggaatcaactctgtcagatgactctacacctccttcgtccagcccaaagattccatctggcccctggcaggaagccaaatgctcatacccatatcatacgctgtcccaaagctcagacgagttcctagacgaaccccttcctcccgtgcaccactggacaagccagcaggtcggccagtggctccagtccctcaacctggagcagtacgcagcagaattcgctgcaagacaggtggacgggccccagcttctgcagctggacggcagtaagctcaagtcattggggctgtctaattcccacgaccgggccctggtgaagaggaaactcaaagagatggctgctgctgcagagaaggagagaaaggcccaggagaaagcggcgcggcagcgcgagaagctacggcgaagggagcaggaggctaaaaagagttag

SEQ ID NO: 251260 - DNA, 42 bp, Artificial Sequence
  derived and/or modified sequence
atggccagcagcaagctgcgggagcccgtggacgaggtgtag

SEQ ID NO: 251261 - DNA, 1338 bp, Artificial Sequence
  derived and/or modified sequence
atggcaagttccaagctgagagagcctgtggacgaggtgttcgacctggacttggctgtgccggaaactgctcggctggacagtagcctccataaagcaagagcacagctgctggccaaaggccgtaggcaccggccatcacgctcaaggctgcgcgattcagcgagcagcgctgaagatggagagggctccgatggtcctggcggaaaggttacagacggctgcggaagccctctccacaggctacgaagtccgctacactcaggccctggatcacctgcgggagggagcttctgcctggacccaccgggactgcgtagatctctcgacgaggatgaaccacctccatcccctctcaccaggtaccggccactccacaacgcagcaagccatgagggactggcagccgcttcatgctctccccctaggagtgcaccctcaagcgacagctcccccagctttgtcaggcgccatcccagagcagagccgcattcggaggatgactcgagggatgcgtctccccctgagccagcctctcccacaattggactggataaaaaaaccagacgcaagtttttagacctcggcgtcacactcaggcgggctagtacaggtaaaagcaggaaagagaaaggaagcaaccgcctgtcaatgggaagccgtgagtccgtagaagggtctggtagaagcggtggctcaccatttcttccatttagttggttcaccgactccggtaagggttctgctagctcagggtctactacctctccaacctgtagccctaagcatgaggggttttctccaaagaagtcagccagccaagctcaactactagcgcatgcacaggaggccctgagcaactcttggtgtctggtgcaggactttgggtccacacagatcggaatggagtccactcttagtgatgattctacgccaccaagcagctcccctaaaatacccagcgggccatggcaggaggccaaatgctcttatccatatcatactcttagccagagcagtgatgaatttcttgacgagcctttaccacctgtgcatcactggactagccagcaagtgggtcaatggctccaatccctgaatcttgagcaatatgccgctgaatttgctgctcggcaggttgatggacctcagctgcttcagttggacggctcaaagcttaaatcactgggtctcagcaactcccatgatagagccttagttaagcgtaaactgaaggagatggccgcagccgctgagaaagaaaggaaagcgcaggagaaagccgcaagacagcgcgagaagctccgacgtcgggagcaggaggccaaaaagtcgtag

SEQ ID NO: 251262 - DNA, 42 bp, Artificial Sequence
  derived and/or modified sequence
atggcaagctctaagcttagggaaccagtggacgaggtgtag

SEQ ID NO: 251263 - DNA, 1938 bp, Artificial Sequence
  derived and/or modified sequence
ggcgctcgctcttcgctcttctctctctctctctctctgtcacacacacacacacgcacacgcacacgcacacacacacggagcatcctcccgtcaggtctcctggtccagccccgcccgcgcctcctgcttccagcgaacctgttccctctccccacatcccccgccctccatctcccccggctctgggacccttcccgccgacctcacccccacccccgggatggagcggctcgagcccgcccggagccccccgcggccggggtgacggtccccccacccctctcctgcccggcccccgcctcgagcaccatgggcctgaggggttcccggggcgccagacgctgaagatgaccgatgccggagctctcttgagtcatggcttcttcaaagctccgagaacccgtggatgaagtttttgacctggacttggctgtgccagagacggccagactggacagcagtttacacaaggcccgggcccaactgttggccaagggccggagacaccggccatcccgctccaggcttcgggacagtgccagctccgcggaggatggtgaaggctcggatgggcccggaggcaaggtgaccgatggctgcgggagccccctgcaccggctgcgctcgcctttgcactcaggcccggggtccccggccgggggctctttctgcctggatcctccggggttgcggcgcagcctggacgaggacgagccgccgccctcgccgctcacacgctaccggcccctgcacaacgctgcgtcgcacgagggcctggccgccgcctcctgctctccgccgcgctccgcgccctcctccgacagctcccccagcttcgtgcgccgccacccgcgcgcagagccgcacagcgaagatgacagccgtgacgccagtcctcctgagcccgccagccccaccatcggcctcgataagaagactcgccgaaagttcctggacctgggggtcaccctgcgccgagcatccacgggcaagagccggaaggagaaaggcagcaaccgactgtccatgggcagcagggagtcagtggaggggtccggcaggtcagggggctccccgttcctgcctttttcctggttcacggacagcggcaagggctcagcatcctcgggtagcaccacctcccccacctgctcccctaaacacgagggcttcagccctaagaagtcagcttcccaggcccagctcctggctcatgcacaggaggcactgagcaactcctggtgcctagtccaggacttcggctccacccagatagggatggaatccactctgagtgatgactccacgccccccagcagcagccccaagatccccagtgggccctggcaggaggccaaatgttcttacccctaccacacgctgtctcagtcttcagatgagttcctggatgaacccctcccccctgtccaccactggaccagccagcaggtgggccagtggctgcagagcctcaacctggaacagtatgctgctgagtttgctgcacggcaggtagacgggccgcagctgctgcagctggacggaagcaaactaaagagcctggggctcagcaactctcatgaccgggcactggtgaagcgcaagttgaaggagatggcagcagctgccgagaaggagcgcaaggcccaggagaaggctgcgcggcagcgggagaagctccggcgccgagagcaggaggccaagaagagctaggggagggtgcacaggcgctggcacccggcaggggcagccactggctccgcgggcacaggcctcaccagggaggctggacctgggcgctgcacttgggctagcctggtcccacgctctcaggggggacatgctctctcttaccctgtcacttggtctagacccagagaccccagaaagggagaccccagggagagggcctagtaataaatcctattttgagga

SEQ ID NO: 251264 - protein, 507 aa, Artificial Sequence
  derived and/or modified sequence
MCTKTIPVLWGCFLLWNLYVSSSQTIYPGIKARITQRALDYGVQAGMKMIEQMLKEKKLPDLSGSESLEFLKVDYVNYNFSNIKISAFSFPNTSLAFVPGVGIKALTNHGTANISTDWGFESPLFQDTGGADLFLSGVYFTGIIILTRNDFGHPTLKLQDCYAQLSHAHVSFSGELSVLYNSFAEPMEKPILKNLNEMLCPIIASEVKALNANLSTLEVLTKIDNYTLLDYSLISSPEITENYLDLNLKGVFYPLENLTDPPFSPVPFVLPERSNSMLYIGIAEYFFKSASFAHFTAGVFNVTLSTEEISNHFVQNSQGLGNVLSRIAEIYILSQPFMVRIMATEPPIINLQPGNFTLDIPASIMMLTQPKNSTVETIVSMDFVASTSVGLVILGQRLVCSLSLNRFRLALPESNRSNIEVLRFENILSSILHFGVLPLANAKLQQGFPLSNPHKFLFVNSDIEVLEGFLLISTDLKYETSSKQQPSFHVWEGLNLISRQWRGKSAP

SEQ ID NO: 251265 - DNA, 2091 bp, Artificial Sequence
  derived and/or modified sequence
atcttggctttttagcagctgagtttaaggcgcaaggtggagaacacatcagcttcaaaggcagagagaatcgaaggtgctctccagctttggacacttcctctgcttgagatgtgtacaaagacaatcccagtcctctggggatgtttcctcctgtggaatctctatgtctcatcctctcagaccatttaccctggaatcaaggcaaggattactcagagggcacttgactatggtgttcaagctggaatgaagatgattgagcaaatgctaaaagaaaagaaactcccagatttaagcggttctgagtctcttgaatttctaaaagttgattatgtaaactacaatttttcaaatataaaaatcagtgccttttcatttccaaatacctcattggcttttgtgcctggagtgggaatcaaagcgctaaccaaccatggcactgccaacatcagcacagactgggggttcgagtctccacttttccaagacacaggaggggctgatctgtttctctccggagtctactttaccggtatcattatcctaacccgaaatgactttggtcatcctaccctgaagctccaagattgctacgcccaactgagccatgcccacgtctcattttccggagaactcagtgttctgtataactcctttgctgagcccatggagaaacccattttaaagaacttaaatgaaatgctctgtcccattattgcaagtgaagtcaaagcgctaaatgccaacctcagcacactggaggttttaaccaagattgacaactacactctgctggattactccctaatcagttctccagaaattactgagaactaccttgacctgaacttgaagggtgtattctacccactggaaaacctcaccgacccccccttctcaccagttccttttgtgctcccagaacgcagcaactccatgctctacattggaatcgccgagtatttctttaaatctgcgtcctttgctcatttcacagctggggttttcaatgtcactctctccaccgaagagatttccaaccattttgttcaaaactctcaaggccttggcaacgtgctctcccggattgcagagatctacatcttgtcccagcccttcatggtgaggatcatggccacagagcctcccataatcaatctacaaccaggcaatttcaccctggacatccctgcctccatcatgatgctcacccaacccaagaactccacagttgaaaccatcgtttccatggacttcgttgctagtaccagtgttggcctggttattttgggacaaagactggtctgctccttgtctctgaacagattccgccttgctttgccagagtccaatcgcagcaacattgaggtcttgaggtttgaaaatattctatcgtccattcttcactttggagtcctcccactggccaatgcaaaattgcagcaaggatttcctctgtccaatccacacaaattcttattcgtcaattcagatattgaagttcttgagggtttccttttgatttccaccgacctgaagtatgaaacatcctcaaagcagcagccaagtttccacgtatgggaaggtctgaacctgataagcagacagtggagggggaagtcagccccttgattgccggtttgcaattcaccccaggaagtaaatggtccttaatcctacaactactgtaaacccagaagggaaagacagtacacactggaattgtaaagcccttgtgaattgcttaggcagaaagttttctttcttaagccttcaggaacccagaataaggcagactctgttaaagggataaatagaggtgtctgaatgtgagtgtatgcatgctgcgtgtgtctgtgtttatgtttgtttgtttgtttggggcaagaaagattctaggacaagagctaggcatgtacttctgaccaggtgggtaagcaactctaagtctgtatttgtattggtcattctcagtggaaatcccttaggccctctagtggttttcccctacctgcatattggttttcatgttttatattcactgttactatcttctgtgtttaattaaaattgttttctatcaacttc

SEQ ID NO: 251266 - DNA, 1524 bp, Artificial Sequence
  derived and/or modified sequence
atgtgcaccaagaccataccagtgctctggggatgtttcttgttgtggaatttatacgtttcctccagtcagaccatttacccagggataaaggctcgaattactcagagagcgcttgactacggcgtgcaagccggtatgaagatgatagagcagatgttaaaagagaagaagctgcccgatctatctgggtccgaatccctggagttcttgaaggtcgattacgtcaactataactttagtaatatcaagattagcgcgttctctttccctaacacctcactggccttcgtccccggagtggggataaaagccctgaccaaccacggcaccgccaatatcagtaccgactgggggtttgagtctcctctgtttcaggacacaggcggtgcggacctattcctgtcaggtgtttacttcactggtatcattatcctcacccggaacgattttggtcatcctaccctgaaactgcaggactgttacgcccagctgagccacgcccacgtttctttttctggcgaactgtcagttctttacaactccttcgcagaaccgatggagaagcctatacttaagaacctgaatgaaatgctatgccccatcatcgcatcagaggtaaaggccctcaacgccaacctgtctactcttgaagtcctcaccaagatcgataattacacactcctcgactattccttgatctccagccccgaaattaccgaaaattatctggaccttaatctgaaaggagtattctacccactggaaaacctgactgatcccccatttagccccgtgccatttgtgctgccggagaggagcaattctatgctctatattggaattgccgaatacttcttcaagtccgcaagcttcgctcacttcaccgctggggtctttaatgtgactctctccactgaggaaatctctaaccacttcgttcaaaattcgcagggtttgggcaacgtcctctcccgaattgccgagatttacatcctctcccagcccttcatggtgagaattatggccaccgaaccccctataattaatctgcagccagggaatttcaccctggatattccagccagcattatgatgctcactcaacccaagaactctacagtcgaaaccatcgtgtcgatggacttcgttgcctctacatcagttgggcttgtgattctcggccagcgtctggtttgttccctgagcttaaatcgatttcggctggccttgccagagtccaaccgtagcaatatcgaagttctgagattcgagaacatcctctcctctatactccattttggagtcctccctctggcgaatgcaaagttacagcaaggcttcccactttctaacccacacaaatttctcttcgtgaactccgatatcgaggttctggagggtttcttgctgatcagcaccgacctcaaatatgagactagttccaaacagcagccatcatttcacgtgtgggaggggctgaatctgataagtcgtcagtggagaggcaagagcgcaccgtag

SEQ ID NO: 251267 - DNA, 1524 bp, Artificial Sequence
  derived and/or modified sequence
atgtgcaccaagactatcccagtgctgtggggttgttttctcctatggaatctctacgtatcatcatctcagacaatctatcctggtattaaggcccgtataactcaacgagctttggactacggggtccaggccggaatgaagatgatcgagcagatgctaaaggagaaaaaattgcctgacctatcaggtagcgaatctttggagtttctgaaggtcgactatgttaactataacttttctaacatcaagatctccgcatttagtttcccaaatacatctttggccttcgtgccaggcgtaggcatcaaggcactgacaaatcacggaactgctaacatcagtacagattggggctttgaatcacctctgttccaggacactggtggcgctgatcttttcctctccggggtgtactttaccggaattatcatcttaactcgaaatgattttggacacccaactttgaagcttcaggattgttacgctcagctgtcccacgctcacgtgagcttttcaggtgaactttctgtgctgtataacagcttcgcagagcccatggagaagcccatcttgaagaatctcaacgaaatgctctgtcccatcatcgctagtgaggtcaaggctctcaatgctaacttaagtacgttggaggttctgacgaagatcgataactatacgctcctagactactcgttgatctcctctccagaaatcactgaaaactacctggacttgaatttgaagggcgttttttaccccttggagaatctcaccgacccacccttctctccagtgccctttgtgctgcctgagcgttctaactccatgctgtacatcggaatcgctgagtatttttttaagtcagccagcttcgcccactttacagccggagttttcaacgtcaccttgtccacggaagagatatccaaccacttcgtgcagaattctcagggactgggcaacgtgctgagccggatcgccgaaatttatatcctgtcccagccctttatggtacggatcatggctacagagcctccaataataaaccttcagccagggaatttcacactggatatccctgcaagcattatgatgctgacacagccaaagaattccacagtggaaacaatcgtgtctatggactttgtggccagcacatccgtcggtcttgtgatcttgggacagcgcctcgtctgcagtctgtctctcaatcgcttcagactcgcgctgcccgagtccaatagaagcaacatagaagtcttacggtttgaaaatattctgtcaagcatcttacacttcggcgttctaccgctggcaaatgctaagcttcagcaagggtttcccctcagcaacccccacaaattcctgttcgtaaactcagatatcgaggtcctcgagggcttcctgctgattagcacagacttaaagtacgaaaccagttcaaagcaacagccttcttttcatgtatgggaaggccttaacctgatttctcgccagtggcgtggtaaaagcgccccttag

SEQ ID NO: 251268 - DNA, 1524 bp, Artificial Sequence
  derived and/or modified sequence
atgtgtaccaagacaattccagtgctttgggggtgcttcctgctgtggaacctttacgtgtcgagctcccaaactatttaccctgggatcaaagctcggattactcaacgtgccctcgattacggagttcaggctgggatgaagatgatcgaacagatgctgaaggaaaagaagctaccagacctctctggatctgagagcctagaatttttgaaggttgactacgtaaactataatttctcaaacattaaaatctcagcctttagcttcccaaacacctctctcgcatttgtccctggcgttggaatcaaagcattgacaaatcacggcactgcgaatatctcaacagattggggattcgaatctccactcttccaggacactgggggcgctgacctgttcttgagtggtgtgtactttactgggattatcatcctgacaagaaacgacttcggccatcctactttaaaactgcaagactgttacgctcagctttcacacgcccacgtgtcatttagcggcgaactctccgtcctatataattcttttgccgagccaatggaaaaacctatccttaagaacttgaatgagatgctttgcccaattatcgcatcggaagttaaagccctgaacgctaatctgagtactctggaagtattgacaaaaatcgataactacaccttgctggattattcgctgatttctagcccagagataaccgagaactacctggatttgaatctgaaaggcgtgttttatcccttagagaacctgacagaccccccgttttcacccgtcccctttgtgttgccagagagatcaaattctatgctttatattggaattgccgaatacttcttcaagagcgcctcctttgcacacttcaccgccggagtgtttaatgtcacactgtccaccgaggagattagcaatcatttcgtgcaaaattcccagggactaggcaatgtactgagccgcatagcagagatctacattctctctcaaccctttatggtgagaatcatggccacagagccacctatcatcaatctgcagccaggcaacttcaccctggacattcccgctagcataatgatgcttactcaacccaaaaactctaccgtggagacaatcgtgagtatggacttcgtggcctctacctcagtaggcttggtgattcttggccagcggcttgtctgtagtcttagtcttaataggtttcgactggctttgcctgaatcaaaccggtctaatattgaagtgctgcgctttgaaaatatcctgagtagtatcctgcattttggcgtcttaccgctcgcaaatgccaagctgcagcagggctttcctctctctaacccacataaattcctgtttgttaattccgatatcgaggtgctggagggctttcttctcatcagcactgatctgaaatatgaaacatcttccaaacagcagccaagctttcacgtctgggaaggactcaatttaatcagtcgtcagtggcgtgggaaatcagccccatag

SEQ ID NO: 251269 - DNA, 1439 bp, Artificial Sequence
  derived and/or modified sequence
atgtgtacaaagacaatcccagtcctctggggatgtttcctcctgtggaatctctatgtctcatcctctcagaccatttaccctggaatcaaggcaaggattactcagagggcacttgactatggtgttcaagctggaatgaagatgattgagcaaatgctaaaagaaaagaaactcccagatttaagcggttctgagtctcttgaatttctaaaagttgattatgtaaactacaatttttcaaatataaaaatcagtgccttttcatttccaaatacctcattggcttttgtgcctggagtgggaatcaaagcgctaaccaaccatggcactgccaacatcagcacagactgggggttcgagtctccacttttaggttgaagaatggtagtcagcttaagcctgagcccaactggaaggcctttgcaccctcgtgtagaaggaggaaatcagattcaagccaagacacaggaggggctgatctgtttctctccggagtctactttaccggtatcattatcctaacccgaaatgactttggtcatcctaccctgaagctccaagattgctacgcccaactgagccatgcccacgtctcattttccggagaactcagtgttctgtataactcctttgctgagcccatggagaaacccattttaaagaacttaaatgaaatgctctgtcccattattgcaagtgaagtcaaagcgctaaatgccaacctcagcacactggaggttttaaccaagattgacaactacactctgctggattactccctaatcagttctccagaaattactgagaactaccttgacctgaacttgaagggtgtattctacccactggaaaacctcaccgacccccccttctcaccagttccttttgtgctcccagaacgcagcaactccatgctctacattggaatcgccgagtatttctttaaatctgcgtcctttgctcatttcacagctggggttttcaatgtcactctctccaccgaagagatttccaaccattttgttcaaaactctcaaggccttggcaacgtgctctcccgggttgctagtaccagtgttggcctggttattttgggacaaagactggtctgctccttgtctctgaacagattccgccttgctttgccagagtccaatcgcagcaacattgaggtcttgaggtttgaaaatattctatcgtccattcttcactttggagtcctcccactggccaatgcaaaattgcagcaaggatttcctctgtccaatccacacaaattcttattcgtcaattcagatattgaagttcttgagggtttccttttgatttccaccgacctgaagtatgaaacatcctcaaagcagcagccaagtttccacgtatgggaaggtctgaacctgataagcagacagtggagggggaagtcagccccttga

SEQ ID NO: 251270 - DNA, 1524 bp, Artificial Sequence
  derived and/or modified sequence
atgtgtaccaaaaccatacccgtcctgtgggggtgttttcttttatggaatttatatgtgtcttccagtcaaaccatttaccccggaatcaaggccagaattacacagagagccttagactacggcgtgcaggcagggatgaagatgattgaacaaatgcttaaagagaagaagttacctgacctttctggatccgaaagcctagagttcttgaaggttgattacgtgaattataatttctccaatattaagatttctgcattttctttccctaatacatcactggccttcgtgccaggcgttgggataaaggcactgacaaaccacgggaccgccaacatcagtaccgactggggttttgagtcaccgctctttcaggataccggtggagcagacctgtttctatccggcgtttactttacaggcattatcattttaactcgaaacgacttcgggcatccaaccctcaaattgcaggactgctatgcgcagctctcgcacgcccacgtatccttttctggcgaactcagcgtgctgtacaatagcttcgccgagcccatggaaaagcccatactcaaaaacctgaacgaaatgctgtgccccataatcgcttccgaggtcaaggccctcaacgccaacctcagtacgcttgaagttctgaccaaaatcgataattatactctcctggattattctttgatctccagcccggaaatcacagagaactatcttgacctgaatctgaagggtgtgttttacccactcgaaaatctcacagaccctccattctcgcccgttcctttcgtgctgcccgagagatcaaactccatgctgtacatcggaatcgccgagtatttttttaagtctgcgagcttcgctcattttaccgctggcgtttttaatgtgacactatctacagaggagattagtaatcattttgtgcaaaactcacagggcctgggtaacgttctgtctagaattgccgagatttatatcctgtctcagcctttcatggtgcgcatcatggccaccgaaccccccattataaacctgcagcctggtaatttcactcttgacattccagcctcaatcatgatgcttacacagcctaaaaatagtacagttgaaaccattgtttctatggactttgtagccagcacgtcagtgggactggttatcctgggtcagcggctggtgtgttctctttctttgaatcgttttcgcctggcgctacctgagtcgaatagatctaacattgaggtgctgcgattcgaaaacatactgtccagtatactgcattttggagtgttgcctctcgcgaatgccaagttgcagcaaggcttccccctttccaatcctcataaatttctgttcgtgaattctgacattgaagtcctcgagggatttctgctgatctcgaccgatctcaagtacgagacttcatcgaaacaacagccaagctttcacgtgtgggagggtctgaacttaattagcagacagtggagaggcaaatccgcaccatag

SEQ ID NO: 251271 - DNA, 1524 bp, Artificial Sequence
  derived and/or modified sequence
atgtgtaccaagacaattcctgtcctgtggggttgctttctcctgtggaacctctacgtctcctcctcccagactatctatcctggcatcaaagctagaattacccagagagcacttgattacggagtccaggctggtatgaaaatgattgaacagatgctgaaagaaaaaaaactgccagacctttccggtagcgagtccttagaatttctaaaggtcgattacgtaaattacaattttagcaacataaagatatcggctttcagtttcccaaatacttccctggcttttgttcctggcgtgggaattaaggccttaactaatcacggaacagctaatattagtactgattggggttttgaaagtccactgtttcaagacaccggtggcgcagacctcttcctgagcggagtatactttactggcattatcatccttacacgaaacgattttggacacccgacactgaagcttcaggattgctatgcccagctctctcacgcacatgtcagcttttcaggcgaactctctgtgttatacaattccttcgctgagccaatggagaagccgattcttaaaaacttgaatgaaatgctatgccccataatcgcctccgaagtcaaggccctgaacgctaatctgtctacactcgaggtactgacaaaaattgataattatacactgctcgactacagcctgattagcagcccagagataaccgagaattatttggaccttaacctgaaaggcgtcttttatccgctggaaaacctcactgatccccccttttcccccgtgccctttgtgctcccagaacggtcgaattctatgctctatatcggtattgcggaatacttcttcaaatctgcaagcttcgcacattttactgctggagtttttaatgtgaccctgagtactgaagagatttcaaaccattttgtccagaacagccaaggcctaggaaacgtcttatctcgtatcgccgagatatacatactatcacagcctttcatggttcgcatcatggctacagaaccacctatcataaacctccagccaggcaacttcacactagacattccagcctccattatgatgctcactcagccaaaaaactctaccgtcgagactatcgtcagcatggattttgtcgcatctacaagtgttggcctcgtaatcctaggacagagattggtatgctccctctccctgaatcgctttcgccttgcactcccggagtcaaataggagcaacatcgaggttctgcgatttgagaatattttgtcaagtatcctacatttcggcgtgttacctctcgcaaatgccaaactgcagcaaggttttcccctctctaatccccataagttcctgttcgtgaattctgacatagaagtgcttgagggctttctgctaattagcaccgacttgaagtacgaaacaagctccaaacagcagccctcttttcatgtttgggaaggactcaacctgatctcccggcaatggcgagggaagagtgctccatag

SEQ ID NO: 251272 - DNA, 1524 bp, Artificial Sequence
  derived and/or modified sequence
atgtgcactaagacgatccctgtgctttgggggtgtttcctcttatggaacctgtacgtgtcatcatctcaaacgatttacccagggataaaggcacgcattacccagagagctctcgattatggagtacaagccggtatgaaaatgatcgaacagatgcttaaagaaaaaaaattgcctgacctaagtggctccgaatctttggaatttctaaaagttgattacgtcaactataatttcagcaatattaagatctccgctttttctttccccaatacatccttagctttcgttcccggggttggaataaaagcgctaaccaaccacggaaccgcaaatatttccacggattggggcttcgaaagcccgctgtttcaggatacaggaggtgcagacttatttctcagtggtgtgtatttcacaggcatcatcatccttactcgcaacgactttggtcatcccactctgaagctgcaggactgttacgcgcaactgagccacgcacacgtctcattttccggcgaactctccgtattatacaatagcttcgcagagccgatggagaagccgattctgaagaacttaaacgagatgctatgccccatcatagcgtctgaagtcaaagctcttaatgccaacttaagcacattagaagttctcactaaaatcgacaattacacgctcctggattactctttgataagctcccctgaaatcaccgaaaattaccttgacttaaacctgaagggagtgttttaccctttggagaacttaactgacccaccgttttcaccagtcccttttgtgctccctgaaagaagtaactctatgctctatattggaatcgccgaatattttttcaaaagcgcctcattcgcacacttcactgccggcgtttttaacgtgaccttatcaactgaagaaataagtaatcacttcgttcagaactctcagggattagggaatgtcttgtcacgtatcgcagagatctatatcctgtcacagccgttcatggtgagaatcatggccaccgagcctccaatcataaacctccagcccggcaacttcacgctcgatatccctgcatctattatgatgctgacgcagcccaagaactccaccgtggagacaattgtaagtatggatttcgtcgctagcacttctgtcggactagtcatccttggacagcgcctggtgtgctccttaagtctaaacaggttcaggctcgcgctcccagagtccaatcgtagcaacattgaagtcctgcgctttgagaatatcctgtccagtatactgcacttcggcgtgctgcccttggccaacgcaaaattacaacagggcttccccctatctaacccccataaatttctcttcgtaaattctgatatcgaggtactggaagggtttcttctgatctctactgatctgaagtacgaaacctcatccaaacaacagcccagctttcatgtgtgggaagggttgaatttaatttccaggcaatggaggggaaaatcggcaccatag

SEQ ID NO: 251273 - DNA, 1980 bp, Artificial Sequence
  derived and/or modified sequence
atgtgtacaaagacaatcccagtcctctggggatgtttcctcctgtggaatctctatgtctcatcctctcagaccatttaccctggaatcaaggcaaggattactcagagggcacttgactatggtgttcaagctggaatgaagatgattgagcaaatgctaaaagaaaagaaactcccagatttaagcggttctgagtctcttgaatttctaaaagttgattatgtaaactacaatttttcaaatataaaaatcagtgccttttcatttccaaatacctcattggcttttgtgcctggagtgggaatcaaagcgctaaccaaccatggcactgccaacatcagcacagactgggggttcgagtctccacttttccaagacacaggaggggctgatctgtttctctccggagtctactttaccggtatcattatcctaacccgaaatgactttggtcatcctaccctgaagctccaagattgctacgcccaactgagccatgcccacgtctcattttccggagaactcagtgttctgtataactcctttgctgagcccatggagaaacccattttaaagaacttaaatgaaatgctctgtcccattattgcaagtgaagtcaaagcgctaaatgccaacctcagcacactggaggttttaaccaagattgacaactacactctgctggattactccctaatcagttctccagaaattactgagaactaccttgacctgaacttgaagggtgtattctacccactggaaaacctcaccgacccccccttctcaccagttccttttgtgctcccagaacgcagcaactccatgctctacattggaatcgccgagtatttctttaaatctgcgtcctttgctcatttcacagctggggttttcaatgtcactctctccaccgaagagatttccaaccattttgttcaaaactctcaaggccttggcaacgtgctctcccggattgcagagatctacatcttgtcccagcccttcatggtgaggatcatggccacagagcctcccataatcaatctacaaccaggcaatttcaccctggacatccctgcctccatcatgatgctcacccaacccaagaactccacagttgaaaccatcgtttccatggacttcgttgctagtaccagtgttggcctggttattttgggacaaagactggtctgctccttgtctctgaacagattccgccttgctttgccagagtccaatcgcagcaacattgaggtcttgaggtttgaaaatattctatcgtccattcttcactttggagtcctcccactggccaatgcaaaattgcagcaaggatttcctctgtccaatccacacaaattcttattcgtcaattcagatattgaagttcttgagggtttccttttgatttccaccgacctgaagtatgaaacatcctcaaagcagcagccaagtttccacgtatgggaaggtctgaacctgataagcagacagtggagggggaagtcagccccttgattgccggtttgcaattcaccccaggaagtaaatggtccttaatcctacaactactgtaaacccagaagggaaagacagtacacactggaattgtaaagcccttgtgaattgcttaggcagaaagttttctttcttaagccttcaggaacccagaataaggcagactctgttaaagggataaatagaggtgtctgaatgtgagtgtatgcatgctgcgtgtgtctgtgtttatgtttgtttgtttgtttggggcaagaaagattctaggacaagagctaggcatgtacttctgaccaggtgggtaagcaactctaagtctgtatttgtattggtcattctcagtggaaatcccttaggccctctagtggttttcccctacctgcatattggttttcatgttttatattcactgttactatcttctgtgtttaattaaaattgttttctatcaacttc

SEQ ID NO: 251274 - DNA, 1524 bp, Artificial Sequence
  derived and/or modified sequence
atgtgcaccaagaccatccccgtgctgtggggctgcttcctgctgtggaacctgtacgtgagcagcagccagaccatctaccccggcatcaaggccagaatcacccagagagccctggactacggcgtgcaggccggcatgaagatgatcgagcagatgctgaaggagaagaagctgcccgacctgagcggcagcgagagcctggagttcctgaaggtggactacgtgaactacaacttcagcaacatcaagatcagcgccttcagcttccccaacaccagcctggccttcgtgcccggcgtgggcatcaaggccctgaccaaccacggcaccgccaacatcagcaccgactggggcttcgagagccccctgttccaggacaccggcggcgccgacctgttcctgagcggcgtgtacttcaccggcatcatcatcctgaccagaaacgacttcggccaccccaccctgaagctgcaggactgctacgcccagctgagccacgcccacgtgagcttcagcggcgagctgagcgtgctgtacaacagcttcgccgagcccatggagaagcccatcctgaagaacctgaacgagatgctgtgccccatcatcgccagcgaggtgaaggccctgaacgccaacctgagcaccctggaggtgctgaccaagatcgacaactacaccctgctggactacagcctgatcagcagccccgagatcaccgagaactacctggacctgaacctgaagggcgtgttctaccccctggagaacctgaccgacccccccttcagccccgtgcccttcgtgctgcccgagagaagcaacagcatgctgtacatcggcatcgccgagtacttcttcaagagcgccagcttcgcccacttcaccgccggcgtgttcaacgtgaccctgagcaccgaggagatcagcaaccacttcgtgcagaacagccagggcctgggcaacgtgctgagcagaatcgccgagatctacatcctgagccagcccttcatggtgagaatcatggccaccgagccccccatcatcaacctgcagcccggcaacttcaccctggacatccccgccagcatcatgatgctgacccagcccaagaacagcaccgtggagaccatcgtgagcatggacttcgtggccagcaccagcgtgggcctggtgatcctgggccagagactggtgtgcagcctgagcctgaacagattcagactggccctgcccgagagcaacagaagcaacatcgaggtgctgagattcgagaacatcctgagcagcatcctgcacttcggcgtgctgcccctggccaacgccaagctgcagcagggcttccccctgagcaacccccacaagttcctgttcgtgaacagcgacatcgaggtgctggagggcttcctgctgatcagcaccgacctgaagtacgagaccagcagcaagcagcagcccagcttccacgtgtgggagggcctgaacctgatcagcagacagtggagaggcaagagcgccccctag

SEQ ID NO: 251275 - DNA, 1524 bp, Artificial Sequence
  derived and/or modified sequence
atgtgtactaaaacgattcctgtgttgtgggggtgcttcctgttatggaacttgtatgtgtcttcgagtcagactatctatcccgggattaaagcgcgaatcacacagagggcacttgattatggtgtgcaggctgggatgaaaatgattgaacagatgctgaaggaaaaaaaactgccagatctatccgggtcagagagcttagaattcctcaaagtagactatgtaaattacaactttagtaacattaaaatcagtgcgttttcattcccaaatacatcgctggccttcgtgccaggggtcggtataaaagcactgacaaatcatggtactgccaacatttcgacagattggggctttgagtcacctctgtttcaggatacaggaggggctgacctttttctctcgggtgtgtatttcaccggaatcattatattgacgcggaatgacttcggacacccaacgttgaagcttcaggactgttacgcgcagctgtcacatgctcatgtgagtttctctggagagctgtctgtgctgtataatagtttcgcagagcccatggagaagcccatcctgaagaatttgaatgagatgctgtgtccaattatcgcatctgaagttaaagcactcaatgctaacctttccactctcgaggtgcttaccaaaatagacaattacactctgctcgattacagcctgattagcagccccgagattactgaaaattatctggatctgaacctgaaaggagtcttctaccccctagagaatttgactgatccgcctttctccccagtgccctttgtgttacctgagaggtcgaactctatgttgtacattggtattgcagagtacttctttaagtccgcctcattcgctcatttcacagccggtgtattcaacgtcactttatcaaccgaggagatatcgaatcacttcgtgcaaaatagtcagggccttgggaacgtactgtctcgcattgccgagatctatatcctttcccagccgttcatggtgagaatcatggccacagaaccccctattataaacttacagcctggcaattttactttggatattcctgcctcaatcatgatgctcactcaacccaagaactctacagtggagaccattgtctctatggattttgtggccagtacaagcgtgggtttggtcattttgggccagaggttggtttgctctctcagcctgaatcggtttcgactagccctccccgaatctaaccgcagcaacatcgaagtgctgcgtttcgaaaatatcctgtcgtcaattttgcacttcggagtcctgcctctggcaaatgcaaagctgcaacaaggtttccccctatctaatccccacaagttcttattcgtcaactcagatatcgaggtcctggaggggtttctactaatcagcactgatcttaagtatgaaacttctagcaagcaacagcctagctttcacgtgtgggaagggttgaacttgatcagtcgacagtggcggggtaagagcgccccttag

SEQ ID NO: 251276 - DNA, 1524 bp, Artificial Sequence
  derived and/or modified sequence
atgtgtactaaaaccatcccagttctgtggggctgtttcctgttgtggaacctttatgtcagtagcagccagactatataccccgggattaaagctagaattactcagcgagctctcgattacggggtgcaggcgggcatgaagatgatcgagcaaatgctcaaagaaaagaaactccctgatctctcaggaagtgagagcctggagttcttaaaagtggattacgtaaactacaactttagcaacattaaaataagtgcattttcctttcctaacaccagcttggcctttgttcctggagtgggaattaaagctcttacaaatcacggcacggcaaatatctccacggattgggggttcgagagccctctttttcaggacactggcggggccgatttatttctcagcggagtgtactttaccggcattatcattctaaccaggaatgattttgggcatccaacattgaagttgcaggactgttacgcgcaactgtcccatgcacatgtgtcattctcaggagagctgtcggttctctataactcattcgccgaaccaatggagaaacctatactgaaaaacctgaatgagatgctctgtcctataattgcctccgaagtgaaggccctcaatgccaatttgtcaactcttgaggtactgaccaagattgataactatactctcttggactacagccttattagcagtcccgaaatcacggaaaattacctggacctgaatctgaaaggagtgttttatccactcgagaatttgacggatccccctttcagcccagttcctttcgtgctgccggaacgttcaaattccatgctttatattgggattgctgaatatttcttcaaaagcgccagttttgcgcatttcaccgccggggttttcaatgtcaccttgagcactgaagagatctccaaccatttcgtgcaaaatagccaggggcttgggaatgtgctgtctcgcattgcggagatctacatcttatcgcaaccattcatggtccgtattatggcaaccgaaccccctatcattaacctgcaacccggaaatttcaccctcgacattcctgcctcaatcatgatgctgacacagcccaagaattccacggtagagacgatagtttctatggactttgtggctagtacgagtgtgggtcttgtgatcctcgggcaacggttggtctgctccttgagcctgaaccgcttcagattagcattgccggaatccaacagaagcaatatcgaggtgctccgctttgagaatattctgtcatccattctccacttcggtgtgcttccgctagccaatgctaagctccagcagggctttcccctgtccaatccccataagttcctgttcgtcaacagcgacattgaggtcctggaaggattcctcctgattagcaccgacttaaagtacgaaacctcatctaaacagcaaccctctttccatgtgtgggagggactcaatctgatcagtcggcagtggcgcggaaaatcggccccctag

SEQ ID NO: 251277 - DNA, 1524 bp, Artificial Sequence
  derived and/or modified sequence
atgtgcaccaagaccatccctgtgctgtggggctgcttcctgctgtggaacctgtatgtgagcagcagccagaccatctacccaggcatcaaggcccgcatcacccagagggccctggactatggagtgcaggccggcatgaagatgattgagcagatgctgaaggagaagaagctgcctgacctgagcggcagcgagagcctggagttcctgaaggtggactatgtgaactacaacttcagcaacatcaagatcagcgccttctccttccccaacaccagcctggcctttgtgcctggggtgggcatcaaggccctgaccaaccacggcacagccaacatcagcacagactggggctttgagagccccctcttccaggacaccggcggcgctgacctcttcctgagcggcgtgtacttcaccggcatcatcatcctgaccagaaatgactttggccaccccaccctgaagctgcaggactgctacgcccagctgagccacgcccacgtgtccttctctggagagctgtctgtgctgtacaacagctttgctgagcccatggagaagcccatcctgaagaacctgaatgagatgctgtgccccatcatcgccagcgaggtgaaggccctgaatgccaacctgagcaccctggaggtgctgaccaagattgacaactacaccctgctggactacagcctcatcagcagccctgagatcacagagaactacctggacctgaacctgaagggcgtcttctaccccctggagaacctgacagatcctcccttcagccctgtgccctttgtgctgcctgagaggagcaacagcatgctgtacatcggcattgctgagtacttcttcaagagcgccagctttgcccacttcaccgctggggtcttcaacgtgaccctgagcacagaggagatcagcaaccactttgtgcagaacagccagggcctgggcaatgtgctgagcagaattgctgagatctacatcctgagccagcccttcatggtgcgcatcatggccacagagccccccatcatcaacctgcagcccggcaacttcaccctggacatcccagccagcatcatgatgctgacccagcccaagaacagcacagtggagaccatcgtgtccatggactttgtggccagcacctctgtgggcctggtgatcctgggccagaggctggtgtgcagcctgagcctgaaccgcttccggctggccctgcctgagagcaacagaagcaacatcgaggtgctgcgctttgagaacatcctgagcagcatcctgcactttggagtgctgcccctggccaatgccaagctgcagcagggcttccccctgagcaacccccacaagttcctgtttgtgaacagcgacatcgaggtgctggagggcttcctgctgatcagcacagacctgaagtatgagaccagcagcaagcagcagcccagcttccacgtgtgggagggcctgaacctgatcagccggcagtggaggggcaagagcgccccctag

SEQ ID NO: 251278 - DNA, 1524 bp, Artificial Sequence
  derived and/or modified sequence
atgtgcaccaagaccatccccgtgctgtggggctgcttcctgctgtggaacctctatgtgtcaagcagccagaccatatatccaggcataaaggctagaattacccaacgggcacttgactacggggtgcaagcaggcatgaaaatgatcgaacagatgcttaaggagaagaaactacccgacctctcaggcagcgagtctcttgagtttcttaaggtggactacgtcaactataacttcagcaacataaaaatttctgccttcagcttccctaatacaagcctggcctttgttccaggagtgggcatcaaggcactcacgaaccacgggactgccaacattagtacggactggggttttgaaagccccctttttcaggatacgggcggggccgatcttttcctctccggggtgtattttactggcataatcattctgacacggaatgacttcggacacccgaccctgaagttgcaagactgctacgcccagttaagccatgcgcatgttagtttctccggggaattatctgtcctttataattcattcgcagagcctatggaaaagccaattctcaagaatttaaatgagatgttatgcccaatcatcgcgtctgaagtcaaagctttgaatgctaatctgagtactctggaagttctgactaagattgacaactatactctgctggattacagcttaatctcgtcccccgagatcacagagaattacttagacctgaacctgaagggagttttctaccccctggagaacctgacagatccccctttttcaccggtcccatttgttctccctgaacgttcaaacagcatgctgtatatcggcattgcagaatatttcttcaaaagtgcaagctttgcccatttcaccgcaggtgtctttaacgtgactctctccactgaagagattagtaaccattttgtgcagaattctcaagggctggggaacgtgttgtcacgaattgccgagatttacatactctcccagcctttcatggtacggatcatggccacagaaccccccatcattaatctccagcccggcaactttactcttgacataccagcttccattatgatgctcactcagccgaagaacagtacagttgaaacaatagtgtccatggacttcgtggcctccacttcggtgggattggtgatcctggggcagaggctggtctgcagcctgtctctgaatagattccgactggccctccccgagtccaacagaagcaatattgaagtcctcagatttgagaacatactgtcaagcatcctccattttggcgtcctacctctggccaacgcaaaactccagcaaggatttcctcttagtaacccacataaatttctgtttgtaaactccgacattgaggtgctagagggatttcttctgatctccacggacctgaagtatgagacttctagtaagcagcagccctccttccacgtatgggaaggccttaatctgatttctcgtcaatggcgcggcaaaagcgcaccctag

SEQ ID NO: 251279 - DNA, 1524 bp, Artificial Sequence
  derived and/or modified sequence
atgtgcaccaagaccatccccgtgctgtggggctgcttcctgctgtggaacttatatgtctcttcttcacagacaatatatccaggcattaaggccagaattacacagcgagctctggattatggggtgcaagctggcatgaagatgatagaacaaatgctgaaggagaaaaagctgcccgacctgagtggatccgagagcctagagtttctcaaggtagattacgtgaactacaacttttctaatatcaaaatctctgcgttttcctttccaaacaccagtctcgctttcgtccccggagtaggaattaaggccctaaccaaccacggcacagcaaatatcagtacagattggggttttgaatcccctttgtttcaggacactggtggcgctgatctgttcctcagcggcgtttatttcaccggcatcatcatcttaacacgaaacgacttcggacatcctacactcaaactgcaggactgctacgctcaacttagtcacgctcacgtttccttttccggcgagctgagtgtgttatacaactcattcgccgagcccatggagaagcctatcctgaagaatctcaacgaaatgctttgtcccattatagcttcggaggtgaaggccttgaatgcaaacctgtccacattggaggtactgacgaaaatcgacaactatacactgctggactatagcctgatttccagccccgaaattacggagaactacctcgatctcaacctaaaaggcgtgttctacccactcgagaacctgacagaccccccctttagtccagtcccctttgtgctgcctgaacgatccaacagcatgctgtacataggcatagccgagtattttttcaaatctgcctcttttgcacacttcaccgccggagtgttcaatgtcacactttcaacagaggagattagtaaccacttcgtgcagaatagccaggggctgggaaatgtgctctcacggatcgccgagatctatattttgtctcagccatttatggtgaggatcatggccacagagccaccaatcattaacctccagccgggaaacttcactctggacatcccagctagtattatgatgttgacacagcctaagaactccacggtagaaaccatagttagcatggatttcgttgcaagcacttccgtgggcctggttattctgggacagcgactggtttgcagtctctctctgaatagatttcgcctggctttgcccgagtcaaatagatctaatattgaggtgctgagatttgagaatatcctgtccagtatcttacacttcggagtcctgccactagccaacgccaagctgcagcaggggtttcccttatctaaccctcataagtttctgttcgtgaactccgacatcgaggtgctggagggatttctgttaatctccaccgatctgaaatacgaaacaagtagcaaacagcaaccttccttccatgtctgggagggcttaaatctgatttctcgacagtggcgtggcaagagtgctccgtag

SEQ ID NO: 251280 - RNA, 1524 nt, Artificial Sequence
  derived and/or modified sequence
auguguaccaagacaauuccagugcuuugggggugcuuccugcuguggaaccuuuacgugucgagcucccaaacuauuuacccugggaucaaagcucggauuacucaacgugcccucgauuacggaguucaggcugggaugaagaugaucgaacagaugcugaaggaaaagaagcuaccagaccucucuggaucugagagccuagaauuuuugaagguugacuacguaaacuauaauuucucaaacauuaaaaucucagccuuuagcuucccaaacaccucucucgcauuugucccuggcguuggaaucaaagcauugacaaaucacggcacugcgaauaucucaacagauuggggauucgaaucuccacucuuccaggacacugggggcgcugaccuguucuugagugguguguacuuuacugggauuaucauccugacaagaaacgacuucggccauccuacuuuaaaacugcaagacuguuacgcucagcuuucacacgcccacgugucauuuagcggcgaacucuccguccuauauaauucuuuugccgagccaauggaaaaaccuauccuuaagaacuugaaugagaugcuuugcccaauuaucgcaucggaaguuaaagcccugaacgcuaaucugaguacucuggaaguauugacaaaaaucgauaacuacaccuugcuggauuauucgcugauuucuagcccagagauaaccgagaacuaccuggauuugaaucugaaaggcguguuuuaucccuuagagaaccugacagaccccccguuuucacccguccccuuuguguugccagagagaucaaauucuaugcuuuauauuggaauugccgaauacuucuucaagagcgccuccuuugcacacuucaccgccggaguguuuaaugucacacuguccaccgaggagauuagcaaucauuucgugcaaaauucccagggacuaggcaauguacugagccgcauagcagagaucuacauucucucucaacccuuuauggugagaaucauggccacagagccaccuaucaucaaucugcagccaggcaacuucacccuggacauucccgcuagcauaaugaugcuuacucaacccaaaaacucuaccguggagacaaucgugaguauggacuucguggccucuaccucaguaggcuuggugauucuuggccagcggcuugucuguagucuuagucuuaauagguuucgacuggcuuugccugaaucaaaccggucuaauauugaagugcugcgcuuugaaaauauccugaguaguauccugcauuuuggcgucuuaccgcucgcaaaugccaagcugcagcagggcuuuccucucucuaacccacauaaauuccuguuuguuaauuccgauaucgaggugcuggagggcuuucuucucaucagcacugaucugaaauaugaaacaucuuccaaacagcagccaagcuuucacgucugggaaggacucaauuuaaucagucgucaguggcgugggaaaucagccccauag

SEQ ID NO: 251281 - RNA, 1524 nt, Artificial Sequence
  derived and/or modified sequence
auguguaccaaaaccauacccguccuguggggguguuuucuuuuauggaauuuauaugugucuuccagucaaaccauuuaccccggaaucaaggccagaauuacacagagagccuuagacuacggcgugcaggcagggaugaagaugauugaacaaaugcuuaaagagaagaaguuaccugaccuuucuggauccgaaagccuagaguucuugaagguugauuacgugaauuauaauuucuccaauauuaagauuucugcauuuucuuucccuaauacaucacuggccuucgugccaggcguugggauaaaggcacugacaaaccacgggaccgccaacaucaguaccgacugggguuuugagucaccgcucuuucaggauaccgguggagcagaccuguuucuauccggcguuuacuuuacaggcauuaucauuuuaacucgaaacgacuucgggcauccaacccucaaauugcaggacugcuaugcgcagcucucgcacgcccacguauccuuuucuggcgaacucagcgugcuguacaauagcuucgccgagcccauggaaaagcccauacucaaaaaccugaacgaaaugcugugccccauaaucgcuuccgaggucaaggcccucaacgccaaccucaguacgcuugaaguucugaccaaaaucgauaauuauacucuccuggauuauucuuugaucuccagcccggaaaucacagagaacuaucuugaccugaaucugaaggguguguuuuacccacucgaaaaucucacagacccuccauucucgcccguuccuuucgugcugcccgagagaucaaacuccaugcuguacaucggaaucgccgaguauuuuuuuaagucugcgagcuucgcucauuuuaccgcuggcguuuuuaaugugacacuaucuacagaggagauuaguaaucauuuugugcaaaacucacagggccuggguaacguucugucuagaauugccgagauuuauauccugucucagccuuucauggugcgcaucauggccaccgaaccccccauuauaaaccugcagccugguaauuucacucuugacauuccagccucaaucaugaugcuuacacagccuaaaaauaguacaguugaaaccauuguuucuauggacuuuguagccagcacgucagugggacugguuauccugggucagcggcugguguguucucuuucuuugaaucguuuucgccuggcgcuaccugagucgaauagaucuaacauugaggugcugcgauucgaaaacauacuguccaguauacugcauuuuggaguguugccucucgcgaaugccaaguugcagcaaggcuucccccuuuccaauccucauaaauuucuguucgugaauucugacauugaaguccucgagggauuucugcugaucucgaccgaucucaaguacgagacuucaucgaaacaacagccaagcuuucacgugugggagggucugaacuuaauuagcagacaguggagaggcaaauccgcaccauag

SEQ ID NO: 251282 - RNA, 1524 nt, Artificial Sequence
  derived and/or modified sequence
auguguaccaagacaauuccuguccugugggguugcuuucuccuguggaaccucuacgucuccuccucccagacuaucuauccuggcaucaaagcuagaauuacccagagagcacuugauuacggaguccaggcugguaugaaaaugauugaacagaugcugaaagaaaaaaaacugccagaccuuuccgguagcgaguccuuagaauuucuaaaggucgauuacguaaauuacaauuuuagcaacauaaagauaucggcuuucaguuucccaaauacuucccuggcuuuuguuccuggcgugggaauuaaggccuuaacuaaucacggaacagcuaauauuaguacugauugggguuuugaaaguccacuguuucaagacaccgguggcgcagaccucuuccugagcggaguauacuuuacuggcauuaucauccuuacacgaaacgauuuuggacacccgacacugaagcuucaggauugcuaugcccagcucucucacgcacaugucagcuuuucaggcgaacucucuguguuauacaauuccuucgcugagccaauggagaagccgauucuuaaaaacuugaaugaaaugcuaugccccauaaucgccuccgaagucaaggcccugaacgcuaaucugucuacacucgagguacugacaaaaauugauaauuauacacugcucgacuacagccugauuagcagcccagagauaaccgagaauuauuuggaccuuaaccugaaaggcgucuuuuauccgcuggaaaaccucacugauccccccuuuucccccgugcccuuugugcucccagaacggucgaauucuaugcucuauaucgguauugcggaauacuucuucaaaucugcaagcuucgcacauuuuacugcuggaguuuuuaaugugacccugaguacugaagagauuucaaaccauuuuguccagaacagccaaggccuaggaaacgucuuaucucguaucgccgagauauacauacuaucacagccuuucaugguucgcaucauggcuacagaaccaccuaucauaaaccuccagccaggcaacuucacacuagacauuccagccuccauuaugaugcucacucagccaaaaaacucuaccgucgagacuaucgucagcauggauuuugucgcaucuacaaguguuggccucguaauccuaggacagagauugguaugcucccucucccugaaucgcuuucgccuugcacucccggagucaaauaggagcaacaucgagguucugcgauuugagaauauuuugucaaguauccuacauuucggcguguuaccucucgcaaaugccaaacugcagcaagguuuuccccucucuaauccccauaaguuccuguucgugaauucugacauagaagugcuugagggcuuucugcuaauuagcaccgacuugaaguacgaaacaagcuccaaacagcagcccucuuuucauguuugggaaggacucaaccugaucucccggcaauggcgagggaagagugcuccauag

SEQ ID NO: 251283 - RNA, 1524 nt, Artificial Sequence
  derived and/or modified sequence
augugcacuaagacgaucccugugcuuuggggguguuuccucuuauggaaccuguacgugucaucaucucaaacgauuuacccagggauaaaggcacgcauuacccagagagcucucgauuauggaguacaagccgguaugaaaaugaucgaacagaugcuuaaagaaaaaaaauugccugaccuaaguggcuccgaaucuuuggaauuucuaaaaguugauuacgucaacuauaauuucagcaauauuaagaucuccgcuuuuucuuuccccaauacauccuuagcuuucguucccgggguuggaauaaaagcgcuaaccaaccacggaaccgcaaauauuuccacggauuggggcuucgaaagcccgcuguuucaggauacaggaggugcagacuuauuucucagugguguguauuucacaggcaucaucauccuuacucgcaacgacuuuggucaucccacucugaagcugcaggacuguuacgcgcaacugagccacgcacacgucucauuuuccggcgaacucuccguauuauacaauagcuucgcagagccgauggagaagccgauucugaagaacuuaaacgagaugcuaugccccaucauagcgucugaagucaaagcucuuaaugccaacuuaagcacauuagaaguucucacuaaaaucgacaauuacacgcuccuggauuacucuuugauaagcuccccugaaaucaccgaaaauuaccuugacuuaaaccugaagggaguguuuuacccuuuggagaacuuaacugacccaccguuuucaccagucccuuuugugcucccugaaagaaguaacucuaugcucuauauuggaaucgccgaauauuuuuucaaaagcgccucauucgcacacuucacugccggcguuuuuaacgugaccuuaucaacugaagaaauaaguaaucacuucguucagaacucucagggauuagggaaugucuugucacguaucgcagagaucuauauccugucacagccguucauggugagaaucauggccaccgagccuccaaucauaaaccuccagcccggcaacuucacgcucgauaucccugcaucuauuaugaugcugacgcagcccaagaacuccaccguggagacaauuguaaguauggauuucgucgcuagcacuucugucggacuagucauccuuggacagcgccuggugugcuccuuaagucuaaacagguucaggcucgcgcucccagaguccaaucguagcaacauugaaguccugcgcuuugagaauauccuguccaguauacugcacuucggcgugcugcccuuggccaacgcaaaauuacaacagggcuucccccuaucuaacccccauaaauuucucuucguaaauucugauaucgagguacuggaaggguuucuucugaucucuacugaucugaaguacgaaaccucauccaaacaacagcccagcuuucaugugugggaaggguugaauuuaauuuccaggcaauggaggggaaaaucggcaccauag

SEQ ID NO: 251284 - protein, 228 aa, Artificial Sequence
  derived and/or modified sequence
MPGAGDGGKAPARWLGTGLLGLFLLPVTLSLEVSVGKATDIYAVNGTEILLPCTFSSCFGFEDLHFRWTYNSSDAFKILIEGTVKNEKSDPKVTLKDDDRITLVGSTKEKMNNISIVLRDLEFSDTGKYTCHVKNPKENNLQHHATIFLQVVDRLEEVDNTVTLIILAVVGGVIGLLILILLIKKLIIFILKKTREKKKECLVSSSGNDNTENGLPGSKAEEKPPSKV

SEQ ID NO: 251285 - DNA, 4516 bp, Artificial Sequence
  derived and/or modified sequence
agagcgcaacaagggctactccctggtccagaattcagtcctttccaggggagaaatggagaatgatggagggtggcccaggcggtgctgattggagtagacagccatcctcccgaggttggcactgagggtgatagagacctacctgcctggccaagctactccgccctgcctaagcatccccttccagagctccaggctggtggggttttattaagggaggcggtgctccttacacaggcctcttcctgctccccgtaaccctgtcgctggaggtgtctgtgggaaaggccaccgacatctacgctgtcaatggcacggagatcctgctgccctgcaccttctccagctgctttggcttcgaggacctccacttccggtggacctacaacagcagtgacgcattcaagattctcatagaggggactgtgaagaatgagaagtctgaccccaaggtgacgttgaaagacgatgaccgcatcactctggtaggctctactaaggagaagatgaacaacatttccattgtgctgagggacctggagttcagcgacacgggcaaatacacctgccatgtgaagaaccccaaggagaataatctccagcaccacgccaccatcttcctccaagtcgttgatagactggaagaagtggacaacacagtgacactcatcatcctggctgtcgtgggcggggtcatcgggctcctcatcctcatcctgctgatcaagaaactcatcatcttcatcctgaagaagactcgggagaagaagaaggagtgtctcgtgagctcctcggggaatgacaacacggagaacggcttgcctggctccaaggcagaggagaaaccaccttcaaaagtgtgagccctgcttcgggctgagcagctgcagggagccccctttctgatgatgaaactgatgcttgagccccgaccgtagaacccacgtgcctgagacatctgctgcttggctcaaactgtagtctttccgggcacaagaaaccagagtcctgcccagcctgcccatccccttcccagtcagggctccccagggacaagggatggccaggggagggggtctgtggaagattcaggagaaagaaaggagaggctagggtggtgtggaggggctggtcccctgacacctgggcagatggggtctccttcagtctccctaccctgcacaagcagggccttgattttcctccaggcttctcttcacaagagactgggaggatccgtaagggatgtcctaagagctgcaccctggagatggggtgtaggaagaagtggcttcctttggaggtgggagtgggctggaggcctctggagaagacctggggtgggggctgatgggggcaggcccacagtgagagactgcctctgcttcataggataccagatcccccacagtcttccaagtaggaaacttcctttcccctgccccgggaccctatctgcctatcccctcccctgctcagagtttttaagccctctcaaccagggctggccaccctggtcttgagggttcctggccacctagcctgctcctctgctctctgggttactgaggggctcaggaaggggcccctcgagccttcctggagtacccgagtgctccctatgcctttccaagcatttctacttggggaattgggccacagaggtagtgagccagtgtcctgggcctctgggatgcccgccccattgctgccaatgctggcagcccctcccctggcatggcaggaccatcgccactctgggcactcctgagcccagctctcccctgcttctccccctcctacctgagaggctgcaccctccaacctcccattggctcgctcccccccccccaccgtgccctccatcacgccctgcccccagggtggttcatttcccagccctgggtcaagggcctgccttcgcctcagggactctcttcctttggatgagggggtccttgggtttcccagctgcttcctgctcagctgggccaccccctcccaccctggggttggggaggagcagggagtgggtgcccacagttttcctttgcttctcccagagctggtttgcacagcccttgtgtgtggggctagaatgtgccttagtcctgaatcctagcccttacccccatcctctctagacggtatgtcctgacataacagcagagtctggtgtggtgctggtgagggttcgccagccctcccctccccagggtcatagagggggccatgaggctggaattggccagtgactgaatcttggagatgtcggccaggtgctcccattggggtttctagcctgccctagggggaggtggtgatgttgggagtgggatctcctgagtccttgttgggcagaattggtgaggccagggatggcagggaaaagtggtaacaagcctctctgcccatctacttccaatccctctctcccttactgattttttgatgccctgtcttctgggcccctaggagggatgagagaggagtagccccctttttcagagagtttggggtctacctcagagctctccctgtcaaaaagcagctgcaagcctcgcaagggtggagtggggggagactgaggaccagtagtacctgcagggtgcccgtggctgtggccagtgtcccttagccaacctgctgggctcaccagttccccgtctgatctgcctgtgcgcctcccattcttctctacccagaacctgtcatgggctggggctcagattttcctggctttgggagcagacagaccagagccaccagccattcagaaaacttcttatagctaccttcatgcaaaactgttttcttcttccttctcaatggtgacatttgaagaggcagagcaccttggggctcctccttctgtcttaagagaaagccaaggcacgtagagtagggagaagaagggcaccatcctctctttcctccccagggtctactgctgatttctagatggatcatgcagcttctctcagctcagctctttccatctaccaaatgggtgtaataatacttacctacctcacaggactgttgtgaggcttggcaagttttgtctaaaaacatctttttggcttggaaagggatctgggaagccaggtattaattgcagggatagttccaagtctgtcctgtcttcatctctgtgtcccatctctacaacccacatacagacacacacactctctctctctttctttccatcccaccccccttggaattatttagtctttgcaatattagaaaccttgactctgatgcttaaagcttcttgtccatggcttttgtttgatggttttcaatagaggtgactgagattgtagggggggcatttttggttgcccccatgcgtgggggcactactaagaatgctaaacttagtccccacaacaaagaatcatcctgtcccatgtcaacattatacccatggagaaacactggcatggatttgcactaggatgtatatgggcaaagctatcttccccaagtggaacctcagtgcatgcaaatctctgatggtggcttccagggcttgtgggctagagagagccacttacaaagtcgatcttgagagacctggccacatgcagctgggctgagtgatgtcagcgagactaaagacaaagttctgagctcctcatcaactacaaaatatgaaatcagcattccaggttctgggcttctccccatgtcgtaattgaacagaaggcagcccgaataaacccctgatgttagagaggcctggggagagcagccgatggggctcagactacatatggcaggccgatcagagctcttgtggagcgagggcttgagagcatgcttgtgagatggcaggaggtggggtgtgcttgtgtggagtgtgcgtgtgcaggcagtgtgggtgcatggcagcgtaactgtggagtggatgggctctgcatgtaaggggtgatgcatgatgggcagatgctggacatttgaggagccgtctttcttggcctgagctatgcctgttgaggcatctggagactgagaaagaatcaaaggcagagaagaccagccgtgctcctgcattccgtcactccatgacttcatctcagtgtcacagacagctgccatcagagggctggcagtagggagttccaggagcggggacttctcgggaaaatcctataacttgctttactttactttgtcccaggttggagtccctaccctcccacctcccacctgatatgcagtgcttttgactatcttatgcatggtttattcctctggcttggatgacaacaatacccatagtcaattttcctatgtaactatagatcaaatgatgcaacaacaggccttgggaggcctcaggtgtgcgagtgcctctgggaggcgcagatgcccacacagccagcactgacttgtgttcgagcacagaacggatataatcagtctggcctctacaacaagttttgcattgtagaattgtatttagctttgccttggatgaaataaaaattatgtttaataa

SEQ ID NO: 251286 - DNA, 4579 bp, Artificial Sequence
  derived and/or modified sequence
ctactccttccctcccgccgttgctccagcagccggctcccagcagcgggcgagcgcgcctccccctccgctccctccctccccctcctctcgctctctgcccgctaactttcccgagccccgaccggcggcgcagagctccggggtagctttgtggccgaacgccgacctcgggcggagagcgcggctgtgcccagtatcccatccccgcgacccccgcgcgctccggagagaacaggactatgcccggggctggggacggaggcaaagccccggcgagatggctgggcactgggcttttgggcctcttcctgctccccgtaaccctgtcgctggaggtgtctgtgggaaaggccaccgacatctacgctgtcaatggcacggagatcctgctgccctgcaccttctccagctgctttggcttcgaggacctccacttccggtggacctacaacagcagtgacgcattcaagattctcatagaggggactgtgaagaatgagaagtctgaccccaaggtgacgttgaaagacgatgaccgcatcactctggtaggctctactaaggagaagatgaacaacatttccattgtgctgagggacctggagttcagcgacacgggcaaatacacctgccatgtgaagaaccccaaggagaataatctccagcaccacgccaccatcttcctccaagtcgttgatagactggaagaagtggacaacacagtgacactcatcatcctggctgtcgtgggcggggtcatcgggctcctcatcctcatcctgctgatcaagaaactcatcatcttcatcctgaagaagactcgggagaagaagaaggagtgtctcgtgagctcctcggggaatgacaacacggagaacggcttgcctggctccaaggcagaggagaaaccaccttcaaaagtgtgagccctgcttcgggctgagcagctgcagggagccccctttctgatgatgaaactgatgcttgagccccgaccgtagaacccacgtgcctgagacatctgctgcttggctcaaactgtagtctttccgggcacaagaaaccagagtcctgcccagcctgcccatccccttcccagtcagggctccccagggacaagggatggccaggggagggggtctgtggaagattcaggagaaagaaaggagaggctagggtggtgtggaggggctggtcccctgacacctgggcagatggggtctccttcagtctccctaccctgcacaagcagggccttgattttcctccaggcttctcttcacaagagactgggaggatccgtaagggatgtcctaagagctgcaccctggagatggggtgtaggaagaagtggcttcctttggaggtgggagtgggctggaggcctctggagaagacctggggtgggggctgatgggggcaggcccacagtgagagactgcctctgcttcataggataccagatcccccacagtcttccaagtaggaaacttcctttcccctgccccgggaccctatctgcctatcccctcccctgctcagagtttttaagccctctcaaccagggctggccaccctggtcttgagggttcctggccacctagcctgctcctctgctctctgggttactgaggggctcaggaaggggcccctcgagccttcctggagtacccgagtgctccctatgcctttccaagcatttctacttggggaattgggccacagaggtagtgagccagtgtcctgggcctctgggatgcccgccccattgctgccaatgctggcagcccctcccctggcatggcaggaccatcgccactctgggcactcctgagcccagctctcccctgcttctccccctcctacctgagaggctgcaccctccaacctcccattggctcgctcccccccccccaccgtgccctccatcacgccctgcccccagggtggttcatttcccagccctgggtcaagggcctgccttcgcctcagggactctcttcctttggatgagggggtccttgggtttcccagctgcttcctgctcagctgggccaccccctcccaccctggggttggggaggagcagggagtgggtgcccacagttttcctttgcttctcccagagctggtttgcacagcccttgtgtgtggggctagaatgtgccttagtcctgaatcctagcccttacccccatcctctctagacggtatgtcctgacataacagcagagtctggtgtggtgctggtgagggttcgccagccctcccctccccagggtcatagagggggccatgaggctggaattggccagtgactgaatcttggagatgtcggccaggtgctcccattggggtttctagcctgccctagggggaggtggtgatgttgggagtgggatctcctgagtccttgttgggcagaattggtgaggccagggatggcagggaaaagtggtaacaagcctctctgcccatctacttccaatccctctctcccttactgattttttgatgccctgtcttctgggcccctaggagggatgagagaggagtagccccctttttcagagagtttggggtctacctcagagctctccctgtcaaaaagcagctgcaagcctcgcaagggtggagtggggggagactgaggaccagtagtacctgcagggtgcccgtggctgtggccagtgtcccttagccaacctgctgggctcaccagttccccgtctgatctgcctgtgcgcctcccattcttctctacccagaacctgtcatgggctggggctcagattttcctggctttgggagcagacagaccagagccaccagccattcagaaaacttcttatagctaccttcatgcaaaactgttttcttcttccttctcaatggtgacatttgaagaggcagagcaccttggggctcctccttctgtcttaagagaaagccaaggcacgtagagtagggagaagaagggcaccatcctctctttcctccccagggtctactgctgatttctagatggatcatgcagcttctctcagctcagctctttccatctaccaaatgggtgtaataatacttacctacctcacaggactgttgtgaggcttggcaagttttgtctaaaaacatctttttggcttggaaagggatctgggaagccaggtattaattgcagggatagttccaagtctgtcctgtcttcatctctgtgtcccatctctacaacccacatacagacacacacactctctctctctttctttccatcccaccccccttggaattatttagtctttgcaatattagaaaccttgactctgatgcttaaagcttcttgtccatggcttttgtttgatggttttcaatagaggtgactgagattgtagggggggcatttttggttgcccccatgcgtgggggcactactaagaatgctaaacttagtccccacaacaaagaatcatcctgtcccatgtcaacattatacccatggagaaacactggcatggatttgcactaggatgtatatgggcaaagctatcttccccaagtggaacctcagtgcatgcaaatctctgatggtggcttccagggcttgtgggctagagagagccacttacaaagtcgatcttgagagacctggccacatgcagctgggctgagtgatgtcagcgagactaaagacaaagttctgagctcctcatcaactacaaaatatgaaatcagcattccaggttctgggcttctccccatgtcgtaattgaacagaaggcagcccgaataaacccctgatgttagagaggcctggggagagcagccgatggggctcagactacatatggcaggccgatcagagctcttgtggagcgagggcttgagagcatgcttgtgagatggcaggaggtggggtgtgcttgtgtggagtgtgcgtgtgcaggcagtgtgggtgcatggcagcgtaactgtggagtggatgggctctgcatgtaaggggtgatgcatgatgggcagatgctggacatttgaggagccgtctttcttggcctgagctatgcctgttgaggcatctggagactgagaaagaatcaaaggcagagaagaccagccgtgctcctgcattccgtcactccatgacttcatctcagtgtcacagacagctgccatcagagggctggcagtagggagttccaggagcggggacttctcgggaaaatcctataacttgctttactttactttgtcccaggttggagtccctaccctcccacctcccacctgatatgcagtgcttttgactatcttatgcatggtttattcctctggcttggatgacaacaatacccatagtcaattttcctatgtaactatagatcaaatgatgcaacaacaggccttgggaggcctcaggtgtgcgagtgcctctgggaggcgcagatgcccacacagccagcactgacttgtgttcgagcacagaacggatataatcagtctggcctctacaacaagttttgcattgtagaattgtatttagctttgccttggatgaaataaaaattatgtttaataa

SEQ ID NO: 251287 - DNA, 687 bp, Artificial Sequence
  derived and/or modified sequence
atgccaggggccggggatggcgggaaggccccagctcgatggcttggaacaggactgctcggactatttctattgccggttactttaagcctggaggtgtccgtggggaaagccacagacatatacgccgtaaacggcaccgagatccttctaccctgtacattctctagttgctttggcttcgaggacttacattttcgatggacctacaactcatcggacgcttttaagattctaattgaggggaccgtcaagaacgaaaagtcagatcccaaggtgacacttaaggacgacgaccgtatcaccctggtgggtagcacaaaggaaaagatgaacaacattagcatcgtcttgagggatctggaattcagcgatacaggcaaatatacatgtcatgtaaagaatcctaaggagaataatctccagcatcacgccaccatcttcctccaggtcgtggataggctggaagaggtagacaatactgtgacactgatcatcctggcggtggtgggcggggtgattggactgctgatcttaattctactcattaagaagttgattatcttcatactgaaaaagacccgggaaaagaaaaaggagtgtctggtgtcaagttccggcaatgacaatacagagaatgggctgccaggcagcaaggcggaagaaaagcctccttccaaggtttag

SEQ ID NO: 251288 - DNA, 687 bp, Artificial Sequence
  derived and/or modified sequence
atgcctggagctggagatggcggcaaggccccagcccgctggctgggcaccggcctgctgggcctcttcctgctgcctgtgaccctgagcctggaggtgtctgtgggcaaggccacagacatctatgctgtgaatggaacagagatcctgctgccctgcaccttcagcagctgctttggatttgaggacctgcacttccgctggacctacaacagcagtgatgccttcaagatcctgattgagggcaccgtgaagaatgagaagagtgaccccaaggtgaccctgaaggatgatgaccgcatcaccctggtgggcagcaccaaggagaagatgaacaacatcagcatcgtgctgcgggacctggagttcagtgacaccgggaagtacacctgccacgtgaagaaccccaaggagaacaacctgcagcaccacgccaccatcttcctgcaggtggtggaccggctggaggaggtggacaacacagtgaccctcatcatcctggccgtggtgggcggcgtcatcggcctgctgatcctgatcctgctgatcaagaagctgatcatcttcatcctgaagaagacccgggagaagaagaaggagtgcctggtgagcagcagtggaaatgacaacacagaaaatggcctgcccggcagcaaggccgaggagaagccacccagcaaggtgtag

SEQ ID NO: 251289 - DNA, 687 bp, Artificial Sequence
  derived and/or modified sequence
atgcccggcgccggcgacggcggcaaggcccccgcccggtggctgggaacaggactgcttggcctgttcttactgccagttacgctgagcctcgaagtgtcggtaggcaaagctaccgatatatatgcagtgaacggcacagaaatattactgccctgcaccttctcctcatgttttggatttgaggacctccacttcagatggacatacaactcctcagacgctttcaagattttaattgagggaaccgtaaagaacgagaaatctgatccaaaggtaacattgaaggatgacgatcgtatcaccctggttggaagtaccaaagagaagatgaacaatattagcatcgtgctaagggatttggaattttcagatacagggaagtacacctgtcatgtaaaaaaccccaaggaaaataatctgcaacaccatgccacaatctttcttcaggtcgttgaccgccttgaagaagtagacaacacagtcactctgatcatcctggctgttgtcggaggcgtcattgggctgctgatcctgattctgttgatcaaaaaactgattatttttatattgaaaaagaccagagaaaagaaaaaagagtgtttggtgtcttccagcgggaatgacaataccgagaacggactgcccggcagtaaggccgaagagaagcccccatccaaagtgtag

SEQ ID NO: 251290 - DNA, 687 bp, Artificial Sequence
  derived and/or modified sequence
atgcccggagctggagatggagggaaggctcctgcacgatggctaggtacgggcctactgggactgtttctgctgcccgtaacactgagtttggaagtttctgtgggcaaagctacagacatttacgccgtgaacggtactgaaattctgctcccgtgcacctttagctcatgcttcgggtttgaggacctgcacttccgctggacgtacaactcaagtgatgccttcaagattctcatagagggcacagtcaagaacgaaaaatctgaccccaaggttactttgaaagacgatgaccgcataactctggtgggcagcacgaaggaaaagatgaataatatttctattgtgttacgtgacctcgagtttagtgatacagggaaatacacatgccatgtgaagaacccaaaagaaaacaacttgcagcatcatgcgacaatttttctacaggtggtcgataggctggaggaggtcgacaacaccgttacacttatcatcttagctgtggttggcggagtaattgggctgcttattctcatcctgctgatcaagaagcttataattttcattttaaagaagactcgagaaaaaaagaaggaatgcttggtcagtagcagcgggaatgacaacacggagaatggactacctggatcaaaggcagaggagaaacccccttccaaggtgtag

SEQ ID NO: 251291 - DNA, 4484 bp, Artificial Sequence
  derived and/or modified sequence
ctctgcccgctaactttcccgagccccgaccggcggcgcagagctccggggtagctttgtggccgaacgccgacctcgggcggagagcgcggctgtgcccagtatcccatccccgcgacccccgcgcgctccggagagaacaggactatgcccggggctggggacggaggcaaagccccggcgagatggctgggcactgggcttttgggcctcttcctgctccccgtaaccctgtcgctggaggtgtctgtgggaaaggccaccgacatctacgctgtcaatggcacggagatcctgctgccctgcaccttctccagctgctttggcttcgaggacctccacttccggtggacctacaacagcagtgacgcattcaagattctcatagaggggactgtgaagaatgagaagtctgaccccaaggtgacgttgaaagacgatgaccgcatcactctggtaggctctactaaggagaagatgaacaacatttccattgtgctgagggacctggagttcagcgacacgggcaaatacacctgccatgtgaagaaccccaaggagaataatctccagcaccacgccaccatcttcctccaagtcgttgatagactggaagaagtggacaacacagtgacactcatcatcctggctgtcgtgggcggggtcatcgggctcctcatcctcatcctgctgatcaagaaactcatcatcttcatcctgaagaagactcgggagaagaagaaggagtgtctcgtgagctcctcggggaatgacaacacggagaacggcttgcctggctccaaggcagaggagaaaccaccttcaaaagtgtgagccctgcttcgggctgagcagctgcagggagccccctttctgatgatgaaactgatgcttgagccccgaccgtagaacccacgtgcctgagacatctgctgcttggctcaaactgtagtctttccgggcacaagaaaccagagtcctgcccagcctgcccatccccttcccagtcagggctccccagggacaagggatggccaggggagggggtctgtggaagattcaggagaaagaaaggagaggctagggtggtgtggaggggctggtcccctgacacctgggcagatggggtctccttcagtctccctaccctgcacaagcagggccttgattttcctccaggcttctcttcacaagagactgggaggatccgtaagggatgtcctaagagctgcaccctggagatggggtgtaggaagaagtggcttcctttggaggtgggagtgggctggaggcctctggagaagacctggggtgggggctgatgggggcaggcccacagtgagagactgcctctgcttcataggataccagatcccccacagtcttccaagtaggaaacttcctttcccctgccccgggaccctatctgcctatcccctcccctgctcagagtttttaagccctctcaaccagggctggccaccctggtcttgagggttcctggccacctagcctgctcctctgctctctgggttactgaggggctcaggaaggggcccctcgagccttcctggagtacccgagtgctccctatgcctttccaagcatttctacttggggaattgggccacagaggtagtgagccagtgtcctgggcctctgggatgcccgccccattgctgccaatgctggcagcccctcccctggcatggcaggaccatcgccactctgggcactcctgagcccagctctcccctgcttctccccctcctacctgagaggctgcaccctccaacctcccattggctcgctcccccccccccaccgtgccctccatcacgccctgcccccagggtggttcatttcccagccctgggtcaagggcctgccttcgcctcagggactctcttcctttggatgagggggtccttgggtttcccagctgcttcctgctcagctgggccaccccctcccaccctggggttggggaggagcagggagtgggtgcccacagttttcctttgcttctcccagagctggtttgcacagcccttgtgtgtggggctagaatgtgccttagtcctgaatcctagcccttacccccatcctctctagacggtatgtcctgacataacagcagagtctggtgtggtgctggtgagggttcgccagccctcccctccccagggtcatagagggggccatgaggctggaattggccagtgactgaatcttggagatgtcggccaggtgctcccattggggtttctagcctgccctagggggaggtggtgatgttgggagtgggatctcctgagtccttgttgggcagaattggtgaggccagggatggcagggaaaagtggtaacaagcctctctgcccatctacttccaatccctctctcccttactgattttttgatgccctgtcttctgggcccctaggagggatgagagaggagtagccccctttttcagagagtttggggtctacctcagagctctccctgtcaaaaagcagctgcaagcctcgcaagggtggagtggggggagactgaggaccagtagtacctgcagggtgcccgtggctgtggccagtgtcccttagccaacctgctgggctcaccagttccccgtctgatctgcctgtgcgcctcccattcttctctacccagaacctgtcatgggctggggctcagattttcctggctttgggagcagacagaccagagccaccagccattcagaaaacttcttatagctaccttcatgcaaaactgttttcttcttccttctcaatggtgacatttgaagaggcagagcaccttggggctcctccttctgtcttaagagaaagccaaggcacgtagagtagggagaagaagggcaccatcctctctttcctccccagggtctactgctgatttctagatggatcatgcagcttctctcagctcagctctttccatctaccaaatgggtgtaataatacttacctacctcacaggactgttgtgaggcttggcaagttttgtctaaaaacatctttttggcttggaaagggatctgggaagccaggtattaattgcagggatagttccaagtctgtcctgtcttcatctctgtgtcccatctctacaacccacatacagacacacacactctctctctctttctttccatcccaccccccttggaattatttagtctttgcaatattagaaaccttgactctgatgcttaaagcttcttgtccatggcttttgtttgatggttttcaatagaggtgactgagattgtagggggggcatttttggttgcccccatgcgtgggggcactactaagaatgctaaacttagtccccacaacaaagaatcatcctgtcccatgtcaacattatacccatggagaaacactggcatggatttgcactaggatgtatatgggcaaagctatcttccccaagtggaacctcagtgcatgcaaatctctgatggtggcttccagggcttgtgggctagagagagccacttacaaagtcgatcttgagagacctggccacatgcagctgggctgagtgatgtcagcgagactaaagacaaagttctgagctcctcatcaactacaaaatatgaaatcagcattccaggttctgggcttctccccatgtcgtaattgaacagaaggcagcccgaataaacccctgatgttagagaggcctggggagagcagccgatggggctcagactacatatggcaggccgatcagagctcttgtggagcgagggcttgagagcatgcttgtgagatggcaggaggtggggtgtgcttgtgtggagtgtgcgtgtgcaggcagtgtgggtgcatggcagcgtaactgtggagtggatgggctctgcatgtaaggggtgatgcatgatgggcagatgctggacatttgaggagccgtctttcttggcctgagctatgcctgttgaggcatctggagactgagaaagaatcaaaggcagagaagaccagccgtgctcctgcattccgtcactccatgacttcatctcagtgtcacagacagctgccatcagagggctggcagtagggagttccaggagcggggacttctcgggaaaatcctataacttgctttactttactttgtcccaggttggagtccctaccctcccacctcccacctgatatgcagtgcttttgactatcttatgcatggtttattcctctggcttggatgacaacaatacccatagtcaattttcctatgtaactatagatcaaatgatgcaacaacaggccttgggaggcctcaggtgtgcgagtgcctctgggaggcgcagatgcccacacagccagcactgacttgtgttcgagcacagaacggatataatcagtctggcctctacaacaagttttgcattgtagaattgtatttagctttgccttggatgaaataaaaattatgtttaataa

SEQ ID NO: 251292 - DNA, 687 bp, Artificial Sequence
  derived and/or modified sequence
atgcccggcgccggcgacggcggcaaggcccccgccagatggctgggcaccggcctgctgggcctgttcctgctgcccgtgaccctgagcctggaggtgagcgtgggcaaggccaccgacatctacgccgtgaacggcaccgagatcctgctgccctgcaccttcagcagctgcttcggcttcgaggacctgcacttcagatggacctacaacagcagcgacgccttcaagatcctgatcgagggcaccgtgaagaacgagaagagcgaccccaaggtgaccctgaaggacgacgacagaatcaccctggtgggcagcaccaaggagaagatgaacaacatcagcatcgtgctgagagacctggagttcagcgacaccggcaagtacacctgccacgtgaagaaccccaaggagaacaacctgcagcaccacgccaccatcttcctgcaggtggtggacagactggaggaggtggacaacaccgtgaccctgatcatcctggccgtggtgggcggcgtgatcggcctgctgatcctgatcctgctgatcaagaagctgatcatcttcatcctgaagaagaccagagagaagaagaaggagtgcctggtgagcagcagcggcaacgacaacaccgagaacggcctgcccggcagcaaggccgaggagaagccccccagcaaggtgtag

SEQ ID NO: 251293 - protein, 586 aa, Artificial Sequence
  derived and/or modified sequence
MQAGARFQRRRRQLQQQQPRRRQPLLWPMDAEPPPPPPWVWMVPGSAGLLRLSAGVVVPPVLLASAPPPAAPLLPGLPGWPAPSEPVLPLLPLPSAPDSAAAAAAHPFPALHGQWLFGGHSPSLGLPPSSTVELVPVFPHLCPSALATPIGKSWIDKRIPNCKIFFNNSFALDSTWIHPEESRFFHGHEKPRLLANQVAVSLSRPAPASRPLPTVVLAPQPIPGGCHNSLKVTSSPAIAIATAAAAAMVSVDPENLRGPSPSSVQPRHFLTLAPIKIPLRTSPVSDTRTERGRVARPPALMLRAQKSRDGDKEDKEPPPMLGGGEDSTARGNRPVASTPVPGSPWCVVWTGDDRVFFFNPTMHLSVWEKPMDLKDRGDLNRIIEDPPHKRKLEAPATDNSDGSSSEDNREDQDVKTKRNRTEGCGSPKPEEAKREDKGTRTPPPQILLPLEERVTHFRDMLLERGVSAFSTWEKELHKIVFDPRYLLLNSEERKQIFEQFVKTRIKEEYKEKKSKLLLAKEEFKKLLEESKVSPRTTFKEFAEKYGRDQRFRLVQKRKDQEHFFNQFILILKKRDKENRLRLRKMR

SEQ ID NO: 251294 - DNA, 1761 bp, Artificial Sequence
  derived and/or modified sequence
atgcaggccggcgccagattccagagaagaagaagacagctgcagcagcagcagcccagaagaagacagcccctgctgtggcccatggacgccgagcccccccccccccccccctgggtgtggatggtgcccggcagcgccggcctgctgagactgagcgccggcgtggtggtgccccccgtgctgctggccagcgcccccccccccgccgcccccctgctgcccggcctgcccggctggcccgcccccagcgagcccgtgctgcccctgctgcccctgcccagcgcccccgacagcgccgccgccgccgccgcccaccccttccccgccctgcacggccagtggctgttcggcggccacagccccagcctgggcctgccccccagcagcaccgtggagctggtgcccgtgttcccccacctgtgccccagcgccctggccacccccatcggcaagagctggatcgacaagagaatccccaactgcaagatcttcttcaacaacagcttcgccctggacagcacctggatccaccccgaggagagcagattcttccacggccacgagaagcccagactgctggccaaccaggtggccgtgagcctgagcagacccgcccccgccagcagacccctgcccaccgtggtgctggccccccagcccatccccggcggctgccacaacagcctgaaggtgaccagcagccccgccatcgccatcgccaccgccgccgccgccgccatggtgagcgtggaccccgagaacctgagaggccccagccccagcagcgtgcagcccagacacttcctgaccctggcccccatcaagatccccctgagaaccagccccgtgagcgacaccagaaccgagagaggcagagtggccagaccccccgccctgatgctgagagcccagaagagcagagacggcgacaaggaggacaaggagcccccccccatgctgggcggcggcgaggacagcaccgccagaggcaacagacccgtggccagcacccccgtgcccggcagcccctggtgcgtggtgtggaccggcgacgacagagtgttcttcttcaaccccaccatgcacctgagcgtgtgggagaagcccatggacctgaaggacagaggcgacctgaacagaatcatcgaggaccccccccacaagagaaagctggaggcccccgccaccgacaacagcgacggcagcagcagcgaggacaacagagaggaccaggacgtgaagaccaagagaaacagaaccgagggctgcggcagccccaagcccgaggaggccaagagagaggacaagggcaccagaaccccccccccccagatcctgctgcccctggaggagagagtgacccacttcagagacatgctgctggagagaggcgtgagcgccttcagcacctgggagaaggagctgcacaagatcgtgttcgaccccagatacctgctgctgaacagcgaggagagaaagcagatcttcgagcagttcgtgaagaccagaatcaaggaggagtacaaggagaagaagagcaagctgctgctggccaaggaggagttcaagaagctgctggaggagagcaaggtgagccccagaaccaccttcaaggagttcgccgagaagtacggcagagaccagagattcagactggtgcagaagagaaaggaccaggagcacttcttcaaccagttcatcctgatcctgaagaagagagacaaggagaacagactgagactgagaaagatgagatag

SEQ ID NO: 251295 - DNA, 1761 bp, Artificial Sequence
  derived and/or modified sequence
atgcaggccggggccagatttcagaggaggagaagacagctacagcagcaacagccaaggaggcgccagcccctgctgtggcctatggacgccgagcctcctccaccccccccctgggtgtggatggtgccagggtccgccgggcttttgaggttgtctgccggggtggtggtgccgccagtcctgttagcttccgcccccccacccgccgctcctctgttacccggactccccgggtggcctgccccgtcagaaccggtgttacccctgctccctctgccaagcgctcctgacagcgcagccgcagcagccgctcaccccttcccagcactgcacggccagtggctgtttggaggccacagccccagcctcggcctgcctcccagctctaccgttgaacttgtccctgtctttccgcacctttgtcccagtgctctcgcgacacctatcggcaaatcctggattgataagagaataccaaattgtaaaatcttcttcaataatagctttgctctcgattccacttggatccaccccgaggaaagtcggttttttcacggccacgaaaagccaagactccttgccaatcaggtggctgtgagcttgagtaggcctgctccggcatccagaccacttcccaccgtggtcctagcacctcaacccattccaggcggctgccataattccttaaaggtaactagctcccctgccatcgcgatcgcaacagccgcagccgccgctatggtgtctgttgatcccgagaacctgagagggccaagcccatcttccgttcagccacgccattttttgaccctggcaccaattaaaatacctttacggacctcgcccgtgtcagacactcgtacagagcgaggcagagtggccaggcctccagccctgatgcttagagcgcagaagtccagggacggggataaagaggacaaagagccccctccgatgctgggaggcggcgaagactccaccgcccgcgggaataggcccgtggcgtctaccccagtgccaggatctccctggtgcgttgtgtggaccggtgacgacagagtgttcttcttcaatccaaccatgcacctgagcgtgtgggaaaagcctatggatctcaaggaccgcggagacctcaaccgaatcatcgaagaccccccccacaagaggaagctggaggcacccgctactgataactccgacggtagcagcagcgaagataacagagaagaccaagatgtgaagacaaaaagaaaccgcactgaaggttgcggaagccccaaacctgaagaagcaaaaagagaggataaagggaccagaaccccacctcctcaaatcctgctgcccctggaggagcgggtcacacacttccgcgatatgctcctggaacgaggggtcagtgccttctcaacttgggagaaagaacttcacaagatagtattcgatccaaggtacctgttgttgaattccgaggagagaaagcaaatctttgagcagtttgttaagacaagaatcaaggaggaatataaagagaagaagagtaagctgttgctcgctaaggaggaattcaagaaactcttggaggagtccaaggttagcccgaggacgacgttcaaggaattcgcggagaaatacggcagagaccaacggttccgacttgtgcagaaaagaaaggaccaggaacacttttttaaccagttcatcctgatcctgaaaaagcgagataaggaaaatcgtctaagactgaggaaaatgaggtag

SEQ ID NO: 251296 - DNA, 1761 bp, Artificial Sequence
  derived and/or modified sequence
atgcaggccggggcccgcttccagaggagaagacggcagctgcagcagcagcagccccggcggcggcagcccctgctgtggcccatggatgctgagcccccacctcctccaccctgggtgtggatggtgcccggcagcgctggcctgctgcggctgtctgctggggtggtggtgccccctgtgctgctggccagcgcccctcctcctgctgcccccctgctgcccggcctgcccggctggccagcccccagcgagcctgtgctgcccctgctgcccctgcccagcgccccagattctgctgctgctgctgctgcccaccccttccctgccctgcacggccagtggctgtttggaggccacagccccagcctgggcctgccccccagcagcacagtggagctggtgcctgtgttcccccacctgtgccccagcgccctggccacccccatcggcaagtcctggattgacaagaggatccccaactgcaagatcttcttcaacaacagctttgccctggacagcacctggatccaccctgaggagagccgcttcttccacggccacgagaagccccggctgctggccaaccaggtggccgtgtccctgagcaggcctgccccagccagccggcccctgcccaccgtggtgctggccccccagcccatccctgggggctgccacaacagcctgaaggtgaccagcagccctgccatcgccatcgccacagctgctgctgctgccatggtgtctgtggaccctgagaacctgcggggccccagccccagctctgtgcagcccaggcacttcctgaccctggcccccatcaagatccccctgcggaccagccctgtgtctgacaccaggacagagcggggccgggtggcccggcccccagccctgatgctgcgggcccagaagagcagagatggagacaaggaggacaaggagcccccacccatgctgggcggcggggaggacagcacagcccggggcaacagacctgtggccagcacccctgtgcccggcagcccctggtgtgtggtgtggacaggagatgacagagtcttcttcttcaaccccaccatgcacctgtctgtgtgggagaagcccatggacctgaaggacagaggagacctgaaccgcatcatcgaggaccccccccacaagaggaagctggaggccccagccacagacaacagtgatggcagcagcagcgaggacaaccgggaggaccaggatgtgaagaccaagaggaacagaacagagggctgcggcagccccaagccagaggaggccaagagagaagataaaggcaccaggaccccaccaccccagatcctgctgcccctggaggagcgggtgacccacttccgggacatgctgctggagcggggcgtgtctgccttcagcacctgggagaaggagctgcacaagatcgtgtttgacccccgctacctgctgctgaacagcgaggagaggaagcagatctttgagcagtttgtgaagacccgcatcaaggaggagtacaaggagaagaagagcaagctgctgctggccaaggaggagttcaagaagctgctggaggagagcaaggtgagccccaggaccaccttcaaggagtttgctgagaagtatggccgggaccagcgcttccggctggtgcagaagaggaaggaccaggagcacttcttcaaccagttcatcctgatcctgaagaagagggacaaggaaaatcggctgcggctgaggaagatgaggtag

SEQ ID NO: 251297 - DNA, 1761 bp, Artificial Sequence
  derived and/or modified sequence
atgcaggccggcgcccggttccagcggcggcggcggcagctgcagcaacaacaaccaaggcgcagacaaccactcctatggcccatggatgctgaaccccccccaccccctccatgggtgtggatggtccctgggtccgctggactgctcaggctcagcgccggggttgtggtccctcctgttttactggccagcgccccaccccccgcggctcctcttctacctggccttcccgggtggcccgccccatcagaaccagtgctgccgctcttacccctgcctagcgcacctgactccgccgctgcagccgctgcacatccatttcctgccttgcacggacagtggctctttggtgggcacagcccttctctcggcctcccaccatcatcaactgtggagctagtgccagtgtttccgcatctttgtccttctgccttagccactcccattgggaagagctggattgataaacgtataccaaactgcaaaatattctttaataactcctttgcactggatagcacttggattcatccagaagaatcccgcttctttcacggacacgaaaagccacgcctcctggccaaccaggtcgccgtctccctgagtcggccggcgccagccagtagacctcttcctactgtcgtcttggctccccagcccattccaggcgggtgccacaactccctgaaagttacgtcatcgcccgccatagcaatcgcgaccgcagctgcagccgctatggtgtctgtggatcccgagaacctgagaggacctagcccaagctccgtgcagccccgccattttcttactcttgctccaataaaaatccccctccgtactagccctgtgagtgatacacgaaccgaaaggggaagggtagcacgaccccctgccctgatgctcagggcccagaaatcgcgggatggcgacaaggaggacaaggagccaccacccatgttgggcggaggggaagactctacagctcgggggaaccgaccagtagcgtccacccctgtacccggttcaccatggtgtgtcgtgtggacaggggatgaccgtgttttttttttcaacccaaccatgcacctctcagtttgggagaaacctatggatctgaaagacaggggggacctaaataggatcattgaggatccaccccacaagaggaagctcgaagcccctgctaccgacaactctgatggctccagcagcgaagacaatagagaggaccaggacgtcaagacaaaacgcaatcgcaccgagggttgcggcagccccaaaccagaagaagccaagagggaggacaagggtactcgcactccccctccacagatactgcttcctctagaggaacgggtgactcattttcgtgacatgctgctggagcggggagtgagcgcgtttagtacatgggagaaggagctacataaaatagtgttcgacccaagatacctcctgctgaatagcgaagagagaaagcaaatctttgagcaatttgtgaagacaagaattaaagaggagtataaggagaagaagtctaagttgcttctagcgaaggaggaatttaaaaagcttttagaggagagcaaagtgtccccgcgcacaacatttaaggagttcgctgagaaatatggccgggaccagcgcttcagacttgttcagaaacgcaaggaccaggaacacttctttaaccagttcatcctgattctgaaaaagagggataaagaaaatcgcctgcgccttcggaagatgcgttag

SEQ ID NO: 251298 - DNA, 1761 bp, Artificial Sequence
  derived and/or modified sequence
atgcaagcaggagccaggttccaaaggagaagaaggcagctgcagcaacagcagcctagacgaaggcagcctctgctgtggccaatggacgccgagccaccgccacccccaccctgggtgtggatggtgccaggctccgcaggtttgctaaggctgtctgccggtgtggtcgtacctccagtgttactggctagcgctcctccccctgccgcaccgctcctgccaggtctgcccggatggcctgcgccttctgaaccagtgctgcctctgctgcccctcccaagtgcacccgattctgctgctgccgctgccgcacacccttttcctgctctgcacgggcagtggctttttggaggacacagtccttctctgggcctcccacctagctcgacggtcgagttggttcctgtttttcctcatctatgcccgtctgctctcgccactcccattgggaaatcctggatagacaaacgcatcccaaattgtaagatcttcttcaataattcattcgcattagatagcacgtggatacacccggaagaaagccggttctttcacggccacgagaagcctaggttactcgctaaccaggtggctgtctccctgtcaaggcccgctcccgcatcaagacccctgccaactgtggtgctggctccacaaccaatccccggtggatgccacaactctctgaaagtgacctccagccccgctatcgcgatcgcaacagctgccgctgctgcaatggtgtctgtggacccagagaatttgaggggtccgagcccttcttcagttcagcctcggcatttcctgaccttagcccctataaaaatcccgctgcgcacttcacccgtaagcgacacacgcactgaaagaggacgggtggcgcgaccccctgccctcatgctccgggctcaaaagtcacgggatggcgacaaggaagacaaagagcctcccccaatgctcgggggtggagaagactccacggcccgtggcaaccgaccagtggccagcactccggtccccggtagtccttggtgcgtagtctggacgggtgatgaccgggtgttctttttcaatcctaccatgcatctgtcagtttgggaaaagccaatggatcttaaagatcgaggtgacctgaatagaatcattgaggacccccctcacaagaggaaactggaggctcccgctaccgacaactccgatggttccagcagtgaagataatcgcgaggaccaagacgtaaagactaagagaaacagaacagagggatgtgggtcacctaaacccgaggaagccaagcgggaggataagggtacccgtacgccccctccccagattctcctgccccttgaggagcgagtgacgcattttcgcgatatgctccttgaacggggtgtgtcggcatttagcacgtgggagaaagaactccataaaatcgtttttgatccacgttacctattgctgaactcggaggaaagaaagcaaatctttgagcaattcgtcaagacccgcattaaagaagagtataaggagaagaaatccaagctgctgctcgccaaagaagaatttaaaaaacttctggaggagtcaaaagtgtccccccgtactactttcaaagaatttgccgagaagtacggaagagaccaaagattcagactcgtccagaaacggaaagaccaggagcatttctttaaccaatttatcctgatcctgaaaaaacgcgataaggagaaccgcctccggctgcgaaaaatgcggtag

SEQ ID NO: 251299 - DNA, 2618 bp, Artificial Sequence
  derived and/or modified sequence
gagttcgctccggagccgcgccgccgccggcccagcatctcgggcgcccgccgcccccgccgccgccgtcagcgcggggatgtaggatgcaggcgggcgccaggttccagcggcggcggcggcagctgcagcagcagcagccccggcggcggcagcctctcctctggccgatggacgcagagccgccgccgccgccgccctgggtctggatggtgccgggctcggccgggctgctccggctcagcgcgggggtcgtggttcccccggtgctgctcgcctcggccccgccgcccgcggccccgctgctccccggtctccccggctggccggccccgagcgagccggtgctcccgctgctgccgctgccctctgcgccagactccgccgccgccgccgccgcgcaccccttccccgcgctccacgggcagtggctgtttggtggccattctccgtccctaggactgcccccctcttccacagtggagctggtgcccgtcttcccacatctctgcccttctgctcttgcaacccctattgggaaaagttggatagacaaaaggattcctaactgtaagatcttttttaataattcctttgctctggactcaacgtggatacatcctgaggagtcaaggtttttccatgggcatgaaaagcctcgtttgctggcaaatcaagtagctgtgtctctgtccaggccggctcctgcctccaggccgctccccacggtggtgttagcacctcagcccatcccaggtggctgccataacagccttaaggtgaccagcagccccgccattgccatcgccaccgccgccgccgctgccatggtctccgtggaccctgagaacctccggggcccgtccccctccagcgtgcagccgcgccacttcctgaccttggcacccatcaaaatacccctccggacgtcccccgtctcagatacaaggacagagcggggccgagtggcccgccctcctgccctgatgctgcgggcccagaagagccgggatggagacaaagaagacaaggagcctccaccgatgctggggggaggagaggacagcacagccagaggcaacaggccagtggcctccaccccggtgcccggatccccctggtgtgtggtctggacgggcgatgaccgagttttcttcttcaacccaacgatgcacctgtctgtctgggagaagcccatggacctgaaggaccgcggagacctcaacaggatcattgaggacccgccccacaaacgcaagctggaggcaccagcaactgacaacagcgatgggtccagttctgaagacaacagggaagaccaagatgtgaaaaccaagaggaaccggaccgaaggctgcgggagtcccaagccagaggaggcaaagagagaggacaaaggcacaaggacgccgcccccgcagatcctcctgcctctggaggagcgtgtgacccacttccgagacatgctgctggagagaggggtatcagcattttctacctgggagaaagaattacacaaaatcgtgtttgacccacgctatctcctgctcaactctgaggaacgaaagcagatatttgaacagtttgtcaagacaagaataaaagaagaatacaaggaaaagaaaagtaaattgctgctagccaaagaagaattcaagaaacttctagaggaatctaaagtgtctcccaggaccacgtttaaggagtttgcagagaaatacggccgggatcagaggttccgacttgttcaaaaaagaaaggaccaggagcattttttcaaccaattcatacttattcttaagaaacgggacaaggaaaacagactaaggctgcggaaaatgagatgagtttgtgaaaaaatgcaataagcccgggggttgaccctgggcgtgccgggggcgagggggtcacggtggagacggacacgggcgtggggcggccgagacctgcacggcccagcgggcaccggcactgcggggtcttcgttctcagaggattactgtttcatattgaagctctctcttttgtacattcagagtttgatgcatttctaatcaccgtgatacgtcgatcccttaattgttttaattatgcaaattacttgtaatatacacaaattatcaatccactgcaggactgtggggaagcaggaacgggagcctctgtaacaatctcaaggcatttgtgtcatcacctaagacgattggcgaaaacttttctgaaaacctttgtgaattacttcgtttctccaggattcccgcagtgttgaggaattccttactctgtccctaggtctcagtctcgtttctgagtagcagcaatagggttttcatcattcatcatagtgacaactgtgagcattccacacctggaccgtggatcacttacaggtttccaagggtggccgcgcgttcctcccagaggggcgtcccggcctggagcagggagccgtgttggttgccaccggtcctacttcaaaagaattattttgtacaaaatcatcatattaatatttgagttatttttattgtatgcccggagtttgcatgagattttttctcatcacctttgtataaaaaatttttaattttttttaatcaataaatattttaaaccag

SEQ ID NO: 251300 - protein, 597 aa, Artificial Sequence
  derived and/or modified sequence
MFASCHCVPRGRRTMKMIHFRSSSVKSLSQEMRCTIRLLDDSEISCHIQRETKGQFLIDHICNYYSLLEKDYFGIRYVDPEKQRHWLEPNKSIFKQMKTHPPYTMCFRVKFYPHEPLKIKEELTRYLLYLQIKRDIFHGRLLCSFSDAAYLGACIVQAELGDYDPDEHPENYISEFEIFPKQSQKLERKIVEIHKNELRGQSPPVAEFNLLLKAHTLETYGVDPHPCKDSTGTTTFLGFTAAGFVVFQGNKRIHLIKWPDVCKLKFEGKTFYVIGTQKEKKAMLAFHTSTPAACKHLWKCGVENQAFYKYAKSSQIKTVSSSKIFFKGSRFRYSGKVAKEVVEASSKIQREPPEVHRANITQSRSSHSLNKQLIINMEPLQPLLPSPSEQEEELPLGEGVPLPKEENISAPLISSSPVKAAREYEDPPSEEEDKIKEEPLTISELVYNPSASLLPTPVDDDEIDMLFDCPSRLELEREDTDSFEDLEADENAFLIAEEEELKEARRALSWSYDILTGHIRVNPLVKSFSRLLVVGLGLLLFVFPLLLLLLESGIDLSFLCEIRQTPEFEQFHYEYYCPLKEWVAGKVHLILYMLGCS

SEQ ID NO: 251301 - DNA, 5297 bp, Artificial Sequence
  derived and/or modified sequence
gaggcggaggcgagcgaacagagggagggacccgcccgccgcgccccggccgctgggcatgtgtgtccgcaggcgcccgacgctgccgatgtcccggggctgagccgcgcccaggtgtcccggacagtgcgtgcgagcgtgtgtgtccgcgcaggcgagcaccgcgccggccctgagcctcccgctcgctccccacggccgcggtgcatgttcgcctcctgccactgtgtgccgagaggcaggaggaccatgaaaatgatccactttcggagctccagcgtcaaatcgctcagccaggagatgagatgcaccatccggctgctggacgactcggagatctcctgccacatccagagggaaaccaaagggcagtttctcattgaccacatctgcaactactacagcctgctggagaaggactactttggcattcgctatgtggacccagagaagcaaaggcactggcttgaacctaacaagtccatcttcaagcaaatgaaaactcatccaccatacaccatgtgctttagagtgaaattctacccacatgaacccttgaagattaaagaagagctcacaagataccttttataccttcagattaaaagggacatttttcatggccgcctgctgtgctccttttctgatgctgcctacctgggtgcctgtattgttcaagctgagcttggtgattacgatcctgatgagcatcctgagaattacatcagtgagtttgagattttccccaagcagtcacagaagctggaaagaaaaatagtggaaattcataaaaatgaactcagggggcagagcccaccagttgctgaatttaacttgctcctgaaagctcacactttggaaacctacggggtggatcctcacccatgcaaggattcaacaggcacaacaacatttttaggattcacagctgcaggctttgtggtctttcagggaaataagagaatccatttgataaaatggccagatgtctgcaaattgaagtttgaagggaagacattttatgtgattggcacccagaaggagaaaaaagccatgttggcattccatacttcaacaccagctgcctgcaaacatctttggaagtgtggagtggaaaaccaggccttttataagtatgcaaaatccagtcagatcaagactgtatcaagcagcaagatattttttaaaggaagtagatttcgatatagtgggaaagttgccaaagaggtggtggaggccagttccaagatccagagggagcctcctgaggtgcacagagccaacattactcagagccgcagttcccactccttgaacaaacagctcatcattaacatggaacccctgcagcccctgcttccttcccccagcgagcaagaagaagaacttcctctgggtgagggtgttccattgcctaaagaggagaacatttctgctcccttgatctccagctccccagtgaaggcagcccgggagtatgaagatccccctagtgaagaggaagataaaataaaagaagaacctttaaccatctctgaactagtgtacaacccaagtgccagcctgctccccacccctgtggatgacgatgagattgacatgctctttgactgtccttctaggcttgagttggaaagagaagacacagattcatttgaggatctggaagcagatgaaaacgcctttttgattgctgaagaagaggagctgaaggaggctcgccgtgctttgtcgtggagctatgacattctgactggccatattcgggtgaacccactggtcaagagtttttccaggctccttgtggtgggcctgggactgctgctctttgtatttcccctgctcctcctccttttggagtcaggtattgatctctccttcttatgcgaaatccgccagacaccagagtttgagcagtttcactatgaatactactgtcccctcaaggagtgggtggctgggaaagtccacctcatcctctacatgctgggttgctcatgaagttaatctctcacgtgactaagggctatattcaatgctagtgatttctttttttcagcaaatgcctggttctgaagggtcacggggctgtcaacaggtgttccttactcataattgattattcaaacctttaagttagctttccataattcactgcacttaaataagtttaaatcaaatacagttattttagttacaggttaggaagatggtctttaaataaccaaaaatatgtttattttttattatagtgtagacatacccttcatctattatatcataatacatgttacattggactgaattagattttcccatttctaatagttggcaccattataagctataaggttcagaatcagaattttagtaacaactcaagagaaagttgttgaatataatccttagtgaaaacagtgtcctctaaccaatgcctatacaactaaatttatgctgggtttttggttctgtttttttaaaaatatttttatgtgttcaaactattttggtaaatttttagcaaaaaaaaaaaagaagcctcctggagttatttacatgtacagattgtaagactaatgcacaaaaggtatatcagaatttttttaatgttttggcgctactttgtttttaaaaatatttttggctgaacaataccataatttgttatgatctgcataggagatagaaaatgggtagaaagacactatagtaagtaagctgctaaaacagaggatggaactggaggatgtagaaactgagagcatcaagtggactcagggtggtccatttttcaaagtatttggacaagaggacttgttattttcatttgtattctgtccgtatattttggctggagaagcagatgttttaaaaagaaagtgagagtttaaaggaaaaaaggtaacagatgtgctagtcagttgcatatcaatgtacattaacccaagagtgaaggcagataggaactggagaaatggaaagtggcaaaaatgagttctggtgaggctggcaggcaaatggtgacaggcgaatggtctattttatgaaagtgatggtgatgccagcgttcgatgatgtgaagagcagtgcagtcgctgtctgagttaacatgaacatgtttaagtggatctaaataaaagtggagaaactttaaggtaaatattttgatccctcatgccatttgttgtgattctgtagaagaaacttcaaaaatgtgtttgtatgtgagtgtgcgtgtgtgtgtgtgtgagagagagagagagagagagagagagaatatgaatggctttttgatacatgtccatgatcatgttttgcggtggtcattatactcctttcctttcccagttgttttaaaatttgacttccatagagaaactggagaggcctcatgagatgacataccagttcagcctgggtaaagtagtgacatgaccctaaccagactgtagaggggaccagtgctctagtaccttccttgataccattaaatccatgatggaaaggatttaatccaacaatttaatggtatcaaggaaggtactagagcattgtaccatcagcaacgtactgatgccttcccatgcagactacctgctgatactgtgttatgtgggagaaagataagagtctagaacttatgccatggagcatagagcttctctgtggattgaaaacattccactgccctaatgtacaaagttacagggcccacttggaatcgctctctctagctaatgacattccaaccctatcattagcatgatttctaaattgggcaatacatttccactcactcagtggagctctgagtacttcactggacatttaattttggaaatgagttttgaaactcagttcgtgaagcctgcagtcgagcaaatgactatatatttgccattaagtttgaggggtttcctttcctatatgctttcagtgatttattttgctttttaaataaagattgtttgtttattacctgaaagttgatactgatttaggaatatattttctgtgattggaatcctcaacaatttattttggaagcttgcagatggctaggtttgaaattgaaatttgtgtttttctccttcttttctcatacgacttctaagtcatcctttctgacataaggcaactttagtgtagtctgcacaaaattagtccccttctgatcatgcgtcatataattttctctaaagttctgactatgacaaatcatctggccctcagtctttcaaaataatattatataatattttttaaattatggaactaatatattttccattgtaaaatacttaaaaaatatgatagtataaatatcacatgtaatccaacgatgcagatttatcttaaggagtaataaatatattattttaacatttccagctaacatctcttttctcttaggtggaaacttcattgttgaatagaaatgtttttaagtgaagaagttgacagaatagggtctgctgaatttaaacagccatcaaaagttaaactggaatcttgaaatgccatttgctcggcatagaatcagagccttttagaaacatccatttaagttttgttagaagatagtcaccagttgcctgaatcgaatgaggaaaagcctgcttccagagatggacagtatattatagagtgagatatagagtttaaagcaagtgtgtgagtatatgtatattccatattattggtatatgtgtgtttatatatgaatctgtatatatgtgtgtctttgaatagacacaacatatatgcccctcatgcataattgtgcttattttgccctaattgaggaatttgagatgtattattggttcttctccctctcagatactatggtgggtaaaacccacagcctgaaagggttaaattttccataaatgccactgagtgtacatttgtggatataaataaatatatataatacacacacacatatggcaaatacatatacacacacaatattgcctttagtgctaatgcaagttggatcatgaaaacaatgtaggtaaagtaaagtatgtatttgtctgtgcttgaaaaatattgtaaaatgttatgtatttggaatatattttgtggtttgtctaatatttataaacacaactcggggtgaattcacaatgagtttatttcattgaaatactagagatatgggggccatgttactgtgattggagccttacctttgtatagtgaaatttgcatttctatgtcaacatccagattgttttatatgttaatatggtggcaggaatccctaataaaaatactctggggtaaaa

SEQ ID NO: 251302 - DNA, 1794 bp, Artificial Sequence
  derived and/or modified sequence
atgtttgcctcttgccattgtgtccccagaggccgcaggaccatgaaaatgattcacttccgttctagcagtgtgaagtctttatcgcaggaaatgcgctgtaccatccgccttctcgacgactctgaaatctcctgtcacatacagcgagagactaaaggacagttccttatcgatcatatttgtaactactactctctactggaaaaggattattttggcatccgatatgtagatcccgaaaagcagagacactggttagaacccaacaagagtatttttaagcagatgaaaacccaccccccctacacaatgtgctttcgggtaaaattttatcctcacgagccccttaagattaaagaggagctcacgagatatctcctgtatctgcagataaaacgcgatattttccatggaagactgctgtgctccttctccgatgctgcttaccttggggcttgcatcgtgcaggccgaactgggagattatgacccggatgaacaccctgagaactatatatccgagtttgagatctttcccaagcagagccaaaagctggaacggaagatcgtagaaatccataaaaatgagttacgcggacagtctcctcctgtggctgagttcaacctgcttctgaaggctcacaccctggaaacatatggcgtggatccccatccttgcaaagatagtacgggcacgacaacctttcttgggtttacagccgccggttttgtcgttttccagggtaacaaaagaatccacttaattaagtggcccgacgtgtgcaaactcaagtttgaaggtaaaactttttacgtgatcgggacccagaaggagaagaaggccatgttagcctttcacacgtccactcccgctgcatgtaaacatttatggaagtgtggcgttgaaaaccaggctttctataagtacgccaaatcatcccagatcaagaccgtaagctcctcaaaaatcttctttaaaggatcccgctttcggtacagtggtaaggtggctaaggaagtggtggaagctagctccaaaatccagcgtgagcctcctgaggttcatcgggcaaacatcacacagagccgctcttcccactctctgaataagcagcttattattaatatggaaccccttcagcccctgctaccatccccgtccgagcaggaggaagaactcccgttaggagagggcgtacccctccccaaggaggaaaacatcagcgcaccactaatttctagcagccccgtgaaagctgcacgcgagtatgaagaccccccaagcgaagaggaagacaagattaaagaagagccactcacaatttccgaattggtctacaatccctctgcatcactattacccactcctgtcgacgatgatgagatcgacatgctcttcgattgcccatcgcgcctggagctggaacgagaggacaccgatagcttcgaagacttggaggctgatgaaaatgcttttctgatcgctgaggaagaggaactgaaggaagcccgaagagcgttaagctggagttatgacatcttgactgggcacatccgggtcaaccccttagtaaaatcattcagtagactcttggttgtgggcctcggactactactgttcgtattcccattgctcctcttactgcttgagtccggcattgacctctcgttcctttgcgaaatacggcaaacccccgaatttgaacaattccactatgagtattactgcccccttaaggagtgggttgccggcaaagtacacctcatcctctacatgctcgggtgttcttag

SEQ ID NO: 251303 - DNA, 1794 bp, Artificial Sequence
  derived and/or modified sequence
atgtttgccagctgccactgtgtgccccggggccgccgcaccatgaagatgatccacttccgcagcagctctgtgaagagcctgagccaggagatgcgctgcaccatccggctgctggatgacagcgagatcagctgccacatccagcgggagaccaagggccagttcctgattgaccacatctgcaactactacagcctgctggagaaggactacttcggcatccgctacgtggaccctgagaagcagaggcactggctggagcccaacaagagcatcttcaagcagatgaagacccaccccccctacaccatgtgcttccgggtgaagttctacccccatgagcccctgaagatcaaggaggagctgacccgctacctgctgtacctgcagatcaagagggacatcttccacggccgcctgctgtgcagcttcagtgatgctgcctacctgggcgcctgcatcgtgcaggccgagctgggggactatgaccctgatgagcaccctgagaactacatcagcgagtttgagatcttccccaagcagagccagaagctggagaggaagatcgtggagatccacaagaatgagctgcggggccagagcccccctgtggccgagttcaacctgctgctgaaggcccacaccctggagacctacggcgtggacccccacccctgcaaggacagcacaggcaccaccaccttcctgggcttcaccgctgctggctttgtggtgttccagggcaacaagaggatccacctgatcaagtggccagatgtgtgcaagctgaagtttgagggcaagaccttctacgtgattggcacccagaaggagaagaaggccatgctggccttccacaccagcaccccagctgcctgcaagcacctgtggaagtgtggggtggagaaccaggccttctacaagtatgccaagagcagccagatcaagacagtgagcagcagcaagatcttcttcaagggcagccgcttccgctacagcggcaaggtggccaaggaggtggtggaggccagcagcaagatccagcgggagcccccagaggtgcaccgggccaacatcacccagagccgcagcagccacagcctgaacaagcagctgatcatcaacatggagcccctgcagcccctgctgcccagccccagcgagcaggaggaggagctgcccctgggggagggcgtgcccctgcccaaggaggagaacatcagcgcccccctcatcagcagcagccctgtgaaggccgcccgggagtatgaagatcctccttctgaggaggaggacaagatcaaggaggagcccctgaccatcagcgagctggtgtacaaccccagcgccagcctgctgcccacccctgtggatgatgatgaaattgacatgctgtttgactgccccagccggctggagctggagcgggaggacacagacagctttgaggacctggaggctgatgaaaatgccttcctgattgctgaggaggaggagctgaaggaggcccggcgggccctgtcctggagctatgacatcctgaccggccacatccgggtgaaccccctggtgaagagcttcagccggctgctggtggtgggcctgggcctgctgctgtttgtgttccccctgctgctgctgctgctggagagcggcatcgacctgtccttcctgtgtgagatccggcagaccccagagtttgagcagttccactatgagtactactgccccctgaaggagtgggtggccggcaaggtgcacctgatcctgtacatgctgggctgcagctag

SEQ ID NO: 251304 - DNA, 1794 bp, Artificial Sequence
  derived and/or modified sequence
atgttcgccagctgccactgcgtgccccggggccggcggaccatgaaaatgattcactttcggagcagcagtgtcaagtctctgtcccaagaaatgagatgtacaatcaggcttctcgacgactccgagatcagttgtcatattcaaagggagaccaaaggtcagttcctgatcgaccacatttgtaattactacagtctgctggaaaaggattactttggcataagatatgtggaccccgagaagcagcgtcattggctagaaccaaacaagagcatctttaaacagatgaagacacatcctccatacaccatgtgtttcagagtcaaattttatccacacgaacctctcaaaatcaaggaagagctcaccagatacctgttatatcttcagatcaagcgagacatctttcacggtcgacttttgtgcagtttcagtgacgcagcataccttggcgcttgtatcgtccaggctgaattaggcgactatgatcctgacgaacaccctgaaaactacatttctgagtttgaaatatttccaaagcagagtcaaaaactggagcgtaaaatagtggaaattcacaaaaacgagctccggggccaatctccaccggtggctgaattcaacctattgctcaaagctcataccttggaaacctacggggtggacccacatccatgtaaagatagcacggggacgaccacattcctcggctttactgccgccggattcgttgtgttccagggcaacaaacgcatccacctgattaaatggcccgacgtctgcaaactcaagttcgagggtaaaacattctatgtgatcggcacccagaaggaaaagaaggcaatgttagccttccatacgagtacgccagccgcctgcaagcacctgtggaaatgcggagtcgagaatcaagcattctataagtacgctaagagctcacaaataaaaacagtgtctagttcaaagattttctttaagggctctagatttaggtatagcggcaaagtagctaaagaggtggtggaggcatcctccaaaatccagcgggagccacccgaggtacatcgagcaaacattactcaatcgaggtccagccactctctgaataaacagctcattattaatatggaaccccttcagccattactgccaagcccaagcgagcaagaagaggaactacctctcggggagggagtacctctgccaaaggaagagaacatatccgcccccctcatcagctccagcccagttaaagccgcgcgtgagtacgaagaccctccatcggaggaagaagataagataaaagaggagccactgaccatatccgagctagtgtacaatcctagtgcttccttgctgccaacgcctgtagacgatgacgagattgacatgttattcgactgccctagtcgcctcgagctggagcgggaagataccgattcatttgaagatttggaagccgatgaaaacgcttttttgatcgctgaagaagaagaactgaaggaggctcgacgggccctctcttggtcgtatgatatactaaccgggcacattcgggtcaatccgctcgtcaagagtttcagtcggttgctggtcgtgggcctcgggctgctattgtttgttttcccacttttgctgctgcttctggagtctggcatagacttatcatttctctgcgagatcagacaaacccccgagtttgaacaatttcactatgagtactactgcccacttaaagaatgggtcgccgggaaagttcatttgatcctgtatatgctcggttgttcttag

SEQ ID NO: 251305 - DNA, 1794 bp, Artificial Sequence
  derived and/or modified sequence
atgtttgcctcatgccactgtgtccccagagggagaaggactatgaaaatgatccacttccggtcttcatctgtgaaatcgctgtcccaggagatgcgatgtactatccgcctgttggatgactcggaaatttcatgtcatattcaacgcgagacaaagggccagtttctgattgatcacatttgcaactactactccctgctcgaaaaagattacttcggtatccgctacgtggaccctgagaaacagcgccattggctggagcctaacaaaagcatctttaaacagatgaaaacccaccccccttatactatgtgttttagagtaaaattctatccacatgaaccactcaaaattaaagaagagttaacacggtatctgctctatctgcagatcaaaagagacatttttcacgggagacttctgtgcagtttttccgacgctgcttacctgggagcctgcatcgttcaggcagaattgggagactatgaccctgatgaacaccctgagaattacatcagtgagttcgagatcttccccaaacagtcccagaagctcgagaggaaaattgtggaaatccataaaaacgagctgcgtggccagagccctccagtagccgagtttaacctccttctcaaggcccacacactggagacctacggtgtcgacccccacccatgtaaggatagtactggtacaacaaccttcctaggcttcacagccgctggttttgtggttttccagggaaacaaacggatccatctgattaagtggcccgacgtgtgcaagctgaaattcgaaggcaaaacattctatgttatcggtacgcagaaggagaaaaaggccatgctggcgtttcacacctccacaccagccgcttgcaagcatctttggaagtgtggcgtggagaatcaggctttttacaaatacgcgaagtcttcacagattaaaactgtgtcaagttctaagatctttttcaaaggttccagatttaggtacagtggcaaagtagcaaaggaggtggtcgaagcttcgtctaagatacagagggagccaccagaggtgcacagggccaatatcacccagtctcgaagctcacatagtcttaacaaacagctgattataaacatggaaccgctccagcctctgctgcccagcccatctgagcaggaagaggaactgccgctgggggaaggggtgcccctgcccaaggaggaaaatattagcgctcctctgatcagcagctcccctgtcaaggccgctagagagtacgaagaccccccaagtgaagaggaggataagattaaggaggaacctcttaccatttccgaactcgtgtacaaccccagcgccagcctactgcccacaccggtggacgatgatgaaatcgacatgctgtttgattgcccctcgaggcttgaattggagagggaggacaccgattccttcgaggacctggaagccgacgagaacgcgttcttgatcgccgaggaggaggagctgaaggaggctcgacgtgccttaagctggtcctatgacattcttactggtcatatacgcgtgaatcctctggtgaagtctttttctcggctgctcgttgtggggctgggcctgctgctttttgttttccccctgctgctactgttgttggaatctggtattgaccttagttttctttgcgaaattaggcaaacacctgagtttgagcagtttcattatgagtactactgccccctgaaggagtgggtggcgggaaaggtgcacctgattctctacatgcttggatgtagttag

SEQ ID NO: 251306 - DNA, 1794 bp, Artificial Sequence
  derived and/or modified sequence
atgttcgccagctgccactgcgtgcccagaggcagaagaaccatgaagatgatccacttcagaagcagcagcgtgaagagcctgagccaggagatgagatgcaccatcagactgctggacgacagcgagatcagctgccacatccagagagagaccaagggccagttcctgatcgaccacatctgcaactactacagcctgctggagaaggactacttcggcatcagatacgtggaccccgagaagcagagacactggctggagcccaacaagagcatcttcaagcagatgaagacccaccccccctacaccatgtgcttcagagtgaagttctacccccacgagcccctgaagatcaaggaggagctgaccagatacctgctgtacctgcagatcaagagagacatcttccacggcagactgctgtgcagcttcagcgacgccgcctacctgggcgcctgcatcgtgcaggccgagctgggcgactacgaccccgacgagcaccccgagaactacatcagcgagttcgagatcttccccaagcagagccagaagctggagagaaagatcgtggagatccacaagaacgagctgagaggccagagcccccccgtggccgagttcaacctgctgctgaaggcccacaccctggagacctacggcgtggacccccacccctgcaaggacagcaccggcaccaccaccttcctgggcttcaccgccgccggcttcgtggtgttccagggcaacaagagaatccacctgatcaagtggcccgacgtgtgcaagctgaagttcgagggcaagaccttctacgtgatcggcacccagaaggagaagaaggccatgctggccttccacaccagcacccccgccgcctgcaagcacctgtggaagtgcggcgtggagaaccaggccttctacaagtacgccaagagcagccagatcaagaccgtgagcagcagcaagatcttcttcaagggcagcagattcagatacagcggcaaggtggccaaggaggtggtggaggccagcagcaagatccagagagagccccccgaggtgcacagagccaacatcacccagagcagaagcagccacagcctgaacaagcagctgatcatcaacatggagcccctgcagcccctgctgcccagccccagcgagcaggaggaggagctgcccctgggcgagggcgtgcccctgcccaaggaggagaacatcagcgcccccctgatcagcagcagccccgtgaaggccgccagagagtacgaggacccccccagcgaggaggaggacaagatcaaggaggagcccctgaccatcagcgagctggtgtacaaccccagcgccagcctgctgcccacccccgtggacgacgacgagatcgacatgctgttcgactgccccagcagactggagctggagagagaggacaccgacagcttcgaggacctggaggccgacgagaacgccttcctgatcgccgaggaggaggagctgaaggaggccagaagagccctgagctggagctacgacatcctgaccggccacatcagagtgaaccccctggtgaagagcttcagcagactgctggtggtgggcctgggcctgctgctgttcgtgttccccctgctgctgctgctgctggagagcggcatcgacctgagcttcctgtgcgagatcagacagacccccgagttcgagcagttccactacgagtactactgccccctgaaggagtgggtggccggcaaggtgcacctgatcctgtacatgctgggctgcagctag

SEQ ID NO: 251307 - protein, 1453 aa, Artificial Sequence
  derived and/or modified sequence
MMLPQNSWHIDFGRCCCHQNLFSAVVTCILLLNSCFLISSFNGTDLELRLVNGDGPCSGTVEVKFQGQWGTVCDDGWNTTASTVVCKQLGCPFSFAMFRFGQAVTRHGKIWLDDVSCYGNESALWECQHREWGSHNCYHGEDVGVNCYGEANLGLRLVDGNNSCSGRVEVKFQERWGTICDDGWNLNTAAVVCRQLGCPSSFISSGVVNSPAVLRPIWLDDILCQGNELALWNCRHRGWGNHDCSHNEDVTLTCYDSSDLELRLVGGTNRCMGRVELKIQGRWGTVCHHKWNNAAADVVCKQLGCGTALHFAGLPHLQSGSDVVWLDGVSCSGNESFLWDCRHSGTVNFDCLHQNDVSVICSDGADLELRLADGSNNCSGRVEVRIHEQWWTICDQNWKNEQALVVCKQLGCPFSVFGSRRAKPSNEARDIWINSISCTGNESALWDCTYDGKAKRTCFRRSDAGVICSDKADLDLRLVGAHSPCYGRLEVKYQGEWGTVCHDRWSTRNAAVVCKQLGCGKPLHVFGMTYFKEASGPIWLDDVSCIGNESNIWDCEHSGWGKHNCVHREDVIVTCSGDATWGLRLVGGSNRCSGRLEVYFQGRWGTVCDDGWNSKAAAVVCSQLDCPSSIIGMGLGNASTGYGKIWLDDVSCDGDESDLWSCRNSGWGNNDCSHSEDVGVICSDASDMELRLVGGSSRCAGKVEVNVQGAVGILCANGWGMNIAEVVCRQLECGSAIRVSREPHFTERTLHILMSNSGCTGGEASLWDCIRWEWKQTACHLNMEASLICSAHRQPRLVGADMPCSGRVEVKHADTWRSVCDSDFSLHAANVLCRELNCGDAISLSVGDHFGKGNGLTWAEKFQCEGSETHLALCPIVQHPEDTCIHSREVGVVCSRYTDVRLVNGKSQCDGQVEINVLGHWGSLCDTHWDPEDARVLCRQLSCGTALSTTGGKYIGERSVRVWGHRFHCLGNESLLDNCQMTVLGAPPCIHGNTVSVICTGSLTQPLFPCLANVSDPYLSAVPEGSALICLEDKRLRLVDGDSRCAGRVEIYHDGFWGTICDDGWDLSDAHVVCQKLGCGVAFNATVSAHFGEGSGPIWLDDLNCTGMESHLWQCPSRGWGQHDCRHKEDAGVICSEFTALRLYSETETESCAGRLEVFYNGTWGSVGRRNITTAIAGIVCRQLGCGENGVVSLAPLSKTGSGFMWVDDIQCPKTHISIWQCLSAPWERRISSPAEETWITCEDRIRVRGGDTECSGRVEIWHAGSWGTVCDDSWDLAEAEVVCQQLGCGSALAALRDASFGQGTGTIWLDDMRCKGNESFLWDCHAKPWGQSDCGHKEDAGVRCSGQSLKSLNASSGHLALILSSIFGLLLLVLFILFLTWCRVQKQKHLPLRVSTRRRGSLEENLFHEMETCLKREDPHGTRTSDDTPNHGCEDASDTSLLGVLPASEATK

SEQ ID NO: 251308 - DNA, 4362 bp, Artificial Sequence
  derived and/or modified sequence
atgatgctccctcaaaactcatggcacattgacttcggacgctgctgttgtcatcaaaatctctttagtgcagtagtgacgtgcattctgctcctgaattcctgcttcctcatctcgtcgttcaacggcacggatctcgaactgagattggtgaatggcgacggaccatgttcaggcacagtcgaggtcaagtttcaagggcaatggggtaccgtgtgtgacgatggttggaatactactgcttctacagtggtgtgcaagcagctcggatgtcccttctcgtttgctatgttccgtttcggccaagcagttactcgccacggcaaaatctggctagacgacgtgagctgctatggaaatgagagcgccctctgggaatgccaacaccgggaatgggggagtcacaactgctaccatggagaggatgtaggggtcaactgctatggagaagctaatctaggcttgcgactcgtggatggaaataattcctgttctgggagggtggaagtgaaattccaggagcggtggggcactatttgtgatgatggctggaacttgaacaccgcggcagttgtctgcagacagctcggctgtcccagcagttttatttcctctggtgtcgttaactcaccggcagtccttcgcccaatatggctggatgacattctctgtcagggcaatgagttggctctgtggaactgccgccaccggggttggggtaaccacgattgctcacacaatgaggacgtgactcttacgtgttacgactccagtgacttggaactgaggctcgtcggaggaacaaaccgctgtatggggagagtggaattgaaaattcaagggaggtggggcaccgtttgccatcataagtggaacaacgctgcagccgatgtggtatgcaagcagctgggctgtggaacagctctgcacttcgccggactcccacatctccagtccggttctgatgttgtctggctggacggtgtatcatgttcaggaaacgaatctttcctctgggattgcaggcactctggcaccgtcaacttcgactgcctgcatcagaacgacgtgagtgttatatgcagcgacggcgcagacttagagcttagattagctgatggctctaataattgcagcggccgagtagaggtaaggattcacgagcagtggtggaccatctgtgatcagaattggaagaacgaacaggccctggtggtttgtaagcagctgggctgcccgttctccgtgttcggaagcaggcgcgctaagcccagtaacgaagctagggatatctggatcaacagcatcagttgcacagggaacgagagcgccttgtgggactgcacctatgacgggaaagctaaaagaacttgctttcgtcggtctgacgccggagtgatttgcagtgataaagcagacctggatctacgcctcgtgggagcccactccccctgttacggcagacttgaagtgaagtaccagggagagtggggcaccgtgtgccacgaccgatggtctacacgcaatgctgcagtggtgtgtaagcagctcggctgcgggaagccactgcacgtctttggcatgacttattttaaggaggctagtggccctatttggctagacgacgtgtcttgtatcgggaatgagagcaacatatgggactgtgagcactccggttggggcaaacacaactgcgtacatcgggaggacgtcatcgtgacctgttctggcgatgcgacctggggcttacggctcgttggtggttccaatcggtgcagtgggagactcgaggtgtattttcaggggagatggggtaccgtgtgtgatgacggctggaatagcaaagccgcagccgttgtttgttcccagctggattgcccaagctcaattatcggaatgggcctcggtaacgctagcacaggctacggcaagatctggctggatgatgtctcctgtgatggagatgagagcgatctgtggtcttgtcgaaactccggctggggcaataatgactgtagccactccgaagacgtcggcgtgatctgttccgacgcttccgacatggaactgcggctcgtgggtgggagcagccgctgcgccggaaaggtcgaggtcaatgttcaaggcgctgttggcatattgtgcgccaacggttggggcatgaacatcgccgaagtggtatgcagacagttggagtgtggctccgcaattagggtctcacgagagccacatttcacggaaagaactttacacatcctgatgtccaactctggctgtaccgggggagaagctagtttatgggactgtatcaggtgggaatggaagcagaccgcttgccatctcaacatggaggctagtctaatttgtagcgctcatcggcagcctagactggtcggcgctgacatgccctgttccggaagagtcgaggtcaagcacgccgatacctggaggagcgtctgcgattctgacttttctctccacgcggctaatgtgttatgtagggagctgaattgcggcgacgctatctccctatcagtgggcgatcactttggcaagggtaacgggctgacttgggctgagaaattccagtgcgaaggatctgaaacacatctcgctctctgtcccatcgtccagcatcctgaggacacctgtatccacagccgcgaggtgggagtggtgtgctctaggtacacagacgtcagacttgtgaatggcaagagtcaatgcgacggccaggtcgaaatcaatgtcctaggacattggggtagcctctgcgatacacactgggatccagaagacgcgagggtcctgtgtagacagctcagctgcgggacagccctctctacgactgggggtaaatatataggggagagatcagtccgcgtttgggggcatagattccactgtcttgggaacgaatctctgctggacaattgccagatgacagtattgggtgctccaccctgcattcacggaaatactgttagcgtgatctgtaccggaagcttgacccagcccctcttcccctgcctcgctaatgtctccgatccctatttaagtgcagtcccagaaggctccgcccttatctgcctggaagataaaaggctaaggctggtggacggagatagtcgctgtgccggacgggtcgaaatctaccatgacggcttttgggggaccatctgtgacgacggttgggatctgtcagacgcccacgtggtgtgtcagaagctgggatgcggtgtggccttcaacgcaaccgtgagcgctcattttggcgaagggagtgggccaatttggttagacgatctgaactgcacaggaatggagagtcatctgtggcagtgccccagcagagggtggggacagcatgactgcagacacaaagaagatgcgggagtgatttgttccgagttcactgcgctgcggctttatagcgagacagaaacggaatcttgcgcagggagattagaggttttttacaatggcacttggggttcagttggaagacgcaacatcactacagctatagccggtattgtgtgcagacagctggggtgcggagagaacggcgtcgtatccctcgccccactctctaagacagggagtggcttcatgtgggtggacgatatccagtgccctaagactcacatctctatctggcagtgtctgtccgcgccttgggagcgaaggataagctcgcccgctgaagagacatggattacctgcgaggacaggatcagggtgaggggcggagacacagagtgctcagggcgtgtagagatctggcacgcaggcagctggggaaccgtttgcgacgactcgtgggatctagcagaggcagaagtggtgtgtcagcagcttgggtgtggatcggccctggccgcattgagagatgcatcattcggccaggggaccggaaccatttggctggacgacatgcgatgcaagggaaacgaaagctttctctgggattgccacgctaagccttggggccagtccgattgcgggcacaaagaagatgctggcgttcgatgtagcggccaatcccttaaaagtctcaatgcctcgtccgggcatctggcactgatcctgtcaagcattttcgggctcctcttgctcgttctgtttatactgtttctcacttggtgtagggtacagaagcaaaagcatcttccattaagggtgagcacccgccgacggggatcacttgaggaaaatctcttccatgagatggaaacttgcttgaagagggaagatccacacgggacccggacctccgacgacaccccgaaccacggttgcgaggatgcttcagacacaagtctgctcggggttttacccgcttctgaggctactaaatag

SEQ ID NO: 251309 - DNA, 4362 bp, Artificial Sequence
  derived and/or modified sequence
atgatgctgccgcagaacagttggcacattgactttggtagatgttgttgtcatcagaatttattttctgctgtggtgacatgcattctgctgctcaatagttgctttctgatctctagctttaatggcaccgacctggagctgcgacttgtgaacggcgatggaccctgcagcggtactgtcgaagtgaaatttcaaggtcagtggggtacagtctgtgacgatggctggaacaccactgctagcactgttgtctgtaaacagctaggatgccccttttctttcgcaatgtttaggttcggccaggctgtcacccgccacgggaagatatggcttgacgacgtgtcttgttacggaaatgaatcagccctgtgggagtgccagcacagggaatggggatcccacaattgctaccacggagaggatgtcggtgtaaattgctatggagaagctaacctcggcctcaggctcgtggatgggaataactcgtgttccggaagagtggaggtaaagttccaggagcggtggggaaccatttgcgatgacggctggaatctgaataccgctgctgtggtgtgccgtcagttggggtgtccctcttcatttatttcatccggcgtcgttaatagtcctgccgtcctccggcctatctggcttgacgacatattatgccagggcaacgaactggctctttggaattgtcgacacagggggtggggcaaccacgactgctcacataatgaagatgtcacacttacttgttatgatagctcagaccttgaattgcgactggtcggcggcacaaacagatgcatgggacgagtggagctgaagattcagggacgctgggggacagtttgccaccacaagtggaacaacgctgctgccgatgtggtctgcaaacagctgggatgtggtacagcactgcactttgccggtttaccacacctacagagcggttcagatgtcgtctggctcgacggggttagttgctctggtaatgaatcctttctatgggactgccgtcatagcggcactgtgaactttgattgtctccatcagaacgacgtctctgtgatctgcagcgatggagccgatttggaattgaggctcgcagacgggtctaacaactgttctggtcgagtagaagtgagaattcatgaacagtggtggacaatttgcgaccaaaactggaaaaacgagcaagctttggtagtgtgcaaacagctcggctgtccattttccgtgtttgggtcccgcagggccaaaccatctaacgaggcacgcgacatctggataaactccatctcctgtacagggaatgaaagtgctctctgggactgtacgtacgatggcaaggcaaaacggacctgttttaggcgctctgatgccggcgtgatttgcagcgataaggcggatctggatcttaggctcgtcggcgcccactccccttgttatggacgactggaggtaaaatatcaaggcgagtggggcactgtttgccacgaccggtggagcactagaaacgccgccgtcgtgtgcaaacagttgggatgtgggaagcccctccacgtgttcggaatgacatatttcaaggaagcgtccgggccaatctggcttgatgatgtgagctgtatagggaacgaaagcaatatctgggactgcgaacattccggttgggggaaacacaattgtgtgcaccgcgaggacgttattgtgacgtgttcgggcgacgcaacatggggcctgcggcttgtgggaggatcgaataggtgcagcggtaggctggaagtttattttcagggaaggtgggggaccgtgtgcgacgatggctggaacagtaaagctgccgctgtggtgtgctcccaacttgactgcccttcctctatcattggcatgggccttggcaatgcaagtacaggctatgggaagatctggttggatgacgtctcctgtgatggcgatgagtcagatttgtggtcatgtcgcaatagtggttggggaaacaatgactgttctcacagtgaggacgtgggcgtgatatgctctgatgcatctgatatggagctgagactggttggaggaagctcacggtgcgccggtaaagtcgaggtcaacgtgcaaggcgctgtgggaattctgtgtgcaaatggatgggggatgaatattgcggaggtcgtgtgccggcagttggagtgtgggtctgccattcgagtaagcagggagccacacttcaccgagcgcacactccacattctgatgtccaattcgggctgcactggcggcgaggcctctctttgggactgcatcagatgggagtggaagcaaacagcctgtcatcttaacatggaagcatctctcatctgttctgcacacagacagcctagactcgtgggggctgacatgccttgcagcgggcgcgtggaggtcaaacatgccgacacttggagatccgtatgtgattctgatttcagcttacacgccgcaaatgttctgtgcagagaacttaactgtggcgatgcaatctctctgtcagtcggagaccatttcgggaagggtaacggcctcacttgggctgagaagtttcagtgcgagggatcagagacccatctggccttgtgccccattgtgcagcatcctgaagatacttgtattcactcacgcgaagtgggggtggtctgttcgcgctacaccgacgtgaggctggttaacggcaagtcacagtgtgacgggcaggtagagatcaatgtcctggggcactggggatcactctgcgacactcactgggatcccgaggacgcccgcgtactctgtagacagctttcatgcggaactgcactttcgaccaccgggggtaagtacattggcgagcgtagcgttagggtctggggccaccggttccactgccttgggaacgaatcactgctcgacaactgtcagatgactgtgctgggtgcccccccatgcatccatggtaacaccgtgtccgtgatttgtactggaagtctcacccagcccttattcccctgcctcgcaaatgtcagcgatccttacctgtccgctgtgccagaggggtccgcactgatatgcctcgaggataaaaggctgcggctggtcgatggggatagtagatgcgccggacgagtcgagatctatcacgacggcttttggggcactatatgtgacgacggctgggatctgagcgacgcacatgtggtctgccaaaaacttggctgtggtgtcgcctttaatgccacagtttcggctcacttcggcgagggaagcggcccaatctggctggatgacctgaattgtaccggtatggaatctcacttatggcagtgcccttctcgggggtggggacaacacgattgcaggcacaaagaggatgccggggttatctgctcagaattcaccgcactgaggctatattctgaaaccgagaccgagagctgcgccggccggctggaggtgttttataatgggacttgggggtctgtgggccgaagaaatatcaccaccgccatagctgggatcgtatgccgtcagttaggatgtggggaaaacggggtggtgagcctcgcacccttaagtaagacaggatctgggttcatgtgggtggatgatatccagtgtcctaagacccatatttcaatatggcagtgtttaagcgcaccatgggagcggagaatcagtagccctgcagaagagacctggatcacatgcgaagatagaattagggtgcgtggaggggatacagagtgctccggaagagtcgagatatggcacgctggatcctggggaaccgtttgcgacgactcatgggatctggccgaggccgaagtggtgtgtcaacaactgggatgcggcagcgctctcgccgcgctgcgtgatgcgtcctttgggcaaggaacgggaacgatttggctggacgacatgcggtgcaagggtaacgagagttttctctgggactgtcacgccaagccttgggggcagtcagattgcggccataaggaggacgcgggggtcagatgcagtggccagtctttgaaatcactgaacgccagcagcggccatttagctctgatcctgagtagcatcttcggcttgttactgctcgtgctgttcattctgtttctgacatggtgccgtgttcagaaacagaagcacctgccacttagagtgagtactagacgccgggggagtctagaagagaatttgttccacgagatggaaacctgccttaagcgcgaagacccccacggaacgcgtacttccgacgacaccccaaaccatgggtgcgaggatgcatccgacacttcgctcctgggtgtgctgccagcgtccgaagccacaaaatag

SEQ ID NO: 251310 - DNA, 4362 bp, Artificial Sequence
  derived and/or modified sequence
atgatgcttccccagaactcctggcacatcgactttgggagatgttgttgccatcaaaatttatttagtgcagtggtcacttgtatattgcttctgaactcatgctttcttatcagtagctttaacggaactgacctcgagttgagactggtgaacggggatgggccttgttccggcaccgttgaggtgaaattccaggggcagtggggcaccgtgtgtgatgatggttggaacaccacagcatctactgtagtgtgcaagcagctaggatgtcctttctctttcgcgatgtttcgatttggccaggccgttactcggcacggtaagatctggctcgacgatgtgagttgctatgggaacgaatccgccctgtgggagtgtcagcaccgcgagtggggtagtcacaactgttaccacggagaagacgttggcgtgaattgttatggagaggcgaacttgggacttaggctggttgatggcaataatagctgcagcgggagagtagaggtaaagtttcaggagcggtggggcacgatttgcgatgacggttggaatttaaacaccgcagcggtagtgtgcaggcagcttgggtgcccttcctcctttatctccagcggggtggtaaatagccctgctgtccttagaccgatatggttagacgacattctgtgtcagggaaatgagctggcattatggaactgcagacacagaggttggggcaatcacgattgctctcataatgaagatgttacattgacatgctatgattcatccgatctagagctcagacttgtggggggcaccaacagatgcatgggacgagtggaactcaaaatccaagggagatggggaacggtgtgccatcataagtggaacaatgccgcagcggacgtggtttgtaagcagctgggatgtggtactgcgctgcatttcgccgggctaccccaccttcagagcggcagcgatgtggtttggttggacggtgtgtcttgttccggtaatgaatccttcctgtgggattgccgccattccggcaccgtcaatttcgattgtctccatcaaaacgacgtgtcagtcatctgctccgacggcgccgacctagagctcagactagcagatggttcaaataattgttccggtcgagttgaggtacggatccacgagcagtggtggactatttgtgatcagaactggaaaaatgagcaggctttagtggtatgcaagcagttgggatgtccattcagtgtgtttggaagtagaagagctaagccctccaacgaagcaagggatatttggatcaatagtatcagctgtaccggtaatgaaagcgcgctctgggactgtacctacgacggcaaagcaaagcggacctgtttccgcagatcagacgccggagtgatatgtagcgacaaagccgacctggatctcaggctggtaggcgcgcattcaccttgttatgggcggcttgaggtgaaatatcagggcgagtggggcactgtgtgccatgataggtggtccacaagaaatgccgcggtggtttgcaagcagctcggatgtggaaagcctctgcatgtgtttggcatgacctatttcaaagaagcctctggcccaatctggcttgatgacgtgtcttgtatcggaaatgaaagcaatatctgggactgcgaacatagcggctggggaaaacataattgtgtgcaccgcgaagacgtgatagtaacatgctcaggcgatgcaacctggggactcagactggtggggggcagtaaccgttgcagcgggagactcgaagtgtacttccagggtcgatggggaactgtctgtgatgacggctggaacagtaaagcagccgccgtagtatgcagccagcttgactgcccgagcagcatcattggaatgggattgggcaacgcctctacagggtatgggaaaatttggctggatgacgtgtcttgtgatggtgacgagtcagatctgtggtcctgcaggaacagcggatgggggaacaacgattgctcacactcggaggatgtgggcgtgatatgcagtgatgccagtgatatggagctgcgacttgtgggtggaagtagccgatgcgctgggaaggtcgaagtgaatgtgcagggtgcggttggtatattatgcgcgaatggctgggggatgaatatcgctgaggtagtgtgtaggcaattggaatgtggctccgccataagggtctctcgcgaaccacacttcaccgagagaacactacatattctaatgagcaatagcggctgtaccgggggagaggcatcgctctgggattgtattagatgggaatggaaacagactgcttgtcacctgaatatggaggcatccctgatttgctctgcacaccggcaacctcggctggtcggcgccgacatgccttgtagtggtagagttgaggtgaagcatgcagatacctggcgctcagtctgcgattctgacttctcattacacgctgccaacgttctgtgcagagagcttaactgtggcgatgcaatctcccttagcgtgggtgaccattttggaaaaggtaacggtctgacctgggctgagaaatttcagtgcgaaggttcagagacacacctcgccctgtgcccaatcgtccagcatccagaggacacatgtattcatagtcgagaggttggagtggtttgcagtaggtacactgatgtgaggctagtaaatggtaaatcccaatgcgatggacaagtagagatcaacgtactgggacactggggaagcctgtgtgacacccattgggatcccgaggatgcacgggttttgtgcagacaactgagctgtgggacagcgctgtcgaccacgggaggtaaatacattggtgaacgatctgtgcgggtttggggacaccggttccactgcttgggtaacgagtctttgctagataactgccagatgacggttcttggagcgcctccatgtatccacggcaacactgtttctgtgatttgtacgggcagcctaacacagcctctctttccctgtctggcaaacgtatcagacccttatctctcggcagtccctgaaggctcagcgttgatttgtcttgaggataaaagactccgcctcgtcgatggcgatagtcggtgtgccggccgggttgaaatttatcatgatgggttctgggggacaatctgtgatgacggctgggatctgtccgatgcccatgtagtatgccagaagctgggttgtggagtcgcatttaatgccacagtcagtgcccactttggagaagggagcggccctatttggttagatgatttgaattgtacgggaatggaaagtcatctgtggcagtgtcctagtagaggctggggacagcatgattgccgacataaggaggatgcaggcgttatttgtagcgagttcacagccttacggctgtacagcgagactgagaccgaatcatgtgctgggcgtttagaagtcttttacaatggcacatgggggtccgtgggaagacggaatattacaactgccatagccgggatcgtgtgtagacaattagggtgcggagagaatggagtggtctctctggcaccgctgtccaagaccgggtccggcttcatgtgggtcgatgacattcagtgcccaaaaacacacatttcaatatggcagtgtctctcagcgccgtgggaacgccgcatttcatctcctgccgaagagacgtggattacttgtgaagacagaattagagtgcgggggggggatacagagtgctcaggcagggtcgagatctggcacgctggctcatgggggactgtctgtgacgattcatgggatctggctgaggctgaggtggtgtgccaacagctaggatgtggctccgccctagccgcccttagggacgcctctttcggtcagggaactggtactatctggctcgatgatatgcgctgtaagggtaacgagtcatttttatgggattgccacgccaaaccctggggccagtctgattgtggacataaggaagatgcaggcgtgcgatgcagcgggcaatcgttaaagtctttaaatgcaagcagcggacatctggctcttattttgtctagcatttttggactgctgctgctggtcctctttattctcttcctgacatggtgtagagtgcagaagcagaagcacctgcccctacgggtgagcacacgaagacggggctccttagaggagaaccttttccacgagatggagacctgcttgaagagagaagacccccacggaactaggacatcggacgatacgcccaatcatggctgtgaagacgcttctgacacgtcactgctgggagtgctgcctgcaagtgaagcgacaaagtag

SEQ ID NO: 251311 - DNA, 4362 bp, Artificial Sequence
  derived and/or modified sequence
atgatgctgccccagaacagctggcacatcgacttcggcagatgctgctgccaccagaacctgttcagcgccgtggtgacctgcatcctgctgctgaacagctgcttcctgatcagcagcttcaacggcaccgacctggagctgagactggtgaacggcgacggcccctgcagcggcaccgtggaggtgaagttccagggccagtggggcaccgtgtgcgacgacggctggaacaccaccgccagcaccgtggtgtgcaagcagctgggctgccccttcagcttcgccatgttcagattcggccaggccgtgaccagacacggcaagatctggctggacgacgtgagctgctacggcaacgagagcgccctgtgggagtgccagcacagagagtggggcagccacaactgctaccacggcgaggacgtgggcgtgaactgctacggcgaggccaacctgggcctgagactggtggacggcaacaacagctgcagcggcagagtggaggtgaagttccaggagagatggggcaccatctgcgacgacggctggaacctgaacaccgccgccgtggtgtgcagacagctgggctgccccagcagcttcatcagcagcggcgtggtgaacagccccgccgtgctgagacccatctggctggacgacatcctgtgccagggcaacgagctggccctgtggaactgcagacacagaggctggggcaaccacgactgcagccacaacgaggacgtgaccctgacctgctacgacagcagcgacctggagctgagactggtgggcggcaccaacagatgcatgggcagagtggagctgaagatccagggcagatggggcaccgtgtgccaccacaagtggaacaacgccgccgccgacgtggtgtgcaagcagctgggctgcggcaccgccctgcacttcgccggcctgccccacctgcagagcggcagcgacgtggtgtggctggacggcgtgagctgcagcggcaacgagagcttcctgtgggactgcagacacagcggcaccgtgaacttcgactgcctgcaccagaacgacgtgagcgtgatctgcagcgacggcgccgacctggagctgagactggccgacggcagcaacaactgcagcggcagagtggaggtgagaatccacgagcagtggtggaccatctgcgaccagaactggaagaacgagcaggccctggtggtgtgcaagcagctgggctgccccttcagcgtgttcggcagcagaagagccaagcccagcaacgaggccagagacatctggatcaacagcatcagctgcaccggcaacgagagcgccctgtgggactgcacctacgacggcaaggccaagagaacctgcttcagaagaagcgacgccggcgtgatctgcagcgacaaggccgacctggacctgagactggtgggcgcccacagcccctgctacggcagactggaggtgaagtaccagggcgagtggggcaccgtgtgccacgacagatggagcaccagaaacgccgccgtggtgtgcaagcagctgggctgcggcaagcccctgcacgtgttcggcatgacctacttcaaggaggccagcggccccatctggctggacgacgtgagctgcatcggcaacgagagcaacatctgggactgcgagcacagcggctggggcaagcacaactgcgtgcacagagaggacgtgatcgtgacctgcagcggcgacgccacctggggcctgagactggtgggcggcagcaacagatgcagcggcagactggaggtgtacttccagggcagatggggcaccgtgtgcgacgacggctggaacagcaaggccgccgccgtggtgtgcagccagctggactgccccagcagcatcatcggcatgggcctgggcaacgccagcaccggctacggcaagatctggctggacgacgtgagctgcgacggcgacgagagcgacctgtggagctgcagaaacagcggctggggcaacaacgactgcagccacagcgaggacgtgggcgtgatctgcagcgacgccagcgacatggagctgagactggtgggcggcagcagcagatgcgccggcaaggtggaggtgaacgtgcagggcgccgtgggcatcctgtgcgccaacggctggggcatgaacatcgccgaggtggtgtgcagacagctggagtgcggcagcgccatcagagtgagcagagagccccacttcaccgagagaaccctgcacatcctgatgagcaacagcggctgcaccggcggcgaggccagcctgtgggactgcatcagatgggagtggaagcagaccgcctgccacctgaacatggaggccagcctgatctgcagcgcccacagacagcccagactggtgggcgccgacatgccctgcagcggcagagtggaggtgaagcacgccgacacctggagaagcgtgtgcgacagcgacttcagcctgcacgccgccaacgtgctgtgcagagagctgaactgcggcgacgccatcagcctgagcgtgggcgaccacttcggcaagggcaacggcctgacctgggccgagaagttccagtgcgagggcagcgagacccacctggccctgtgccccatcgtgcagcaccccgaggacacctgcatccacagcagagaggtgggcgtggtgtgcagcagatacaccgacgtgagactggtgaacggcaagagccagtgcgacggccaggtggagatcaacgtgctgggccactggggcagcctgtgcgacacccactgggaccccgaggacgccagagtgctgtgcagacagctgagctgcggcaccgccctgagcaccaccggcggcaagtacatcggcgagagaagcgtgagagtgtggggccacagattccactgcctgggcaacgagagcctgctggacaactgccagatgaccgtgctgggcgcccccccctgcatccacggcaacaccgtgagcgtgatctgcaccggcagcctgacccagcccctgttcccctgcctggccaacgtgagcgacccctacctgagcgccgtgcccgagggcagcgccctgatctgcctggaggacaagagactgagactggtggacggcgacagcagatgcgccggcagagtggagatctaccacgacggcttctggggcaccatctgcgacgacggctgggacctgagcgacgcccacgtggtgtgccagaagctgggctgcggcgtggccttcaacgccaccgtgagcgcccacttcggcgagggcagcggccccatctggctggacgacctgaactgcaccggcatggagagccacctgtggcagtgccccagcagaggctggggccagcacgactgcagacacaaggaggacgccggcgtgatctgcagcgagttcaccgccctgagactgtacagcgagaccgagaccgagagctgcgccggcagactggaggtgttctacaacggcacctggggcagcgtgggcagaagaaacatcaccaccgccatcgccggcatcgtgtgcagacagctgggctgcggcgagaacggcgtggtgagcctggcccccctgagcaagaccggcagcggcttcatgtgggtggacgacatccagtgccccaagacccacatcagcatctggcagtgcctgagcgccccctgggagagaagaatcagcagccccgccgaggagacctggatcacctgcgaggacagaatcagagtgagaggcggcgacaccgagtgcagcggcagagtggagatctggcacgccggcagctggggcaccgtgtgcgacgacagctgggacctggccgaggccgaggtggtgtgccagcagctgggctgcggcagcgccctggccgccctgagagacgccagcttcggccagggcaccggcaccatctggctggacgacatgagatgcaagggcaacgagagcttcctgtgggactgccacgccaagccctggggccagagcgactgcggccacaaggaggacgccggcgtgagatgcagcggccagagcctgaagagcctgaacgccagcagcggccacctggccctgatcctgagcagcatcttcggcctgctgctgctggtgctgttcatcctgttcctgacctggtgcagagtgcagaagcagaagcacctgcccctgagagtgagcaccagaagaagaggcagcctggaggagaacctgttccacgagatggagacctgcctgaagagagaggacccccacggcaccagaaccagcgacgacacccccaaccacggctgcgaggacgccagcgacaccagcctgctgggcgtgctgcccgccagcgaggccaccaagtag

SEQ ID NO: 251312 - DNA, 4615 bp, Artificial Sequence
  derived and/or modified sequence
gattatatataagaggacccaggagttacatcaggactcaggaagagatagacccataatgatgctgcctcaaaactcgtggcatattgattttggaagatgctgctgtcatcagaaccttttctctgctgtggtaacttgcatcctgctcctgaattcctgctttctcatcagcagttttaatggaacagatttggagttgaggctggtcaatggagacggtccctgctctgggacagtggaggtgaaattccagggacagtgggggactgtgtgtgatgatgggtggaacactactgcctcaactgtcgtgtgcaaacagcttggatgtccattttctttcgccatgtttcgttttggacaagccgtgactagacatggaaaaatttggcttgatgatgtttcctgttatggaaatgagtcagctctctgggaatgtcaacaccgggaatggggaagccataactgttatcatggagaagatgttggtgtgaactgttatggtgaagccaatctgggtttgaggctagtggatggaaacaactcctgttcagggagagtggaggtgaaattccaagaaaggtggggaactatatgtgatgatgggtggaacttgaatactgctgccgtggtgtgcaggcaactaggatgtccatcttcttttatttcttctggagttgttaatagccctgctgtattgcgccccatttggctggatgacattttatgccaggggaatgagttggcactctggaattgcagacatcgtggatggggaaatcatgactgcagtcacaatgaggatgtcacattaacttgttatgatagtagtgatcttgaactaaggcttgtaggtggaactaaccgctgtatggggagagtagagctgaaaatccaaggaaggtgggggaccgtatgccaccataagtggaacaatgctgcagctgatgtcgtatgcaagcagttgggatgtggaaccgcacttcacttcgctggcttgcctcatttgcagtcagggtctgatgttgtatggcttgatggtgtctcctgctccggtaatgaatcttttctttgggactgcagacattccggaaccgtcaattttgactgtcttcatcaaaacgatgtgtctgtgatctgctcagatggagcagatttggaactgcgactagcagatggaagtaacaattgttcagggagagtagaggtgagaattcatgaacagtggtggacaatatgtgaccagaactggaagaatgaacaagcccttgtggtttgtaagcagctaggatgtccgttcagcgtctttggcagtcgtcgtgctaaacctagtaatgaagctagagacatttggataaacagcatatcttgcactgggaatgagtcagctctctgggactgcacatatgatggaaaagcaaagcgaacatgcttccgaagatcagatgctggagtaatttgttctgataaggcagatctggacctaaggcttgtcggggctcatagcccctgttatgggagattggaggtgaaataccaaggagagtgggggactgtgtgtcatgacagatggagcacaaggaatgcagctgttgtttgtaaacaattgggatgtggaaagcctttgcatgtgtttggtatgacctattttaaagaagcatcaggacctatttggctggatgacgtttcttgcattggaaatgagtcaaatatctgggactgtgaacacagtggatggggaaagcataattgtgtacacagagaggatgtgattgtaacctgctcaggtgatgcaacatggggcctgaggctggtgggcggcagcaaccgctgctcgggaagactggaggtgtactttcaaggacggtggggcacagtgtgtgatgacggctggaacagtaaagctgcagctgtggtgtgtagccagctggactgcccatcttctatcattggcatgggtctgggaaacgcttctacaggatatggaaaaatttggctcgatgatgtttcctgtgatggagatgagtcagatctctggtcatgcaggaacagtgggtggggaaataatgactgcagtcacagtgaagatgttggagtgatctgttctgatgcatcggatatggagctgaggcttgtgggtggaagcagcaggtgtgctggaaaagttgaggtgaatgtccagggtgccgtgggaattctgtgtgctaatggctggggaatgaacattgctgaagttgtttgcaggcaacttgaatgtgggtctgcaatcagggtctccagagagcctcatttcacagaaagaacattacacatcttaatgtcgaattctggctgcactggaggggaagcctctctctgggattgtatacgatgggagtggaaacagactgcgtgtcatttaaatatggaagcaagtttgatctgctcagcccacaggcagcccaggctggttggagctgatatgccctgctctggacgtgttgaagtgaaacatgcagacacatggcgctctgtctgtgattctgatttctctcttcatgctgccaatgtgctgtgcagagaattaaactgtggagatgccatatctctttctgtgggagatcactttggaaaagggaatggtctaacttgggccgaaaagttccagtgtgaagggagtgaaactcaccttgcattatgccccattgttcaacatccggaagacacttgtatccacagcagagaagttggagttgtctgttcccgatatacagatgtccgacttgtgaatggcaaatcccagtgtgacgggcaagtggagatcaacgtgcttggacactggggctcactgtgtgacacccactgggacccagaagatgcccgtgttctatgcagacagctcagctgtgggactgctctctcaaccacaggaggaaaatatattggagaaagaagtgttcgtgtgtggggacacaggtttcattgcttagggaatgagtcacttctggataactgtcaaatgacagttcttggagcacctccctgtatccatggaaatactgtctctgtgatctgcacaggaagcctgacccagccactgtttccatgcctcgcaaatgtatctgacccatatttgtctgcagttccagagggcagtgctttgatctgcttagaggacaaacggctccgcctagtggatggggacagccgctgtgccgggagagtagagatctatcacgacggcttctggggcaccatctgtgatgacggctgggacctgagcgatgcccacgtggtgtgtcaaaagctgggctgtggagtggccttcaatgccacggtctctgctcactttggggaggggtcagggcccatctggctggatgacctgaactgcacaggaatggagtcccacttgtggcagtgcccttcccgcggctgggggcagcacgactgcaggcacaaggaggacgcaggggtcatctgctcagaattcacagccttgaggctctacagtgaaactgaaacagagagctgtgctgggagattggaagtcttctataacgggacctggggcagcgtcggcaggaggaacatcaccacagccatagcaggcattgtgtgcaggcagctgggctgtggggagaatggagttgtcagcctcgcccctttatctaagacaggctctggtttcatgtgggtggatgacattcagtgtcctaaaacgcatatctccatatggcagtgcctgtctgccccatgggagcgaagaatctccagcccagcagaagagacctggatcacatgtgaagatagaataagagtgcgtggaggagacaccgagtgctctgggagagtggagatctggcacgcaggctcctggggcacagtgtgtgatgactcctgggacctggccgaggcggaagtggtgtgtcagcagctgggctgtggctctgctctggctgccctgagggacgcttcgtttggccagggaactggaaccatctggttggatgacatgcggtgcaaaggaaatgagtcatttctatgggactgtcacgccaaaccctggggacagagtgactgtggacacaaggaagatgctggcgtgaggtgctctggacagtcgctgaaatcactgaatgcctcctcaggtcatttagcacttattttatccagtatctttgggctccttctcctggttctgtttattctatttctcacgtggtgccgagttcagaaacaaaaacatctgcccctcagagtttcaaccagaaggaggggttctctcgaggagaatttattccatgagatggagacctgcctcaagagagaggacccacatgggacaagaacctcagatgacacccccaaccatggttgtgaagatgctagcgacacatcgctgttgggagttcttcctgcctctgaagccacaaaatgactttagacttccagggctcaccagatcaacctctaaatatctttgaaggagacaacaacttttaaatgaataaagaggaagtcaagttgccctatggaaaacttgtccaaataacatttcttgaacaataggagaacagctaaattgataaagactggtgataataaaaattgaattatgtatatcactgttaaa

SEQ ID NO: 251313 - DNA, 4362 bp, Artificial Sequence
  derived and/or modified sequence
atgatgcttccgcagaattcctggcacatcgacttcggccgttgctgttgccatcaaaacctgtttagcgcggtggtgacttgcattctgcttctaaattcctgttttctcatctcctcattcaacggtactgacttggaactcagactggtgaatggggatggcccctgctcaggaaccgtagaggttaagttccagggccaatggggtaccgtttgtgacgatggctggaataccaccgcaagcaccgtggtatgtaagcagctcggttgcccattcagctttgccatgttccgctttggccaggccgtcacgaggcacggcaaaatctggctggatgatgtgtcttgctacggaaatgagtctgccctgtgggagtgccagcatagggaatggggttcacataactgttaccacggagaagacgttggggtgaactgttatggcgaggctaatctcggactgcgcctcgtggatggaaataatagctgttctggacgggttgaggttaaattccaggagaggtggggcaccatctgtgacgatggctggaatcttaacaccgcagccgtggtctgcagacagctcggttgccctagtagcttcatcagttccggcgtcgtcaatagcccagctgtcctgaggccaatttggttagatgacatcttgtgccagggaaatgaactcgccctgtggaattgtcggcaccgggggtggggaaaccacgattgttctcataacgaggatgtcactcttacttgctacgattccagcgacctggagctaaggctggttggggggaccaaccgctgtatgggcagagtggagctcaaaattcaggggcggtggggaacagtgtgccatcacaagtggaataacgcagccgccgatgtggtgtgcaagcaattgggttgcggaactgcgctgcattttgcagggctcccacacctgcagtctggctccgatgtggtgtggctcgatggtgtgtcttgctcaggaaatgagtctttcctttgggattgtcgccactctggcacggtcaactttgactgtttgcaccaaaacgacgtctcagttatctgtagcgacggtgctgatctcgaattaaggttagctgacggtagcaacaactgctccggacgggttgaggtcagaatccatgaacaatggtggacaatttgtgatcagaattggaaaaacgaacaagccttggttgtgtgtaaacaactcggatgtccgttcagtgtctttggctctcgccgggccaagccaagtaacgaagctagagacatatggatcaacagtatttcttgcaccggtaatgagtctgctctgtgggattgtacctacgacgggaaggccaaaagaacctgtttcagaagatctgacgccggggttatatgttctgataaagcggacctggaccttcgacttgtgggcgcccactccccttgctacggccgcctggaagtcaagtatcagggagaatggggcactgtctgtcacgaccgctggagcaccaggaacgccgcagtggtgtgcaagcagctgggctgcggtaagcccctacacgtgtttggaatgacctacttcaaagaggccagcggtcctatctggctggatgacgtctcttgtataggaaatgagagcaatatctgggactgtgagcacagtgggtggggtaagcacaattgcgtccatagagaagacgtcattgtgacatgttctggagacgcgacctgggggttgagattagtgggcggctcaaaccgctgtagcggcaggcttgaagtctactttcagggccgatggggaacagtctgtgacgatggctggaacagcaaagccgcagccgtggtgtgctctcaactggattgtccaagtagcattataggcatgggactcggaaacgcttcaaccggatacgggaaaatctggttggacgatgttagttgcgatggtgatgaatctgacctgtggtcatgcaggaattctggctggggcaacaacgactgctcccatagtgaggatgtgggagtaatttgcagcgacgcctccgatatggagcttaggctcgtcgggggttccagtcgttgtgccgggaaagttgaagtgaatgtgcagggagccgtgggcattctctgtgccaacggatgggggatgaacatagccgaagtcgtgtgccgccagcttgagtgcgggtctgcgataagagtcagccgcgagccacatttcaccgagaggacgttgcacatcctcatgagtaactccgggtgtaccggcggcgaagccagtctctgggactgtatacgatgggagtggaagcagacagcttgtcatctgaacatggaagccagccttatatgtagtgcgcatcggcagccgcgtcttgtcggggctgatatgccgtgttccggacgcgtcgaggtgaagcacgctgatacttggcggagcgtgtgcgacagcgacttttccctacatgccgccaacgtgctctgcagggagttaaactgtggagatgccatctcactgagcgtcggcgaccactttggcaagggcaacggcttgacgtgggctgagaagttccaatgtgagggctctgagactcacctggctctgtgccctatcgtacagcaccctgaagacacgtgtatccactcacgtgaagtgggcgtagtttgcagccgctacacagacgttcgattggtgaatgggaagtcccaatgcgacgggcaggtcgagataaacgtactcggacattggggttccctctgcgacactcactgggatcctgaggacgcccgtgtgttgtgtcgccagctctcctgcgggactgccctgagtacaacggggggcaagtacatcggggagcgcagtgtaagggtgtggggacacagattccactgccttggaaacgagtcgctcctcgataattgtcagatgactgtgcttggagctccaccttgtatacacggcaacacagtttctgttatctgtaccggcagcttgacacagccgctttttccctgcctggctaacgtgagcgatccgtacctgagcgccgtacctgaaggcagtgctctaatctgcctggaagacaagcgactgagactcgtggacggcgatagtaggtgtgctggccgggtggaaatctaccatgacggcttttgggggacgatttgtgatgatggttgggacctgagcgacgcccacgtcgtctgtcagaagttaggatgcggagtggcctttaacgctacagtcagcgcacacttcggagaaggctccggacccatttggctggacgatcttaattgtacgggaatggagtctcatctgtggcagtgtccctctagaggatggggacagcatgattgtaggcacaaagaggatgctggggtgatttgttctgagtttaccgctcttcgcctgtactcagaaacggaaaccgagagttgcgccggccgattagaggtcttctataacgggacctgggggagtgtgggaagacgcaatattacgacagctattgccggtatagtttgtaggcagctcggctgtggggagaatggggtagttagccttgcccccctcagcaagactggaagtggcttcatgtgggttgacgatatccagtgccctaaaacccatatcagcatctggcagtgtctgtcagccccctgggagcggagaatctccagtcctgcggaagagacctggatcacatgcgaggataggatcagagtgaggggtggtgataccgagtgttctggcagagtggaaatctggcatgcaggaagctgggggaccgtgtgcgacgatagctgggacctggctgaagctgaggttgtctgccagcagcttggctgtggtagtgcccttgcagcactgagggatgcatccttcggccaaggaactgggaccatctggttggacgatatgcggtgtaagggaaatgaatcttttctgtgggactgccacgccaagccatggggccaaagcgattgcggacataaggaggatgccggcgttcggtgtagtgggcagagtcttaagtctcttaacgcctcatctgggcacctggccttgatcttgagctccattttcggcctcctcctgctcgtgctgttcatcctctttctgacctggtgcagagtgcagaagcagaagcatctacccttgcgggtctccacccgcaggagaggcagtttggaagaaaacttgttccatgagatggagacctgcctgaagcgggaggacccacatgggacccgcaccagtgacgataccccaaaccatgggtgtgaggacgccagtgatactagcctgcttggagtactgcccgcgagtgaggccactaagtag

SEQ ID NO: 251314 - DNA, 4362 bp, Artificial Sequence
  derived and/or modified sequence
atgatgctgccccagaacagctggcacatcgactttggccgctgctgctgccaccagaacctcttctctgctgtggtgacctgcatcctgctgctgaacagctgcttcctgatcagcagcttcaacggcacagacctggagctgcggctggtgaatggagatggcccctgcagcggcaccgtggaggtgaagttccagggccagtggggcaccgtgtgtgatgatggctggaacaccacagccagcacagtggtgtgcaagcagctgggctgccccttctcctttgccatgttccgcttcggccaggccgtgaccaggcatggcaagatctggctggatgatgtgtcctgctatggaaatgaaagtgccctgtgggagtgccagcaccgggagtggggcagccacaactgctaccatggagaagatgtgggcgtgaactgctacggggaggccaacctgggcctgcggctggtggatggcaacaacagctgcagcggccgggtggaggtgaagttccaggagcgctggggcaccatctgtgatgatggctggaacctgaacacagctgctgtggtgtgccggcagctgggctgccccagcagcttcatcagcagtggagtggtgaacagccctgctgtgctgcggcccatctggctggatgacatcctgtgccagggcaatgagctggccctgtggaactgccgccaccggggctggggcaaccacgactgcagccacaatgaagatgtgaccctgacctgctatgacagcagtgacctggagctgcggctggtgggcggcaccaaccgctgcatgggccgggtggagctgaagatccagggccgctggggcaccgtgtgccaccacaagtggaacaatgctgctgctgatgtggtgtgcaagcagctgggctgcggcacagccctgcactttgctggcctgccccacctgcagagcggcagtgatgtggtgtggctggatggagtgtcctgcagcggaaatgaaagcttcctgtgggactgccgccacagcggcaccgtgaactttgactgcctgcaccagaatgatgtgtctgtcatctgcagtgatggagctgacctggagctgcggctggctgatggcagcaacaactgcagcggccgggtggaggtgcgcatccacgagcagtggtggaccatctgtgaccagaactggaagaatgagcaggccctggtggtgtgcaagcagctgggctgccccttctctgtgtttggcagccggcgggccaagcccagcaatgaggcccgggacatctggatcaacagcatcagctgcacaggaaatgaaagtgccctgtgggactgcacctatgatggcaaggccaagaggacctgcttccgccgcagtgatgctggggtcatctgcagcgacaaggctgacctggacctgcggctggtgggcgcccacagcccctgctacggccgcctggaggtgaagtaccagggcgagtggggcaccgtgtgccacgaccgctggagcaccagaaatgctgctgtggtgtgcaagcagctgggctgcggcaagcccctgcacgtgtttggcatgacctacttcaaggaggccagcggccccatctggctggatgatgtgtcctgcattggaaatgaaagcaacatctgggactgtgagcacagcggctggggcaagcacaactgtgtgcacagagaagatgtgattgtgacctgcagcggagatgccacctggggcctgcggctggtgggcggcagcaaccgctgcagcggccgcctggaggtgtacttccagggccgctggggcaccgtgtgtgatgatggctggaacagcaaggctgctgctgtggtgtgcagccagctggactgccccagcagcatcatcggcatgggcctgggcaatgccagcacaggctacggcaagatctggctggatgatgtgtcctgtgatggagatgaaagtgacctgtggagctgcagaaattctggctggggcaacaatgactgcagccacagtgaagatgtgggcgtcatctgcagtgatgccagtgacatggagctgcggctggtgggcggcagcagccgctgtgccggcaaggtggaggtgaatgtgcagggcgctgtgggcatcctgtgtgccaacggctggggcatgaacattgctgaggtggtgtgccggcagctggagtgtggcagcgccatccgggtgtcccgggagccccacttcacagagaggaccctgcacatcctgatgagcaacagcggctgcaccggcggggaggccagcctgtgggactgcatccgctgggagtggaagcagacagcctgccacctgaacatggaggccagcctcatctgcagcgcccaccggcagccccggctggtgggcgctgacatgccctgcagcggccgggtggaggtgaagcatgctgacacctggaggtctgtgtgtgacagcgacttcagcctgcacgccgccaacgtgctgtgccgggagctgaactgtggagatgccatcagcctgtctgtgggggaccactttggaaaaggaaatggcctgacctgggccgagaagttccagtgtgagggcagcgagacccacctggccctgtgccccatcgtgcagcaccctgaggacacctgcatccacagccgggaggtgggcgtggtgtgcagccgctacacagatgtgcggctggtgaatggcaagagccagtgtgatggccaggtggagatcaacgtgctgggccactggggcagcctgtgtgacacccactgggaccctgaagatgcccgggtgctgtgccggcagctgagctgtggcacagccctgagcaccaccggcggcaagtacatcggggagaggtctgtgcgggtgtggggccaccgcttccactgcctgggcaatgaaagcctgctggacaactgccagatgacagtgctgggcgccccaccctgcatccacggcaacacagtgtctgtcatctgcaccggcagcctgacccagcccctcttcccctgcctggccaacgtgtctgacccctacctgtctgctgtgcctgagggcagcgccctgatctgcctggaggacaagaggctgcggctggtggatggagacagccgctgtgccggccgggtggagatctaccatgatggcttctggggcaccatctgtgatgatggctgggacctgagtgatgcccacgtggtgtgccagaagctgggctgcggcgtggccttcaatgccaccgtgtctgcccactttggagagggcagcggccccatctggctggatgacctgaactgcaccggcatggagagccacctgtggcagtgccccagccggggctggggccagcacgactgccgccacaaggaggatgctggggtcatctgcagcgagttcaccgccctgcggctgtacagcgagacagaaacagagagctgtgccggccgcctggaggtgttctacaacggcacctggggctctgtgggcagaagaaacatcaccacagccatcgccggcatcgtgtgccggcagctgggctgtggggagaatggagtggtgtccctggcccccctgagcaagacaggcagcggcttcatgtgggtggatgacatccagtgccccaagacccacatcagcatctggcagtgcctgagcgccccctgggagcggcgcatcagcagccctgctgaggagacctggatcacctgtgaagatcgcatccgggtgcggggcggggacacagagtgcagcggccgggtggagatctggcacgccggctcctggggcaccgtgtgtgatgacagctgggacctggccgaggccgaggtggtgtgccagcagctgggctgcggcagcgccctggccgccctgagagatgccagctttggccagggcaccggcaccatctggctggatgacatgcgctgcaagggaaatgaaagcttcctgtgggactgccacgccaagccctggggccagagcgactgtggccacaaggaggatgctggggtgcgctgcagcggccagagcctgaagagcctgaatgccagcagcggccacctggccctgatcctgagcagcatcttcggcctgctgctgctggtgctcttcatcctcttcctgacctggtgccgggtgcagaagcagaagcacctgcccctgcgggtgtccaccaggagaagaggcagcctggaggagaacctcttccacgagatggagacctgcctgaagcgggaggacccccacggcaccaggaccagtgatgacacccccaaccacggctgtgaagatgccagtgacaccagcctgctgggcgtgctgcctgccagcgaggccaccaagtag

SEQ ID NO: 251315 - DNA, 4362 bp, Artificial Sequence
  derived and/or modified sequence
atgatgctgccccagaacagctggcacatcgacttcggccggtgctgttgtcaccagaacctcttctctgctgtggtgacatgtatactactacttaatagctgctttctcatctccagcttcaacggcacggatttggaacttagactggttaatggcgacggcccatgctcagggacggtggaagtgaaatttcaggggcaatggggcacagtgtgcgacgatggatggaataccaccgcttcaaccgtggtgtgcaaacagctcggttgtccatttagcttcgcaatgttccggttcggccaggctgtcacgcggcacggcaagatctggctcgatgatgtgagctgttatggcaatgaaagtgctctgtgggaatgtcaacaccgtgagtggggctctcataactgttaccatggtgaggacgtcggggtgaactgttacggcgaagccaatctcggcctccgtctcgtggacgggaataacagctgcagcggaagagtcgaggttaagtttcaggagcgttgggggaccatctgcgatgacggatggaacctgaatacagcagctgtggtctgtcgacaactgggctgcccctcttcctttatttctagtggagtggttaattcccctgctgtgttgcgtccgatatggttggatgacatcttatgtcagggtaatgaacttgccctgtggaactgcagacacaggggctggggtaaccacgactgcagccacaatgaggacgtaactctgacctgttacgatagctcagacctggaactgcgcctcgtgggcgggactaaccgatgcatggggcgagtcgagctgaaaattcaaggccggtgggggacagtctgccatcataaatggaacaatgctgcagcagatgttgtgtgtaagcaactgggctgtggtactgccctgcatttcgccggactgccccacctgcagtcaggatcggatgttgtgtggctggatggggtcagctgttccggtaatgaatcatttctctgggactgtcggcatagtggcacagtgaatttcgattgtctccatcaaaacgatgtgtctgtgatatgcagcgacggggccgacctagagttaaggttagccgatggatcaaataactgcagtggcagggttgaagtacggattcacgagcagtggtggacaatctgcgaccagaattggaaaaacgaacaggccctggtggtgtgtaagcagctgggatgtccatttagcgtgttcgggtctcgcagagccaagccatctaacgaggccagagatatatggatcaactccatttcttgcactgggaatgagagcgccctctgggattgtacctacgacggaaaagctaagagaacctgtttccggagatcagatgcaggagtcatttgctctgacaaagccgatctcgacctgagactggttggggcccactctccttgctatggtcgtctagaggtgaagtaccaaggcgaatggggaactgtctgtcacgataggtggtccactaggaatgccgccgtggtgtgcaagcagctggggtgtggaaaacccctgcatgtgttcggtatgacgtatttcaaggaggcctcaggccctatctggctggatgacgttagctgcatagggaacgagtccaatatttgggactgtgaacattccggctggggcaagcataattgcgttcaccgagaggatgtgatagtgacatgtagcggggacgcgacctggggccttagactggttggaggctcgaatcgctgtagcggacggctggaagtgtactttcaggggcggtggggaaccgtgtgcgatgacggctggaattccaaggctgccgccgtcgtgtgcagccagttggattgtcccagctccattattggaatgggtctgggcaacgcttcaaccggttatggaaagatttggctggatgatgtgagctgtgatggagacgaaagcgatctatggtcctgtcgcaattcggggtgggggaataatgattgttcccacagtgaagacgtgggcgtgatctgttccgacgctagcgatatggaactgcgactggtcggggggagctcacgttgtgctggtaaagtggaagtgaatgtgcaaggtgctgtgggaattctctgcgcaaacggatggggcatgaatatcgcagaagttgtatgcagacagttggagtgcgggagtgccataagggtgtcaagagaacctcactttaccgagcgcacactgcacatcctcatgtctaattctgggtgtactggcggcgaagcctcactatgggactgcatccggtgggagtggaagcagacagcatgtcacctcaacatggaagcatccctcatttgttccgcacaccgtcaaccaaggctggtgggtgcagatatgccatgttcaggacgggtcgaggttaaacacgctgacacatggcggtctgtgtgtgactcggatttctccctgcacgctgctaacgtgctttgcagggagctgaactgcggggacgctatatcactgagtgttggagaccatttcggtaaaggaaacggtttaacctgggccgagaaatttcagtgtgaaggttccgaaacccaccttgctctgtgcccaatcgtccagcaccctgaggatacttgtattcatagccgggaagtcggggtagtttgttcacgctacacagacgtccgcctggtaaatggcaagagtcagtgtgacggtcaggtggaaatcaacgttctaggccattggggttcactgtgtgacacccactgggatccagaggatgcccgcgtcctgtgtaggcaactttcctgtggtaccgccctgtcgacgacaggcgggaaatacattggagaaaggagcgtacgtgtgtggggtcacagatttcattgtctgggcaatgagtccctgctcgacaactgccaaatgaccgtactgggtgctcccccatgcatccacgggaacactgtcagcgtcatctgtacaggtagtctgacccaacccctgttcccctgcctggccaatgtaagcgatccttacctgtcagccgttccagaaggtagcgcactcatatgcctggaggacaaacgtctgcgactggtggacggagactcaagatgtgccggacgagtggagatctaccacgacggtttttggggcactatttgtgatgacggatgggacttatcagatgcacacgtggtgtgtcagaaactcgggtgtggggtcgctttcaatgctaccgtgtcagctcacttcggggagggcagtggaccaatctggctagatgacctcaactgcactgggatggagtcacacctctggcaatgtccgagtcgaggctggggccagcacgattgccgacacaaagaagatgcaggcgttatttgctcggaatttaccgctctcagactttatagtgagaccgagaccgagtcctgcgccggaaggctggaggtgttttataacggtacctggggctcagtcggcagacgtaacattacaaccgccatcgctggcatcgtgtgtcggcagctaggctgtggtgaaaacggcgtagtctccctggcccccctcagcaagacagggtctgggtttatgtgggtggatgatatccagtgtcccaaaacccacatcagtatttggcagtgcctgagtgcaccctgggaaaggagaatttcttctcctgcggaggaaacatggatcacgtgcgaagaccgaatacgggtccggggaggcgacaccgagtgtagcggccgcgtggaaatctggcacgcaggcagttgggggacagtttgcgatgattcctgggacttggccgaggcagaagtggtgtgtcagcagttggggtgtggctcagctctggcagctctcagggatgccagttttggccaggggactggcactatctggctggacgatatgagatgcaagggaaatgagtcattcctttgggactgtcacgccaaaccatggggccagtctgactgtggtcataaagaggacgccggagtcagatgttcgggacagagcctgaagagcctgaacgcaagctccggccacttagcactgattctgagtagcattttcgggctgctgctgcttgtgctttttattctctttctgacatggtgtagggtgcagaaacaaaaacatctgccattacgcgtgagcacaaggcggcgcgggagcctcgaggagaatcttttccacgaaatggaaacttgcctgaaaagagaagacccacatggcacacgcacttccgacgatacccccaatcatggatgcgaggacgcatctgacacctcccttttgggggtactgcccgccagtgaagcaaccaaatag

SEQ ID NO: 251316 - RNA, 4362 nt, Artificial Sequence
  derived and/or modified sequence
augaugcugccgcagaacaguuggcacauugacuuugguagauguuguugucaucagaauuuauuuucugcuguggugacaugcauucugcugcucaauaguugcuuucugaucucuagcuuuaauggcaccgaccuggagcugcgacuugugaacggcgauggacccugcagcgguacugucgaagugaaauuucaaggucagugggguacagucugugacgauggcuggaacaccacugcuagcacuguugucuguaaacagcuaggaugccccuuuucuuucgcaauguuuagguucggccaggcugucacccgccacgggaagauauggcuugacgacgugucuuguuacggaaaugaaucagcccugugggagugccagcacagggaauggggaucccacaauugcuaccacggagaggaugucgguguaaauugcuauggagaagcuaaccucggccucaggcucguggaugggaauaacucguguuccggaagaguggagguaaaguuccaggagcgguggggaaccauuugcgaugacggcuggaaucugaauaccgcugcuguggugugccgucaguuggggugucccucuucauuuauuucauccggcgucguuaauaguccugccguccuccggccuaucuggcuugacgacauauuaugccagggcaacgaacuggcucuuuggaauugucgacacaggggguggggcaaccacgacugcucacauaaugaagaugucacacuuacuuguuaugauagcucagaccuugaauugcgacuggucggcggcacaaacagaugcaugggacgaguggagcugaagauucagggacgcugggggacaguuugccaccacaaguggaacaacgcugcugccgauguggucugcaaacagcugggaugugguacagcacugcacuuugccgguuuaccacaccuacagagcgguucagaugucgucuggcucgacgggguuaguugcucugguaaugaauccuuucuaugggacugccgucauagcggcacugugaacuuugauugucuccaucagaacgacgucucugugaucugcagcgauggagccgauuuggaauugaggcucgcagacgggucuaacaacuguucuggucgaguagaagugagaauucaugaacagugguggacaauuugcgaccaaaacuggaaaaacgagcaagcuuugguagugugcaaacagcucggcuguccauuuuccguguuugggucccgcagggccaaaccaucuaacgaggcacgcgacaucuggauaaacuccaucuccuguacagggaaugaaagugcucucugggacuguacguacgauggcaaggcaaaacggaccuguuuuaggcgcucugaugccggcgugauuugcagcgauaaggcggaucuggaucuuaggcucgucggcgcccacuccccuuguuauggacgacuggagguaaaauaucaaggcgaguggggcacuguuugccacgaccgguggagcacuagaaacgccgccgucgugugcaaacaguugggaugugggaagccccuccacguguucggaaugacauauuucaaggaagcguccgggccaaucuggcuugaugaugugagcuguauagggaacgaaagcaauaucugggacugcgaacauuccgguugggggaaacacaauugugugcaccgcgaggacguuauugugacguguucgggcgacgcaacauggggccugcggcuugugggaggaucgaauaggugcagcgguaggcuggaaguuuauuuucagggaaggugggggaccgugugcgacgauggcuggaacaguaaagcugccgcuguggugugcucccaacuugacugcccuuccucuaucauuggcaugggccuuggcaaugcaaguacaggcuaugggaagaucugguuggaugacgucuccugugauggcgaugagucagauuuguggucaugucgcaauagugguuggggaaacaaugacuguucucacagugaggacgugggcgugauaugcucugaugcaucugauauggagcugagacugguuggaggaagcucacggugcgccgguaaagucgaggucaacgugcaaggcgcugugggaauucugugugcaaauggaugggggaugaauauugcggaggucgugugccggcaguuggagugugggucugccauucgaguaagcagggagccacacuucaccgagcgcacacuccacauucugauguccaauucgggcugcacuggcggcgaggccucucuuugggacugcaucagaugggaguggaagcaaacagccugucaucuuaacauggaagcaucucucaucuguucugcacacagacagccuagacucgugggggcugacaugccuugcagcgggcgcguggaggucaaacaugccgacacuuggagauccguaugugauucugauuucagcuuacacgccgcaaauguucugugcagagaacuuaacuguggcgaugcaaucucucugucagucggagaccauuucgggaaggguaacggccucacuugggcugagaaguuucagugcgagggaucagagacccaucuggccuugugccccauugugcagcauccugaagauacuuguauucacucacgcgaaguggggguggucuguucgcgcuacaccgacgugaggcugguuaacggcaagucacagugugacgggcagguagagaucaauguccuggggcacuggggaucacucugcgacacucacugggaucccgaggacgcccgcguacucuguagacagcuuucaugcggaacugcacuuucgaccaccggggguaaguacauuggcgagcguagcguuagggucuggggccaccgguuccacugccuugggaacgaaucacugcucgacaacugucagaugacugugcugggugcccccccaugcauccaugguaacaccguguccgugauuuguacuggaagucucacccagcccuuauuccccugccucgcaaaugucagcgauccuuaccuguccgcugugccagagggguccgcacugauaugccucgaggauaaaaggcugcggcuggucgauggggauaguagaugcgccggacgagucgagaucuaucacgacggcuuuuggggcacuauaugugacgacggcugggaucugagcgacgcacauguggucugccaaaaacuuggcuguggugucgccuuuaaugccacaguuucggcucacuucggcgagggaagcggcccaaucuggcuggaugaccugaauuguaccgguauggaaucucacuuauggcagugcccuucucggggguggggacaacacgauugcaggcacaaagaggaugccgggguuaucugcucagaauucaccgcacugaggcuauauucugaaaccgagaccgagagcugcgccggccggcuggagguguuuuauaaugggacuugggggucugugggccgaagaaauaucaccaccgccauagcugggaucguaugccgucaguuaggauguggggaaaacgggguggugagccucgcacccuuaaguaagacaggaucuggguucauguggguggaugauauccaguguccuaagacccauauuucaauauggcaguguuuaagcgcaccaugggagcggagaaucaguagcccugcagaagagaccuggaucacaugcgaagauagaauuagggugcguggaggggauacagagugcuccggaagagucgagauauggcacgcuggauccuggggaaccguuugcgacgacucaugggaucuggccgaggccgaaguggugugucaacaacugggaugcggcagcgcucucgccgcgcugcgugaugcguccuuugggcaaggaacgggaacgauuuggcuggacgacaugcggugcaaggguaacgagaguuuucucugggacugucacgccaagccuugggggcagucagauugcggccauaaggaggacgcgggggucagaugcaguggccagucuuugaaaucacugaacgccagcagcggccauuuagcucugauccugaguagcaucuucggcuuguuacugcucgugcuguucauucuguuucugacauggugccguguucagaaacagaagcaccugccacuuagagugaguacuagacgccgggggagucuagaagagaauuuguuccacgagauggaaaccugccuuaagcgcgaagacccccacggaacgcguacuuccgacgacaccccaaaccaugggugcgaggaugcauccgacacuucgcuccugggugugcugccagcguccgaagccacaaaauag

SEQ ID NO: 251317 - RNA, 4362 nt, Artificial Sequence
  derived and/or modified sequence
augaugcuuccccagaacuccuggcacaucgacuuugggagauguuguugccaucaaaauuuauuuagugcaguggucacuuguauauugcuucugaacucaugcuuucuuaucaguagcuuuaacggaacugaccucgaguugagacuggugaacggggaugggccuuguuccggcaccguugaggugaaauuccaggggcaguggggcaccgugugugaugaugguuggaacaccacagcaucuacuguagugugcaagcagcuaggauguccuuucucuuucgcgauguuucgauuuggccaggccguuacucggcacgguaagaucuggcucgacgaugugaguugcuaugggaacgaauccgcccugugggagugucagcaccgcgagugggguagucacaacuguuaccacggagaagacguuggcgugaauuguuauggagaggcgaacuugggacuuaggcugguugauggcaauaauagcugcagcgggagaguagagguaaaguuucaggagcgguggggcacgauuugcgaugacgguuggaauuuaaacaccgcagcgguagugugcaggcagcuugggugcccuuccuccuuuaucuccagcggggugguaaauagcccugcuguccuuagaccgauaugguuagacgacauucugugucagggaaaugagcuggcauuauggaacugcagacacagagguuggggcaaucacgauugcucucauaaugaagauguuacauugacaugcuaugauucauccgaucuagagcucagacuuguggggggcaccaacagaugcaugggacgaguggaacucaaaauccaagggagauggggaacggugugccaucauaaguggaacaaugccgcagcggacgugguuuguaagcagcugggaugugguacugcgcugcauuucgccgggcuaccccaccuucagagcggcagcgaugugguuugguuggacggugugucuuguuccgguaaugaauccuuccugugggauugccgccauuccggcaccgucaauuucgauugucuccaucaaaacgacgugucagucaucugcuccgacggcgccgaccuagagcucagacuagcagaugguucaaauaauuguuccggucgaguugagguacggauccacgagcagugguggacuauuugugaucagaacuggaaaaaugagcaggcuuuagugguaugcaagcaguugggauguccauucaguguguuuggaaguagaagagcuaagcccuccaacgaagcaagggauauuuggaucaauaguaucagcuguaccgguaaugaaagcgcgcucugggacuguaccuacgacggcaaagcaaagcggaccuguuuccgcagaucagacgccggagugauauguagcgacaaagccgaccuggaucucaggcugguaggcgcgcauucaccuuguuaugggcggcuugaggugaaauaucagggcgaguggggcacugugugccaugauaggugguccacaagaaaugccgcggugguuugcaagcagcucggauguggaaagccucugcauguguuuggcaugaccuauuucaaagaagccucuggcccaaucuggcuugaugacgugucuuguaucggaaaugaaagcaauaucugggacugcgaacauagcggcuggggaaaacauaauugugugcaccgcgaagacgugauaguaacaugcucaggcgaugcaaccuggggacucagacugguggggggcaguaaccguugcagcgggagacucgaaguguacuuccagggucgauggggaacugucugugaugacggcuggaacaguaaagcagccgccguaguaugcagccagcuugacugcccgagcagcaucauuggaaugggauugggcaacgccucuacaggguaugggaaaauuuggcuggaugacgugucuugugauggugacgagucagaucugugguccugcaggaacagcggaugggggaacaacgauugcucacacucggaggaugugggcgugauaugcagugaugccagugauauggagcugcgacuuguggguggaaguagccgaugcgcugggaaggucgaagugaaugugcagggugcgguugguauauuaugcgcgaauggcugggggaugaauaucgcugagguaguguguaggcaauuggaauguggcuccgccauaagggucucucgcgaaccacacuucaccgagagaacacuacauauucuaaugagcaauagcggcuguaccgggggagaggcaucgcucugggauuguauuagaugggaauggaaacagacugcuugucaccugaauauggaggcaucccugauuugcucugcacaccggcaaccucggcuggucggcgccgacaugccuuguagugguagaguugaggugaagcaugcagauaccuggcgcucagucugcgauucugacuucucauuacacgcugccaacguucugugcagagagcuuaacuguggcgaugcaaucucccuuagcgugggugaccauuuuggaaaagguaacggucugaccugggcugagaaauuucagugcgaagguucagagacacaccucgcccugugcccaaucguccagcauccagaggacacauguauucauagucgagagguuggagugguuugcaguagguacacugaugugaggcuaguaaaugguaaaucccaaugcgauggacaaguagagaucaacguacugggacacuggggaagccugugugacacccauugggaucccgaggaugcacggguuuugugcagacaacugagcugugggacagcgcugucgaccacgggagguaaauacauuggugaacgaucugugcggguuuggggacaccgguuccacugcuuggguaacgagucuuugcuagauaacugccagaugacgguucuuggagcgccuccauguauccacggcaacacuguuucugugauuuguacgggcagccuaacacagccucucuuucccugucuggcaaacguaucagacccuuaucucucggcagucccugaaggcucagcguugauuugucuugaggauaaaagacuccgccucgucgauggcgauagucggugugccggccggguugaaauuuaucaugauggguucugggggacaaucugugaugacggcugggaucuguccgaugcccauguaguaugccagaagcuggguuguggagucgcauuuaaugccacagucagugcccacuuuggagaagggagcggcccuauuugguuagaugauuugaauuguacgggaauggaaagucaucuguggcaguguccuaguagaggcuggggacagcaugauugccgacauaaggaggaugcaggcguuauuuguagcgaguucacagccuuacggcuguacagcgagacugagaccgaaucaugugcugggcguuuagaagucuuuuacaauggcacauggggguccgugggaagacggaauauuacaacugccauagccgggaucguguguagacaauuagggugcggagagaauggaguggucucucuggcaccgcuguccaagaccggguccggcuucaugugggucgaugacauucagugcccaaaaacacacauuucaauauggcagugucucucagcgccgugggaacgccgcauuucaucuccugccgaagagacguggauuacuugugaagacagaauuagagugcgggggggggauacagagugcucaggcagggucgagaucuggcacgcuggcucaugggggacugucugugacgauucaugggaucuggcugaggcugagguggugugccaacagcuaggauguggcuccgcccuagccgcccuuagggacgccucuuucggucagggaacugguacuaucuggcucgaugauaugcgcuguaaggguaacgagucauuuuuaugggauugccacgccaaacccuggggccagucugauuguggacauaaggaagaugcaggcgugcgaugcagcgggcaaucguuaaagucuuuaaaugcaagcagcggacaucuggcucuuauuuugucuagcauuuuuggacugcugcugcugguccucuuuauucucuuccugacaugguguagagugcagaagcagaagcaccugccccuacgggugagcacacgaagacggggcuccuuagaggagaaccuuuuccacgagauggagaccugcuugaagagagaagacccccacggaacuaggacaucggacgauacgcccaaucauggcugugaagacgcuucugacacgucacugcugggagugcugccugcaagugaagcgacaaaguag

SEQ ID NO: 251318 - protein, 328 aa, Artificial Sequence
  derived and/or modified sequence
MGKGDVLEAAPTTTAYHSLMDEYGYEVGKAIGHGSYGSVYEAFYTKQKVMVAVKIISKKKASDDYLNKFLPREIQVMKVLRHKYLINFYRAIESTSRVYIILELAQGGDVLEWIQRYGACSEPLAGKWFSQLTLGIAYLHSKSIVHRDLKLENLLLDKWENVKISDFGFAKMVPSNQPVGCSPSYRQVNCFSHLSQTYCGSFAYACPEILRGLPYNPFLSDTWSMGVILYTLVVAHLPFDDTNLKKLLRETQKEVTFPANHTISQECKNLILQMLRQATKRATILDIIKDSWVLKFQPEQPTHEIRLLEAMCQLHNTTKQHQSLQITT

SEQ ID NO: 251319 - protein, 252 aa, Artificial Sequence
  derived and/or modified sequence
MKVLRHKYLINFYRAIESTSRVYIILELAQGGDVLEWIQRYGACSEPLAGKWFSQLTLGIAYLHSKSIVHRDLKLENLLLDKWENVKISDFGFAKMVPSNQPVGCSPSYRQVNCFSHLSQTYCGSFAYACPEILRGLPYNPFLSDTWSMGVILYTLVVAHLPFDDTNLKKLLRETQKEVTFPANHTISQECKNLILQMLRQATKRATILDIIKDSWVLKFQPEQPTHEIRLLEAMCQLHNTTKQHQSLQITT

SEQ ID NO: 251320 - DNA, 987 bp, Artificial Sequence
  derived and/or modified sequence
atgggcaagggcgacgtgctggaggccgcccccaccaccaccgcctaccacagcctgatggacgagtacggctacgaggtgggcaaggccatcggccacggcagctacggcagcgtgtacgaggccttctacaccaagcagaaggtgatggtggccgtgaagatcatcagcaagaagaaggccagcgacgactacctgaacaagttcctgcccagagagatccaggtgatgaaggtgctgagacacaagtacctgatcaacttctacagagccatcgagagcaccagcagagtgtacatcatcctggagctggcccagggcggcgacgtgctggagtggatccagagatacggcgcctgcagcgagcccctggccggcaagtggttcagccagctgaccctgggcatcgcctacctgcacagcaagagcatcgtgcacagagacctgaagctggagaacctgctgctggacaagtgggagaacgtgaagatcagcgacttcggcttcgccaagatggtgcccagcaaccagcccgtgggctgcagccccagctacagacaggtgaactgcttcagccacctgagccagacctactgcggcagcttcgcctacgcctgccccgagatcctgagaggcctgccctacaaccccttcctgagcgacacctggagcatgggcgtgatcctgtacaccctggtggtggcccacctgcccttcgacgacaccaacctgaagaagctgctgagagagacccagaaggaggtgaccttccccgccaaccacaccatcagccaggagtgcaagaacctgatcctgcagatgctgagacaggccaccaagagagccaccatcctggacatcatcaaggacagctgggtgctgaagttccagcccgagcagcccacccacgagatcagactgctggaggccatgtgccagctgcacaacaccaccaagcagcaccagagcctgcagatcaccacctag

SEQ ID NO: 251321 - DNA, 987 bp, Artificial Sequence
  derived and/or modified sequence
atggggaaaggagacgtactggaagcagcgccaacaacgacagcataccactctctgatggatgaatatggctatgaagtggggaaggccattggtcatggatcttatgggtcagtttatgaggcattttacacaaaacagaaggtgatggttgctgttaagattatttccaagaaaaaagcgagcgatgactacctcaataagttcctcccccgtgaaatccaggttatgaaggtccttcgacataaatatttgatcaacttctatcgtgccatcgagtccacgtcacgggtgtatataattttagaactggcacaaggcggcgatgtcctcgaatggattcaacggtatggggcttgttcagagcccttggcggggaaatggttctcccagttgacgttaggtattgcgtacctgcatagcaaaagcatcgtacatcgcgatctgaagctagagaacttgttgctggacaagtgggagaacgttaagatttctgactttggattcgctaagatggtcccgtctaatcagcctgttggttgttctccctcttaccgtcaggttaactgcttttctcacctctcgcagacatattgtgggtcctttgcttatgcatgtccggaaatcctgcgcggacttccctataatccattcctatctgatacctggagcatgggagtcatcctctacacattggtggtcgcacacctaccattcgatgacacaaacctcaagaaactcttacgcgagacacagaaggaagttacatttccagctaaccataccattagccaagagtgcaagaatctgatattacagatgctaaggcaagccactaaaagagcaacgattctcgatattatcaaggatagctgggtgctgaaatttcaacctgagcagcctacccatgaaattcgtctcttggaggcaatgtgccagctacataacaccacaaaacagcaccagagccttcagatcacaacctag

SEQ ID NO: 251322 - DNA, 987 bp, Artificial Sequence
  derived and/or modified sequence
atgggcaaaggagatgtgctggaggccgcccccaccaccacagcctaccacagcctgatggatgaatatggctatgaggtgggcaaggccatcggccacggcagctatggctctgtgtatgaggccttctacaccaagcagaaggtgatggtggccgtgaagatcatcagcaagaagaaggccagtgatgactacctgaacaagttcctgccccgggagatccaggtgatgaaggtgctgcggcacaagtacctgatcaacttctaccgggccatcgagagcaccagccgggtgtacatcatcctggagctggcccagggcggagatgtgctggagtggatccagagatatggagcctgcagcgagcccctggccggcaagtggttcagccagctgaccctgggcatcgcctacctgcacagcaagagcatcgtgcaccgggacctgaagctggagaacctgctgctggacaagtgggagaatgtgaagatcagtgactttggatttgccaagatggtgcccagcaaccagcctgtgggctgcagccccagctaccggcaggtgaactgcttcagccacctgagccagacctactgcggcagctttgcctatgcctgcccagagatcctgcggggcctgccctacaaccccttcctgagtgacacctggagcatgggcgtcatcctgtacaccctggtggtggcccacctgccctttgatgacaccaacctgaagaagctgctgcgggagacccagaaggaggtgaccttccctgccaaccacaccatcagccaggagtgcaagaacctgatcctgcagatgctgcggcaggccaccaagagggccaccatcctggacatcatcaaggacagctgggtgctgaagttccagcctgagcagcccacccatgagatccggctgctggaggccatgtgccagctgcacaacaccaccaagcagcaccagagcctgcagatcaccacctag

SEQ ID NO: 251323 - DNA, 987 bp, Artificial Sequence
  derived and/or modified sequence
atgggcaagggcgacgtgctggaggccgcccccaccaccaccgcctaccattctctcatggacgagtatggatatgaagtcgggaaggctattggacacgggtcctatggctccgtgtacgaagctttctacactaaacagaaggtgatggtggctgtaaagatcatctctaaaaagaaggcttctgacgactacttgaataagttcctgcctcgcgaaatccaggttatgaaagtattaagacacaaatacctcataaatttttatagggccattgaatccacttccagggtgtacattattctggaactagctcaaggcggcgatgtcctggagtggattcaacgctacggagcctgcagtgagcccctggccggaaagtggttctcccagctaacactggggattgcatacctccactccaaaagcatcgtgcacagggacctgaaactggagaacctgctgctggataaatgggagaacgtcaagataagcgactttggattcgctaaaatggtccccagcaaccagcccgtggggtgcagtccatcttatcgccaagtgaactgcttctcacacctctcacagacctattgcggttccttcgcgtacgcctgccctgagattctgcgagggttaccttacaacccttttctaagtgacacatggtctatgggcgtgattttgtacactttagtcgtggcccaccttccgttcgatgacactaatctgaaaaagctactgagagagacgcaaaaagaagtaactttccctgctaatcacaccatttcccaggaatgcaaaaatctgatcctgcaaatgctccgacaggcgacaaaaagagcaacgattctggatatcattaaagacagttgggtcctgaagttccagcccgaacagcctacccacgagatccgacttttggaggctatgtgtcagcttcacaacactaccaaacaacatcaaagtctccagatcacgacctag

SEQ ID NO: 251324 - DNA, 987 bp, Artificial Sequence
  derived and/or modified sequence
atgggaaagggtgacgtgctggaggccgcacccacaactactgcctatcactctcttatggacgagtatggatatgaggtgggaaaagcaatagggcacggaagttacgggagcgtttatgaagctttctataccaaacagaaagtaatggtggctgtcaaaatcatttccaaaaaaaaagcatctgacgactacctcaacaaattcctccctagggagatacaagttatgaaggtgcttcgacataaatacctcataaatttctatcgggctatcgagagcactagtagagtgtatatcatcctggaactcgcacagggcggtgatgttcttgaatggatccagcggtatggcgcatgtagcgagccccttgccggaaagtggttcagtcagctgactctgggcatagcataccttcactctaagtctattgtccaccgagacctcaagctggaaaatctgctgctggacaaatgggagaacgtgaagatttcagacttcgggttcgccaaaatggttcccagcaatcagccagttgggtgctccccttcttatagacaggtcaactgtttctcacatctctcacagacatactgtgggtcattcgcctacgcttgccctgaaattctgcggggattgccttataaccccttcctcagcgacacatggtccatgggtgtgatactgtacacccttgtggtggctcacctaccatttgatgacaccaacctgaaaaagcttctccgagaaacccaaaaagaggttactttcccagctaatcacaccatcagccaggagtgcaagaatctcatactccagatgctgcggcaggccaccaaaagagccacgatactagatataatcaaagattcttgggtgctgaagtttcaacccgagcaacccacccacgaaatccgactcctggaagcaatgtgtcaactgcataacaccacaaagcagcatcagtccttgcagatcaccacatag

SEQ ID NO: 251325 - DNA, 1257 bp, Artificial Sequence
  derived and/or modified sequence
tcctagtggagggctgagtccagcatcccagactcgtgtgactatataggcaagcatttggggacctacttcactttgataccctagccttcagcagctcaaggtgttggcctttggataggaggcttccaagtagtaaagctccctgctctcagcaagcccaacaccatggggaagggagatgtcttagaggcagcaccaaccaccacagcctaccattccctcatggatgaatatggttatgaggtgggcaaggccattggccatggctcctatgggtcggtatatgaggctttctacacaaagcagaaggttatggtggcagtcaagatcatctcaaagaagaaggcctctgatgactatcttaacaagttcctgccccgtgaaatacaggtaatgaaagtcttgcggcacaagtacctcatcaacttctatcgggccattgagagcacatctcgagtatacatcattctggaactggctcagggtggtgatgtccttgaatggatccagcgctacggggcctgctctgagccccttgctggcaagtggttctcccagctgaccctgggcattgcctacctgcacagcaagagcatcgtgcaccgggacttaaagttggagaacctgttgctggacaagtgggagaatgtgaagatatcagactttggctttgccaagatggtgccttctaaccagcctgtgggttgtagcccttcttaccgccaagtgaactgcttttcccacctcagccagacttactgtggcagctttgcttacgcttgcccagagatcttacgaggcttgccctacaaccctttcctgtctgacacctggagcatgggcgtcatcctttacactctagtggtcgcccatctgccctttgatgacaccaatctcaaaaagctgctaagagagactcagaaggaggtcactttcccagctaaccataccatctcccaggagtgcaagaacctgatcctccagatgctacgccaagccactaagcgtgccaccattctggacatcatcaaggattcctgggtgctcaagttccagcctgagcaacccacccatgagatcaggctgcttgaggccatgtgccagctccacaacaccactaaacagcaccaatccttgcaaattacgacctgaaaatggctgagggagggggctaagagaggagcaaagcaggaggtcttgggctaaaaatcttttttaccaaaaataaatctaagtctgatttagtttcatcaa

SEQ ID NO: 251326 - protein, 1052 aa, Artificial Sequence
  derived and/or modified sequence
MEAAHLLPAADVLRHFSVTAEGGLSPAQVTGARERYGPNELPSEEGKSLWELVLEQFEDLLVRILLLAALVSFVLAWFEEGEETTTAFVEPLVIMLILVANAIVGVWQERNAESAIEALKEYEPEMGKVIRSDRKGVQRIRARDIVPGDIVEVAVGDKVPADLRLIEIKSTTLRVDQSILTGESVSVTKHTEAIPDPRAVNQDKKNMLFSGTNITSGKAVGVAVATGLHTELGKIRSQMAAVEPERTPLQRKLDEFGRQLSHAISVICVAVWVINIGHFADPAHGGSWLRGAVYYFKIAVALAVAAIPEGLPAVITTCLALGTRRMARKNAIVRSLPSVETLGCTSVICSDKTGTLTTNQMSVCRMFVVAEADAGSCLLHEFTISGTTYTPEGEVRQGDQPVRCGQFDGLVELATICALCNDSALDYNEAKGVYEKVGEATETALTCLVEKMNVFDTDLQALSRVERAGACNTVIKQLMRKEFTLEFSRDRKSMSVYCTPTRPHPTGQGSKMFVKGAPESVIERCSSVRVGSRTAPLTPTSREQILAKIRDWGSGSDTLRCLALATRDAPPRKEDMELDDCSKFVQYETDLTFVGCVGMLDPPRPEVAACITRCYQAGIRVVMITGDNKGTAVAICRRLGIFGDTEDVAGKAYTGREFDDLSPEQQRQACRTARCFARVEPAHKSRIVENLQSFNEITAMTGDGVNDAPALKKAEIGIAMGSGTAVAKSAAEMVLSDDNFASIVAAVEEGRAIYSNMKQFIRYLISSNVGEVVCIFLTAILGLPEALIPVQLLWVNLVTDGLPATALGFNPPDLDIMEKLPRSPREALISGWLFFRYLAIGVYVGLATVAAATWWFVYDAEGPHINFYQLRNFLKCSEDNPLFAGIDCEVFESRFPTTMALSVLVTIEMCNALNSVSENQSLLRMPPWMNPWLLVAVAMSMALHFLILLVPPLPLIFQVTPLSGRQWVVVLQISLPVILLDEALKYLSRNHMHACLYPGLLRTVSQAWSRQPLTTSWTPDHTGLASLGQGHSIVSLSELLREGGSREEMSQK

SEQ ID NO: 251327 - protein, 998 aa, Artificial Sequence
  derived and/or modified sequence
MEAAHLLPAADVLRHFSVTAEGGLSPAQVTGARERYGPNELPSEEGKSLWELVLEQFEDLLVRILLLAALVSFVLAWFEEGEETTTAFVEPLVIMLILVANAIVGVWQERNAESAIEALKEYEPEMGKVIRSDRKGVQRIRARDIVPGDIVEVAVGDKVPADLRLIEIKSTTLRVDQSILTGESVSVTKHTEAIPDPRAVNQDKKNMLFSGTNITSGKAVGVAVATGLHTELGKIRSQMAAVEPERTPLQRKLDEFGRQLSHAISVICVAVWVINIGHFADPAHGGSWLRGAVYYFKIAVALAVAAIPEGLPAVITTCLALGTRRMARKNAIVRSLPSVETLGCTSVICSDKTGTLTTNQMSVCRMFVVAEADAGSCLLHEFTISGTTYTPEGEVRQGDQPVRCGQFDGLVELATICALCNDSALDYNEAKGVYEKVGEATETALTCLVEKMNVFDTDLQALSRVERAGACNTVIKQLMRKEFTLEFSRDRKSMSVYCTPTRPHPTGQGSKMFVKGAPESVIERCSSVRVGSRTAPLTPTSREQILAKIRDWGSGSDTLRCLALATRDAPPRKEDMELDDCSKFVQYETDLTFVGCVGMLDPPRPEVAACITRCYQAGIRVVMITGDNKGTAVAICRRLGIFGDTEDVAGKAYTGREFDDLSPEQQRQACRTARCFARVEPAHKSRIVENLQSFNEITAMTGDGVNDAPALKKAEIGIAMGSGTAVAKSAAEMVLSDDNFASIVAAVEEGRAIYSNMKQFIRYLISSNVGEVVCIFLTAILGLPEALIPVQLLWVNLVTDGLPATALGFNPPDLDIMEKLPRSPREALISGWLFFRYLAIGVYVGLATVAAATWWFVYDAEGPHINFYQLRNFLKCSEDNPLFAGIDCEVFESRFPTTMALSVLVTIEMCNALNSVSENQSLLRMPPWMNPWLLVAVAMSMALHFLILLVPPLPLIFQVTPLSGRQWVVVLQISLPVILLDEALKYLSRNHMHGHTQS

SEQ ID NO: 251328 - DNA, 3159 bp, Artificial Sequence
  derived and/or modified sequence
atggaggccgcgcatctattgcctgccgccgatgttctgcgccatttctctgtgacagcagaaggcggcttgagccccgctcaggttaccggagcccgtgagcgatatggccccaacgaacttccttcagaagagggtaaaagtctgtgggagctggtacttgagcagttcgaggacctgctcgtacgaattctgctgcttgccgccctcgtgagctttgtgcttgcttggttcgaggaaggcgaggaaacaaccacagcctttgtggagccactggtcattatgctgatcctcgtggccaatgccattgtgggcgtgtggcaagagaggaacgcagaatctgctatcgaggccctgaaggagtatgaaccagaaatgggtaaagtcatacgctcagatcggaaaggggtgcaacgaatcagagccagggacatcgtgcccggcgatattgtcgaggtcgcagttggcgacaaagtgccagctgaccttagactaattgagatcaaatctaccacgctgcgagtggatcagagcatcttaaccggggaaagcgtgagtgtgacaaaacacacagaagccataccagatccccgcgcagtgaatcaggacaaaaagaatatgttgttcagcgggactaacatcacgagcggtaaggcagtgggggtggcggtcgcaacaggactccacaccgaactcggcaagatcaggtcgcaaatggcagcggtcgaacccgagagaacacctctgcagaggaaactcgacgaattcggcaggcagctctcccacgccatatccgtcatatgcgtggcagtatgggttatcaacatcggtcatttcgcagaccctgcccatggtggctcatggttacggggtgctgtctattatttcaagatcgccgtcgcgcttgcagttgcggccattcctgaaggtctgccagccgtcattaccacctgcttggccttaggcactcgccggatggctcgaaagaacgccattgtcagatccctgccatccgtcgaaaccttaggctgcactagtgtgatctgcagcgacaagaccggcaccctgacgacaaaccagatgtccgtctgccgaatgttcgtggtggcggaggcagacgccggatcttgtctgctgcacgagttcaccatttctgggacaacctatactcccgaaggagaagtgcggcagggcgaccagccggtgcgctgcggccagttcgacgggctggtcgaattggcaaccatctgcgccctgtgcaacgattccgccctggattacaacgaggcaaagggcgtctacgaaaaggtgggagaggcgaccgagacagccctaacctgtctggtggaaaaaatgaacgtgtttgatacagacttgcaagcgctgtcccgtgtcgaacgggctggcgcttgcaacactgtaattaagcagctgatgaggaaggagttcaccctcgagttctctcgcgatagaaagagcatgagcgtatactgcacccccacgcgacctcacccgaccggacaagggagtaaaatgttcgtgaagggtgctcccgaatccgtcattgaacgctgctcttcagttcgggtggggtcaaggaccgccccgctgacgcccacctccagagaacagatcctcgccaaaattcgcgactggggctcgggcagcgacaccctgcgctgcttggccctggcgactagagacgctccgccacgcaaagaagacatggaacttgacgactgcagcaaatttgtccaatacgaaacagacctgacttttgttggctgcgtcgggatgctggaccctccacgtcccgaggtggctgcatgtattaccaggtgttaccaggcaggcatccgagtggtgatgattactggcgataataaagggactgctgttgccatctgcagaaggctgggcattttcggggacaccgaggacgtggcaggcaaagcctatacaggcagagaattcgatgacctgtctcctgagcaacaacgacaagcttgccgtacagcaaggtgtttcgccagggtggaacctgcacataaaagtcgtatagtggaaaatctgcaatctttcaatgaaatcacagctatgactggtgacggtgtgaacgacgctcctgcgcttaaaaaggccgagatcggcatcgcaatgggtagtgggacagctgtggcaaagtccgccgccgagatggtattgtctgatgacaacttcgcttccatcgtggcagccgtcgaagagggcagagctatctactccaatatgaaacagttcattcgctacctgatttcttctaatgtgggtgaagtggtgtgtatcttcctgaccgctattcttgggctgccagaagcactaatccccgtgcaattactgtgggtgaacctggttaccgatggactgcctgccactgcactgggttttaaccctccagacctagacatcatggagaagctcccgcgatccccgagagaagcgctgatttctgggtggctgttcttccggtacctggccatcggggtatacgtggggcttgccaccgttgcagcggccacgtggtggttcgtatatgacgcagagggtccacacattaatttctaccagctgaggaactttctcaagtgctctgaggataatcccctattcgcgggcatcgattgtgaggtgttcgagtctcgctttccaaccactatggccttgtcagtgctcgtcaccatcgagatgtgcaacgctctgaattccgtatcggaaaaccagtcactgctccgcatgccgccttggatgaatccctggctacttgtagctgtggcaatgagcatggctctgcacttcctgattctgctggttccgcctctgcctctgatttttcaagtaacgccattgagcgggcgccaatgggtggttgtgcttcagatctccttacctgttatcctgttagacgaggctttaaagtatctcagcagaaatcacatgcatgcatgtttgtaccccggtctcttgagaaccgtgtcacaagcttggtcacggcagcccctgacaacatcttggaccccagatcacaccgggctggcttctttaggacaggggcactctatagtatctcttagtgagttgctgcgcgaaggcggtagtcgggaagagatgtctcagaagtag

SEQ ID NO: 251329 - DNA, 3159 bp, Artificial Sequence
  derived and/or modified sequence
atggaggccgcccacctgctgcctgctgctgatgtgctgcggcacttctctgtgacagctgagggcggcctgagccctgcccaggtgactggagcccgggagagatatggccccaatgagctgcccagcgaggagggcaagagcctgtgggagctggtgctggagcagtttgaggacctgctggtgcgcatcctgctgctggccgccctggtgtcctttgtgctggcctggtttgaggagggggaggagaccaccacagcctttgtggagcccctggtgatcatgctgatcctggtggccaatgccatcgtgggcgtgtggcaggagagaaatgctgagagcgccatcgaggccctgaaggagtatgagcctgagatgggcaaggtgatccgcagtgacagaaaaggagtgcagaggatccgggcccgggacatcgtgcctggggacatcgtggaggtggccgtgggggacaaggtgcctgctgacctgcggctcatcgagatcaagagcaccaccctgcgggtggaccagagcatcctgactggagagagcgtgtctgtgaccaagcacacagaggccatcccagaccccagggctgtgaaccaggacaagaagaacatgctgttcagcggcaccaacatcaccagcggcaaggctgtgggcgtggccgtggccaccggcctgcacacagagctgggcaagatccgcagccagatggctgctgtggagcctgagaggacccccctgcagaggaagctggatgaatttggccggcagctgagccacgccatcagcgtcatctgtgtggccgtgtgggtgatcaacatcggccactttgctgaccctgcccacggcggctcctggctgcggggagctgtgtactacttcaagattgctgtggccctggccgtggccgccatccctgagggcctgcctgctgtgatcaccacctgcctggccctgggcaccaggaggatggccaggaagaatgccatcgtgcgcagcctgcccagcgtggagaccctgggctgcaccagcgtcatctgcagcgacaagacaggcaccctgaccaccaaccagatgtctgtgtgcaggatgtttgtggtggccgaggctgatgctggcagctgcctgctgcacgagttcaccatcagcggcaccacctacaccccagagggggaggtgcggcagggcgaccagcctgtgcgctgtggccagtttgatggcctggtggagctggccaccatctgtgccctgtgcaatgattctgccctggactacaatgaggccaagggcgtgtatgagaaggtgggggaggccacagaaacagccctgacctgcctggtggagaagatgaatgtgtttgacacagacctgcaggccctgagccgggtggagcgggccggggcctgcaacacagtcatcaagcagctgatgaggaaggagttcaccctggagttcagccgggacaggaagtccatgtctgtgtactgcacccccacccggccccaccccaccggccagggcagcaagatgtttgtgaagggggcccctgagagcgtcatcgagcgctgcagctctgtgcgggtgggcagcaggacagcccccctgacccccaccagccgggagcagatcctggccaagatccgggactggggcagcggcagtgacaccctgcgctgcctggccctggccaccagagatgccccacccaggaaggaggacatggagctggatgactgcagcaagtttgtgcagtatgaaacagacctgacctttgtgggctgtgtgggcatgctggacccccccaggcctgaggtggccgcctgcatcacccgctgctaccaggccggcatccgggtggtgatgatcactggagacaacaagggcacagctgtggccatctgccggcggctgggcatctttggagacacagaagatgtggccggcaaggcctacacaggccgggagtttgatgacctgagccctgagcagcagaggcaggcctgcaggacagcccgctgctttgcccgggtggagcccgcccacaagagcagaattgtggagaacctgcagagcttcaatgagatcacagccatgactggagatggagtgaatgatgccccagccctgaagaaggccgagatcggcatcgccatgggcagcggcacagctgtggccaagtctgctgctgagatggtgctgagtgatgacaactttgccagcatcgtggccgctgtggaggagggccgggccatctacagcaacatgaagcagttcatccgctacctgatcagcagcaatgtgggggaggtggtgtgcatcttcctgacagccatcctgggcctgcctgaggccctgatccctgtgcagctgctgtgggtgaacctggtgacagatggcctgcctgccacagccctgggcttcaaccccccagacctggacatcatggagaagctgcccaggagcccccgggaggccctgatcagcggctggctgttcttccgctacctggccatcggcgtgtatgtgggcctggccaccgtggccgccgccacctggtggtttgtgtatgatgctgagggcccccacatcaacttctaccagctgaggaacttcctgaagtgcagcgaggacaaccccctgtttgctggcatcgactgtgaggtgtttgagagccgcttccccaccaccatggccctgtctgtgctggtgaccatcgagatgtgcaatgccctgaacagcgtgtctgagaaccagagcctgctgaggatgccaccctggatgaacccctggctgctggtggccgtggccatgtccatggccctgcacttcctgatcctgctggtgccccccctgcccctcatcttccaggtgacccccctgagcggccggcagtgggtggtggtgctgcagatcagcctgcccgtcatcctgctggatgaggccctgaagtacctgagcaggaaccacatgcacgcctgcctgtacccaggcctgctgaggacagtgtcccaggcctggagccggcagcccctgaccacctcctggaccccagaccacacaggcctggccagcctgggccagggccacagcatcgtgtccctgtctgagctgctgcgggagggcggcagccgggaggagatgagccagaagtag

SEQ ID NO: 251330 - DNA, 3159 bp, Artificial Sequence
  derived and/or modified sequence
atggaggccgcccacctgctgcccgccgccgacgtgctgcggcactttagcgtgacggcagaaggcgggctcagtcccgcccaggtaacgggcgcccgggagcgttatgggcctaacgaactgccttcggaggagggaaaaagcctgtgggagctggttctcgagcagtttgaggacttactggtgaggatattactcctcgccgcgcttgtgtcctttgtcttagcttggttcgaagagggcgaggagacaacgacggcattcgtcgaacccctggttatcatgctcatccttgtagccaacgccattgtcggtgtttggcaggagagaaacgccgagagtgccattgaggctctgaaggagtacgagcctgagatgggcaaggtcataaggtcggatcgtaaaggagttcaacgtatccgggcacgcgacatagtcccaggcgatatcgtggaagtggccgtgggcgataaagtgcctgccgacttgagactgatcgagataaagagcacaacacttcgtgtagatcaatctatactgacaggcgaaagcgtatcagtgacgaaacacacagaggcaattccagaccccagagctgttaatcaggataagaagaacatgctattctccggcaccaatatcacgagcggcaaggcagtcggcgtggcggtggcaaccggcctgcacactgaactcggaaaaatcagatctcagatggccgctgtcgagcccgagcgaacgcccctgcagagaaaactggacgaatttggtcggcaactatctcacgccatcagtgtgatatgtgtcgcggtttgggtgataaacatcggacactttgctgatcccgcccacggtgggtcctggctgcggggagctgtctactatttcaagatcgcggtggccctggcagtagccgcaatccccgaaggattgcccgccgtgataactacttgcctggccctaggaactcggcgcatggctagaaagaatgcaatagtcagaagtctcccatccgtggagaccctgggctgcacctccgtcatatgctctgataagaccggaacattgaccaccaaccagatgtcagtgtgtaggatgtttgtcgtggccgaggctgatgccggaagctgtttgctgcacgaatttactatttccgggactacttacacccctgagggggaagtcaggcagggggaccagccagtgcggtgcggacagtttgacggattggtggagctggctactatctgtgcgttatgtaatgactcagccctggactataatgaagctaaaggggtttacgaaaaggttggtgaagccacggagacagcgttaacttgcctggtcgagaagatgaatgtattcgataccgatctgcaggctttatctagggtggaacgagctggcgcctgcaatacagttatcaagcagctgatgaggaaggagtttacccttgagttttctcgggatcgcaagtcaatgtccgtgtactgcacaccaacaaggcctcatcctaccggtcagggtagcaagatgttcgttaagggcgcccccgagtcagtcattgagcgctgttcgtcagtgcgggtgggatcgaggactgcccccctcacccccacaagtagggagcagatactcgctaaaatcagagattgggggtcgggatctgataccctacgatgtttggctctggcaacccgggatgccccacctcggaaggaagatatggagttagatgattgttctaagttcgtgcagtacgagacagacctcaccttcgtcgggtgtgtaggaatgctcgatccacccagaccagaagtggcagcctgcatcacacgctgctatcaggccggaattcgcgtcgtcatgattaccggggacaataaggggacagcagtggccatctgcaggcgcctcggcattttcggggacaccgaggacgtcgcaggcaaagcctacacaggacgggagttcgatgatctgagcccagagcagcaaagacaggcctgccggacagcaagatgcttcgccagagttgaaccagcccacaaatcgcgcatagtggagaaccttcaaagcttcaatgagataacagcaatgacaggtgatggtgtgaacgacgccccggcactgaagaaagccgagattggtattgccatgggcagcgggacagccgtggccaagtcagcagcagagatggtgctttctgatgataacttcgccagcatagtcgctgcagttgaagagggacgggccatatattctaatatgaaacagtttattcgttacctgatctcctctaatgtgggggaagtcgtgtgcattttcctcacagccatacttggtctcccggaagctctgattccagtgcaactcctgtgggtgaacctcgtgactgacggtctgcctgcaactgctctcggcttcaaccctccagatttagacatcatggagaagctgccccggtcccctcgggaggctctcattagcggatggttattttttcgatatcttgccattggagtctatgtcggtttggccacagtcgccgccgccacctggtggtttgtgtatgacgcggagggtccccacataaacttctatcagctgagaaactttctgaaatgctccgaggataaccccttgtttgcaggcatagactgcgaggtattcgagagcagattccccactactatggccttgtcagtgctcgttacgatcgagatgtgtaacgcgctgaactccgtgtccgaaaatcagagtctgctgcggatgccgccctggatgaatccatggctgctcgtggctgttgccatgagtatggcccttcactttctgatactcctggtcccccccctgcctctgatattccaggtgactcccctttctggtaggcagtgggtggtggtgctgcaaatttcattaccagtgatcctgcttgatgaagcacttaagtacctgagccggaatcatatgcacgcctgtctgtatcccgggctcctgcgcaccgttagtcaggcttggtctcggcaacccctgaccacttcatggactccagatcacacagggctggcctccctcgggcaaggccattctatcgtctccttgagtgaattactccgcgaagggggctcgcgcgaggagatgtctcaaaagtag

SEQ ID NO: 251331 - DNA, 3159 bp, Artificial Sequence
  derived and/or modified sequence
atggaggctgcgcacttgcttcccgctgccgatgtgctgaggcacttttctgtgacagccgagggcggtctttcacctgcacaggtgacaggggcacgggaaagatacggccctaatgagcttccgtccgaggaagggaaatctttatgggagctggttttagagcagttcgaggatctgctggttaggattctgttgttagcggctttagtctctttcgtgcttgcatggttcgaggaaggtgaagagaccactacagccttcgtggaacctctggtgataatgctaattttagtcgctaatgctatcgtgggcgtatggcaagaacgaaacgccgagagtgccatcgaggccctaaaggaatacgagcctgagatggggaaggtcatcaggtctgacagaaaaggcgttcagagaattcgagcccgagatatcgtcccgggagacatcgtcgaggtagcggttggcgataaggtaccggcagacttgaggctcattgaaattaaaagcactacacttcgcgtcgaccaatctatcctgacaggagagtctgtttctgttaccaaacatactgaggcgattcctgatcccagggccgtaaaccaggacaagaagaacatgttgttcagcgggactaacatcaccagtgggaaggccgtaggcgttgccgtggccactggcctgcacaccgaactgggtaaaattaggtcccagatggccgcagttgaaccagaaagaacaccgctgcagaggaagctggacgagtttgggcgacagctctcccacgctatctcagtcatatgtgtggctgtttgggttataaacatcggccacttcgccgatcccgctcatgggggtagttggttgagaggggctgtgtattacttcaagatcgccgtggcactcgctgtggccgcaataccggaagggctgcccgcagttatcaccacttgcttagccctggggactagaagaatggcacggaagaacgcaattgttcggtcactgccaagtgtggagacgctgggatgcacaagtgtaatctgctcggacaagaccggcacgctgacaaccaaccagatgagtgtgtgtagaatgttcgttgtggcggaggccgacgccggatcctgcctgttacatgaatttaccatctccgggacaacatatacacctgaaggagaggtacgccaaggtgatcagccagttcggtgcggccaatttgacggtctcgtggaattggctacaatttgtgctctgtgtaacgattcagccctggactataatgaagcaaaaggtgtgtacgagaaggtcggggaggcaacagagaccgctttaacatgtctcgtggaaaagatgaacgtgttcgatacagatttacaggcgcttagtcgagtggaacgagctggcgcatgcaataccgtcataaagcaactgatgcgaaaggagttcaccctcgaattcagcagggatagaaagagcatgtctgtgtactgcactcctacccggcctcatcctacaggacagggatctaagatgtttgtcaaaggagcccctgagtcagtgatcgaacgatgcagtagtgtcagggttgggtccagaacggcacccttgacccctacctctcgagaacaaatactcgctaaaatcagagactggggttccggcagcgacaccctccgctgtcttgccctggccaccagggatgcccctcctagaaaggaagatatggagctggatgactgctccaagttcgtccagtacgaaacagacctcactttcgtggggtgtgtaggtatgctggacccaccacgcccagaagttgccgcatgtatcacaagatgctaccaagctgggattcgcgtagtgatgattaccggcgacaataaaggcacggctgtagcaatttgcaggagactaggcattttcggcgacaccgaagatgtggctggaaaggcctacaccgggagggagtttgatgacctatctcccgagcaacaaaggcaggcttgccgaaccgccaggtgcttcgctagggtagagcctgcccacaagtcacggatcgtggaaaacctccaatcctttaatgaaatcacggccatgactggggatggagtgaatgacgctcccgcactcaagaaagcggagataggcatcgcaatgggatccggcactgccgtggcgaagtctgccgctgagatggtcctgagtgacgataattttgcaagcattgtggccgcagtggaggagggaagggcgatctactcgaatatgaaacagtttattcgttacttaatctcctcaaatgtgggcgaggtggtctgcatttttctgacagccatcctagggttaccagaagcattgatcccagttcaactgctgtgggttaacctagtgacagacggcctgccagctaccgccctcggctttaatccgcctgacctggatatcatggagaaactgccgcgttccccccgagaggctctgatttctgggtggctgttcttcagatacctggccattggtgtttacgtcggtttagccaccgtcgcagccgctacatggtggtttgtctatgacgccgagggcccacatataaacttttatcagctacgaaactttctcaagtgctcagaagacaaccccctctttgctgggatcgattgtgaagtgtttgagtcgagattcccaaccacaatggctctgtccgttttagttacaattgaaatgtgtaacgcactcaactccgtgtcggagaaccagtccctgttgcgcatgccaccatggatgaatccgtggctgttggtcgccgtggctatgagtatggcgctccacttccttatcctgctagtgccaccactgccactcattttccaggtcacgcccttgtccggtcggcagtgggtggttgtgctgcagatttctctgcccgtcatcctcctggatgaggcacttaagtacctgagtcgtaatcacatgcacgcttgtctgtaccctggcctactccggactgtatcacaggcttggtcccggcaaccacttacaacctcctggactcctgatcacacaggtctggcaagcctgggtcaaggccatagcatcgtttccctttcagagctacttagagaagggggaagccgagaggaaatgtcccagaagtag

SEQ ID NO: 251332 - DNA, 4857 bp, Artificial Sequence
  derived and/or modified sequence
ccgccgccactgccgtcgggtaaggtcccagcacggacatggcctcgcgcggcgcccgcccgggcccgagtcccccgcgccccgctttgtagccccccggcggagaggcggcctcgacggtgcggacggcgcagacggccgggcgggcggcatggaggcggcgcatctgctcccggccgccgacgtgctgcgccacttctcggtgacagccgagggcggcctgagcccggcgcaggtgaccggcgcgcgggagcgctacggccccaacgagctcccgagtgaggaagggaagtccctgtgggagctggtgctggaacagtttgaggacctcctggtgcgcatcctgctgctggctgcccttgtctcctttgtcctggcctggttcgaggagggcgaggagaccacgaccgccttcgtggagcccctggtcatcatgctgatcctcgtggccaacgccattgtgggcgtgtggcaggaacgcaacgccgagagtgccatcgaggccctgaaggagtatgagcctgagatgggcaaggtgatccgctcggaccgcaagggcgtgcagaggatccgtgcccgggacatcgtcccaggggacattgtagaagtggcagtgggggacaaagtgcctgctgacctccgcctcatcgagatcaagtccaccacgctgcgagtggaccagtccatcctgacgggtgaatctgtgtccgtgaccaagcacacagaggccatcccagaccccagagctgtgaaccaggacaagaagaacatgctgttttctggcaccaatatcacatcgggcaaagcggtgggtgtggccgtggccaccggcctgcacacggagctgggcaagatccggagccagatggcggcagtcgagcccgagcggacgccgctgcagcgcaagctggacgagtttggacggcagctgtcccacgccatctctgtgatctgcgtggccgtgtgggtcatcaacatcggccacttcgccgacccggcccacggtggctcctggctgcgtggcgctgtctactacttcaagatcgccgtggccctggcggtggcggccatccccgagggcctcccggctgtcatcactacatgcctggcactgggcacgcggcgcatggcacgcaagaacgccatcgtgcgaagcctgccgtccgtggagaccctgggctgcacctcagtcatctgctccgacaagacgggcacgctcaccaccaatcagatgtctgtctgccggatgttcgtggtagccgaggccgatgcgggctcctgccttttgcacgagttcaccatctcgggtaccacgtatacccccgagggcgaagtgcggcagggggatcagcctgtgcgctgcggccagttcgacgggctggtggagctggcgaccatctgcgccctgtgcaacgactcggctctggactacaacgaggccaagggtgtgtatgagaaggtgggagaggccacggagacagctctgacttgcctggtggagaagatgaacgtgttcgacaccgacctgcaggctctgtcccgggtggagcgagctggcgcctgtaacacggtcatcaagcagctgatgcggaaggagttcaccctggagttctcccgagaccggaaatccatgtccgtgtactgcacgcccacccgccctcaccctactggccagggcagcaagatgtttgtgaagggggctcctgagagtgtgatcgagcgctgtagctcagtccgcgtggggagccgcacagcacccctgacccccacctccagggagcagatcctggcaaagatccgggattggggctcaggctcagacacgctgcgctgcctggcactggccacccgggacgcgcccccaaggaaggaggacatggagctggacgactgcagcaagtttgtgcagtacgagacggacctgaccttcgtgggctgcgtaggcatgctggacccgccgcgacctgaggtggctgcctgcatcacacgctgctaccaggcgggcatccgcgtggtcatgatcacgggggataacaaaggcactgccgtggccatctgccgcaggcttggcatctttggggacacggaagacgtggcgggcaaggcctacacgggccgcgagtttgatgacctcagccccgagcagcagcgccaggcctgccgcaccgcccgctgcttcgcccgcgtggagcccgcacacaagtcccgcatcgtggagaacctgcagtcctttaacgagatcactgctatgactggcgatggagtgaacgacgcaccagccctgaagaaagcagagatcggcatcgccatgggctcaggcacggccgtggccaagtcggcggcagagatggtgctgtcagatgacaactttgcctccatcgtggctgcggtggaggagggccgggccatctacagcaacatgaagcaattcatccgctacctcatctcctccaatgttggcgaggtcgtctgcatcttcctcacggcaattctgggcctgcccgaagccctgatccctgtgcagctgctctgggtgaacctggtgacagacggcctacctgccacggctctgggcttcaacccgccagacctggacatcatggagaagctgccccggagcccccgagaagccctcatcagtggctggctcttcttccgatacctggctatcggagtgtacgtaggcctggccacagtggctgccgccacctggtggtttgtgtatgacgccgagggacctcacatcaacttctaccagctgaggaacttcctgaagtgctccgaagacaacccgctctttgccggcatcgactgtgaggtgttcgagtcacgcttccccaccaccatggccttgtccgtgctcgtgaccattgaaatgtgcaatgccctcaacagcgtctcggagaaccagtcgctgctgcggatgccgccctggatgaacccctggctgctggtggctgtggccatgtccatggccctgcacttcctcatcctgctcgtgccgcccctgcctctcattttccaggtgaccccactgagcgggcgccagtgggtggtggtgctccagatatctctgcctgtcatcctgctggatgaggccctcaagtacctgtcccggaaccacatgcacgcctgtctttatccaggccttctcaggacagtctcgcaggcctggagtaggcagccgctgaccacctcttggaccccagaccacaccgggttggcctctttgggccagggacacagcatcgtctcgctgtcagagctgctcagagagggaggaagcagggaagaaatgagccagaagtgagcgctgggaacagagtggagtctccggtgtgtacctcagactgatggtgcccatgtgttcgcctccgccccccacccttgccaccacactcgcccacttgcccaccgggtcccgccggataaatgacaggcccgaggtcagaatggccatccccgggccccgtcctggggtctctgtccccacttccttctggcctgggaggtctgtaattcctgtctcctggactctcctgggaagttccctgctctgcagctctggcccaggagctgcaggctgggagggggcagccaagaagccggagctggcagcatacccagagatccggggcccccccacccccaaatcacgagtgcagctggagcttgctcccccttgttcggaagctggacgttcacttggtgactggtgcctctgcactgacggaggactctgggggtccttcttaccggctctgacctctctcttcgtgcctggtctgggactgggtcagccctgggggatcagaaggggccatctgggcccagctgtgtacagcgagggtgggcagccccctccactccactctgcttccacaaagtcggctcccgagagctcgaggctgcttctgtttatatgtgcagggcccgggcgggtgaagggtcagagagacggacacaaggagccggcaggagggcggagcgaggatgtcctttcccgggagacaagtcgggaaagcctggctggactgcctcagccccgcgcgcctcctggactcagggttccccgtcctgagctcgggagatgttcagagtcacactgccgcccggtctgccacgcagaggtccaacttgccacccgcgtccctggtacctgagaccaccgacatcctcaggttcctgaccgtggcgcccttctacccagcccagtgtgcggccgccgcgctgtctgcacagctgggggcctctgagcctggtgggcttcctggactcttggcctcactccttgccccctccccacgacacccatgagccgaaaggatgtcactaaggatggctgattccccaagggcacccgctctccctccctccctgctggaggaacacgtcatatcagatgagaggaagatggcctctgatggacagaatttttctcttaactcagcttttgctactttggcaaaaactagcgaggggtagcagaaacctgcaccaaggattgtccctatgtcttggccactcctagagcgtgtgcagactgatgattttatatgtaaatcaagactcacatccctttcctagtcccccacatccaaagcccctcagcctgccttgcagaccaatgggctccatgttctgtagccccctcccctacgcctcacccctcctccctctcacaggttctgggcggccagtgagagaaacgcagtgggggaggcagggagtctggtgcctgcagagattctctgcttctttcctggggggaggtggggaggtcttagcaggagcgggccctgtacccacctgctgacctgctgtttggtagagaaataaaggttgtgtgactggggg

SEQ ID NO: 251333 - DNA, 3159 bp, Artificial Sequence
  derived and/or modified sequence
atggaggccgcccacctgctgcccgccgccgacgtgctgagacacttcagcgtgaccgccgagggcggcctgagccccgcccaggtgaccggcgccagagagagatacggccccaacgagctgcccagcgaggagggcaagagcctgtgggagctggtgctggagcagttcgaggacctgctggtgagaatcctgctgctggccgccctggtgagcttcgtgctggcctggttcgaggagggcgaggagaccaccaccgccttcgtggagcccctggtgatcatgctgatcctggtggccaacgccatcgtgggcgtgtggcaggagagaaacgccgagagcgccatcgaggccctgaaggagtacgagcccgagatgggcaaggtgatcagaagcgacagaaagggcgtgcagagaatcagagccagagacatcgtgcccggcgacatcgtggaggtggccgtgggcgacaaggtgcccgccgacctgagactgatcgagatcaagagcaccaccctgagagtggaccagagcatcctgaccggcgagagcgtgagcgtgaccaagcacaccgaggccatccccgaccccagagccgtgaaccaggacaagaagaacatgctgttcagcggcaccaacatcaccagcggcaaggccgtgggcgtggccgtggccaccggcctgcacaccgagctgggcaagatcagaagccagatggccgccgtggagcccgagagaacccccctgcagagaaagctggacgagttcggcagacagctgagccacgccatcagcgtgatctgcgtggccgtgtgggtgatcaacatcggccacttcgccgaccccgcccacggcggcagctggctgagaggcgccgtgtactacttcaagatcgccgtggccctggccgtggccgccatccccgagggcctgcccgccgtgatcaccacctgcctggccctgggcaccagaagaatggccagaaagaacgccatcgtgagaagcctgcccagcgtggagaccctgggctgcaccagcgtgatctgcagcgacaagaccggcaccctgaccaccaaccagatgagcgtgtgcagaatgttcgtggtggccgaggccgacgccggcagctgcctgctgcacgagttcaccatcagcggcaccacctacacccccgagggcgaggtgagacagggcgaccagcccgtgagatgcggccagttcgacggcctggtggagctggccaccatctgcgccctgtgcaacgacagcgccctggactacaacgaggccaagggcgtgtacgagaaggtgggcgaggccaccgagaccgccctgacctgcctggtggagaagatgaacgtgttcgacaccgacctgcaggccctgagcagagtggagagagccggcgcctgcaacaccgtgatcaagcagctgatgagaaaggagttcaccctggagttcagcagagacagaaagagcatgagcgtgtactgcacccccaccagaccccaccccaccggccagggcagcaagatgttcgtgaagggcgcccccgagagcgtgatcgagagatgcagcagcgtgagagtgggcagcagaaccgcccccctgacccccaccagcagagagcagatcctggccaagatcagagactggggcagcggcagcgacaccctgagatgcctggccctggccaccagagacgccccccccagaaaggaggacatggagctggacgactgcagcaagttcgtgcagtacgagaccgacctgaccttcgtgggctgcgtgggcatgctggacccccccagacccgaggtggccgcctgcatcaccagatgctaccaggccggcatcagagtggtgatgatcaccggcgacaacaagggcaccgccgtggccatctgcagaagactgggcatcttcggcgacaccgaggacgtggccggcaaggcctacaccggcagagagttcgacgacctgagccccgagcagcagagacaggcctgcagaaccgccagatgcttcgccagagtggagcccgcccacaagagcagaatcgtggagaacctgcagagcttcaacgagatcaccgccatgaccggcgacggcgtgaacgacgcccccgccctgaagaaggccgagatcggcatcgccatgggcagcggcaccgccgtggccaagagcgccgccgagatggtgctgagcgacgacaacttcgccagcatcgtggccgccgtggaggagggcagagccatctacagcaacatgaagcagttcatcagatacctgatcagcagcaacgtgggcgaggtggtgtgcatcttcctgaccgccatcctgggcctgcccgaggccctgatccccgtgcagctgctgtgggtgaacctggtgaccgacggcctgcccgccaccgccctgggcttcaacccccccgacctggacatcatggagaagctgcccagaagccccagagaggccctgatcagcggctggctgttcttcagatacctggccatcggcgtgtacgtgggcctggccaccgtggccgccgccacctggtggttcgtgtacgacgccgagggcccccacatcaacttctaccagctgagaaacttcctgaagtgcagcgaggacaaccccctgttcgccggcatcgactgcgaggtgttcgagagcagattccccaccaccatggccctgagcgtgctggtgaccatcgagatgtgcaacgccctgaacagcgtgagcgagaaccagagcctgctgagaatgcccccctggatgaacccctggctgctggtggccgtggccatgagcatggccctgcacttcctgatcctgctggtgccccccctgcccctgatcttccaggtgacccccctgagcggcagacagtgggtggtggtgctgcagatcagcctgcccgtgatcctgctggacgaggccctgaagtacctgagcagaaaccacatgcacgcctgcctgtaccccggcctgctgagaaccgtgagccaggcctggagcagacagcccctgaccaccagctggacccccgaccacaccggcctggccagcctgggccagggccacagcatcgtgagcctgagcgagctgctgagagagggcggcagcagagaggagatgagccagaagtag

SEQ ID NO: 251334 - protein, 1043 aa, Artificial Sequence
  derived and/or modified sequence
MEAAHLLPAADVLRHFSVTAEGGLSPAQVTGARERYGPNELPSEEGKSLWELVLEQFEDLLVRILLLAALVSFVLAWFEEGEETTTAFVEPLVIMLILVANAIVGVWQERNAESAIEALKEYEPEMGKVIRSDRKGVQRIRARDIVPGDIVEVAVGDKVPADLRLIEIKSTTLRVDQSILTGESVSVTKHTEAIPDPRAVNQDKKNMLFSGTNITSGKAVGVAVATGLHTELGKIRSQMAAVEPERTPLQRKLDEFGRQLSHAISVICVAVWVINIGHFADPAHGGSWLRGAVYYFKIAVALAVAAIPEGLPAVITTCLALGTRRMARKNAIVRSLPSVETLGCTSVICSDKTGTLTTNQMSVCRMFVVAEADAGSCLLHEFTISGTTYTPEGEVRQGDQPVRCGQFDGLVELATICALCNDSALDYNEAKGVYEKVGEATETALTCLVEKMNVFDTDLQALSRVERAGACNTVIKQLMRKEFTLEFSRDRKSMSVYCTPTRPHPTGQGSKMFVKGAPESVIERCSSVRVGSRTAPLTPTSREQILAKIRDWGSGSDTLRCLALATRDAPPRKEDMELDDCSKFVQYETDLTFVGCVGMLDPPRPEVAACITRCYQAGIRVVMITGDNKGTAVAICRRLGIFGDTEDVAGKAYTGREFDDLSPEQQRQACRTARCFARVEPAHKSRIVENLQSFNEITAMTGDGVNDAPALKKAEIGIAMGSGTAVAKSAAEMVLSDDNFASIVAAVEEGRAIYSNMKQFIRYLISSNVGEVVCIFLTAILGLPEALIPVQLLWVNLVTDGLPATALGFNPPDLDIMEKLPRSPREALISGWLFFRYLAIGVYVGLATVAAATWWFVYDAEGPHINFYQLRNFLKCSEDNPLFAGIDCEVFESRFPTTMALSVLVTIEMCNALNSVSENQSLLRMPPWMNPWLLVAVAMSMALHFLILLVPPLPLIFQVTPLSGRQWVVVLQISLPVILLDEALKYLSRNHMHACLYPGLLRTVSQAWSRQPLTTSWTPDHTGRNEPEVSAGNRVESPVCTSD

SEQ ID NO: 251335 - DNA, 3132 bp, Artificial Sequence
  derived and/or modified sequence
atggaggccgctcacctgcttcctgccgccgacgtgctccgacatttcagcgtgaccgccgaaggaggtctcagtcccgctcaggtcacaggcgcgcgggagagatatgggcccaacgaactgccaagcgaggagggtaagtccctctgggagcttgtgctcgagcagtttgaagacctcctggtgaggatccttcttctggcagccctggtgtctttcgtcctcgcctggttcgaagaaggcgaggagaccaccaccgccttcgtagagccacttgtgattatgctaattctcgttgcaaacgccattgtcggggtgtggcaggagagaaacgctgagagcgcaatcgaagctctaaaagagtatgagcccgaaatgggcaaggtgatcaggtccgaccgaaaaggtgtccagcggattagagccagagatatcgtcccaggagatatagtggaggtggccgtgggtgataaagtccccgcagacctccgattgatagaaatcaaatcaacgaccctgcgggtggaccagtctattctgaccggcgaatcagtgtcagtaactaaacatactgaagccattccggacccacgggctgtcaatcaagataagaaaaatatgctattcagtggcacaaatataacaagtggcaaagctgttggtgtcgccgtagcgacaggcctccataccgaacttggtaagattagaagccagatggccgctgtagagcccgaacgcaccccccttcagcgcaaattggatgaatttgggagacagttatctcatgcgatctccgtcatctgtgtagcagtctgggtcatcaatatcggccacttcgcagatccagcacatggggggtcctggctacgtggggctgtgtactactttaaaatcgccgtggcccttgctgtggccgctatccccgaaggactcccggcagtcataaccacgtgtctcgccctcggtacgcggcggatggccagaaagaatgctatcgtcagaagcctgccgtcagtggaaacattgggctgtacttccgtgatctgttccgataagactggaacattgacgacaaaccaaatgagcgtgtgccgaatgttcgtagtggccgaggctgatgcaggatcatgtctgttgcatgagttcaccatcagtgggaccacttacacccccgagggagaagtccgccagggcgatcagccagtgaggtgtggacagttcgacgggctggtggagctcgccactatctgcgcattgtgtaacgactcagccttagattataacgaagctaaaggcgtttacgagaaagtaggcgaagccacagaaacggcattgacgtgcctggttgaaaagatgaacgtcttcgacactgacctccaggcattgagcagggtcgagcgtgccggagcctgcaacaccgtgatcaagcagttgatgagaaaagaattcactctggagttcagcagggatcgaaaatcaatgtctgtctattgcaccccaacacgtccacatccaacaggacagggcagcaagatgttcgtcaagggggcgccagaatcagtaattgaacgctgctcttctgtgcgggtcgggtcgcggacggcaccgcttacccccacatctagggaacaaatcctagccaagatcagagactggggctccgggtccgacaccctgcggtgcctagctcttgccactcgggatgctccacccaggaaggaggatatggagctggatgactgctcaaagttcgtgcagtacgaaacagacttaacgttcgtgggctgtgtggggatgctggatcctccacgccctgaggtggctgcctgcattaccaggtgctatcaggccggaatcagagtggtgatgatcaccggagacaataagggaacagccgtggcaatatgcaggagactgggtatcttcggagacacagaggacgtcgccgggaaggcttacacaggcagagaattcgatgacttatccccagagcagcagcgtcaggcgtgtagaaccgccagatgttttgctcgggtcgaacccgcccataagagtagaatcgtcgagaaccttcagagtttcaatgaaattactgcgatgaccggcgatggcgtaaacgacgccccagcactaaaaaaagcggagatcggtatcgcaatgggatccggaacagctgttgcaaaaagcgccgctgagatggtgctgagcgacgacaactttgcttccatcgtggccgcagtggaggagggccgtgctatttacagcaacatgaagcagttcattcgctatcttataagttctaatgttggtgaggttgtatgtattttccttactgctatccttgggctgcctgaggctctcataccggtgcaacttctctgggtgaacctagtcactgatggactgccagcaaccgctctcgggttcaacccacctgatttggacatcatggaaaaactgcctcggtcaccccgggaggccttgatttcaggctggctgttttttcgttacctggcaattggtgtgtacgttggccttgccaccgtggccgctgcaacctggtggttcgtctacgacgcagaggggccccacatcaatttctaccaactgcgcaactttctgaaatgttctgaagataatcctctgttcgcaggcattgattgcgaagtgttcgaatcccgcttcccaaccacaatggccttgtcagtgctggttaccattgagatgtgcaatgccctcaactcggtgtccgaaaatcagagcttgctccgtatgcctccatggatgaacccgtggctgttggtcgcagttgctatgtctatggcattacacttcctgatcttgctggtgccccccctgccactaatcttccaagtcacacccctgagcggaagacaatgggtagtcgtcttacagatatctctcccggtgatcctgctagatgaggccctcaagtacctgtctcgtaaccacatgcacgcatgcctttacccggggttgctccgcactgtgagtcaggcctggtcacgccagccattaacgacttcctggacccctgatcacacaggacgcaatgaacccgaggtcagcgccggtaatagagttgaatctccagtgtgcacgtctgactag

SEQ ID NO: 251336 - DNA, 3132 bp, Artificial Sequence
  derived and/or modified sequence
atggaggccgcccacctgctgcctgctgctgatgtgctgcggcacttctctgtgacagctgagggcggcctgagccctgcccaggtgactggagcccgggagagatatggccccaatgagctgcccagcgaggagggcaagagcctgtgggagctggtgctggagcagtttgaggacctgctggtgcgcatcctgctgctggccgccctggtgtcctttgtgctggcctggtttgaggagggggaggagaccaccacagcctttgtggagcccctggtgatcatgctgatcctggtggccaatgccatcgtgggcgtgtggcaggagagaaatgctgagagcgccatcgaggccctgaaggagtatgagcctgagatgggcaaggtgatccgcagtgacagaaaaggagtgcagaggatccgggcccgggacatcgtgcctggggacatcgtggaggtggccgtgggggacaaggtgcctgctgacctgcggctcatcgagatcaagagcaccaccctgcgggtggaccagagcatcctgactggagagagcgtgtctgtgaccaagcacacagaggccatcccagaccccagggctgtgaaccaggacaagaagaacatgctgttcagcggcaccaacatcaccagcggcaaggctgtgggcgtggccgtggccaccggcctgcacacagagctgggcaagatccgcagccagatggctgctgtggagcctgagaggacccccctgcagaggaagctggatgaatttggccggcagctgagccacgccatcagcgtcatctgtgtggccgtgtgggtgatcaacatcggccactttgctgaccctgcccacggcggctcctggctgcggggagctgtgtactacttcaagattgctgtggccctggccgtggccgccatccctgagggcctgcctgctgtgatcaccacctgcctggccctgggcaccaggaggatggccaggaagaatgccatcgtgcgcagcctgcccagcgtggagaccctgggctgcaccagcgtcatctgcagcgacaagacaggcaccctgaccaccaaccagatgtctgtgtgcaggatgtttgtggtggccgaggctgatgctggcagctgcctgctgcacgagttcaccatcagcggcaccacctacaccccagagggggaggtgcggcagggcgaccagcctgtgcgctgtggccagtttgatggcctggtggagctggccaccatctgtgccctgtgcaatgattctgccctggactacaatgaggccaagggcgtgtatgagaaggtgggggaggccacagaaacagccctgacctgcctggtggagaagatgaatgtgtttgacacagacctgcaggccctgagccgggtggagcgggccggggcctgcaacacagtcatcaagcagctgatgaggaaggagttcaccctggagttcagccgggacaggaagtccatgtctgtgtactgcacccccacccggccccaccccaccggccagggcagcaagatgtttgtgaagggggcccctgagagcgtcatcgagcgctgcagctctgtgcgggtgggcagcaggacagcccccctgacccccaccagccgggagcagatcctggccaagatccgggactggggcagcggcagtgacaccctgcgctgcctggccctggccaccagagatgccccacccaggaaggaggacatggagctggatgactgcagcaagtttgtgcagtatgaaacagacctgacctttgtgggctgtgtgggcatgctggacccccccaggcctgaggtggccgcctgcatcacccgctgctaccaggccggcatccgggtggtgatgatcactggagacaacaagggcacagctgtggccatctgccggcggctgggcatctttggagacacagaagatgtggccggcaaggcctacacaggccgggagtttgatgacctgagccctgagcagcagaggcaggcctgcaggacagcccgctgctttgcccgggtggagcccgcccacaagagcagaattgtggagaacctgcagagcttcaatgagatcacagccatgactggagatggagtgaatgatgccccagccctgaagaaggccgagatcggcatcgccatgggcagcggcacagctgtggccaagtctgctgctgagatggtgctgagtgatgacaactttgccagcatcgtggccgctgtggaggagggccgggccatctacagcaacatgaagcagttcatccgctacctgatcagcagcaatgtgggggaggtggtgtgcatcttcctgacagccatcctgggcctgcctgaggccctgatccctgtgcagctgctgtgggtgaacctggtgacagatggcctgcctgccacagccctgggcttcaaccccccagacctggacatcatggagaagctgcccaggagcccccgggaggccctgatcagcggctggctgttcttccgctacctggccatcggcgtgtatgtgggcctggccaccgtggccgccgccacctggtggtttgtgtatgatgctgagggcccccacatcaacttctaccagctgaggaacttcctgaagtgcagcgaggacaaccccctgtttgctggcatcgactgtgaggtgtttgagagccgcttccccaccaccatggccctgtctgtgctggtgaccatcgagatgtgcaatgccctgaacagcgtgtctgagaaccagagcctgctgaggatgccaccctggatgaacccctggctgctggtggccgtggccatgtccatggccctgcacttcctgatcctgctggtgccccccctgcccctcatcttccaggtgacccccctgagcggccggcagtgggtggtggtgctgcagatcagcctgcccgtcatcctgctggatgaggccctgaagtacctgagcaggaaccacatgcacgcctgcctgtacccaggcctgctgaggacagtgtcccaggcctggagccggcagcccctgaccacctcctggaccccagaccacactggaagaaatgaacctgaggtgtctgctggcaacagagtggagagccctgtgtgcaccagtgactag

SEQ ID NO: 251337 - DNA, 3132 bp, Artificial Sequence
  derived and/or modified sequence
atggaggccgcccacctgctgcccgccgccgacgtgctgcggcacttctcagtgaccgcggaaggaggtcttagccctgcgcaggtgaccggggcacgagaaagatatgggcctaacgaactgccatcagaggaaggaaaaagcctgtgggagctggttctggagcaatttgaggacctgctggtgagaatcctgctgttggccgctcttgtgagctttgtgctcgcttggtttgaagagggcgaggaaacaacaacggccttcgtcgagcctctcgtcataatgttaattctggttgcaaatgcaattgttggcgtatggcaagagagaaatgccgaaagcgccatcgaagctctcaaagaatacgagccagagatgggtaaagtgattagaagtgacagaaagggtgttcagcgaattcgcgcgcgggacattgtgccgggagacatcgttgaggtcgccgttggagacaaagttcctgccgacctgcgcttaatcgaaataaagtcgactaccctgagggtggatcaaagcattctcaccggcgagtctgtgagcgtgactaaacatactgaggcaattcccgacccgcgggccgtgaatcaggacaagaagaatatgctcttcagtggcacgaacattacttccggcaaggccgtgggagtagccgttgcgaccggactgcatacggaactggggaaaatcaggagccagatggcagccgtggaaccagagcgcacccccctccagaggaagctggacgaattcggccggcagctctctcacgcaatttcggtcatttgcgtggcagtttgggttattaatatcggccactttgctgaccccgctcacgggggatcctggctgcggggggccgtgtactatttcaaaatcgccgtggcccttgctgtcgccgcgattcccgagggtctccctgcagtgattactacatgcctggccctgggcacgcgccgcatggccagaaagaacgccatcgtcagatctcttccgtccgtagagacactgggatgtacctcagttatttgttctgacaaaaccggtacactgacaacaaaccagatgtcagtgtgccgaatgttcgtggtggctgaggcagatgccggttcctgcctgcttcacgagtttactatcagcggtaccacatacacacccgagggggaggtgcgacaaggagatcagcccgtacggtgcggtcagtttgacggcctcgtggaactggctaccatttgcgctctgtgcaacgacagtgcccttgattacaatgaggcaaaaggagtttacgagaaagtgggtgaagctaccgagactgcactgacatgcctagtggagaaaatgaacgtgttcgatactgacttacaggccctgtcacgggtggagcgtgccggggcctgtaacaccgtaattaaacagctgatgaggaaggaattcacgcttgaattctctagagaccggaagtctatgtcagtatattgcactcccacgcgacctcaccccactggtcagggctcgaagatgtttgtaaagggggctcccgaaagcgtcatcgaacggtgcagttccgtgcgcgttggcagtagaaccgcccctctgactcccacgtcccgcgaacagatactggccaaaattcgggattggggatctggctccgacactcttcgatgtctggcgttggccacacgtgatgcccctccaagaaaggaagacatggagttggatgattgttccaaattcgttcaatacgagacagatctgaccttcgtgggctgcgtgggaatgctggacccccctagacccgaggtagccgcctgcattacacgctgttaccaagccgggatcagggtggtgatgatcacgggggataacaagggaactgctgttgcgatttgtcggaggctgggaattttcggggatactgaggatgtggccggtaaagcatataccgggcgggagtttgacgatctgtctccagagcagcaacgacaggcttgccgaactgcccggtgtttcgcacgagtggaaccagctcacaagagcagaatcgtagaaaatctgcagagctttaacgagattaccgcaatgactggcgatggtgtcaatgatgcacctgcgctgaagaaggcggaaatcggcatcgcaatgggcagcggaacagccgttgctaaaagcgctgcagaaatggtcctgtctgacgataacttcgcttccatcgtggccgcggtggaggagggcagagccatctacagcaatatgaaacagtttattaggtatctaatttcatctaatgttggggaggttgtatgcattttccttacggccatccttggcctgccagaggctctgattccagtacaactcctgtgggtgaacctggtgacagacggcctgcctgcaactgccttggggtttaatccgcccgacctggatattatggagaaactgccccgttcaccccgcgaagcattgatttccggatggctgttctttcgctatctcgccatcggcgtctatgtcgggctcgctacagtggcagctgcgacttggtggttcgtctacgatgctgagggacctcacataaatttttaccagttgcggaatttcttaaaatgtagtgaggataatccattgtttgccggtattgactgcgaggtgttcgagagcagattcccaaccactatggcactcagcgtcctcgtcacgattgaaatgtgcaatgctctgaactccgtgtccgaaaaccagagccttcttcgcatgcccccttggatgaacccctggttgctggtcgccgtggctatgagcatggctctgcactttctaatccttttagtaccacctctccctcttatctttcaggttacgcccttgtctggtcggcaatgggttgtggtgctgcagatttctctgcccgtaatcttactcgacgaggccctgaaatacctctctagaaaccacatgcatgcttgtttgtatccggggctgctaagaacagtatctcaggcttggagccgtcaacctctgaccacaagctggactccggaccacacagggcgcaacgagcccgaagtgtctgctggaaatcgcgtagagtcaccagtatgtacatcggactag

SEQ ID NO: 251338 - DNA, 3132 bp, Artificial Sequence
  derived and/or modified sequence
atggaagctgctcaccttctgcctgcggctgatgtcttgcggcacttcagtgtgaccgcagaggggggtttgagtcctgctcaggtgactggcgcacgtgaaagatacggtcccaacgaactccctagtgaagagggcaaaagtctatgggagcttgtgctcgaacaattcgaagacctattggttcgcattctgttgttggccgcactcgtgtcatttgtgctcgcctggttcgaggagggggaggagacaacaactgcgttcgtggagcctctggtaatcatgctaattcttgtggccaacgctatagtgggagtgtggcaagaaagaaacgccgagagtgcgatagaggcactgaaggaatacgagcctgaaatgggcaaagtcatccggtccgaccgcaaaggggtgcaacggattcgggctagagacatcgtccctggcgacatcgtggaagtcgccgtaggggataaagtgccggcagacctccgcctgatagaaataaagagcactacactgagagttgatcaatcaatactcaccggagaaagtgtgagcgtgaccaaacacacagaggccattcccgaccctcgtgccgtcaatcaggataaaaaaaacatgctcttcagcggcactaatatcacgagtgggaaagccgtgggagtagccgtggcaacaggactgcacacagaactgggtaaaatacgcagccagatggctgccgtggaaccggaacggacccccctgcagaggaagctggatgagtttgggcgtcaactgagtcatgcaatcagcgttatttgtgttgcagtgtgggttattaacattgggcatttcgccgatcccgctcatggaggttcatggttgaggggcgctgtatactatttcaaaattgccgtcgctcttgcggtcgccgcaattccagaaggactccccgctgtgattactacatgcctggcgcttggcacccggaggatggcgaggaaaaacgctatcgttcggtcattgcctagtgtcgagacacttggctgtacatcagtgatttgttcagacaagacaggcacgctaaccaccaatcagatgagtgtctgtaggatgtttgtggtcgcggaggccgacgctggtagctgcctgctgcacgagttcaccatcagtgggacgacctataccccagaaggagaagtgaggcagggagatcagccagtgagatgcgggcagttcgacggcctggtggagctcgccactatatgcgcactctgcaacgactcagcattggattataatgaggccaaaggggtgtatgagaaggtcggcgaggcaaccgagacagcactgacgtgccttgtcgaaaaaatgaatgtatttgacaccgacctgcaggccctaagccgagtggaaagagccggagcctgcaacaccgtgattaagcagcttatgcgcaaggaatttaccctggagttcagcagagaccgcaagagcatgtccgtgtactgtacaccaacaaggcctcatcccacgggacaaggctccaaaatgtttgtaaagggtgcaccggaaagcgtcattgaaaggtgctcaagcgttcgcgtcggtagtcgtacagccccattgaccccaacaagccgagaacagattctagccaaaattcgcgactggggctccggcagcgacacattaagatgtcttgccttagctacaagagatgcaccgccaagaaaagaagatatggaattggacgactgttccaaatttgtgcaatacgaaaccgatttaacatttgtcggatgcgtgggaatgctggatccacctcgtcctgaggtcgccgcttgtatcacacggtgctaccaggctggcatccgtgtggtaatgattacaggcgacaacaaaggtacagcagtcgcaatttgcaggcgcttaggaatttttggagataccgaggacgtggcgggaaaagcctatacgggtcgagagtttgacgatctgagccctgagcaacagcgacaggcctgtagaacagccagatgttttgctcgtgtggagccggctcataaaagccgtatagtggagaaccttcagagctttaatgaaataacggcgatgaccggagacggagttaatgatgccccagccttgaagaaagctgagatagggatcgctatgggctctggcacagccgtcgccaaatccgccgctgaaatggtgctctcagacgacaactttgcatccattgtggctgctgtcgaggaagggagggcaatctactccaacatgaaacagttcattcgctaccttatttcatccaatgtcggagaagtggtgtgtattttcctgacagcaatactgggacttccagaggcattgatccctgtacagctcctgtgggtcaatttggtgaccgacggtctacccgctactgccctggggttcaacccccctgacctggacattatggaaaaattgcccagaagtcccagggaggcgcttataagtggatggctgtttttccgataccttgcaataggagtgtatgtcgggcttgccacagtcgccgctgcaacctggtggtttgtgtacgatgccgagggcccacacatcaatttttaccagctgagaaatttcctcaagtgcagcgaggataaccctctattcgccggaatagactgcgaggtgttcgaaagcaggttccccacaactatggctctgtctgtgttggtaacaattgagatgtgtaatgccttaaactcagtatccgagaaccagtcattgcttagaatgcccccttggatgaatccttggctgctggtggctgttgcgatgtcaatggccctccacttcttgatcctgcttgtcccccctctcccgctgatctttcaggtgactcctctatccgggaggcagtgggtcgttgtactgcaaattagcctgccagtcatattgctggatgaggcactcaagtacctgtcccgcaatcacatgcatgcctgcctgtatcccggtttgctgcgcaccgtttcacaagcctggagtcgccaacctctgaccaccagctggacacctgaccatacaggacgaaacgaacctgaggtgtctgctggaaatcgggttgagtccccggtttgcacctcagactag

SEQ ID NO: 251339 - DNA, 4786 bp, Artificial Sequence
  derived and/or modified sequence
ccgccgccactgccgtcgggtaaggtcccagcacggacatggcctcgcgcggcgcccgcccgggcccgagtcccccgcgccccgctttgtagccccccggcggagaggcggcctcgacggtgcggacggcgcagacggccgggcgggcggcatggaggcggcgcatctgctcccggccgccgacgtgctgcgccacttctcggtgacagccgagggcggcctgagcccggcgcaggtgaccggcgcgcgggagcgctacggccccaacgagctcccgagtgaggaagggaagtccctgtgggagctggtgctggaacagtttgaggacctcctggtgcgcatcctgctgctggctgcccttgtctcctttgtcctggcctggttcgaggagggcgaggagaccacgaccgccttcgtggagcccctggtcatcatgctgatcctcgtggccaacgccattgtgggcgtgtggcaggaacgcaacgccgagagtgccatcgaggccctgaaggagtatgagcctgagatgggcaaggtgatccgctcggaccgcaagggcgtgcagaggatccgtgcccgggacatcgtcccaggggacattgtagaagtggcagtgggggacaaagtgcctgctgacctccgcctcatcgagatcaagtccaccacgctgcgagtggaccagtccatcctgacgggtgaatctgtgtccgtgaccaagcacacagaggccatcccagaccccagagctgtgaaccaggacaagaagaacatgctgttttctggcaccaatatcacatcgggcaaagcggtgggtgtggccgtggccaccggcctgcacacggagctgggcaagatccggagccagatggcggcagtcgagcccgagcggacgccgctgcagcgcaagctggacgagtttggacggcagctgtcccacgccatctctgtgatctgcgtggccgtgtgggtcatcaacatcggccacttcgccgacccggcccacggtggctcctggctgcgtggcgctgtctactacttcaagatcgccgtggccctggcggtggcggccatccccgagggcctcccggctgtcatcactacatgcctggcactgggcacgcggcgcatggcacgcaagaacgccatcgtgcgaagcctgccgtccgtggagaccctgggctgcacctcagtcatctgctccgacaagacgggcacgctcaccaccaatcagatgtctgtctgccggatgttcgtggtagccgaggccgatgcgggctcctgccttttgcacgagttcaccatctcgggtaccacgtatacccccgagggcgaagtgcggcagggggatcagcctgtgcgctgcggccagttcgacgggctggtggagctggcgaccatctgcgccctgtgcaacgactcggctctggactacaacgaggccaagggtgtgtatgagaaggtgggagaggccacggagacagctctgacttgcctggtggagaagatgaacgtgttcgacaccgacctgcaggctctgtcccgggtggagcgagctggcgcctgtaacacggtcatcaagcagctgatgcggaaggagttcaccctggagttctcccgagaccggaaatccatgtccgtgtactgcacgcccacccgccctcaccctactggccagggcagcaagatgtttgtgaagggggctcctgagagtgtgatcgagcgctgtagctcagtccgcgtggggagccgcacagcacccctgacccccacctccagggagcagatcctggcaaagatccgggattggggctcaggctcagacacgctgcgctgcctggcactggccacccgggacgcgcccccaaggaaggaggacatggagctggacgactgcagcaagtttgtgcagtacgagacggacctgaccttcgtgggctgcgtaggcatgctggacccgccgcgacctgaggtggctgcctgcatcacacgctgctaccaggcgggcatccgcgtggtcatgatcacgggggataacaaaggcactgccgtggccatctgccgcaggcttggcatctttggggacacggaagacgtggcgggcaaggcctacacgggccgcgagtttgatgacctcagccccgagcagcagcgccaggcctgccgcaccgcccgctgcttcgcccgcgtggagcccgcacacaagtcccgcatcgtggagaacctgcagtcctttaacgagatcactgctatgactggcgatggagtgaacgacgcaccagccctgaagaaagcagagatcggcatcgccatgggctcaggcacggccgtggccaagtcggcggcagagatggtgctgtcagatgacaactttgcctccatcgtggctgcggtggaggagggccgggccatctacagcaacatgaagcaattcatccgctacctcatctcctccaatgttggcgaggtcgtctgcatcttcctcacggcaattctgggcctgcccgaagccctgatccctgtgcagctgctctgggtgaacctggtgacagacggcctacctgccacggctctgggcttcaacccgccagacctggacatcatggagaagctgccccggagcccccgagaagccctcatcagtggctggctcttcttccgatacctggctatcggagtgtacgtaggcctggccacagtggctgccgccacctggtggtttgtgtatgacgccgagggacctcacatcaacttctaccagctgaggaacttcctgaagtgctccgaagacaacccgctctttgccggcatcgactgtgaggtgttcgagtcacgcttccccaccaccatggccttgtccgtgctcgtgaccattgaaatgtgcaatgccctcaacagcgtctcggagaaccagtcgctgctgcggatgccgccctggatgaacccctggctgctggtggctgtggccatgtccatggccctgcacttcctcatcctgctcgtgccgcccctgcctctcattttccaggtgaccccactgagcgggcgccagtgggtggtggtgctccagatatctctgcctgtcatcctgctggatgaggccctcaagtacctgtcccggaaccacatgcacgcctgtctttatccaggccttctcaggacagtctcgcaggcctggagtaggcagccgctgaccacctcttggaccccagaccacaccggaagaaatgagccagaagtgagcgctgggaacagagtggagtctccggtgtgtacctcagactgatggtgcccatgtgttcgcctccgccccccacccttgccaccacactcgcccacttgcccaccgggtcccgccggataaatgacaggcccgaggtcagaatggccatccccgggccccgtcctggggtctctgtccccacttccttctggcctgggaggtctgtaattcctgtctcctggactctcctgggaagttccctgctctgcagctctggcccaggagctgcaggctgggagggggcagccaagaagccggagctggcagcatacccagagatccggggcccccccacccccaaatcacgagtgcagctggagcttgctcccccttgttcggaagctggacgttcacttggtgactggtgcctctgcactgacggaggactctgggggtccttcttaccggctctgacctctctcttcgtgcctggtctgggactgggtcagccctgggggatcagaaggggccatctgggcccagctgtgtacagcgagggtgggcagccccctccactccactctgcttccacaaagtcggctcccgagagctcgaggctgcttctgtttatatgtgcagggcccgggcgggtgaagggtcagagagacggacacaaggagccggcaggagggcggagcgaggatgtcctttcccgggagacaagtcgggaaagcctggctggactgcctcagccccgcgcgcctcctggactcagggttccccgtcctgagctcgggagatgttcagagtcacactgccgcccggtctgccacgcagaggtccaacttgccacccgcgtccctggtacctgagaccaccgacatcctcaggttcctgaccgtggcgcccttctacccagcccagtgtgcggccgccgcgctgtctgcacagctgggggcctctgagcctggtgggcttcctggactcttggcctcactccttgccccctccccacgacacccatgagccgaaaggatgtcactaaggatggctgattccccaagggcacccgctctccctccctccctgctggaggaacacgtcatatcagatgagaggaagatggcctctgatggacagaatttttctcttaactcagcttttgctactttggcaaaaactagcgaggggtagcagaaacctgcaccaaggattgtccctatgtcttggccactcctagagcgtgtgcagactgatgattttatatgtaaatcaagactcacatccctttcctagtcccccacatccaaagcccctcagcctgccttgcagaccaatgggctccatgttctgtagccccctcccctacgcctcacccctcctccctctcacaggttctgggcggccagtgagagaaacgcagtgggggaggcagggagtctggtgcctgcagagattctctgcttctttcctggggggaggtggggaggtcttagcaggagcgggccctgtacccacctgctgacctgctgtttggtagagaaataaaggttgtgtgactggggg

SEQ ID NO: 251340 - DNA, 3132 bp, Artificial Sequence
  derived and/or modified sequence
atggaggccgcccacctgctgcccgccgccgacgtgctgagacacttcagcgtgaccgccgagggcggcctgagccccgcccaggtgaccggcgccagagagagatacggccccaacgagctgcccagcgaggagggcaagagcctgtgggagctggtgctggagcagttcgaggacctgctggtgagaatcctgctgctggccgccctggtgagcttcgtgctggcctggttcgaggagggcgaggagaccaccaccgccttcgtggagcccctggtgatcatgctgatcctggtggccaacgccatcgtgggcgtgtggcaggagagaaacgccgagagcgccatcgaggccctgaaggagtacgagcccgagatgggcaaggtgatcagaagcgacagaaagggcgtgcagagaatcagagccagagacatcgtgcccggcgacatcgtggaggtggccgtgggcgacaaggtgcccgccgacctgagactgatcgagatcaagagcaccaccctgagagtggaccagagcatcctgaccggcgagagcgtgagcgtgaccaagcacaccgaggccatccccgaccccagagccgtgaaccaggacaagaagaacatgctgttcagcggcaccaacatcaccagcggcaaggccgtgggcgtggccgtggccaccggcctgcacaccgagctgggcaagatcagaagccagatggccgccgtggagcccgagagaacccccctgcagagaaagctggacgagttcggcagacagctgagccacgccatcagcgtgatctgcgtggccgtgtgggtgatcaacatcggccacttcgccgaccccgcccacggcggcagctggctgagaggcgccgtgtactacttcaagatcgccgtggccctggccgtggccgccatccccgagggcctgcccgccgtgatcaccacctgcctggccctgggcaccagaagaatggccagaaagaacgccatcgtgagaagcctgcccagcgtggagaccctgggctgcaccagcgtgatctgcagcgacaagaccggcaccctgaccaccaaccagatgagcgtgtgcagaatgttcgtggtggccgaggccgacgccggcagctgcctgctgcacgagttcaccatcagcggcaccacctacacccccgagggcgaggtgagacagggcgaccagcccgtgagatgcggccagttcgacggcctggtggagctggccaccatctgcgccctgtgcaacgacagcgccctggactacaacgaggccaagggcgtgtacgagaaggtgggcgaggccaccgagaccgccctgacctgcctggtggagaagatgaacgtgttcgacaccgacctgcaggccctgagcagagtggagagagccggcgcctgcaacaccgtgatcaagcagctgatgagaaaggagttcaccctggagttcagcagagacagaaagagcatgagcgtgtactgcacccccaccagaccccaccccaccggccagggcagcaagatgttcgtgaagggcgcccccgagagcgtgatcgagagatgcagcagcgtgagagtgggcagcagaaccgcccccctgacccccaccagcagagagcagatcctggccaagatcagagactggggcagcggcagcgacaccctgagatgcctggccctggccaccagagacgccccccccagaaaggaggacatggagctggacgactgcagcaagttcgtgcagtacgagaccgacctgaccttcgtgggctgcgtgggcatgctggacccccccagacccgaggtggccgcctgcatcaccagatgctaccaggccggcatcagagtggtgatgatcaccggcgacaacaagggcaccgccgtggccatctgcagaagactgggcatcttcggcgacaccgaggacgtggccggcaaggcctacaccggcagagagttcgacgacctgagccccgagcagcagagacaggcctgcagaaccgccagatgcttcgccagagtggagcccgcccacaagagcagaatcgtggagaacctgcagagcttcaacgagatcaccgccatgaccggcgacggcgtgaacgacgcccccgccctgaagaaggccgagatcggcatcgccatgggcagcggcaccgccgtggccaagagcgccgccgagatggtgctgagcgacgacaacttcgccagcatcgtggccgccgtggaggagggcagagccatctacagcaacatgaagcagttcatcagatacctgatcagcagcaacgtgggcgaggtggtgtgcatcttcctgaccgccatcctgggcctgcccgaggccctgatccccgtgcagctgctgtgggtgaacctggtgaccgacggcctgcccgccaccgccctgggcttcaacccccccgacctggacatcatggagaagctgcccagaagccccagagaggccctgatcagcggctggctgttcttcagatacctggccatcggcgtgtacgtgggcctggccaccgtggccgccgccacctggtggttcgtgtacgacgccgagggcccccacatcaacttctaccagctgagaaacttcctgaagtgcagcgaggacaaccccctgttcgccggcatcgactgcgaggtgttcgagagcagattccccaccaccatggccctgagcgtgctggtgaccatcgagatgtgcaacgccctgaacagcgtgagcgagaaccagagcctgctgagaatgcccccctggatgaacccctggctgctggtggccgtggccatgagcatggccctgcacttcctgatcctgctggtgccccccctgcccctgatcttccaggtgacccccctgagcggcagacagtgggtggtggtgctgcagatcagcctgcccgtgatcctgctggacgaggccctgaagtacctgagcagaaaccacatgcacgcctgcctgtaccccggcctgctgagaaccgtgagccaggcctggagcagacagcccctgaccaccagctggacccccgaccacaccggcagaaacgagcccgaggtgagcgccggcaacagagtggagagccccgtgtgcaccagcgactag

SEQ ID NO: 251341 - protein, 1029 aa, Artificial Sequence
  derived and/or modified sequence
MEAAHLLPAADVLRHFSVTAEGGLSPAQVTGARERYGPNELPSEEGKSLWELVLEQFEDLLVRILLLAALVSFVLAWFEEGEETTTAFVEPLVIMLILVANAIVGVWQERNAESAIEALKEYEPEMGKVIRSDRKGVQRIRARDIVPGDIVEVAVGDKVPADLRLIEIKSTTLRVDQSILTGESVSVTKHTEAIPDPRAVNQDKKNMLFSGTNITSGKAVGVAVATGLHTELGKIRSQMAAVEPERTPLQRKLDEFGRQLSHAISVICVAVWVINIGHFADPAHGGSWLRGAVYYFKIAVALAVAAIPEGLPAVITTCLALGTRRMARKNAIVRSLPSVETLGCTSVICSDKTGTLTTNQMSVCRMFVVAEADAGSCLLHEFTISGTTYTPEGEVRQGDQPVRCGQFDGLVELATICALCNDSALDYNEAKGVYEKVGEATETALTCLVEKMNVFDTDLQALSRVERAGACNTVIKQLMRKEFTLEFSRDRKSMSVYCTPTRPHPTGQGSKMFVKGAPESVIERCSSVRVGSRTAPLTPTSREQILAKIRDWGSGSDTLRCLALATRDAPPRKEDMELDDCSKFVQYETDLTFVGCVGMLDPPRPEVAACITRCYQAGIRVVMITGDNKGTAVAICRRLGIFGDTEDVAGKAYTGREFDDLSPEQQRQACRTARCFARVEPAHKSRIVENLQSFNEITAMTGDGVNDAPALKKAEIGIAMGSGTAVAKSAAEMVLSDDNFASIVAAVEEGRAIYSNMKQFIRYLISSNVGEVVCIFLTAILGLPEALIPVQLLWVNLVTDGLPATALGFNPPDLDIMEKLPRSPREALISGWLFFRYLAIGVYVGLATVAAATWWFVYDAEGPHINFYQLRNFLKCSEDNPLFAGIDCEVFESRFPTTMALSVLVTIEMCNALNSVSENQSLLRMPPWMNPWLLVAVAMSMALHFLILLVPPLPLIFQVTPLSGRQWVVVLQISLPVILLDEALKYLSRNHMHACLYPGLLRTVSQAWSRQPLTTSWTPDHTGLASLKK

SEQ ID NO: 251342 - DNA, 3090 bp, Artificial Sequence
  derived and/or modified sequence
atggaagccgcccatctgcttcccgcagccgatgtcctacgccacttcagtgtcaccgcagagggaggcttgtctccggcccaggtgaccggcgccagagagcgatacgggccgaatgagctgccatcagaggaaggaaaatcactgtgggaacttgtgttggaacaatttgaagatctcctcgtcaggattctgctgttggccgcactcgtgtctttcgttctcgcctggttcgaggagggcgaggaaaccactactgcctttgtggaaccactagtgatcatgctcattctggtagccaatgctatagtgggggtctggcaggagaggaacgccgaatcagcaatcgaggcactgaaagaatatgagccagaaatgggcaaggtgatccggtccgatcgtaagggggtccagaggattagagcccgggacatcgtacctggggatattgtggaggtggctgtgggcgacaaagttccggctgatctcagattaatcgagattaaatctacaacactcagagtggatcaatcaattctgactggggaaagtgtttccgtcacaaaacatactgaggcgatcccagaccctcgtgccgtcaatcaggataagaagaatatgctatttagcggtacaaacatcacctccgggaaggcggtaggggtggccgtcgcaacaggtctgcatacagagctggggaaaatcagaagccagatggctgccgtggaaccagagcgtacccccctgcagcgaaagctggacgaattcgggcgacagctttcacacgcaatttctgtgatatgcgtagctgtctgggtgatcaacattggacattttgccgatcccgcccacggcggaagctggctccgtggtgcagtgtactattttaagattgcagtagcgctggcggtcgccgctattccggaaggcctgccagcggtgatcactacgtgccttgctttaggcacgagacgcatggcccggaagaacgcaattgtgcgctcacttccatctgtggaaacactggggtgcaccagtgtgatttgctccgacaaaaccggcacattgactaccaaccagatgtccgtgtgtcgcatgttcgttgtggccgaagcggacgctgggtcatgtctcctccacgagtttacaatcagcgggactacatacactcctgagggggaggtaaggcagggtgatcaacccgtcaggtgcggtcaatttgatggccttgtcgaactggctactatctgcgccttatgtaacgattcagctctggactacaatgaggctaaaggtgtctacgagaaggtcggagaagcaacagagactgccttaacctgcttggttgaaaaaatgaatgtgtttgacaccgatctgcaggcactcagcagagtggaaagggcaggtgcatgtaataccgtcataaaacagttgatgcgaaaggagttcacactggagttcagccgcgaccggaagtcaatgtccgtctactgtacccctacccgcccgcaccctacaggacaagggtctaagatgtttgtgaagggcgcgccagagagcgttatcgagagatgctcatccgtgcgggttgggtctcgcaccgcccctctgacacccacctctcgcgagcagatcctcgccaagatcagagactggggtagcgggtctgatacactgcgctgcctagcgctagcaacccgcgatgcacccccgaggaaagaggatatggaacttgatgactgctccaagttcgtgcagtacgagacagaccttacttttgtgggctgtgttggcatgctcgacccgccacgccctgaagtggctgcctgcatcactcggtgttatcaggccgggattagagttgtcatgatcactggtgataataagggaacagcggtagctatatgccggagactcggaatattcggggacaccgaggatgtggccggcaaggcctacaccggaagagaattcgacgatctgagccccgagcaacagcgtcaggcttgtcgaacagctagatgtttcgccagagtggaacctgcacacaagtcccgcatcgtggagaatctgcaaagcttcaatgagattaccgctatgactggcgatggagtcaatgatgctcccgctctgaagaaagcagagattggcatcgcaatgggcagcggcactgcggtggccaagtccgcagccgagatggtgctctccgacgacaattttgcgtccattgtcgctgcagtcgaggagggcagggcaatttactccaatatgaagcaattcatcaggtacctcataagctcgaatgtgggcgaggtggtctgtatcttcctaaccgccattttggggctgccggaggccctgataccagtccagctcttgtgggtaaatctggtcaccgacggactccctgctacagctctgggctttaatcctccagacctagacatcatggagaagctaccccgatcacccagggaggccctcatctcaggctggctattctttaggtaccttgccatcggcgtgtatgtgggcttagccaccgtagctgctgccacatggtggtttgtttatgacgcggagggaccacatatcaacttttaccaactgcgaaacttccttaagtgttctgaggataatcccctgtttgccggtatagattgcgaagtctttgagtcccggttccctaccacaatggccctcagcgtgttagtaaccattgaaatgtgtaacgctcttaattctgtctccgaaaaccagtctctactcagaatgccaccttggatgaatccttggctactggtggccgtagctatgagtatggccctgcactttttgattctgcttgtgcccccgctacccctcattttccaggtgactcctctctcaggccgccagtgggtggtggtcctgcaaatttctctacctgtcattctcctggatgaagcgttgaagtatctcagcagaaaccacatgcatgcttgtctgtatcccggtcttttacgtacggtgtcacaagcttggtcaagacagcctctaaccacatcatggactcctgaccacaccggactggcctccttgaaaaagtag

SEQ ID NO: 251343 - DNA, 3090 bp, Artificial Sequence
  derived and/or modified sequence
atggaggccgcacatcttttacctgcagcggacgtactgagacacttcagcgtaactgcagagggcgggcttagtccagcacaggtcactggtgcccgagagagatatgggcccaatgagttgccttctgaagaagggaagagtttgtgggagctggtgcttgagcagtttgaggacctgctcgtcaggattctgcttctcgccgcactcgtttctttcgtccttgcctggtttgaagaaggagaagaaactacaaccgcttttgtggagccccttgtcatcatgctcattttggttgccaacgcgatcgtgggggtatggcaagagcgcaacgcagagtccgccatcgaggcgctaaaagagtatgaacccgagatgggaaaggtaatccggtcagaccgcaagggggtccagcgcatccgtgcccgggacattgtgcccggggacattgttgaagtagccgtcggagataaagtgcccgccgacctgagacttattgaaatcaagagtactacactcagagtggaccaatctattctgaccggggaatcggtctccgtaacgaaacacaccgaagcaatccctgatcccagagctgtgaatcaggacaagaaaaacatgcttttttccggcacgaatataacctccggaaaagccgttggcgttgccgtcgctaccggtctgcacaccgaacttggtaaaatacgaagccagatggctgccgtggaacccgaaaggaccccattgcagagaaagctggacgaattcgggaggcagctgtctcacgctatctcagtcatatgcgtcgccgtatgggtgattaatattggccacttcgccgacccggcccatggagggtcgtggttgagaggggctgtatactacttcaagattgcggttgcgctggccgtggccgcgattcccgagggactcccagccgtaattaccacttgcctggccctggggacacggaggatggcccggaagaacgctattgtccgatccttgcccagtgtagagactctgggctgcacctccgtgatatgttcagacaagaccggaacccttacaaccaaccagatgtcagtgtgccgtatgttcgtggtggcagaagcagatgcagggtcatgtctcctgcatgagtttaccatctccggtacaacctacaccccagagggcgaggttaggcaaggcgaccagcccgttagatgtggacagttcgacggcttggtggaattagcaacaatctgcgctttgtgcaacgatagcgccctggattacaacgaagctaagggtgtgtacgaaaaagtgggagaagctaccgagacagcactgacgtgtctggtggagaaaatgaacgtcttcgacacggacttgcaggcactgtcacgggttgaacgcgcaggagcctgtaacactgttataaaacagctgatgaggaaggaattcacacttgaattttcccgcgatcggaaaagtatgtctgtgtactgtacgccaacccgaccacatccaaccggtcagggctctaagatgtttgtgaagggtgctccagaaagtgtgattgagcggtgtagctcagtgagagtggggagtagaaccgccccccttactccgactagcagggaacagatcctggctaagatccgcgattggggcagtggatcagatactctccgttgtctagcgctggccacaagagacgcaccccctcgcaaggaggatatggagctggatgactgttccaagtttgtgcagtacgaaactgacttgacatttgtcggctgcgtgggtatgctagatcctccaaggcctgaggttgccgcctgtatcactcggtgctatcaggctggcataagagttgttatgataactggggacaacaaaggcactgcggtagccatctgccgaagactgggcatcttcggagatacagaagatgttgccgggaaggcatacactgggagagagttcgatgatctgtctcctgagcaacaacgccaagcttgccggaccgcccgttgcttcgcgagagtggagcctgcacataaaagcagaatcgtggagaacctacagagtttcaatgaaattaccgcgatgacgggtgatggtgtcaacgatgccccagctctaaagaaagccgaaattggaattgcaatgggctccgggactgccgtcgccaaatccgctgcagagatggtgttgtctgatgataacttcgcttctatagtcgccgccgttgaggaggggagagccatctattcaaacatgaagcaatttattcgatatctgattagcagcaatgtaggtgaggtggtctgcatcttcttgacagcaatacttggcctgccagaggctcttataccggtgcagttgctgtgggtcaacttggtcacggatgggctgcctgcaactgccctgggctttaatcctccagacttagacataatggaaaagctccctcgctcccccagagaagccctgattagcggctggctgttcttcagatacttagcgattggcgtgtacgtgggcctcgcaacggtggcagcagccacatggtggtttgtgtacgatgcagagggtcctcatatcaacttttaccagctgaggaattttctaaaatgttctgaggacaacccactgttcgccggcatcgattgtgaagttttcgaatctcgattccctactaccatggcactgagtgtgctggtcactatcgaaatgtgtaatgctctaaatagcgtctccgagaatcaatccttactaagaatgccaccatggatgaacccctggctcctcgtcgccgtcgccatgagtatggctttacacttcctgatactcttagtgccgccattacccctgattttccaggtcacaccccttagtgggcgccagtgggttgtcgttctacagatttctctgcccgtcatcctgctggacgaagctttaaagtatctttctcggaatcatatgcacgcgtgtttgtatccgggactgctccggaccgtgtcacaggcgtggagtcggcagccactgacgacttcttggactcccgatcacaccggactcgctagcctcaagaagtag

SEQ ID NO: 251344 - DNA, 3090 bp, Artificial Sequence
  derived and/or modified sequence
atggaggccgcccacctgctgcctgctgctgatgtgctgcggcacttctctgtgacagctgagggcggcctgagccctgcccaggtgactggagcccgggagagatatggccccaatgagctgcccagcgaggagggcaagagcctgtgggagctggtgctggagcagtttgaggacctgctggtgcgcatcctgctgctggccgccctggtgtcctttgtgctggcctggtttgaggagggggaggagaccaccacagcctttgtggagcccctggtgatcatgctgatcctggtggccaatgccatcgtgggcgtgtggcaggagagaaatgctgagagcgccatcgaggccctgaaggagtatgagcctgagatgggcaaggtgatccgcagtgacagaaaaggagtgcagaggatccgggcccgggacatcgtgcctggggacatcgtggaggtggccgtgggggacaaggtgcctgctgacctgcggctcatcgagatcaagagcaccaccctgcgggtggaccagagcatcctgactggagagagcgtgtctgtgaccaagcacacagaggccatcccagaccccagggctgtgaaccaggacaagaagaacatgctgttcagcggcaccaacatcaccagcggcaaggctgtgggcgtggccgtggccaccggcctgcacacagagctgggcaagatccgcagccagatggctgctgtggagcctgagaggacccccctgcagaggaagctggatgaatttggccggcagctgagccacgccatcagcgtcatctgtgtggccgtgtgggtgatcaacatcggccactttgctgaccctgcccacggcggctcctggctgcggggagctgtgtactacttcaagattgctgtggccctggccgtggccgccatccctgagggcctgcctgctgtgatcaccacctgcctggccctgggcaccaggaggatggccaggaagaatgccatcgtgcgcagcctgcccagcgtggagaccctgggctgcaccagcgtcatctgcagcgacaagacaggcaccctgaccaccaaccagatgtctgtgtgcaggatgtttgtggtggccgaggctgatgctggcagctgcctgctgcacgagttcaccatcagcggcaccacctacaccccagagggggaggtgcggcagggcgaccagcctgtgcgctgtggccagtttgatggcctggtggagctggccaccatctgtgccctgtgcaatgattctgccctggactacaatgaggccaagggcgtgtatgagaaggtgggggaggccacagaaacagccctgacctgcctggtggagaagatgaatgtgtttgacacagacctgcaggccctgagccgggtggagcgggccggggcctgcaacacagtcatcaagcagctgatgaggaaggagttcaccctggagttcagccgggacaggaagtccatgtctgtgtactgcacccccacccggccccaccccaccggccagggcagcaagatgtttgtgaagggggcccctgagagcgtcatcgagcgctgcagctctgtgcgggtgggcagcaggacagcccccctgacccccaccagccgggagcagatcctggccaagatccgggactggggcagcggcagtgacaccctgcgctgcctggccctggccaccagagatgccccacccaggaaggaggacatggagctggatgactgcagcaagtttgtgcagtatgaaacagacctgacctttgtgggctgtgtgggcatgctggacccccccaggcctgaggtggccgcctgcatcacccgctgctaccaggccggcatccgggtggtgatgatcactggagacaacaagggcacagctgtggccatctgccggcggctgggcatctttggagacacagaagatgtggccggcaaggcctacacaggccgggagtttgatgacctgagccctgagcagcagaggcaggcctgcaggacagcccgctgctttgcccgggtggagcccgcccacaagagcagaattgtggagaacctgcagagcttcaatgagatcacagccatgactggagatggagtgaatgatgccccagccctgaagaaggccgagatcggcatcgccatgggcagcggcacagctgtggccaagtctgctgctgagatggtgctgagtgatgacaactttgccagcatcgtggccgctgtggaggagggccgggccatctacagcaacatgaagcagttcatccgctacctgatcagcagcaatgtgggggaggtggtgtgcatcttcctgacagccatcctgggcctgcctgaggccctgatccctgtgcagctgctgtgggtgaacctggtgacagatggcctgcctgccacagccctgggcttcaaccccccagacctggacatcatggagaagctgcccaggagcccccgggaggccctgatcagcggctggctgttcttccgctacctggccatcggcgtgtatgtgggcctggccaccgtggccgccgccacctggtggtttgtgtatgatgctgagggcccccacatcaacttctaccagctgaggaacttcctgaagtgcagcgaggacaaccccctgtttgctggcatcgactgtgaggtgtttgagagccgcttccccaccaccatggccctgtctgtgctggtgaccatcgagatgtgcaatgccctgaacagcgtgtctgagaaccagagcctgctgaggatgccaccctggatgaacccctggctgctggtggccgtggccatgtccatggccctgcacttcctgatcctgctggtgccccccctgcccctcatcttccaggtgacccccctgagcggccggcagtgggtggtggtgctgcagatcagcctgcccgtcatcctgctggatgaggccctgaagtacctgagcaggaaccacatgcacgcctgcctgtacccaggcctgctgaggacagtgtcccaggcctggagccggcagcccctgaccacctcctggaccccagaccacacaggcctggccagcctgaagaagtag

SEQ ID NO: 251345 - DNA, 3090 bp, Artificial Sequence
  derived and/or modified sequence
atggaggccgcccacctgctgcccgccgccgacgtgctgcggcacttctcagtgaccgctgagggtggtctaagtccagcccaagtcactggagcgagggagaggtacggcccaaatgagctgccttccgaagaggggaaaagtctgtgggagctggtactcgaacaattcgaggatcttcttgtgagaattctgctcttggcagccctagtctccttcgtgctggcctggtttgaggaaggcgaggagactacgacagcttttgttgagcccctcgttataatgcttatattagtagccaacgcgatcgtgggcgtgtggcaggaacggaatgcagaatccgctattgaagcgcttaaagaatatgaacccgagatgggcaaggtgattaggtctgatcggaagggcgtgcagagaatcagggccagagatattgtgcccggagacattgttgaggtggctgttggggacaaagtgcctgccgatttaagacttattgagatcaagtccaccaccctacgggtggatcagagtatcctgactggcgagtccgtctcagtgactaaacatacagaagcaatcccggacccccgcgcagttaaccaggacaagaagaacatgctttttagcggcaccaacatcacatcagggaaggcggtcggggtagccgtggctactgggctccacacggagctgggtaagattagaagccagatggctgcagtggagccagaacgtactcctctacagcgcaagctcgacgagtttggacggcagctgagccacgctatatccgttatctgtgtggctgtgtgggtcatcaacataggccatttcgcagaccccgcccacggggggagttggctaagaggcgctgtttattactttaagattgcggtcgcactggctgtggccgcaataccagaggggctgcccgcggtgataactacctgccttgccctcgggacgcgtaggatggctcggaagaatgccatcgtcaggtctctgcccagcgtggagacactgggctgcacctcggtgatctgttccgacaaaaccgggacgctcactaccaatcagatgtccgtctgtcgcatgttcgtggttgccgaagctgacgcagggtcgtgtcttctgcacgagtttacaatttctggcacaacctatacccccgagggggaggtgcgccaaggggatcagccagtgaggtgcggacagtttgacggcctggtcgagctggcaaccatctgcgctctgtgcaacgactctgcacttgattataacgaggcaaaaggggtgtacgagaaggtgggcgaagccaccgagactgcattaacctgcctggtagagaaaatgaacgtttttgatacagacctgcaagctctgagtagagtggagcgggctggcgcctgcaataccgtcatcaagcaactgatgcgcaaggagttcaccctggagttttctcgcgacaggaagagcatgtcagtttactgtactccgacacgtccacaccccacaggtcaagggagtaaaatgttcgtcaagggggcgcccgagtccgttatcgagcggtgcagtagtgtgcgtgtgggtagccggaccgctccacttacaccaacttccagagaacagatactcgccaaaatccgcgactggggatctgggtccgatacactccgatgcctcgcactggcaactcgggacgccccacccagaaaagaggatatggagctggatgattgttccaaatttgtccaatatgagacagatctgaccttcgtcggttgtgtagggatgctagatccacctagacccgaagttgcggcctgtatcacccggtgctatcaagccggtattcgggtggtcatgataacgggcgataacaaaggcactgccgtagcaatatgccgccggctgggcatattcggagacacagaggacgtcgctggcaaagcgtatacgggtcgcgagttcgacgacctgagccccgaacaacagagacaggcctgcaggaccgcccgatgcttcgcaagagtcgaacctgcccataaaagtcggatcgtggaaaatctgcagtctttcaacgaaattaccgccatgactggagacggggtaaatgacgccccggccctgaagaaagctgaaattggcatagccatgggttctgggactgccgtcgctaagtccgccgccgagatggtactcagcgatgacaattttgcaagcatcgtcgcagccgtggaagaaggccgggccatttacagcaacatgaagcagtttataagatacctgatttcctctaatgttggggaagtagtttgtatctttcttactgcaattttaggcctgccagaggccctgattcctgttcagctgttatgggttaatctagtgacagacggtctgccagctacagctctcggcttcaacccccccgacttggatatcatggagaaacttccacgcagcccgagggaagccctcattagcgggtggctgttctttcgatacttggccatcggagtctatgtcggtctggctaccgtcgccgccgctacttggtggtttgtgtacgacgctgagggccctcacataaacttctaccagctcaggaatttccttaaatgtagcgaggacaaccctctgtttgcagggatagattgcgaagtttttgagtctagatttccgaccaccatggccctgagtgtgcttgtgaccattgagatgtgcaatgctctgaacagtgttagtgagaatcaaagccttttgcgtatgccaccctggatgaacccttggctactggtggccgtggcaatgagcatggctctgcactttctgattctactagtcccgcctctacctctaatcttccaagtaactccccttagcggccgtcaatgggttgttgttctgcaaataagtctcccggtgattctactggacgaggccctgaaatacctctcaagaaatcatatgcatgcttgcctctaccccggactgctccggaccgtgtctcaagcctggtctcggcagcctctgactacttcctggacccctgatcacaccggattggcttcgctgaagaagtag

SEQ ID NO: 251346 - DNA, 3090 bp, Artificial Sequence
  derived and/or modified sequence
atggaggccgcccacctgctgcccgccgccgacgtgctgcggcacttctccgtgacagcagagggcggcctctcaccagctcaagtaactggcgcccgggaacgctacgggccaaatgagctacccagtgaggaaggaaagagtttgtgggaactcgtcctggagcagtttgaagatcttctcgtccgcatcctcctgctggcagccctggtatcatttgtcctcgcatggtttgaggagggcgaagagacaacaacagctttcgtggagccccttgttatcatgctgatcctggtagctaatgcaatagtcggagtgtggcaggagaggaatgccgagtcagctattgaggccttgaaagagtatgagccagaaatgggtaaggtaatccgatccgacaggaagggtgttcagaggattcgggcccgtgacattgtaccgggggatatcgttgaggtcgccgtaggagacaaggtgccagccgatctccgcttaatcgagataaaatccaccaccctgcgagtggatcagtctatcttaactggtgagtccgtcagtgtcacgaagcatactgaggctattcctgaccctcgtgctgtgaatcaagacaagaaaaatatgctgttttccggaactaatatcaccagtggtaaagcagtgggcgtcgctgtggctacgggccttcacacggaactggggaagatccggagccagatggccgccgtggagcccgagcgtacccccctgcagagaaaacttgatgaattcggtagacagctttcgcacgctatcagcgtcatttgcgttgctgtgtgggtaatcaacattggtcatttcgccgaccctgcccacggcggctcctggctgcggggggccgtgtattactttaagatcgcagtggcgctagccgtcgcggcaatcccagagggactgcctgcagtcatcaccacctgtctggccctgggcacacgacgcatggctcggaagaatgccatcgtacgttctcttccttcagtggaaacactcgggtgcaccagcgtgatttgctcggataaaaccggaacactcacgaccaatcaaatgagcgtatgcaggatgtttgttgtggccgaagctgacgccggatcctgtctcctccacgagtttaccatatctggaaccacttatacacctgagggcgaggttagacaaggagatcaacctgttcgctgcggccaattcgatggactggtcgagctggcaacaatatgcgctctgtgtaatgactcggccctggactataacgaagcaaaaggagtgtacgaaaaggtgggggaagcgacagagaccgctttgacatgtctcgtggaaaaaatgaatgtttttgatacagacctccaggccctgtcacgggtggagcgagcgggcgcctgtaatacggtgattaagcagcttatgcggaaggaatttaccctagaattcagcagggatcgcaagtctatgtccgtgtactgtactcccacaagaccccacccaaccggacagggctccaagatgttcgtgaaaggcgctccggagtccgtgatcgagagatgttcctccgtgagggtgggcagtagaactgcaccactgactccaacatcaagggagcagattttagctaagatacgggattggggaagtggttccgatactctgcgctgtctcgccttagccacacgtgatgccccccctagaaaggaagatatggaattggacgattgctcaaagttcgtgcagtatgagactgacttgaccttcgtgggttgtgtcgggatgttagatccccctaggcccgaagttgccgcgtgtataacccggtgctatcaggcaggcatacgagtcgtcatgatcaccggtgacaacaaaggcaccgccgtcgccatctgccggcgtctggggatctttggcgacaccgaagatgtggccggtaaagcatatacagggagggaattcgatgacctgtctcccgagcagcagagacaggcgtgccgtacagccaggtgtttcgcccgtgtagagcccgctcataagagcaggattgtcgagaatctccagtctttcaacgagattacagctatgaccggagacggagttaacgatgcccccgctctgaagaaagcggagatcggcatagccatgggctcgggaactgctgttgcaaagagcgccgccgagatggtgctgtcagacgacaattttgccagtatcgtcgcggccgtagaggaaggccgcgctatttatagcaatatgaagcagttcattcgctacctgatcagctcgaatgtcggggaggtggtgtgtatttttcttaccgcaatcttggggctgccagaagccctgatccccgtgcagctgctgtgggtcaatttggtgacagatggcctcccagccacagctctcggcttcaacccacctgatctggacatcatggagaaacttcctcgctcacctcgggaagccttgatcagcggatggctctttttcaggtacttggctatcggcgtgtacgtggggctggccactgtggcagccgctacctggtggttcgtctatgatgccgagggaccacacataaacttctatcagttaaggaattttctcaaatgtagcgaagacaaccccctgttcgccggcatagactgcgaagtatttgaatcccgcttccctactactatggcactgagcgtgctcgttactatagagatgtgcaatgcgctcaattctgtgtcagaaaatcagagtctcctgaggatgcccccctggatgaacccgtggctgctggtggcagtcgccatgagcatggcattgcattttctgatccttctggtgccacctctacccctgatctttcaagtcactccgctgtccgggcgccagtgggtggtagttctgcagatcagcttgccagtcatacttctggacgaagccctgaagtatctgagcagaaaccacatgcacgcctgcttataccccggccttctcaggaccgtttcacaggcctggagccggcagccactgacaacctcttggacgccggatcacactggattagcctctcttaagaaatag

SEQ ID NO: 251347 - DNA, 3090 bp, Artificial Sequence
  derived and/or modified sequence
atggaagcagctcacctgttacccgcagcagacgtcctacggcacttctcagttactgccgagggaggcctcagcccggcacaggtgaccggcgcacgtgaacgctatggacccaacgagctaccatccgaggagggtaagtcattgtgggagctggtgctggagcaattcgaagacctgcttgtgaggatactgctgttggccgcactggtaagcttcgtcctggcatggtttgaagaaggtgaggaaacaaccacggcatttgtcgaacccctggttattatgctgattctagtggccaatgctatcgtgggggtttggcaggaaaggaacgcagagagcgccattgaggctctgaaagagtatgaacctgagatgggaaaagtaattagatctgatcgcaaaggggtccagcggattagagcacgagatatagtgccgggagatattgtggaggtggccgtcggagacaaagtccctgccgatctgagactgatcgagatcaaatcaacaacactgagagttgaccagagtattctcacgggggagtccgtgtccgttactaaacacaccgaagctatccctgaccctcgtgccgtcaaccaggataaaaaaaatatgcttttttccgggacgaatatcaccagtgggaaggcagtcggagtcgccgtcgcgaccggcttacatactgaactcggtaagattaggtcccagatggccgctgtggaacccgagcgcacacctctgcaacggaaactcgacgagttcgggaggcagcttagtcatgctatctcggtgatctgtgtggcagtctgggttataaacattggccattttgcagacccagcccatgggggtagctggctcaggggggctgtatactattttaagattgcggttgccctggccgtcgcagcgatccctgagggactgccagccgtaatcaccacttgcctagccctggggacccgtcggatggccaggaaaaatgctatcgtacgcagcttacctagtgtggagactctgggatgtactagtgttatctgctcagacaagactggcacccttaccaccaaccaaatgagcgtgtgtaggatgtttgtggttgcggaggccgacgctggatcttgcctgttacacgagttcacgattagtgggaccacatacacccctgagggcgaagtgagacaaggcgatcagcccgtgagatgcggacagtttgacgggctcgtcgagctggccacaatctgtgccctatgcaatgatagtgcactggactataatgaagctaaaggagtatacgagaaagttggagaagccacggagaccgccctgacgtgtctggtggagaagatgaatgtgtttgatactgacttacaagccctgagcagagtggagcgcgctggcgcttgtaacacagtgattaaacagctgatgaggaaggagtttaccttggagttctcccgtgaccgcaagagtatgtccgtgtattgtacacctacaagaccccaccctaccggacagggctcgaaaatgttcgtgaagggtgcaccagagagcgtgatcgagagatgctcgtcagtccgcgtaggatctcgcaccgcaccactcacccctacctctagggagcaaatcctggccaagattcgtgactggggcagcggctcagacaccctgagatgtctggccttggccaccagagacgcccctcctaggaaggaggacatggaactggacgattgtagcaaatttgtccagtacgagactgacctaacgttcgtgggttgtgttggaatgctagatccgccacggccagaggttgcagcatgcattacacgctgctatcaggcaggaattagggtggttatgatcaccggcgataataagggaaccgccgtggctatctgccgacgccttgggattttcggtgacaccgaagacgttgctggtaaggcctacacggggagggagtttgatgaccttagcccagagcagcagagacaggcgtgccgcacggcaaggtgctttgctagggtggaacctgcacacaagtctcgcatagtagaaaatcttcagtcttttaatgagatcaccgctatgaccggtgacggtgtgaacgacgcccctgccctgaagaaagcagagatcggcatagccatgggcagcgggactgccgtggccaagtctgcggcagagatggtgctgagcgatgacaacttcgcaagcattgtggctgctgtggaagagggacgcgcaatctactcaaacatgaagcagtttattcggtatctgatctcctccaacgtgggagaggtcgtctgcatttttctgactgccattttagggttgccagaggcactcatcccggtgcagctgctttgggtgaacctcgtcacagacggactgccagccaccgctctcggcttcaatccccctgatctggacatcatggagaaattaccccgttctccccgtgaagctctcatcagcggctggctgttcttccgctatctggcaatcggcgtatacgttggcctggctactgtggcggcagccacctggtggttcgtttatgatgctgagggcccacacattaacttctaccagctgcggaattttctcaaatgctccgaagataacccactgttcgccggaatcgattgtgaggtgttcgagtcacggtttcctactaccatggcactgagtgttctggtaactattgaaatgtgcaacgctctcaatagcgtctcagagaatcagtctttgctcaggatgcccccatggatgaacccttggttattagtcgctgtcgccatgagcatggcattgcattttctaatactactcgtaccacctcttcccctgatttttcaggtgacaccactgagcggaaggcagtgggttgtggtgcttcaaattagcctgccagtgattctgcttgacgaggcactgaaatatttatcccgcaaccatatgcacgcctgtctctaccctgggttgctcagaaccgtgtcgcaagcatggtcacgccagcctcttaccacctcctggacacctgatcacacaggtttagccagtctgaagaagtag

SEQ ID NO: 251348 - DNA, 3090 bp, Artificial Sequence
  derived and/or modified sequence
atggaggcagcgcacttactacctgcagccgatgtgctgagacactttagcgtcacagccgagggtggcctatctcctgcccaggttaccggggctcgtgaacgatatggacctaacgaactgccgagcgaggagggaaaatccctgtgggagctggtactagagcagttcgaagatctactggtgcgaatactgttgctggctgccctggtgagctttgtgctggcctggtttgaggaaggcgaggagactacgacagcttttgtggaaccactggtgattatgcttatccttgtcgcaaatgcgattgtgggagtgtggcaggaaagaaacgctgagtcagccatagaggccctcaaagaatacgagccagaaatggggaaggtgataagatcagaccggaaaggggtccagcgcattcgggcacgcgatatcgttcctggcgacattgtggaagttgcagtgggagacaaggtaccggctgacctgagactgattgagatcaagtccacaaccctgagagtggatcagagtatcctgactggcgagtctgtgtccgtgaccaagcacaccgaggcaattccagaccctagggcagtgaatcaagataagaaaaatatgctattttccggtacgaatatcacatccggaaaggccgtcggggtcgcggtggctaccgggttacacactgaactcggtaaaatccgcagtcagatggctgctgtggagcccgagcgtacgcctctgcaaagaaagcttgacgaatttggtaggcagctgtctcatgctatctccgtgatatgtgtggcggtatgggtaatcaacatcggccatttcgccgatcccgctcatggcggaagctggcttagaggcgcagtgtactatttcaagatcgctgtagctctggctgtagcagcaattccggaaggcctaccagccgttattactacttgcctcgcgctgggcacccggagaatggcccgaaaaaatgcaattgttaggagtttgccgtccgtagaaacattagggtgtacgtctgttatatgtagtgacaagactggtactctcaccacaaatcagatgtctgtttgcagaatgttcgtagtggccgaggccgatgccggaagttgcctcttgcacgagttcacaatatctggaacaacctacacacccgaaggggaggtccgacagggtgaccagccggtgcgatgcggacagttcgatggcttagtggaactggcaaccatttgcgccctctgtaatgacagtgccttggactacaacgaggctaaaggcgtgtacgagaaagtgggagaggccacagaaaccgcgttgacttgtctggtggagaaaatgaacgtttttgatacagatctgcaggcgctgtcccgagtggaacgcgcaggtgcttgtaataccgtgattaagcaactcatgagaaaggaatttacactagagttcagccgcgatcggaagtccatgagcgtgtattgtacccctactagaccacatcctactgggcaggggagcaagatgtttgtcaagggtgcacctgaatccgtcattgaaagatgtagcagcgtccgcgtgggctcgcggaccgcccctcttacccctaccagtcgggaacagatcttagcaaagattcgggactggggctcaggatctgacaccctcagatgtctggcactggcgacaagagacgcacctcccaggaaagaagacatggagctggacgattgcagtaaatttgtgcaatacgagaccgacctgacattcgtgggctgtgtaggaatgctcgacccacctaggccagaggtggcagcatgtataaccagatgttatcaggcaggaatcagagtggtgatgataaccggagacaacaaaggcactgctgtggctatttgccggagactggggatattcggcgacacggaggacgtggccggaaaggcctacaccggaagagagttcgacgatctgtcccccgaacagcagcggcaagcctgtcggacagctcgctgcttcgctcgagtggagccagcgcataaaagcaggatcgtcgaaaatctgcagtcgttcaacgagatcaccgcaatgacaggagatggggtcaacgatgcgcctgcgctgaaaaaagccgaaattgggatcgccatgggaagcggaaccgctgtggctaagagcgccgcagaaatggtcctaagcgatgataatttcgcatccatcgtcgctgctgtcgaagaaggccgtgcgatctactccaatatgaagcagttcataagatatttaatatcatctaacgtcggcgaggtggtatgtatctttctcaccgcaatcctaggattgccagaggcgctgattcccgttcagttgctgtgggtcaacctggtgaccgatgggctgccagcaactgcactggggtttaatccccctgacctggatattatggagaagctcccgaggagtccaagagaagcgttgatcagcggttggctgtttttccgctacctcgccattggggtgtatgtgggacttgctactgttgccgctgctacatggtggtttgtttacgacgccgaaggcccacatattaacttttatcagctgcggaacttcctgaagtgctctgaagacaatccactgtttgcagggatcgattgtgaagtgtttgagtccaggtttccaaccacaatggctctgtccgtgcttgttacaatcgaaatgtgtaatgccctgaacagcgtgagcgaaaatcagagtctgcttcggatgcccccatggatgaacccatggctcttggtggcagtggccatgagtatggccttacacttcctcattctgctggtgccccctctgccattaatctttcaggttactccgctctcagggcgtcagtgggtggttgtgctacaaatctcactgcccgtcattctgcttgatgaggctctgaaatacctatctcggaaccacatgcatgcctgcctgtatcccggtttactgaggaccgtgagtcaggcctggtcgcggcagcccctgactacttcctggacccccgatcataccggcctggcctcccttaagaagtag

SEQ ID NO: 251349 - DNA, 4799 bp, Artificial Sequence
  derived and/or modified sequence
ccgccgccactgccgtcgggtaaggtcccagcacggacatggcctcgcgcggcgcccgcccgggcccgagtcccccgcgccccgctttgtagccccccggcggagaggcggcctcgacggtgcggacggcgcagacggccgggcgggcggcatggaggcggcgcatctgctcccggccgccgacgtgctgcgccacttctcggtgacagccgagggcggcctgagcccggcgcaggtgaccggcgcgcgggagcgctacggccccaacgagctcccgagtgaggaagggaagtccctgtgggagctggtgctggaacagtttgaggacctcctggtgcgcatcctgctgctggctgcccttgtctcctttgtcctggcctggttcgaggagggcgaggagaccacgaccgccttcgtggagcccctggtcatcatgctgatcctcgtggccaacgccattgtgggcgtgtggcaggaacgcaacgccgagagtgccatcgaggccctgaaggagtatgagcctgagatgggcaaggtgatccgctcggaccgcaagggcgtgcagaggatccgtgcccgggacatcgtcccaggggacattgtagaagtggcagtgggggacaaagtgcctgctgacctccgcctcatcgagatcaagtccaccacgctgcgagtggaccagtccatcctgacgggtgaatctgtgtccgtgaccaagcacacagaggccatcccagaccccagagctgtgaaccaggacaagaagaacatgctgttttctggcaccaatatcacatcgggcaaagcggtgggtgtggccgtggccaccggcctgcacacggagctgggcaagatccggagccagatggcggcagtcgagcccgagcggacgccgctgcagcgcaagctggacgagtttggacggcagctgtcccacgccatctctgtgatctgcgtggccgtgtgggtcatcaacatcggccacttcgccgacccggcccacggtggctcctggctgcgtggcgctgtctactacttcaagatcgccgtggccctggcggtggcggccatccccgagggcctcccggctgtcatcactacatgcctggcactgggcacgcggcgcatggcacgcaagaacgccatcgtgcgaagcctgccgtccgtggagaccctgggctgcacctcagtcatctgctccgacaagacgggcacgctcaccaccaatcagatgtctgtctgccggatgttcgtggtagccgaggccgatgcgggctcctgccttttgcacgagttcaccatctcgggtaccacgtatacccccgagggcgaagtgcggcagggggatcagcctgtgcgctgcggccagttcgacgggctggtggagctggcgaccatctgcgccctgtgcaacgactcggctctggactacaacgaggccaagggtgtgtatgagaaggtgggagaggccacggagacagctctgacttgcctggtggagaagatgaacgtgttcgacaccgacctgcaggctctgtcccgggtggagcgagctggcgcctgtaacacggtcatcaagcagctgatgcggaaggagttcaccctggagttctcccgagaccggaaatccatgtccgtgtactgcacgcccacccgccctcaccctactggccagggcagcaagatgtttgtgaagggggctcctgagagtgtgatcgagcgctgtagctcagtccgcgtggggagccgcacagcacccctgacccccacctccagggagcagatcctggcaaagatccgggattggggctcaggctcagacacgctgcgctgcctggcactggccacccgggacgcgcccccaaggaaggaggacatggagctggacgactgcagcaagtttgtgcagtacgagacggacctgaccttcgtgggctgcgtaggcatgctggacccgccgcgacctgaggtggctgcctgcatcacacgctgctaccaggcgggcatccgcgtggtcatgatcacgggggataacaaaggcactgccgtggccatctgccgcaggcttggcatctttggggacacggaagacgtggcgggcaaggcctacacgggccgcgagtttgatgacctcagccccgagcagcagcgccaggcctgccgcaccgcccgctgcttcgcccgcgtggagcccgcacacaagtcccgcatcgtggagaacctgcagtcctttaacgagatcactgctatgactggcgatggagtgaacgacgcaccagccctgaagaaagcagagatcggcatcgccatgggctcaggcacggccgtggccaagtcggcggcagagatggtgctgtcagatgacaactttgcctccatcgtggctgcggtggaggagggccgggccatctacagcaacatgaagcaattcatccgctacctcatctcctccaatgttggcgaggtcgtctgcatcttcctcacggcaattctgggcctgcccgaagccctgatccctgtgcagctgctctgggtgaacctggtgacagacggcctacctgccacggctctgggcttcaacccgccagacctggacatcatggagaagctgccccggagcccccgagaagccctcatcagtggctggctcttcttccgatacctggctatcggagtgtacgtaggcctggccacagtggctgccgccacctggtggtttgtgtatgacgccgagggacctcacatcaacttctaccagctgaggaacttcctgaagtgctccgaagacaacccgctctttgccggcatcgactgtgaggtgttcgagtcacgcttccccaccaccatggccttgtccgtgctcgtgaccattgaaatgtgcaatgccctcaacagcgtctcggagaaccagtcgctgctgcggatgccgccctggatgaacccctggctgctggtggctgtggccatgtccatggccctgcacttcctcatcctgctcgtgccgcccctgcctctcattttccaggtgaccccactgagcgggcgccagtgggtggtggtgctccagatatctctgcctgtcatcctgctggatgaggccctcaagtacctgtcccggaaccacatgcacgcctgtctttatccaggccttctcaggacagtctcgcaggcctggagtaggcagccgctgaccacctcttggaccccagaccacaccgggttggcctctttgaagaaatgagccagaagtgagcgctgggaacagagtggagtctccggtgtgtacctcagactgatggtgcccatgtgttcgcctccgccccccacccttgccaccacactcgcccacttgcccaccgggtcccgccggataaatgacaggcccgaggtcagaatggccatccccgggccccgtcctggggtctctgtccccacttccttctggcctgggaggtctgtaattcctgtctcctggactctcctgggaagttccctgctctgcagctctggcccaggagctgcaggctgggagggggcagccaagaagccggagctggcagcatacccagagatccggggcccccccacccccaaatcacgagtgcagctggagcttgctcccccttgttcggaagctggacgttcacttggtgactggtgcctctgcactgacggaggactctgggggtccttcttaccggctctgacctctctcttcgtgcctggtctgggactgggtcagccctgggggatcagaaggggccatctgggcccagctgtgtacagcgagggtgggcagccccctccactccactctgcttccacaaagtcggctcccgagagctcgaggctgcttctgtttatatgtgcagggcccgggcgggtgaagggtcagagagacggacacaaggagccggcaggagggcggagcgaggatgtcctttcccgggagacaagtcgggaaagcctggctggactgcctcagccccgcgcgcctcctggactcagggttccccgtcctgagctcgggagatgttcagagtcacactgccgcccggtctgccacgcagaggtccaacttgccacccgcgtccctggtacctgagaccaccgacatcctcaggttcctgaccgtggcgcccttctacccagcccagtgtgcggccgccgcgctgtctgcacagctgggggcctctgagcctggtgggcttcctggactcttggcctcactccttgccccctccccacgacacccatgagccgaaaggatgtcactaaggatggctgattccccaagggcacccgctctccctccctccctgctggaggaacacgtcatatcagatgagaggaagatggcctctgatggacagaatttttctcttaactcagcttttgctactttggcaaaaactagcgaggggtagcagaaacctgcaccaaggattgtccctatgtcttggccactcctagagcgtgtgcagactgatgattttatatgtaaatcaagactcacatccctttcctagtcccccacatccaaagcccctcagcctgccttgcagaccaatgggctccatgttctgtagccccctcccctacgcctcacccctcctccctctcacaggttctgggcggccagtgagagaaacgcagtgggggaggcagggagtctggtgcctgcagagattctctgcttctttcctggggggaggtggggaggtcttagcaggagcgggccctgtacccacctgctgacctgctgtttggtagagaaataaaggttgtgtgactggggg

SEQ ID NO: 251350 - DNA, 4205 bp, Artificial Sequence
  derived and/or modified sequence
ccgccgccactgccgtcgggtaaggtcccagcacggacatggcctcgcgcggcgcccgcccgggcccgagtcccccgcgccccgctttgtagccccccggcggagaggcggcctcgacggtgcggacggcgcagacggccgggcgggcggcatggaggcggcgcatctgctcccggccgccgacgtgctgcgccacttctcggtgacagccgagggcggcctgagcccggcgcaggtgaccggcgcgcgggagcgctacggccccaacgagctcccgagtgaggaagggaagtccctgtgggagctggtgctggaacagtttgaggacctcctggtgcgcatcctgctgctggctgcccttgtctcctttgtcctggcctggttcgaggagggcgaggagaccacgaccgccttcgtggagcccctggtcatcatgctgatcctcgtggccaacgccattgtgggcgtgtggcaggaacgcaacgccgagagtgccatcgaggccctgaaggagtatgagcctgagatgggcaaggtgatccgctcggaccgcaagggcgtgcagaggatccgtgcccgggacatcgtcccaggggacattgtagaagtggcagtgggggacaaagtgcctgctgacctccgcctcatcgagatcaagtccaccacgctgcgagtggaccagtccatcctgacgggtgaatctgtgtccgtgaccaagcacacagaggccatcccagaccccagagctgtgaaccaggacaagaagaacatgctgttttctggcaccaatatcacatcgggcaaagcggtgggtgtggccgtggccaccggcctgcacacggagctgggcaagatccggagccagatggcggcagtcgagcccgagcggacgccgctgcagcgcaagctggacgagtttggacggcagctgtcccacgccatctctgtgatctgcgtggccgtgtgggtcatcaacatcggccacttcgccgacccggcccacggtggctcctggctgcgtggcgctgtctactacttcaagatcgccgtggccctggcggtggcggccatccccgagggcctcccggctgtcatcactacatgcctggcactgggcacgcggcgcatggcacgcaagaacgccatcgtgcgaagcctgccgtccgtggagaccctgggctgcacctcagtcatctgctccgacaagacgggcacgctcaccaccaatcagatgtctgtctgccggatgttcgtggtagccgaggccgatgcgggctcctgccttttgcacgagttcaccatctcgggtaccacgtatacccccgagggcgaagtgcggcagggggatcagcctgtgcgctgcggccagttcgacgggctggtggagctggcgaccatctgcgccctgtgcaacgactcggctctggactacaacgaggccaagggtgtgtatgagaaggtgggagaggccacggagacagctctgacttgcctggtggagaagatgaacgtgttcgacaccgacctgcaggctctgtcccgggtggagcgagctggcgcctgtaacacggtcatcaagcagctgatgcggaaggagttcaccctggagttctcccgagaccggaaatccatgtccgtgtactgcacgcccacccgccctcaccctactggccagggcagcaagatgtttgtgaagggggctcctgagagtgtgatcgagcgctgtagctcagtccgcgtggggagccgcacagcacccctgacccccacctccagggagcagatcctggcaaagatccgggattggggctcaggctcagacacgctgcgctgcctggcactggccacccgggacgcgcccccaaggaaggaggacatggagctggacgactgcagcaagtttgtgcagtacgagacggacctgaccttcgtgggctgcgtaggcatgctggacccgccgcgacctgaggtggctgcctgcatcacacgctgctaccaggcgggcatccgcgtggtcatgatcacgggggataacaaaggcactgccgtggccatctgccgcaggcttggcatctttggggacacggaagacgtggcgggcaaggcctacacgggccgcgagtttgatgacctcagccccgagcagcagcgccaggcctgccgcaccgcccgctgcttcgcccgcgtggagcccgcacacaagtcccgcatcgtggagaacctgcagtcctttaacgagatcactgctatgactggcgatggagtgaacgacgcaccagccctgaagaaagcagagatcggcatcgccatgggctcaggcacggccgtggccaagtcggcggcagagatggtgctgtcagatgacaactttgcctccatcgtggctgcggtggaggagggccgggccatctacagcaacatgaagcaattcatccgctacctcatctcctccaatgttggcgaggtcgtctgcatcttcctcacggcaattctgggcctgcccgaagccctgatccctgtgcagctgctctgggtgaacctggtgacagacggcctacctgccacggctctgggcttcaacccgccagacctggacatcatggagaagctgccccggagcccccgagaagccctcatcagtggctggctcttcttccgatacctggctatcggagtgtacgtaggcctggccacagtggctgccgccacctggtggtttgtgtatgacgccgagggacctcacatcaacttctaccagctgaggaacttcctgaagtgctccgaagacaacccgctctttgccggcatcgactgtgaggtgttcgagtcacgcttccccaccaccatggccttgtccgtgctcgtgaccattgaaatgtgcaatgccctcaacagcgtctcggagaaccagtcgctgctgcggatgccgccctggatgaacccctggctgctggtggctgtggccatgtccatggccctgcacttcctcatcctgctcgtgccgcccctgcctctcattttccaggtgaccccactgagcgggcgccagtgggtggtggtgctccagatatctctgcctgtcatcctgctggatgaggccctcaagtacctgtcccggaaccacatgcacgcctgtctttatccaggccttctcaggacagtctcgcaggcctggagtaggcagccgctgaccacctcttggaccccagaccacaccgggttggcctctttgaagaaatgagccagaagtgagcgctgggaacagagtggagtctccgggcccgggcgggtgaagggtcagagagacggacacaaggagccggcaggagggcggagcgaggatgtcctttcccgggagacaagtcgggaaagcctggctggactgcctcagccccgcgcgcctcctggactcagggttccccgtcctgagctcgggagatgttcagagtcacactgccgcccggtctgccacgcagaggtccaacttgccacccgcgtccctggtacctgagaccaccgacatcctcaggttcctgaccgtggcgcccttctacccagcccagtgtgcggccgccgcgctgtctgcacagctgggggcctctgagcctggtgggcttcctggactcttggcctcactccttgccccctccccacgacacccatgagccgaaaggatgtcactaaggatggctgattccccaagggcacccgctctccctccctccctgctggaggaacacgtcatatcagatgagaggaagatggcctctgatggacagaatttttctcttaactcagcttttgctactttggcaaaaactagcgaggggtagcagaaacctgcaccaaggattgtccctatgtcttggccactcctagagcgtgtgcagactgatgattttatatgtaaatcaagactcacatccctttcctagtcccccacatccaaagcccctcagcctgccttgcagaccaatgggctccatgttctgtagccccctcccctacgcctcacccctcctccctctcacaggttctgggcggccagtgagagaaacgcagtgggggaggcagggagtctggtgcctgcagagattctctgcttctttcctggggggaggtggggaggtcttagcaggagcgggccctgtacccacctgctgacctgctgtttggtagagaaataaaggttgtgtgactggggg

SEQ ID NO: 251351 - DNA, 3090 bp, Artificial Sequence
  derived and/or modified sequence
atggaggccgcccacctgctgcccgccgccgacgtgctgagacacttcagcgtgaccgccgagggcggcctgagccccgcccaggtgaccggcgccagagagagatacggccccaacgagctgcccagcgaggagggcaagagcctgtgggagctggtgctggagcagttcgaggacctgctggtgagaatcctgctgctggccgccctggtgagcttcgtgctggcctggttcgaggagggcgaggagaccaccaccgccttcgtggagcccctggtgatcatgctgatcctggtggccaacgccatcgtgggcgtgtggcaggagagaaacgccgagagcgccatcgaggccctgaaggagtacgagcccgagatgggcaaggtgatcagaagcgacagaaagggcgtgcagagaatcagagccagagacatcgtgcccggcgacatcgtggaggtggccgtgggcgacaaggtgcccgccgacctgagactgatcgagatcaagagcaccaccctgagagtggaccagagcatcctgaccggcgagagcgtgagcgtgaccaagcacaccgaggccatccccgaccccagagccgtgaaccaggacaagaagaacatgctgttcagcggcaccaacatcaccagcggcaaggccgtgggcgtggccgtggccaccggcctgcacaccgagctgggcaagatcagaagccagatggccgccgtggagcccgagagaacccccctgcagagaaagctggacgagttcggcagacagctgagccacgccatcagcgtgatctgcgtggccgtgtgggtgatcaacatcggccacttcgccgaccccgcccacggcggcagctggctgagaggcgccgtgtactacttcaagatcgccgtggccctggccgtggccgccatccccgagggcctgcccgccgtgatcaccacctgcctggccctgggcaccagaagaatggccagaaagaacgccatcgtgagaagcctgcccagcgtggagaccctgggctgcaccagcgtgatctgcagcgacaagaccggcaccctgaccaccaaccagatgagcgtgtgcagaatgttcgtggtggccgaggccgacgccggcagctgcctgctgcacgagttcaccatcagcggcaccacctacacccccgagggcgaggtgagacagggcgaccagcccgtgagatgcggccagttcgacggcctggtggagctggccaccatctgcgccctgtgcaacgacagcgccctggactacaacgaggccaagggcgtgtacgagaaggtgggcgaggccaccgagaccgccctgacctgcctggtggagaagatgaacgtgttcgacaccgacctgcaggccctgagcagagtggagagagccggcgcctgcaacaccgtgatcaagcagctgatgagaaaggagttcaccctggagttcagcagagacagaaagagcatgagcgtgtactgcacccccaccagaccccaccccaccggccagggcagcaagatgttcgtgaagggcgcccccgagagcgtgatcgagagatgcagcagcgtgagagtgggcagcagaaccgcccccctgacccccaccagcagagagcagatcctggccaagatcagagactggggcagcggcagcgacaccctgagatgcctggccctggccaccagagacgccccccccagaaaggaggacatggagctggacgactgcagcaagttcgtgcagtacgagaccgacctgaccttcgtgggctgcgtgggcatgctggacccccccagacccgaggtggccgcctgcatcaccagatgctaccaggccggcatcagagtggtgatgatcaccggcgacaacaagggcaccgccgtggccatctgcagaagactgggcatcttcggcgacaccgaggacgtggccggcaaggcctacaccggcagagagttcgacgacctgagccccgagcagcagagacaggcctgcagaaccgccagatgcttcgccagagtggagcccgcccacaagagcagaatcgtggagaacctgcagagcttcaacgagatcaccgccatgaccggcgacggcgtgaacgacgcccccgccctgaagaaggccgagatcggcatcgccatgggcagcggcaccgccgtggccaagagcgccgccgagatggtgctgagcgacgacaacttcgccagcatcgtggccgccgtggaggagggcagagccatctacagcaacatgaagcagttcatcagatacctgatcagcagcaacgtgggcgaggtggtgtgcatcttcctgaccgccatcctgggcctgcccgaggccctgatccccgtgcagctgctgtgggtgaacctggtgaccgacggcctgcccgccaccgccctgggcttcaacccccccgacctggacatcatggagaagctgcccagaagccccagagaggccctgatcagcggctggctgttcttcagatacctggccatcggcgtgtacgtgggcctggccaccgtggccgccgccacctggtggttcgtgtacgacgccgagggcccccacatcaacttctaccagctgagaaacttcctgaagtgcagcgaggacaaccccctgttcgccggcatcgactgcgaggtgttcgagagcagattccccaccaccatggccctgagcgtgctggtgaccatcgagatgtgcaacgccctgaacagcgtgagcgagaaccagagcctgctgagaatgcccccctggatgaacccctggctgctggtggccgtggccatgagcatggccctgcacttcctgatcctgctggtgccccccctgcccctgatcttccaggtgacccccctgagcggcagacagtgggtggtggtgctgcagatcagcctgcccgtgatcctgctggacgaggccctgaagtacctgagcagaaaccacatgcacgcctgcctgtaccccggcctgctgagaaccgtgagccaggcctggagcagacagcccctgaccaccagctggacccccgaccacaccggcctggccagcctgaagaagtag

SEQ ID NO: 251352 - protein, 400 aa, Artificial Sequence
  derived and/or modified sequence
MSGRVGDLSPKQAETLAKFRENVQDVLPALPNPDDYFLLRWLRARNFDLQKSEALLRKYMEFRKTMDIDHILDWQPPEVIQKYMPGGLCGYDRDGCPVWYDIIGPLDPKGLLFSVTKQDLLKTKMRDCERILHECDLQTERLGKKIETIVMIFDCEGLGLKHFWKPLVEVYQEFFGLLEENYPETLKFMLIVKATKLFPVGYNLMKPFLSEDTRRKIIVLGNNWKEGLLKLISPEELPAQFGGTLTDPDGNPKCLTKINYGGEIPKSMYVRDQVKTQYEHSVQINRGSSHQVEYEILFPGCVLRWQFSSDGADIGFGVFLKTKMGERQRAGEMTDVLPSQRYNAHMVPEDGNLTCSEAGVYVLRFDNTYSFVHAKKVSFTVEVLLPDEGMQKYDKELTPV

SEQ ID NO: 251353 - protein, 341 aa, Artificial Sequence
  derived and/or modified sequence
MEFRKTMDIDHILDWQPPEVIQKYMPGGLCGYDRDGCPVWYDIIGPLDPKGLLFSVTKQDLLKTKMRDCERILHECDLQTERLGKKIETIVMIFDCEGLGLKHFWKPLVEVYQEFFGLLEENYPETLKFMLIVKATKLFPVGYNLMKPFLSEDTRRKIIVLGNNWKEGLLKLISPEELPAQFGGTLTDPDGNPKCLTKINYGGEIPKSMYVRDQVKTQYEHSVQINRGSSHQVEYEILFPGCVLRWQFSSDGADIGFGVFLKTKMGERQRAGEMTDVLPSQRYNAHMVPEDGNLTCSEAGVYVLRFDNTYSFVHAKKVSFTVEVLLPDEGMQKYDKELTPV

SEQ ID NO: 251354 - DNA, 1203 bp, Artificial Sequence
  derived and/or modified sequence
atgagcggtagagtgggtgatctgagccctaagcaggctgagacgctggccaaatttagagaaaacgtccaggacgtgctccccgccctgccaaatccagatgactactttttgctcagatggctgcgcgcccgaaacttcgacctccagaaatcagaagctctcctgcgaaagtatatggaatttcgaaaaaccatggacattgatcacatccttgattggcagcctcctgaagtaatccagaagtatatgcctggcgggttgtgtggatatgatcgcgacggatgtcccgtgtggtatgatatcatcgggcctctggatcctaagggcctgctgttctccgttactaagcaggatttgctgaagaccaagatgagagattgcgagagaattctacatgagtgcgacctccagacagaacgtctgggaaagaagatcgagacgatcgtgatgatcttcgattgtgagggattaggattaaagcacttttggaaaccacttgtggaggtgtaccaggaattttttggactactggaagaaaactaccctgagacactgaaattcatgctgatagttaaggccactaagcttttccccgtgggttacaacctcatgaagcctttccttagcgaagacactcggagaaagattattgtattgggaaacaattggaaggaggggctcctgaaactgatcagtccagaagagctgcccgcccagtttggtggaactctcacggaccccgacggtaatccaaagtgtctcactaaaatcaactacggaggggagattccgaagtccatgtatgtgcgggatcaggtgaaaacccagtatgagcactccgtacagattaatcgagggtcgagccaccaggtagagtacgagattttatttcctggatgtgtgctgcgctggcagttctccagtgatggcgccgacattggttttggggtgtttctgaaaactaagatgggagagcgacaacgtgccggggagatgactgacgtgctgcctagtcagagatataacgcccacatggtccctgaagatgggaatcttacttgcagcgaggcaggggtgtatgtgctaaggttcgacaatacctacagttttgtgcatgctaagaaggtcagttttactgtcgaagtgctcctccccgatgagggtatgcagaagtatgacaaggagcttacccccgtctag

SEQ ID NO: 251355 - DNA, 1203 bp, Artificial Sequence
  derived and/or modified sequence
atgagcggccgggtgggggacctgagccccaagcaggccgagaccctggccaagttcagagaaaatgtgcaggatgtgctgcctgccctgcccaacccagatgactacttcctgctgcgctggctgcgggccaggaactttgacctgcagaagtctgaggccctgctgaggaagtacatggagttcaggaagaccatggacatcgaccacatcctggactggcagcccccagaggtgatccagaagtacatgcctgggggcctgtgtggctatgacagagatggctgccctgtgtggtatgacatcatcggccccctggaccccaagggcctgctcttctctgtgaccaagcaggacctgctgaagaccaagatgagggactgtgagcgcatcctgcatgaatgtgacctgcagacagagcggctgggcaagaagattgagaccatcgtgatgatctttgactgtgagggcctgggcctgaagcacttctggaagcccctggtggaggtgtaccaggagttcttcggcctgctggaggagaactacccagagaccctgaagttcatgctgattgtgaaggccaccaagctgtttcctgtgggctacaacctgatgaagcccttcctgtctgaggacaccaggaggaagatcatcgtgctgggcaacaactggaaggagggcctgctgaagctgatcagccctgaggagctgcctgcccagtttggaggcaccctgacagatcctgatggcaaccccaagtgcctgaccaagatcaactacggcggggagatccccaagtccatgtatgtgcgggaccaggtgaagacccagtatgagcacagcgtgcagatcaacagaggcagcagccaccaggtggagtatgagatcctcttccctggctgtgtgctgcgctggcagttcagcagtgatggagctgacatcggctttggagtcttcctgaagaccaagatgggagagcggcagagagctggggagatgacagatgtgctgcccagccagcgctacaatgcccacatggtgcctgaagatggcaacctgacctgcagcgaggccggcgtgtatgtgctgcgctttgacaacacctacagctttgtgcacgccaagaaggtgtccttcaccgtggaggtgctgctgcctgatgagggcatgcagaagtatgacaaggagctgacccctgtgtag

SEQ ID NO: 251356 - DNA, 1203 bp, Artificial Sequence
  derived and/or modified sequence
atgagcggccgggtgggcgacctgagccccaagcaggccgagaccctggcaaaatttagagaaaacgtccaagatgtcctgccagcgctgcctaaccctgatgactactttctgctacgatggctccgtgcccgaaattttgatttgcagaagtctgaggctctgttgaggaagtatatggaattccgaaaaacaatggacattgaccacattttagactggcagccccctgaggtgatccagaagtacatgccggggggtctctgcggatacgatcgggacggctgtcccgtatggtatgatattatcggaccactcgaccctaagggactgcttttttctgttactaaacaggaccttctcaagaccaaaatgcgcgactgtgagagaatcctgcacgaatgtgacctgcagacagaacgtctgggaaaaaagatcgagaccattgtgatgatctttgactgtgagggactagggctgaagcatttttggaaacccctggtggaggtctaccaagagttctttggactgcttgaggagaattaccctgaaactttaaaattcatgttaatagtgaaggcaacgaaactttttcccgtgggatacaacctgatgaagccgtttctttcagaggacacaaggcggaagatcatcgttctcgggaataattggaaggaggggcttttgaagcttatttccccagaggaactgccagcccaattcggcggcaccctaaccgatccagatggcaatcccaagtgtctgacgaagatcaactacggtggagagatccctaagtctatgtacgttcgggaccaagtcaaaacccaatacgaacactctgtccagatcaacagaggctcaagtcaccaggtggaatatgagattctgttcccaggatgcgttttgaggtggcagtttagtagtgacggtgccgacattggatttggtgtttttctaaaaactaagatgggggagaggcagagagccggcgaaatgaccgacgttcttccttcgcagagatacaacgctcacatggtccctgaagatggcaacttgacatgctcagaggcaggagtatacgtgttaaggtttgataacacgtactcctttgtacacgctaagaaggtgtcttttaccgtggaggtgctgcttccagatgagggaatgcagaaatacgacaaagaactaacacccgtatag

SEQ ID NO: 251357 - DNA, 1203 bp, Artificial Sequence
  derived and/or modified sequence
atgagtggaagggtcggcgacctttccccaaaacaggcagagaccctagccaaattccgcgagaacgttcaggatgtgctccccgctctaccaaatccagatgactacttcctcttacgctggttacgggctcgcaattttgatctgcagaaatctgaagccctgctgaggaaatatatggaatttaggaaaacaatggatatcgatcatattttagactggcagccacctgaggtgatccaaaagtatatgcccggaggtctatgcgggtatgacagggacggctgccctgtatggtacgatatcataggaccactggacccaaagggcctgctcttctccgtgaccaaacaagaccttctgaaaacaaagatgagggactgcgagcggatcctgcacgagtgtgatttacagaccgagcgactggggaagaagatagaaacgatagtgatgatattcgattgcgaaggcttgggtctgaaacatttttggaaacctttggtcgaagtgtatcaggagttcttcggcttgctggaagagaattaccccgagacattgaagttcatgcttatcgttaaggcgactaagctctttcctgtggggtataatctaatgaaaccatttctgagcgaagatacacgccgaaagattatcgtccttgggaacaactggaaagaagggctgctgaaattaatcagtccagaagaacttccagcccaattcggcggtaccttgaccgatccggatggcaaccctaaatgccttaccaagattaattacgggggagagatccctaaaagcatgtacgtgcgggaccaggtcaagactcagtatgagcattccgtccagatcaaccgcggatcctcccaccaggtcgaatatgagatactatttcctggctgcgtactaagatggcagttctccagtgacggggctgacattggcttcggtgttttcctgaaaacgaaaatgggcgaacggcagcgtgccggagaaatgactgatgtgctacccagccagcgatacaatgcgcacatggtccctgaagatgggaaccttacgtgttcagaagctggagtttacgtgctgagattcgacaacacttacagctttgtgcacgctaagaaagtgtcttttacagtggaagtgttgctgcctgacgagggcatgcagaagtacgacaaggagctgaccccagtctag

SEQ ID NO: 251358 - DNA, 1203 bp, Artificial Sequence
  derived and/or modified sequence
atgagcggcagagtgggcgacctgagccccaagcaggccgagaccctggccaagttcagagagaacgtgcaggacgtgctgcccgccctgcccaaccccgacgactacttcctgctgagatggctgagagccagaaacttcgacctgcagaagagcgaggccctgctgagaaagtacatggagttcagaaagaccatggacatcgaccacatcctggactggcagccccccgaggtgatccagaagtacatgcccggcggcctgtgcggctacgacagagacggctgccccgtgtggtacgacatcatcggccccctggaccccaagggcctgctgttcagcgtgaccaagcaggacctgctgaagaccaagatgagagactgcgagagaatcctgcacgagtgcgacctgcagaccgagagactgggcaagaagatcgagaccatcgtgatgatcttcgactgcgagggcctgggcctgaagcacttctggaagcccctggtggaggtgtaccaggagttcttcggcctgctggaggagaactaccccgagaccctgaagttcatgctgatcgtgaaggccaccaagctgttccccgtgggctacaacctgatgaagcccttcctgagcgaggacaccagaagaaagatcatcgtgctgggcaacaactggaaggagggcctgctgaagctgatcagccccgaggagctgcccgcccagttcggcggcaccctgaccgaccccgacggcaaccccaagtgcctgaccaagatcaactacggcggcgagatccccaagagcatgtacgtgagagaccaggtgaagacccagtacgagcacagcgtgcagatcaacagaggcagcagccaccaggtggagtacgagatcctgttccccggctgcgtgctgagatggcagttcagcagcgacggcgccgacatcggcttcggcgtgttcctgaagaccaagatgggcgagagacagagagccggcgagatgaccgacgtgctgcccagccagagatacaacgcccacatggtgcccgaggacggcaacctgacctgcagcgaggccggcgtgtacgtgctgagattcgacaacacctacagcttcgtgcacgccaagaaggtgagcttcaccgtggaggtgctgctgcccgacgagggcatgcagaagtacgacaaggagctgacccccgtgtag

SEQ ID NO: 251359 - DNA, 2086 bp, Artificial Sequence
  derived and/or modified sequence
gggcaaaaggacccagctgggtcagggctgacaaactaggcttggcctcttgcctatagtggccaccactcctcaagccccagccagcaccatgagcggccgagttggagacctgagccccaaacaggcagagaccctggccaagttccgagaaaacgtccaggatgtgcttcctgccctgcccaaccctgatgattatttccttctacgctggctccgagctcggaattttgacttgcagaagtcggaggctttgctccgcaagtacatggagttccggaagaccatggatattgaccatatccttgattggcagcccccagaggtgatccagaagtacatgcctgggggcctgtgtggctatgaccgtgatggctgccccgtgtggtatgacatcattgggccacttgatcccaaggggttgctcttctcagtcaccaagcaggacctgctcaagaccaagatgagggactgtgagcgcatcctgcatgagtgtgacctgcagacagagaggctagggaagaagattgagaccatcgtgatgatatttgactgtgagggcctgggactgaaacacttctggaaacctctggtagaagtgtaccaggagttctttggcctccttgaagagaattacccagagaccctgaagttcatgctcatcgtgaaagctaccaaactgttccctgtgggctacaacctcatgaagccattcctgagtgaggacactcgcaggaaaattattgtgttgggaaataactggaaggaaggtttgctgaaactcatcagtcctgaggaactgcctgcccagtttgggggcaccctgactgacccagatgggaaccccaaatgtttaaccaagattaactatggcggggagatccccaagtccatgtacgtgcgggaccaggtgaagactcagtacgagcactcggtgcagatcaaccgcggctcatcacaccaagtggaatacgagatcctatttccaggctgcgttctcaggtggcagttctcatctgatggtgcggacatcggcttcggagttttcctgaagaccaagatgggggagcgacagcgggcaggggagatgacagatgttctacccagccagcgctataacgcccacatggtgcccgaggatgggaacctcacctgctcagaggccggcgtctatgtcctacgcttcgacaacacctatagctttgtccacgccaagaaggtcagcttcacagtggaggtcctgctccctgacgagggcatgcagaaatatgataaggagctcacccctgtctaggtggctccctcatttctcagagacctcctaaccctttgatttctctgtttatatcctacactccctccctccctgaaattgattgttagtcctcctgactctgtgacgttagtgagtacagaaagagatgccctggggaaaactcatctactgtggtcagatcaagaaaggtatgagaggcacaaccttggagggtaccaaggttgcagaagaggaaaaagcaagggtaaaggcaagaagtgggtgtcatgaaactcaataaatagcaaaatgaatcccctagcctttgtcctcacctaccctaaggcaggtgtgtatgcttgaattccttccgtatggctgtgagcaacttgggttggagacatatctaaatcctttttacttccactccctatatatagtagatgctcagtgtatatttgtggcattgaatggaggaccagaaggtagggtgcaggtgactcaacagctgtacatgattaggaggagcctatgtggggtggatttcagcaccttggacaggagcagatgtgtggtggggttggactctcttctggagacccagacaattcagtctccagatttctggcagtggctgtcttttgagggccccagccacaaaggccacatgcctctgataggagctgcctacatcaggctttgtctgacttgcacgctcagcttcccaccctaacccacttcccttgttgcacatagcttatgttttagggactttcctggaagcaaaggcagtcacatctggcataatcataataaagaaaacaactatca

SEQ ID NO: 251360 - DNA, 1864 bp, Artificial Sequence
  derived and/or modified sequence
caccactcctcaagccccagccagcaccatgagcggccgagttggagacctgagccccaaacaggcagagaccctggccaagatggagtctctgtcatccaggctggagtgctgtggagcgatctcagctcactgcagcctctgtctcccaggttcaagcaattctcctgcctcagcctcctgagtagctgggattacagttccgagaaaacgtccaggatgtgcttcctgccctgcccaaccctgatgattatttccttctacgctggctccgagctcggaattttgacttgcagaagtcggaggctttgctccgcaagtacatggagttccggaagaccatggatattgaccatatccttgattggcagcccccagaggtgatccagaagtacatgcctgggggcctgtgtggctatgaccgtgatggctgccccgtgtggtatgacatcattgggccacttgatcccaaggggttgctcttctcagtcaccaagcaggacctgctcaagaccaagatgagggactgtgagcgcatcctgcatgagtgtgacctgcagacagagaggctagggaagaagattgagaccatcgtgatgatatttgactgtgagggcctgggactgaaacacttctggaaacctctggtagaagtgtaccaggagttctttggcctccttgaagagaattacccagagaccctgaagttcatgctcatcgtgaaagctaccaaactgttccctgtgggctacaacctcatgaagccattcctgagtgaggacactcgcaggaaaattattgtgttgggaaataactggaaggaaggtttgctgaaactcatcagtcctgaggaactgcctgcccagtttgggggcaccctgactgacccagatgggaaccccaaatgtttaaccaagattaactatggcggggagatccccaagtccatgtacgtgcgggaccaggtgaagactcagtacgagcactcggtgcagatcaaccgcggctcatcacaccaagtggaatacgagatcctatttccaggctgcgttctcaggtggcagttctcatctgatggtgcggacatcggcttcggagttttcctgaagaccaagatgggggagcgacagcgggcaggggagatgacagatgttctacccagccagcgctataacgcccacatggtgcccgaggatgggaacctcacctgctcagaggccggcgtctatgtcctacgcttcgacaacacctatagctttgtccacgccaagaaggtcagcttcacagtggaggtcctgctccctgacgagggcatgcagaaatatgataaggagctcacccctgtctaggtggctccctcatttctcagagacctcctaaccctttgatttctctgtttatatcctacactccctccctccctgaaattgattgttagtcctcctgactctgtgacgttagtgagtacagaaagagatgccctggggaaaactcatctactgtggtcagatcaagaaaggtatgagaggcacaaccttggagggtaccaaggttgcagaagaggaaaaagcaagggtaaaggcaagaagtgggtgtcatgaaactcaataaatagcaaaatgaatcccctagcctttgtcctcacctaccctaaggcaggtgtgtatgcttgaattccttccgtatggctgtgagcaacttgggttggagacatatctaaatcctttttacttccactccctatatatagtagatgctcagtgtatatttgtggcattgaatggaggaccagaaggtagggtgcaggtgactcaacagctgtacatgattaggaggagcctatgtggggtggatttcagcacct

SEQ ID NO: 251361 - protein, 584 aa, Artificial Sequence
  derived and/or modified sequence
MVAEVCSMPTASTVKKPFDLRSKMGKWCHHRFPCCRGSGKSNMGTSGDHDDSFMKMLRSKMGKCCRHCFPCCRGSGTSNVGTSGDHENSFMKMLRSKMGKWCCHCFPCCRGSGKSNVGAWGDYDHSAFMEPRYHIRREDLDKLHRAAWWGKVPRKDLIVMLRDTDMNKRDKEKRTALHLASANGNSEVVQLLLDRRCQLNVLDNKKRTALIKAIQCQEDECVLMLLEHGADRNIPDEYGNTALHYAIYNEDKLMAKALLLYGADIESKNKCGLTPLLLGVHEQKQQVVKFLIKKKANLNVLDRYGRTALILAVCCGSASIVNLLLEQNVDVSSQDLSGQTAREYAVSSHHHVICELLSDYKEKQMLKISSENSNPEQDLKLTSEEESQRLKVSENSQPEKMSQEPEINKDCDREVEEEIKKHGSNPVGLPENLTNGASAGNGDDGLIPQRRSRKPENQQFPDTENEEYHSDEQNDTRKQLSEEQNTGISQDEILTNKQKQIEVAEQKMNSELSLSHKKEEDLLRENSVLQEEIAMLRLELDETKHQNQLRENKILEEIESVKEKTDKLLRAMQLNEEALTKTNI

SEQ ID NO: 251362 - DNA, 1755 bp, Artificial Sequence
  derived and/or modified sequence
atggtcgccgaggtgtgttcaatgcccactgccagtactgttaaaaaacccttcgacctgaggtcaaaaatgggaaaatggtgccatcatcggttcccatgttgcaggggcagcgggaaatctaatatgggtacatctggtgaccatgatgacagctttatgaagatgctaagaagcaaaatgggaaagtgttgtagacactgcttcccatgctgccggggaagcggcacatccaacgtaggaaccagcggagaccatgaaaactccttcatgaagatgctacgtagcaaaatgggcaagtggtgctgtcattgctttccctgctgccgcggttcaggaaagagtaacgtgggcgcctggggggactacgatcatagtgcttttatggaaccgcgatatcacataagacgcgaggacttggataagctgcacagggccgcttggtggggcaaggtcccacggaaagacctaatcgttatgctgcgcgataccgatatgaataaaagagacaaagagaagcggactgctctccaccttgcatccgctaacggaaactcggaagtagtccaactgctgctggaccgaaggtgccagcttaacgttttagataataaaaagcggactgcactaattaaggccatccaatgtcaggaggatgaatgcgttctgatgctattagagcacggagcagacagaaacattcctgacgaatatggcaacactgccttacactatgctatttataatgaggataaactgatggctaaggctctgttactctatggcgctgatattgagagcaaaaataaatgcgggttgacgccactattactgggagtccatgaacagaaacagcaagtggtgaagtttctgattaagaagaaagctaatctcaatgtgctcgataggtacggaagaactgcattgatcctggctgtgtgttgtggaagtgcaagcatcgtcaatctgctgcttgagcagaacgtggacgtctcctctcaggacctttctgggcagacggctagggaatacgccgtatcctcccaccatcacgtaatctgtgagttactgagcgactacaaggaaaagcagatgctcaagatttcatcagaaaattccaatcctgaacaggacttgaagctgacttccgaggaagaatcgcagcggcttaaggtcagtgagaactcccagcctgagaagatgtcccaggaacctgagattaataaggactgtgatcgggaggtagaggaggaaatcaagaaacacggatcaaatcccgttgggttgcctgaaaacctcacaaatggggccagcgccggtaatggagacgacggcctcattccccagcggcgctcccgtaagcctgagaaccagcaatttcctgacacggagaacgaagaataccactctgatgagcagaatgacactcggaagcagctgagcgaggagcagaatactggtatctcgcaagacgagatcttgacaaacaagcagaaacagatcgaagtcgcagagcagaagatgaattccgaactttccctgtcccataaaaaggaagaggaccttctgcgggagaattccgtgttgcaagaggaaatcgccatgttgagattggaattggacgagaccaaacaccagaaccaactgcgcgagaacaaaattttggaggaaattgagtccgtcaaagaaaagaccgacaaattgttgagagctatgcagctcaacgaagaggcattaactaagacaaacatctag

SEQ ID NO: 251363 - DNA, 1755 bp, Artificial Sequence
  derived and/or modified sequence
atggtggccgaggtgtgcagcatgcccacagccagcacagtgaagaagccctttgacctgcggagcaagatgggcaagtggtgccaccaccgcttcccctgctgccggggcagcggcaagagcaacatgggcaccagcggggaccatgatgacagcttcatgaagatgctgcggagcaagatgggcaagtgctgccgccactgcttcccctgctgccggggcagcggcaccagcaatgtgggcaccagcggggaccatgaaaattccttcatgaagatgctgcggagcaagatgggcaagtggtgctgccactgcttcccctgctgccggggcagcggcaagagcaatgtgggcgcctggggagactatgaccacagcgccttcatggagccccgctaccacatccggcgggaggacctggacaagctgcaccgggccgcctggtggggcaaggtgcccaggaaggacctgattgtgatgctgcgggacacagacatgaacaagagggacaaggagaagaggacagccctgcacctggccagcgccaatggaaacagcgaggtggtgcagctgctgctggaccggcgctgccagctgaatgtgctggacaacaagaagaggacagccctgatcaaggccatccagtgccaggaggatgaatgtgtgctgatgctgctggagcacggggctgacaggaacatcccagatgaatatggcaacacagccctgcactacgccatctacaatgaagacaagctgatggccaaggccctgctgctgtatggagctgacatcgagagcaagaacaagtgtggcctgacccccctgctgctgggcgtgcatgagcagaagcagcaggtggtgaagttcctgatcaagaagaaggccaacctgaatgtgctggacagatatggccgcacagccctgatcctggccgtgtgctgcggcagcgccagcatcgtgaacctgctgctggagcagaatgtggatgtgagcagccaggacctgagcggccagacagcccgggagtatgctgtgagcagccaccaccacgtgatctgtgagctgctgagtgactacaaggagaagcagatgctgaagatcagcagcgagaacagcaaccctgagcaggacctgaagctgaccagcgaggaggagagccagaggctgaaggtgtctgagaacagccagcctgagaagatgagccaggagcctgagatcaacaaggactgtgaccgggaggtggaggaggagatcaagaagcacggcagcaaccctgtgggcctgcctgagaacctgaccaatggagccagcgctggaaatggagatgatggcctcatcccccagaggaggagcaggaagccagagaaccagcagttcccagacacagaaaatgaggagtaccacagtgatgagcagaatgacaccaggaagcagctgtctgaggagcagaacacaggcatcagccaggatgagatcctgaccaacaagcagaagcagatcgaggtggccgagcagaagatgaacagcgagctgagcctgagccacaagaaggaggaggacctgctgagagaaaattctgtgctgcaggaggagatcgccatgctgcggctggagctggatgagaccaagcaccagaaccagctgcgggagaacaagatcctggaggagattgagagcgtgaaggagaagacagacaagctgctgcgggccatgcagctgaatgaggaggccctgaccaagaccaacatctag

SEQ ID NO: 251364 - DNA, 1755 bp, Artificial Sequence
  derived and/or modified sequence
atggtggccgaggtgtgcagcatgcccaccgccagcaccgtgaagaagccattcgatctgaggtcaaaaatgggaaagtggtgccaccaccgcttcccatgctgtagaggaagcggaaagagtaacatgggcacttctggcgatcatgatgatagctttatgaagatgttgcgctctaaaatgggcaaatgctgccggcactgcttcccatgctgtcgcggcagcggtacatcgaatgttggtacatccggagatcacgagaattcgttcatgaagatgctgcgcagcaaaatgggtaaatggtgctgtcattgctttccttgctgccgcgggagcgggaagtctaatgtgggtgcgtggggcgactacgatcactcggcttttatggagccacggtaccacatcagacgggaagacctggataaactgcacagagctgcgtggtgggggaaagtccctaggaaggacttaatagtaatgctccgtgacaccgatatgaacaagcgcgacaaggagaagagaactgcccttcacctggcctccgccaacggaaactccgaagtggttcagctgcttctggatagacgttgccagctcaacgttctcgataacaagaagcggaccgcgctgattaaagcgattcaatgccaagaagatgaatgtgtgttgatgcttctggagcacggagctgaccgcaatatccccgatgaatatgggaacacggctctgcattacgcgatttacaacgaggacaagctgatggcaaaggcattgcttctgtatggcgccgacatagaaagcaagaacaagtgcggtttaacgccacttttgctaggcgtgcacgagcagaaacagcaggtggtaaagtttctcatcaagaagaaggcaaatctgaatgtcctggataggtacggacgtacagcactgattctggccgtgtgctgcggcagtgcctccatcgtgaatctgttgttagagcagaatgtggacgtgtcctcccaggacctgagcgggcagactgcccgcgaatacgctgtttcctctcatcaccatgtgatctgtgagttgctttctgactataaagaaaaacagatgcttaagatctcatccgaaaatagcaatccagagcaggacctaaaattaacctcagaggaagagagccagcgccttaaagtgtccgaaaattctcaacctgaaaagatgagccaggaacccgagattaacaaagattgcgaccgagaagtcgaagaggaaatcaagaaacacggatcaaaccccgtggggctgcccgagaacctgacaaatggtgcttctgcagggaacggcgacgatggcttaatcccgcagcgccggtccagaaagcccgaaaaccaacagttcccagataccgagaacgaagagtaccattcagacgaacagaacgatacccgcaagcagctgtcagaggaacagaacacgggaatctcacaagacgagatcctcaccaacaagcagaaacagatcgaagtcgctgaacaaaagatgaattcagaactgtccctcagtcataagaaggaggaggacctcctaagagagaatagtgtgctccaggaggaaatagcaatgttaagattggagctggacgagacaaaacatcagaatcagttgagggagaacaaaattctcgaggagatagagtcagtgaaagaaaaaaccgacaaactgttgcgcgcaatgcagctcaacgaggaggcactgacaaagacgaatatttag

SEQ ID NO: 251365 - DNA, 1826 bp, Artificial Sequence
  derived and/or modified sequence
ggtagacgcgatctgttcgctactaccggcctcccctggctgttaaaagcagatggtggctgaggtttgttcaatgcccactgcctctactgtgaagaagccatttgatctcaggagcaagatgggcaagtggtgccaccaccgcttcccctgctgcagggggagcggcaagagcaacatgggcacttctggagaccacgacgactcctttatgaagatgctcaggagcaagatgggcaagtgttgccgccactgcttcccctgctgcagggggagcggcacgagcaacgtgggcacttctggagaccatgaaaactcctttatgaagatgctcaggagcaagatgggcaagtggtgctgtcactgcttcccctgctgcagggggagcggcaagagcaacgtgggcgcttggggagactacgaccacagcgccttcatggagccgaggtaccacatccgtcgagaagatctggacaagctccacagagctgcctggtggggtaaagtccccagaaaggatctcatcgtcatgctcagggacactgacatgaacaagagggacaaggaaaagaggactgctctacatttggcctctgccaatggaaattcagaagtagtacaactcctgctggacagacgatgtcaacttaatgtccttgacaacaaaaaaaggacagctctgataaaggccatacaatgccaggaagatgaatgtgtgttaatgttgctggaacatggcgctgatcgaaatattccagatgagtatggaaataccgctctacactatgctatctacaatgaagataaattaatggccaaagcactgctcttatatggtgctgatattgaatcaaaaaacaagtgtggcctcacaccacttttgcttggcgtacatgaacaaaaacagcaagtggtgaaatttttaatcaagaaaaaagctaatttaaatgtacttgatagatatggaagaactgccctcatacttgctgtatgttgtggatcagcaagtatagtcaatcttctacttgagcaaaatgttgatgtatcttctcaagatctatctggacagacggccagagagtatgctgtttctagtcatcatcatgtaatttgtgaattactttctgactataaagaaaaacagatgctaaaaatctcttctgaaaacagcaatccagaacaagacttaaagctgacatcagaggaagagtcacaaaggcttaaagtcagtgaaaatagccagccagagaaaatgtctcaagaaccagaaataaataaggactgtgatagagaggttgaagaagaaataaagaagcatggaagtaatcctgtgggattaccagaaaacctgactaatggtgccagtgctggcaatggtgatgatggattaattccacaaaggaggagcagaaaacctgaaaatcagcaatttcctgacactgagaatgaagagtatcacagtgatgaacaaaatgatacccggaaacaactttctgaagaacagaacactggaatatcacaagatgagattctgactaataaacaaaagcagatagaagtggctgaacagaaaatgaattctgagctttctcttagtcataagaaagaagaagatctcttgcgtgaaaacagcgtgttgcaggaagaaattgccatgctaagactggaactagatgaaacaaaacatcagaaccagctaagggaaaataaaattttggaggaaattgaaagtgtgaaagaaaagactgataaacttctaagggctatgcaattgaatgaagaagcattaacgaaaaccaatatttaagtacagtggacagcttagg

SEQ ID NO: 251366 - DNA, 1755 bp, Artificial Sequence
  derived and/or modified sequence
atggtcgctgaggtgtgctcaatgccaaccgcttccacagttaagaagccttttgatctccgatccaaaatgggaaagtggtgtcatcataggttcccatgctgtagaggaagcggaaagtccaatatgggtacatcaggcgaccacgacgattcctttatgaaaatgctgcgcagcaaaatggggaaatgctgccgtcattgcttcccttgttgcagaggcagcgggacctcaaatgtcggcacctctggcgatcatgagaattcctttatgaaaatgctcagaagtaagatggggaaatggtgttgtcactgttttccctgttgtcggggatcagggaaatcgaacgtaggcgcatggggggattatgaccacagcgcctttatggaacccagataccatatccgacgggaggatctggacaaactgcatagagccgcttggtggggaaaagtgccaagaaaagacttgattgtgatgttaagggatacggacatgaacaagagggataaggagaaacgaacagcccttcacttggcttccgcgaacggaaattcagaggtcgtgcaattgctcttggaccgcaggtgccagcttaatgtgctcgataacaagaagagaactgccctgataaaagccatccagtgccaagaagatgagtgcgtgctcatgctgctggaacatggcgcagatcgaaacatccccgacgaatacgggaatacagcgctgcactatgcaatctacaatgaagacaaattaatggccaaggctctcttgttatacggggctgacattgagtcaaagaacaagtgcggactgaccccactgctcctaggagtgcatgaacagaagcagcaggtcgtaaagttcttaataaagaaaaaagccaatctgaacgtcctcgatcgctacggacgcacagccttgattctggctgtgtgctgcggaagcgcttcaattgtcaacctcctcctggaacagaatgtggacgtgagctcccaggacctctcaggacagaccgccagagagtacgccgtttcgtctcatcatcacgttatatgcgaactgctgagcgactacaaagaaaaacagatgcttaagatctcttctgagaacagcaatcctgagcaggacctaaagctcacatcagaagaggagtcccagaggctgaaggtaagtgagaattcccagccagaaaaaatgagtcaggaaccagaaattaacaaagactgcgaccgcgaggtggaagaggagataaaaaagcatggaagcaaccccgttggcctccctgaaaatttgacaaatggggcttccgcagggaacggcgatgacggattgatcccgcagcggagaagcaggaaacctgaaaaccagcagttccccgatacagaaaacgaggaataccacagtgacgagcagaatgatactcgcaagcagctatctgaagagcagaatacaggaatcagccaggacgaaatactgactaataagcagaaacaaatcgaggttgccgagcagaaaatgaactccgaattaagtttgtctcacaagaaggaggaggatttgctgagagaaaattctgtgttacaggaggaaatagcaatgctcagacttgaactggacgaaacgaaacatcaaaaccaactccgggagaataagatccttgaggaaatcgagagcgtgaaagaaaaaacagataagctactgcgtgcaatgcagctcaacgaagaagccctcacgaaaacaaacatctag

SEQ ID NO: 251367 - DNA, 1755 bp, Artificial Sequence
  derived and/or modified sequence
atggtggccgaggtgtgcagcatgcccaccgccagcaccgtgaagaagcccttcgacctgagaagcaagatgggcaagtggtgccaccacagattcccctgctgcagaggcagcggcaagagcaacatgggcaccagcggcgaccacgacgacagcttcatgaagatgctgagaagcaagatgggcaagtgctgcagacactgcttcccctgctgcagaggcagcggcaccagcaacgtgggcaccagcggcgaccacgagaacagcttcatgaagatgctgagaagcaagatgggcaagtggtgctgccactgcttcccctgctgcagaggcagcggcaagagcaacgtgggcgcctggggcgactacgaccacagcgccttcatggagcccagataccacatcagaagagaggacctggacaagctgcacagagccgcctggtggggcaaggtgcccagaaaggacctgatcgtgatgctgagagacaccgacatgaacaagagagacaaggagaagagaaccgccctgcacctggccagcgccaacggcaacagcgaggtggtgcagctgctgctggacagaagatgccagctgaacgtgctggacaacaagaagagaaccgccctgatcaaggccatccagtgccaggaggacgagtgcgtgctgatgctgctggagcacggcgccgacagaaacatccccgacgagtacggcaacaccgccctgcactacgccatctacaacgaggacaagctgatggccaaggccctgctgctgtacggcgccgacatcgagagcaagaacaagtgcggcctgacccccctgctgctgggcgtgcacgagcagaagcagcaggtggtgaagttcctgatcaagaagaaggccaacctgaacgtgctggacagatacggcagaaccgccctgatcctggccgtgtgctgcggcagcgccagcatcgtgaacctgctgctggagcagaacgtggacgtgagcagccaggacctgagcggccagaccgccagagagtacgccgtgagcagccaccaccacgtgatctgcgagctgctgagcgactacaaggagaagcagatgctgaagatcagcagcgagaacagcaaccccgagcaggacctgaagctgaccagcgaggaggagagccagagactgaaggtgagcgagaacagccagcccgagaagatgagccaggagcccgagatcaacaaggactgcgacagagaggtggaggaggagatcaagaagcacggcagcaaccccgtgggcctgcccgagaacctgaccaacggcgccagcgccggcaacggcgacgacggcctgatcccccagagaagaagcagaaagcccgagaaccagcagttccccgacaccgagaacgaggagtaccacagcgacgagcagaacgacaccagaaagcagctgagcgaggagcagaacaccggcatcagccaggacgagatcctgaccaacaagcagaagcagatcgaggtggccgagcagaagatgaacagcgagctgagcctgagccacaagaaggaggaggacctgctgagagagaacagcgtgctgcaggaggagatcgccatgctgagactggagctggacgagaccaagcaccagaaccagctgagagagaacaagatcctggaggagatcgagagcgtgaaggagaagaccgacaagctgctgagagccatgcagctgaacgaggaggccctgaccaagaccaacatctag

SEQ ID NO: 251368 - protein, 480 aa, Artificial Sequence
  derived and/or modified sequence
MGPGPPAAGAAPSPRPLSLVARLSYAVGHFLNDLCASMWFTYLLLYLHSVRAYSSRGAGLLLLLGQVADGLCTPLVGYEADRAASCCARYGPRKAWHLVGTVCVLLSFPFIFSPCLGCGAATPEWAALLYYGPFIVIFQFGWASTQISHLSLIPELVTNDHEKVELTALRYAFTVVANITVYGAAWLLLHLQGSSRVEPTQDISISDQLGGQDVPVFRNLSLLVVGVGAVFSLLFHLGTRERRRPHAEEPGEHTPLLAPATAQPLLLWKHWLREPAFYQVGILYMTTRLIVNLSQTYMAMYLTYSLHLPKKFIATIPLVMYLSGFLSSFLMKPINKCIGRNMTYFSGLLVILAFAAWVALAEGLGVAVYAAAVLLGAGCATILVTSLAMTADLIGPHTNSGAFVYGSMSFLDKVANGLAVMAIQSLHPCPSELCCRACVSFYHWAMVAVTGGVGVAAALCLCSLLLWPTRLRRWDRDARP

SEQ ID NO: 251369 - DNA, 1443 bp, Artificial Sequence
  derived and/or modified sequence
atgggccccggcccccccgccgccggcgccgcccccagccccagacccctgagcctggtggccagactgagctacgccgtgggccacttcctgaacgacctgtgcgccagcatgtggttcacctacctgctgctgtacctgcacagcgtgagagcctacagcagcagaggcgccggcctgctgctgctgctgggccaggtggccgacggcctgtgcacccccctggtgggctacgaggccgacagagccgccagctgctgcgccagatacggccccagaaaggcctggcacctggtgggcaccgtgtgcgtgctgctgagcttccccttcatcttcagcccctgcctgggctgcggcgccgccacccccgagtgggccgccctgctgtactacggccccttcatcgtgatcttccagttcggctgggccagcacccagatcagccacctgagcctgatccccgagctggtgaccaacgaccacgagaaggtggagctgaccgccctgagatacgccttcaccgtggtggccaacatcaccgtgtacggcgccgcctggctgctgctgcacctgcagggcagcagcagagtggagcccacccaggacatcagcatcagcgaccagctgggcggccaggacgtgcccgtgttcagaaacctgagcctgctggtggtgggcgtgggcgccgtgttcagcctgctgttccacctgggcaccagagagagaagaagaccccacgccgaggagcccggcgagcacacccccctgctggcccccgccaccgcccagcccctgctgctgtggaagcactggctgagagagcccgccttctaccaggtgggcatcctgtacatgaccaccagactgatcgtgaacctgagccagacctacatggccatgtacctgacctacagcctgcacctgcccaagaagttcatcgccaccatccccctggtgatgtacctgagcggcttcctgagcagcttcctgatgaagcccatcaacaagtgcatcggcagaaacatgacctacttcagcggcctgctggtgatcctggccttcgccgcctgggtggccctggccgagggcctgggcgtggccgtgtacgccgccgccgtgctgctgggcgccggctgcgccaccatcctggtgaccagcctggccatgaccgccgacctgatcggcccccacaccaacagcggcgccttcgtgtacggcagcatgagcttcctggacaaggtggccaacggcctggccgtgatggccatccagagcctgcacccctgccccagcgagctgtgctgcagagcctgcgtgagcttctaccactgggccatggtggccgtgaccggcggcgtgggcgtggccgccgccctgtgcctgtgcagcctgctgctgtggcccaccagactgagaagatgggacagagacgccagaccctag

SEQ ID NO: 251370 - DNA, 1443 bp, Artificial Sequence
  derived and/or modified sequence
atgggacctggccctccggctgccggcgcagccccttcgcctagaccgctgagcctggtggcccggctgtcttacgcggtaggccatttcctgaatgacctgtgtgcaagtatgtggttcacatacctcctgctttacctgcactctgtgcgggcttacagcagccgaggagccgggctcctcctactgctcggccaagtggccgatgggctttgtacacccttggtgggatatgaggctgatagggctgcatcctgctgcgcccggtatgggccacggaaggcctggcacctggtgggcaccgtgtgcgtgctgctgagctttccattcatattctccccttgcctcggctgcggcgcagcgacacccgaatgggcagctctgctctattacggaccatttatcgtaatcttccagtttgggtgggcctcgactcagataagtcatctgtccctaattcctgagctggtcaccaacgatcacgaaaaggttgagctgaccgctctccgctacgcctttaccgtcgttgcgaatatcacggtatacggcgctgcttggttactgttgcatcttcaagggtcctcacgagtcgaaccgactcaagacatttcaattagcgatcaattggggggtcaagacgtaccagtgttccgaaatctgtctttgctcgtagttggggtgggggctgtgttcagcctgctgttccacttgggtaccagagagcggcgaagaccccacgctgaagagcccggggagcacacccccctgcttgcacctgcaactgcccaacccctgttactgtggaagcactggttgcgggagccggcattctaccaagtcggcatcctctatatgacaacccgcttgattgtgaatctgtcccagacctacatggccatgtatcttacttactcactacacctgccaaagaagtttatcgccactattcctcttgtaatgtacctttccggattcctcagctcttttctgatgaaacccattaacaagtgtattggacgcaatatgacttattttagcggcctgctggtgattttagcattcgctgcctgggttgcgctggccgaaggcctgggtgtcgcggtgtacgccgccgccgtgctcctaggcgcaggatgtgcaacaattctggtgacctcactcgccatgaccgccgaccttatcggaccacataccaattcaggggcgttcgtctacggctccatgagcttcctggacaaggtggccaacggcctggcagtaatggccatacaatctctgcacccctgcccttctgaattgtgttgcagggcttgcgtgtcgttctaccattgggctatggtggcggttaccggaggcgttggggtagcggcggctctctgtctctgtagtcttctcctgtggcctactcggctgcgccgctgggatcgcgatgcgcggccgtag

SEQ ID NO: 251371 - DNA, 2123 bp, Artificial Sequence
  derived and/or modified sequence
tggggcggacgcggcggacgtgggtgagggcgcggccgtaagagagcgggacgcggggtgcccggcgcgtggtgggggtccccggcgcctgcccccacggcacccaagaaggcctggccagggtaccctccgcggagcccgggggtggggggcgcgggcccggcgccgcgatgggcccgggacccccagcggccggagcggcgccgtccccgcggccgctgtccctggtggcgcggctgagctacgccgtgggccacttcctcaacgacctgtgcgcgtccatgtggttcacctacctgctgctctacctgcactcggtgcgcgcctacagctcccgcggcgcggggctgctgctgctgctgggccaggtggccgacgggctgtgcacaccgctcgtgggctacgaggccgaccgcgccgccagctgctgcgcccgctacggcccgcgcaaggcctggcacctggtcggcaccgtctgcgtcctgctgtccttccccttcatcttcagcccctgcctgggctgtggggcggccacgcccgagtgggctgccctcctctactacggcccgttcatcgtgatcttccagtttggctgggcctccacacagatctcccacctcagcctcatcccggagctcgtcaccaacgaccatgagaaggtggagctcacggcactcaggtatgcgttcaccgtggtggccaacatcaccgtctacggcgccgcctggctcctgctgcacctgcagggctcgtcgcgggtggagcccacccaagacatcagcatcagcgaccagctggggggccaggacgtgcccgtgttccggaacctgtccctgctggtggtgggtgtcggcgccgtgttctcactgctattccacctgggcacccgggagaggcgccggccgcatgcggaggagccaggcgagcacacccccctgttggcccctgccacggcccagcccctgctgctctggaagcactggctccgggagccggctttctaccaggtgggcatactgtacatgaccaccaggctcatcgtgaacctgtcccagacctacatggccatgtacctcacctactcgctccacctgcccaagaagttcatcgcgaccattcccctggtgatgtacctcagcggcttcttgtcctccttcctcatgaagcccatcaacaagtgcattgggaggaacatgacctacttctcaggcctcctggtgatcctggcctttgccgcctgggtggcgctggcggagggactgggtgtggccgtgtacgcagcggctgtgctgctgggtgctggctgtgccaccatcctcgtcacctcgctggccatgacggccgacctcatcggtccccacacgaacagcggagcgttcgtgtacggctccatgagcttcttggataaggtggccaatgggctggcagtcatggccatccagagcctgcacccttgcccctcagagctctgctgcagggcctgcgtgagcttttaccactgggcgatggtggctgtgacgggcggcgtgggcgtggccgctgccctgtgtctctgtagcctcctgctgtggccgacccgcctgcgacgctgggaccgtgatgcccggccctgactcctgacagcctcctgcacctgtgcaagggaactgtggggacgcacgaggatgccccccagggccttggggaaaagcccccactgcccctcactcttctctggacccccaccctccatcctcacccagctcccgggggtggggtcgggtgagggcagcagggatgcccgccagggacttgcaaggaccccctgggttttgagggtgtcccattctcaactctaatccatcccagccctctggaggatttggggtgcccctctcggcagggaacaggaagtaggaatcccagaagggtctgggggaaccctaaccctgagctcagtccagttcacccctcacctccagcctgggggtctccagacactgccagggccccctcaggacggctggagcctggaggagacagccacggggtggtgggctgggcctggaccccaccgtggtgggcagcagggctgcccggcaggcttggtggactctgctggcagcaaataaagagatgacggc

SEQ ID NO: 251372 - DNA, 1443 bp, Artificial Sequence
  derived and/or modified sequence
atgggccctggccccccagctgctggggccgcccccagcccccggcccctgagcctggtggcccggctgtcctatgctgtgggccacttcctgaatgacctgtgtgcctccatgtggttcacctacctgctgctgtacctgcacagcgtgcgggcctacagcagcagaggagctggcctgctgctgctgctgggccaggtggctgatggcctgtgcacccccctggtgggctatgaggccgacagagctgccagctgctgtgcccgctatggccccaggaaggcctggcacctggtgggcaccgtgtgtgtgctgctgtccttccccttcatcttcagcccctgcctgggctgtggggccgccaccccagagtgggccgccctgctgtactacggccccttcatcgtcatcttccagtttggctgggccagcacccagatcagccacctgagcctcatccctgagctggtgaccaatgaccacgagaaggtggagctgacagccctgcgctatgccttcaccgtggtggccaacatcaccgtgtatggagctgcctggctgctgctgcacctgcagggcagcagccgggtggagcccacccaggacatcagcatcagtgaccagctgggcggccaggatgtgcctgtgttcaggaacctgagcctgctggtggtgggcgtgggcgctgtgttcagcctgctcttccacctgggcacccgggagaggagaagacctcatgctgaggagcccggggagcacacccccctgctggccccagccacagcccagcccctgctgctgtggaagcactggctgcgggagcccgccttctaccaggtgggcatcctgtacatgaccaccaggctcatcgtgaacctgagccagacctacatggccatgtacctgacctacagcctgcacctgcccaagaagttcatcgccaccatccccctggtgatgtacctgagcggcttcctgagcagcttcctgatgaagcccatcaacaagtgcatcggcaggaacatgacctacttcagcggcctgctggtgatcctggcctttgctgcctgggtggccctggccgagggcctgggcgtggccgtgtatgctgctgctgtgctgctgggcgccggctgtgccaccatcctggtgaccagcctggccatgacagctgacctgattggcccccacaccaacagcggggcctttgtgtatggctccatgtccttcctggacaaggtggccaacggcctggccgtgatggccatccagagcctgcacccctgccccagcgagctgtgctgccgggcctgtgtgtccttctaccactgggccatggtggccgtgactggaggagtgggcgtggccgccgccctgtgcctgtgcagcctgctgctgtggcccacccggctgcggcgctgggacagagatgcccggccctag

SEQ ID NO: 251373 - DNA, 1443 bp, Artificial Sequence
  derived and/or modified sequence
atgggccccggcccccccgccgccggcgccgcccccagcccccggcctctcagcctcgtggcgagactctcatacgcagtgggacacttcttaaatgatctgtgtgctagcatgtggttcacctatctcttattatatctgcatagcgtcagagcatattcaagccgaggggcgggcctgctgctgttactcggtcaggtcgcagatggactgtgtacccccctggtgggctacgaggcggatagggctgcgagctgctgcgctcgctacgggcctcgcaaagcatggcacttggtagggactgtctgcgttttactcagctttcccttcattttctctccatgcctaggatgtggagctgctacccccgaatgggccgccttgctctattacggaccttttatagtgatattccaatttggatgggccagcacacagatatcgcacctgagccttatccctgagttagtgacaaatgatcatgagaaagtggagctgacagccttgagatacgctttcactgtcgtcgccaacatcactgtgtacggcgccgcgtggctgctgttgcacctccagggctcatctcgcgtcgaaccgacacaagatatctctatttccgatcagctcgggggccaggacgtccctgtgtttcgcaatctctctcttctggtggtgggagtgggcgctgtattctcgctgctcttccacttaggaactagagagcggagacggccacacgctgaagagcccggtgaacatacccctcttctggcccctgccacagcccagcccctattgctctggaagcactggctcagagagcctgccttttaccaggtgggtattctgtatatgacaaccaggctgatcgttaatttgtcccagacttacatggccatgtacctgacatactccctacatctgccgaagaaattcatcgccactatacctctggtaatgtacctgtcggggtttctgagttcattcctaatgaagcccatcaacaaatgcatcggcaggaacatgacgtacttctcgggactgctcgtgatcttggcgtttgctgcctgggttgccctggccgagggtctcggcgtcgcagtttatgctgccgccgtgctcctcggtgcagggtgcgccaccattctggtcacatctctagctatgaccgcagacctgattggaccccacactaactctggcgcgttcgtttatggaagtatgtcattcttggacaaggtagcgaacggcctggctgtcatggccattcagtctttacacccttgtcctagcgagttgtgctgcagggcgtgcgtgtccttctatcactgggccatggttgcagtgaccggcggcgtgggagtggctgccgcgctatgtctctgttctctgctcttgtggcctacaaggttacgcagatgggacagagacgcgagaccatag

SEQ ID NO: 251374 - DNA, 1443 bp, Artificial Sequence
  derived and/or modified sequence
atggggccaggcccaccagctgcgggagccgctccctccccacggccattaagccttgtcgcaaggcttagttatgcagtaggccatttcctgaatgatctttgcgccagcatgtggttcacatacctcctcctgtacctccatagcgtgagggcctatagctccagaggcgcaggactgctattgctcttaggtcaggtcgctgatggtttatgtaccccactggtcgggtatgaggccgatcgcgcagcgagctgttgtgccaggtatggccctcggaaggcctggcatttggtgggaactgtttgcgtactgctttcctttccctttatttttagcccttgcctgggatgcggcgctgcaacaccagagtgggctgccctactctattacggtccttttattgtaatattccagtttgggtgggctagtactcagatctcccatctttcgcttatccccgagttagtgaccaatgatcatgaaaaggtggaattgaccgcactgaggtatgcctttacagtggttgcaaacattaccgtgtacggtgcagcttggttactgctgcacctccagggcagttcgagggtagaaccgactcaagatattagtatttctgatcagctcggtgggcaggacgtacctgtgtttcgtaatctgtctctactggtggttggtgtcggcgctgtgtttagtcttttgttccacctgggcaccagagaacggaggaggcctcatgccgaagagccgggagaacacactccattgctggccccagcgacagcacagcctctgttactgtggaagcactggttgagggagcccgcattttatcaagtcggcatcctctatatgactaccagactgatcgttaacttgtcacagacctatatggctatgtatctcacttattcgctgcacctccccaaaaagttcatagcgaccataccgctggttatgtacctgtctggtttcctgagctctttcttaatgaaaccaatcaacaagtgcatcgggcgaaacatgacctacttttctgggttgctggtgattctagcttttgcagcatgggtggccctggcggagggtctcggcgtggctgtctacgcggctgctgtgctgctcggagcgggatgcgctactatcctggtgacttctctcgccatgacggctgatttgattggtccccacaccaactcaggtgcctttgtctatggatccatgagctttctggataaggtagccaatggcttagctgtgatggcaattcaaagtctccacccttgcccgtctgaactgtgttgccgagcctgcgtcagcttctatcattgggccatggtggctgtaactggcggtgtgggagttgccgctgccctttgtctgtgtagtctcctgttgtggccaacaagactgagaagatgggacagagacgctcgaccttag

SEQ ID NO: 251375 - protein, 1007 aa, Artificial Sequence
  derived and/or modified sequence
MKMWLLVSHLVIISITTCLAVSEEDKGFGPIFEEQPINTIYPEESLEGKVSLNCRARASPFPVYKWRMNNGDVDLTSDRYSMVGGNLVINNPDKQKDAGIYYCLASNNYGMVRSTEATLSFGYLDPFPPEERPEVRVKEGKGMVLLCDPPYHFPDDLSYRWLLNEFPVFITMDKRRFVSQTNGNLYIANVEASDKGNYSCFVSSPSITKSVFSKFIPLIPIPERTTKPYPADIVVQFKDVYALMGQNVTLECFALGNPVPDIRWRKVLEPMPSTAEISTSGAVLKIFNIQLEDEGIYECEAENIRGKDKHQARIYVQAFPEWVEHINDTEVDIGSDLYWPCVATGKPIPTIRWLKNGYAYHKGELRLYDVTFENAGMYQCIAENTYGAIYANAELKILALAPTFEMNPMKKKILAAKGGRVIIECKPKAAPKPKFSWSKGTEWLVNSSRILIWEDGSLEINNITRNDGGIYTCFAENNRGKANSTGTLVITDPTRIILAPINADITVGENATMQCAASFDPALDLTFVWSFNGYVIDFNKENIHYQRNFMLDSNGELLIRNAQLKHAGRYTCTAQTIVDNSSASADLVVRGPPGPPGGLRIEDIRATSVALTWSRGSDNHSPISKYTIQTKTILSDDWKDAKTDPPIIEGNMEAARAVDLIPWMEYEFRVVATNTLGRGEPSIPSNRIKTDGAAPNVAPSDVGGGGGRNRELTITWAPLSREYHYGNNFGYIVAFKPFDGEEWKKVTVTNPDTGRYVHKDETMSPSTAFQVKVKAFNNKGDGPYSLVAVINSAQDAPSEAPTEVGVKVLSSSEISVHWEHVLEKIVESYQIRYWAAHDKEEAANRVQVTSQEYSARLENLLPDTQYFIEVGACNSAGCGPPSDMIEAFTKKAPPSQPPRIISSVRSGSRYIITWDHVVALSNESTVTGYKVLYRPDGQHDGKLYSTHKHSIEVPIPRDGEYVVEVRAHSDGGDGVVSQVKISGAPTLSPSLLGLLLPAFGILVYLEF

SEQ ID NO: 251376 - DNA, 3024 bp, Artificial Sequence
  derived and/or modified sequence
atgaagatgtggctattagtgagtcacctggtgatcatttccataactacttgtctggctgtgtccgaggaagataagggttttggtcctattttcgaagaacagccgattaacactatctaccctgaagaatctctggaagggaaagtgagcctcaattgccgagctcgcgcaagccccttcccagtgtacaaatggaggatgaataacggcgatgtggatttaacttccgatagatactctatggtcggtggcaacctggtaattaacaaccccgacaaacagaaggatgcaggaatctattactgcctggcaagcaacaattacggtatggtcaggtctaccgaagcaaccctcagctttgggtatctggatcccttccctccggaagaaagacctgaggtgagggtgaaagagggcaaaggaatggtgctgttgtgcgacccaccctatcacttcccagacgacctctcctatagatggttgctgaatgagtttccagtgtttataacgatggacaagaggcggttcgtgagtcagaccaatggaaacctgtatattgcaaacgtagaggcaagcgacaagggtaactattcatgctttgtttccagtccctcaataactaagtcagtgtttagcaaattcatcccattgatacctatacctgagcggactactaaaccataccctgctgacatcgtggtccagttcaaggacgtatacgctttgatggggcagaatgtaactctcgaatgctttgctctcggcaatcccgtgccagacatcagatggcgtaaagtgttggagcccatgccctccacggccgagatttcgaccagcggggcagtcctcaaaatatttaacatccaactcgaagatgaggggatatacgagtgtgaagcagagaacatccgggggaaggacaagcaccaggctaggatctacgtgcaggcatttcccgagtgggtcgaacatatcaacgacacggaagtggatatcggatctgatctgtattggccttgtgtcgcaacaggaaaaccaattcccactattcgctggttaaagaacggttatgcctaccacaagggcgagctgcgcctctatgatgtgacatttgagaacgctggcatgtaccaatgcatcgccgaaaatacttatggcgctatctacgccaacgcagaactgaagatactggcgttggctccgacattcgagatgaaccccatgaagaagaagattcttgcagcaaaggggggacgggttattattgaatgcaaaccaaaggcagcacctaagccaaagtttagctggtccaagggaactgaatggctggtcaacagttccaggatcctcatttgggaggacggatcgctagagatcaataatataactagaaacgatggcggcatctatacatgttttgctgagaataatcgcggaaaagccaacagtacagggaccctggtgattaccgaccccacccgcatcatcctcgcccctattaacgcagacattaccgtaggagaaaatgccaccatgcagtgcgccgcctcattcgaccccgctttggacctgacatttgtgtggtcttttaacgggtacgttattgactttaacaaagagaacatccattatcaacgcaacttcatgttggacagtaacggagaactcctgatcaggaacgcccagctcaagcatgctgggcgatacacttgtaccgcacagactatcgtagataacagttcagcatctgccgatttggtcgtgcgtggacctccaggaccacctggggggctgagaattgaggacattcgagccaccagcgtggctctgacctggtctcggggcagtgataatcattcgcccatcagcaaatacaccattcagactaaaacaatcctctcggatgactggaaggacgcaaagacggaccctcccattattgagggcaatatggaggccgcacgtgccgtggatctcatcccctggatggaatatgaatttcgggtagtcgcaaccaacacactgggaagaggcgagccgagtatccctagcaatcgcatcaagaccgatggggcagctcctaatgtggccccttctgatgtcggtggggggggaggcagaaaccgggagcttacaattacgtgggctcctttgagtagagaatatcactacggtaataacttcgggtatatcgtagcctttaagccgttcgatggggaagaatggaaaaaggtgaccgtgacgaaccccgacacaggaagatacgtccataaggatgagacaatgagcccaagtactgcatttcaagttaaagtgaaggcttttaataataagggagatggaccttactccttggtggcggtgatcaattctgcccaggacgccccaagtgaggccccaactgaggtgggtgttaaagtgctcagttcttctgagatctcagtccactgggagcacgtgctcgaaaaaatcgtggagtcataccagatccggtactgggctgctcatgacaaggaagaggctgccaatcgtgtccaggtgacctcacaagaatactcagctagacttgaaaatctcctaccagacactcagtatttcattgaggtgggagcctgcaattctgcgggctgcggccccccatctgatatgattgaagccttcaccaaaaaggcaccgccaagtcaacctcctcggattatctcttccgtgagatccggatcccgctatattatcacctgggatcacgtggtggcattgtccaacgagtccaccgtcacaggctataaggtgctgtatcgcccagatgggcagcatgatggcaagttgtactctactcataagcattctattgaggtaccaatacccagagatggggagtacgtcgtagaggtgcgggcccattccgatgggggagacggagtcgttagtcaagtaaagattagcggtgcacctaccctgtccccatccctccttgggttacttcttccagcttttggaattcttgtttatctcgagttctag

SEQ ID NO: 251377 - DNA, 3024 bp, Artificial Sequence
  derived and/or modified sequence
atgaagatgtggctgctggtgagccacctggtgatcatcagcatcaccacctgcctggccgtgtctgaggaggacaagggcttcggccccatctttgaggagcagcccatcaacaccatctacccagaggagagcctggagggcaaggtgtccctgaactgccgggcccgggccagccccttccctgtgtacaagtggaggatgaacaatggagatgtggacctgaccagtgaccgctacagcatggtgggcggcaacctggtgatcaacaacccagacaagcagaaggatgctggcatctactactgcctggccagcaacaactacggcatggtgcgcagcacagaggccaccctgagctttggctacctggaccccttccccccagaggagaggcctgaggtgcgggtgaaggagggcaagggcatggtgctgctgtgtgaccccccctaccacttcccagatgacctgagctaccgctggctgctgaatgagttccctgtgttcatcaccatggacaagagaagatttgtgtcccagaccaacggcaacctgtacatcgccaacgtggaggccagtgacaagggcaactacagctgctttgtgagcagccccagcatcaccaagagcgtcttcagcaagttcatccccctcatccccatccctgagaggaccaccaagccctacccagctgacatcgtggtgcagttcaaggatgtgtatgccctgatgggccagaatgtgaccctggagtgctttgccctgggcaaccctgtgcctgacatccgctggaggaaggtgctggagcccatgcccagcacagctgagatcagcaccagcggggctgtgctgaagatcttcaacatccagctggaggatgagggcatctatgaatgtgaggccgagaacatccggggcaaggacaagcaccaggcccgcatctacgtgcaggccttccctgagtgggtggagcacatcaatgacacagaggtggacattggaagtgacctgtactggccctgtgtggccaccgggaagcccatccccaccatccgctggctgaagaatggctacgcctaccacaagggggagctgcggctgtatgatgtgacctttgaaaatgccggcatgtaccagtgcatcgccgagaacacctacggggccatctatgccaatgctgagctgaagatcctggccctggcccccacctttgagatgaaccccatgaagaagaagatcctggccgccaagggcggccgggtcatcatcgagtgcaagcccaaggccgcccccaagcccaagttctcctggagcaaaggaacagagtggctggtgaacagcagccgcatcctgatctgggaggatggcagcctggagatcaacaacatcaccagaaatgatggcggcatctacacctgctttgctgagaacaacagaggcaaggccaacagcacaggcaccctggtgatcacagaccccacccgcatcatcctggcccccatcaatgctgacatcaccgtgggagaaaatgccaccatgcagtgtgccgccagctttgatcctgccctggacctgacctttgtgtggagcttcaacggctacgtgattgacttcaacaaggagaacatccactaccagaggaacttcatgctggacagcaatggagagctgctgatcagaaatgcccagctgaagcatgctggccgctacacctgcacagcccagaccatcgtggacaacagcagcgccagcgctgacctggtggtgcggggccccccaggccccccaggcggcctgagaattgaggacatccgggccacctctgtggccctgacctggagccggggcagtgacaaccacagccccatcagcaagtacaccatccagaccaagaccatcctgagtgatgactggaaggatgccaagacagatcctcccatcatcgagggcaacatggaggccgcccgggctgtggacctgatcccctggatggagtatgagttccgggtggtggccaccaacaccctgggccgcggggagcccagcatccccagcaaccgcatcaagacagatggagctgcccccaacgtggcccccagtgatgtgggcggcggcggcggcaggaaccgggagctgaccatcacctgggcccccctgagccgggagtaccactacggcaacaactttggctacatcgtggccttcaagccctttgatggagaggagtggaagaaggtgacagtgaccaacccagacaccggccgctacgtgcacaaggatgagaccatgagccccagcacagccttccaggtgaaggtgaaggccttcaacaacaagggagatggcccctacagcctggtggccgtcatcaacagcgcccaggatgcccccagcgaggcccccacagaggtgggcgtgaaggtgctgagcagcagcgagatctctgtgcactgggagcacgtgctggagaagatcgtggagagctaccagatccgctactgggccgcccatgacaaggaggaggccgccaacagagtgcaggtgaccagccaggagtacagcgcccggctggagaacctgctgcctgacacccagtacttcatcgaggtgggcgcctgcaacagcgctggctgcggcccccccagcgacatgattgaggccttcaccaagaaggccccacccagccagcccccacgcatcatcagctctgtgcgcagcggcagccgctacatcatcacctgggaccacgtggtggccctgagcaatgaaagcacagtgacaggctacaaggtgctgtacagaccagatggccagcatgatggcaagctgtacagcacccacaagcacagcattgaggtgcccatccccagagatggagaatatgtggtggaggtgcgggcccacagtgatggaggagatggagtggtgtcccaggtgaagatcagcggggcccccaccctgagccccagcctgctgggcctgctgctgcctgccttcggcatcctggtgtacctggagttctag

SEQ ID NO: 251378 - DNA, 3024 bp, Artificial Sequence
  derived and/or modified sequence
atgaagatgtggctgctggtgagccacctggtgatcatcagcatcaccacctgtctggctgtgtctgaggaggacaaaggcttcggacccattttcgaggagcaacctatcaatacaatctacccagaggaatcactcgaaggcaaggtcagcctgaattgcagagcgcgggcctccccttttcccgtctacaaatggagaatgaacaacggggatgttgatctcactagcgacaggtatagcatggtgggaggcaacttggttatcaataaccctgataagcagaaggacgccggcatttattactgcctggcgagtaacaattacggaatggtgaggagcaccgaggctaccctatcatttgggtacctcgaccctttcccgcctgaggagagacccgaagtccgcgtcaaagaagggaagggcatggtcctcctatgcgacccaccgtaccactttccggacgatctgtcatatcggtggctcctgaacgagttcccagttttcatcacaatggacaagcgtagatttgtatctcagactaacgggaacctgtacattgctaacgtcgaggcaagtgacaaaggcaactattcatgtttcgtttctagcccttcaattactaagagcgtgttctcaaaatttataccattaattcccatccccgagaggacgactaaaccatatcccgccgatatcgtcgttcagtttaaagacgtgtatgctttaatgggacagaatgtcactctcgaatgttttgccctgggaaatcccgtccctgacataagatggaggaaagttttggagcctatgccctctaccgccgagattagcacctctggcgctgttctcaaaatcttcaatattcaactcgaggatgaaggaatttacgaatgcgaggccgagaatatccgcgggaaagataagcaccaggcaaggatttatgtgcaggcctttccagagtgggtcgaacatatcaatgacaccgaagttgacattggatccgacctttactggccatgtgtggcgacaggcaagcccatacctactatcagatggctcaaaaatggttacgcctatcacaaaggcgagttgagattatacgatgtaaccttcgagaatgcaggaatgtatcagtgtattgctgagaatacctacggtgcaatatacgccaacgccgaactaaagattctggccttggcccctacatttgagatgaatccaatgaaaaagaaaatcctcgccgcgaaagggggacgagtcattatcgagtgcaagcccaaggccgctccgaaaccgaagttttcttggtcaaagggcactgagtggctcgtcaacagcagcagaatcctaatatgggaagacgggtctctggaaatcaataacatcacccgaaatgatggagggatctatacatgctttgctgaaaacaatcgtggcaaagctaatagtaccgggactctcgtgatcactgaccctacacgcatcatcctagcacccattaacgctgacattactgtcggagagaacgctaccatgcagtgtgccgcctctttcgacccagcactggaccttacgtttgtttggtcctttaatggttatgtgattgactttaataaagaaaacattcactatcagagaaattttatgctcgacagcaacggggagctgctcatcaggaatgcccaattaaaacacgctggacggtacacttgcaccgcccagaccatcgttgacaatagcagtgcatctgccgacctggtggtcaggggaccaccagggcctcctggtgggctgaggatcgaagatattcgggctacaagcgtggcactgacatggtcacgcgggagcgataaccacagcccaattagtaaatatacaattcagacgaagacaatcctcagcgatgactggaaagatgctaaaacggatccccctatcatcgaggggaatatggaggccgctagggcagtggacctaattccttggatggagtacgagtttcgtgttgttgcaaccaacaccctggggagaggcgaaccatcaatcccaagcaacaggatcaaaacagacggcgccgcccctaatgttgcaccttccgacgtgggaggcggcgggggcaggaatagggagcttaccataacctgggctcctttgagtcgggaataccactatggcaacaactttggctatatagttgcgtttaagccctttgatggtgaggagtggaagaaagttactgtcaccaatcccgatactgggcggtacgtccacaaagacgaaaccatgagcccgtccacagcctttcaggtgaaagtgaaggctttcaataacaagggagacggcccctatagccttgtagcagtaatcaactcagctcaagatgcaccgtctgaggccccaaccgaagtcggtgtgaaagtgctcagctcatctgaaatcagcgtgcactgggagcacgtgctggagaagattgttgagagttatcagatcagatactgggcagcgcacgataaagaggaggctgctaatcgtgtgcaggttacctcgcaggaatacagcgccagactcgagaatctgctgcccgacacccagtacttcatagaggtcggagcctgcaattccgctggatgtgggcccccttccgacatgatcgaggcctttacgaaaaaggccccacccagtcaacctccacgcattatcagctccgtgagatcagggagcaggtacattatcacctgggaccacgttgttgcgctgagcaatgagagcacagtaaccgggtacaaggtgttgtaccgcccagacgggcagcacgacggtaagctgtactcaacccataagcattcaatcgaggtgccaattccacgcgacggggagtacgtggtcgaggtaagggcacactccgatggcggcgacggcgttgtgtcacaggtgaaaatatctggggcacctaccctatcacccagtctgttaggcctgcttttgcccgcgttcgggatccttgtgtatcttgagttctag

SEQ ID NO: 251379 - DNA, 3024 bp, Artificial Sequence
  derived and/or modified sequence
atgaaaatgtggctgcttgttagtcatctcgttataatcagtatcacaacatgcctcgccgtcagcgaggaagacaaaggcttcgggccaatcttcgaggaacaacctattaacacaatttatcctgaagagtccctggagggtaaggtctctctgaattgcagggcgcgagctagcccattcccggtgtataagtggagaatgaacaacggcgacgtggacctgacgtctgacaggtactccatggtagggggaaacctggtgatcaataaccccgataaacaaaaagatgcgggtatatactactgcctggcctctaataattatggaatggtacgttctaccgaagctaccctctccttcggttacctggatcccttcccgcctgaggaaagaccagaagtgcgcgtgaaagagggaaagggcatggttttgctctgcgatccaccctatcatttccctgacgatttaagttacaggtggttattaaacgaatttcctgtgttcatcacaatggacaagagacgatttgtgtcgcagactaatgggaatctgtatatcgctaacgtggaggcaagcgataagggtaactatagttgttttgtttctagcccctccatcacaaaatccgtgttcagcaaattcatcccattaatacccatccctgaaagaaccaccaagccataccctgcagacatcgtggttcagtttaaggatgtgtatgccctcatggggcaaaatgtcaccctagaatgtttcgccctcggtaatccagttcccgacatacgttggcggaaggtcctggagcctatgccatctaccgccgaaatcagtacttcaggcgctgtcctgaagatcttcaacatccagcttgaagatgagggaatctacgaatgcgaggcagagaacattaggggcaaggacaagcaccaggccaggatctatgtgcaggccttccctgagtgggtggaacacattaatgacacagaggtggacattggaagcgacttatactggccatgcgtcgcgaccggaaaacccatccccaccattcggtggcttaagaacggctacgcctatcataaaggcgagctcaggctgtacgatgtaacgtttgaaaatgctggcatgtatcagtgcattgctgagaatacgtatggcgcaatttatgccaatgcggaactgaaaattcttgcgctagcccctacattcgagatgaatcccatgaagaaaaagatcctagccgcaaaggggggaagggtaatcattgagtgcaaacctaaggcagctccaaaacctaaattttcatggtcaaagggaacggagtggctagtgaatagtagccgcatcttgatttgggaggacggatctcttgaaatcaataatatcactcggaatgacgggggtatctatacctgctttgcagagaacaataggggaaaggcaaattctactggaacactcgtgatcaccgacccaaccagaattatcttggcaccaattaacgccgatatcactgtaggcgagaatgcaacaatgcagtgcgctgcaagttttgacccggctctggacttaacctttgtctggtccttcaatggctacgtgattgactttaacaaggaaaacatccactaccagcggaactttatgctagattcgaacggggaactactgataagaaacgctcagcttaagcacgccggtagatatacctgcactgctcagaccattgtcgataatagttccgcctctgcagatctcgtggtgcgaggacctccaggccctcccggtggcctacgcattgaggatatacgcgctaccagtgtggccctaacctggagccggggtagcgataatcatagccctatcagcaagtacacgatccaaaccaagacaatactgagtgatgactggaaggatgcaaaaacagacccccctattatcgaaggtaatatggaggcagcgagagcggtggaccttattccttggatggaatatgaattcagggtggtagctactaacaccttggggaggggtgaacctagtatcccctctaacaggatcaagacggacggcgctgctcctaatgttgccccttcagatgtcgggggtggtgggggacgcaacagagagctcacaatcacatgggctcccttgtcaagggagtatcactatggcaataacttcggatatatcgtggccttcaaaccattcgatggtgaggaatggaaaaaagttaccgtcactaatccagacaccggccgttatgttcacaaggatgaaaccatgtctccatcaaccgcgtttcaggtcaaagttaaggcatttaataacaagggggacggtccctattcattagtggccgtgataaacagcgctcaggacgcaccttctgaggcccctaccgaggtaggggttaaagtgctctcctctagtgagatttccgttcactgggaacacgtgcttgagaagattgtggagtcctatcagattagatattgggcagcccatgataaggaggaagcggctaatagggtgcaggtcacgagccaggaatactccgctcgcctcgagaatctgctgcctgatacccagtacttcatagaagtcggagcctgtaacagcgctggctgcggacccccatcagatatgatcgaggctttcactaagaaggccccacccagtcaaccccctcgaatcattagctccgtgcgatcgggatcccgctacattataacgtgggatcacgtggtggcccttagcaacgaatctacggtcacgggctataaggtcctctatcgtccagatggacagcatgacggcaaactctactcaacccacaagcatagcatcgaggttcctatacctcgggacggcgaatacgtcgtggaagtgagagcacactcagatggaggtgatggggttgtaagccaggtgaagatcagcggagctcccacattgtctcccagcctgctgggacttctgctccctgcattcgggatcttggtatatctcgagttttag

SEQ ID NO: 251380 - DNA, 3328 bp, Artificial Sequence
  derived and/or modified sequence
gtttaaaattatccaactgccatagagctaaattcttttttggaaaattgaaccgaacttctactgaatacaagatgaaaatgtggttgctggtcagtcatcttgtgataatatctattactacctgtttagcagtttctgaggaagacaaaggatttggaccaatttttgaagagcagccaatcaataccatttatccagaggaatcactggaaggaaaagtctcactcaactgtagggcacgagccagccctttcccggtttacaaatggagaatgaataatggggacgttgatctcacaagtgatcgatacagtatggtaggaggaaaccttgttatcaacaaccctgacaaacagaaagatgctggaatatactactgtttagcatctaataactacgggatggtcagaagcactgaagcaaccctgagctttggatatcttgatcctttcccacctgaggaacgtcctgaggtcagagtaaaagaagggaaaggaatggtgcttctctgtgaccccccataccattttccagatgatcttagctatcgctggcttctaaatgaatttcctgtatttatcacaatggataaacggcgatttgtgtctcagacaaatggcaatctctacattgcaaatgttgaggcttccgacaaaggcaattattcctgctttgtttccagtccttctattacaaagagcgtgttcagcaaattcatcccactcattccaatacctgaacgaacaacaaaaccatatcctgctgatattgtagttcagttcaaggatgtatatgcattgatgggccaaaatgtgaccttagaatgttttgcacttggaaatcctgttccggatatccgatggcggaaggttctagaaccaatgccaagcactgctgagattagcacctctggggctgttcttaagatcttcaatattcagctagaagatgaaggcatctatgaatgtgaggctgagaacattagaggaaaggataaacatcaagcaagaatttatgttcaagcattccctgagtgggtagaacacatcaatgacacagaggtggacataggcagtgatctctactggccttgtgtggccacaggaaagcccatccctacaatccgatggttgaaaaatggatatgcgtatcataaaggggaattaagactgtatgatgtgacttttgaaaatgccggaatgtatcagtgcatagctgaaaacacatatggagccatttatgcaaatgctgagttgaagatcttggcgttggctccaacttttgaaatgaatcctatgaagaaaaagatcctggctgctaaaggtggaagggtgataattgaatgcaaacctaaagctgcaccgaaaccaaagttttcatggagtaaagggacagagtggcttgtcaatagcagcagaatactcatttgggaagatggtagcttggaaatcaacaacattacaaggaatgatggaggtatctatacatgctttgcagaaaataacagagggaaagctaatagcactggaacccttgttatcacagatcctacgcgaattatattggccccaattaatgccgatatcacagttggagaaaacgccaccatgcagtgtgctgcgtcctttgatcctgccttggatctcacatttgtttggtccttcaatggctatgtgatcgattttaacaaagagaatattcactaccagaggaattttatgctggattccaatggggaattactaatccgaaatgcgcagctgaaacatgctggaagatacacatgcactgcccagacaattgtggacaattcttcagcttcagctgaccttgtagtgagaggccctccaggccctccaggtggtctgagaatagaagacattagagccacttctgtggcacttacttggagccgtggttcagacaatcatagtcctatttctaaatacactatccagaccaagactattctttcagatgactggaaagatgcaaagacagatcccccaattattgaaggaaatatggaggcagcaagagcagtggacttaatcccatggatggagtatgaattccgcgtggtagcaaccaatacactgggtagaggagagcccagtataccatctaacagaattaaaacagacggtgctgcaccaaatgtggctccttcagatgtaggaggtggaggtggaagaaacagagagctgaccataacatgggcgcctttgtcaagagaataccactatggcaacaattttggttacatagtggcatttaagccatttgatggagaagaatggaaaaaagtcacagttactaatcctgatactggccgatatgtccataaagatgaaaccatgagcccttccactgcatttcaagttaaagtcaaggccttcaacaacaaaggagatggaccttacagcctagtagcagtcattaattcagcacaagacgctcccagtgaagccccaacagaagtaggtgtaaaagtcttatcatcttctgagatatctgttcattgggaacatgttttagaaaaaatagtggaaagctatcagattcggtattgggctgcccatgacaaagaagaagctgcaaacagagttcaagtcaccagccaagagtactcggccaggctcgagaaccttctgccagacacccagtattttatagaagtcggggcctgcaatagtgcagggtgtggacctccaagtgacatgattgaggctttcaccaagaaagcacctcctagccagcctccaaggatcatcagttcagtaaggtctggttcacgctatataatcacctgggatcatgtcgttgcactatcaaatgaatctacagtgacgggatataaggtactctacagacctgatggccagcatgatggcaagctgtattcaactcacaaacactccatagaagtcccaatccccagagatggagaatacgttgtggaggttcgcgcgcacagtgatggaggagatggagtggtgtctcaagtcaaaatttcaggtgcacccaccctatccccaagtcttctcggcttactgctgcctgcctttggcatccttgtctacttggaattctgaatgtgttgtgacagctgctgttcccatcccagctcagaagacacccttcaaccctgggatgaccacaattccttccaatttctgcggctccatcctaagccaaataaattatactttaacaaactattcaactgatttacaacacacatgatgactgaggcattcgggaaccccttcatccaaaagaataaacttttaaatggatataaatgatttttaactcgttccaa

SEQ ID NO: 251381 - DNA, 3024 bp, Artificial Sequence
  derived and/or modified sequence
atgaagatgtggctgctggtgagccacctggtgatcatcagcatcaccacctgcctggccgtgagcgaggaggacaagggcttcggccccatcttcgaggagcagcccatcaacaccatctaccccgaggagagcctggagggcaaggtgagcctgaactgcagagccagagccagccccttccccgtgtacaagtggagaatgaacaacggcgacgtggacctgaccagcgacagatacagcatggtgggcggcaacctggtgatcaacaaccccgacaagcagaaggacgccggcatctactactgcctggccagcaacaactacggcatggtgagaagcaccgaggccaccctgagcttcggctacctggaccccttcccccccgaggagagacccgaggtgagagtgaaggagggcaagggcatggtgctgctgtgcgaccccccctaccacttccccgacgacctgagctacagatggctgctgaacgagttccccgtgttcatcaccatggacaagagaagattcgtgagccagaccaacggcaacctgtacatcgccaacgtggaggccagcgacaagggcaactacagctgcttcgtgagcagccccagcatcaccaagagcgtgttcagcaagttcatccccctgatccccatccccgagagaaccaccaagccctaccccgccgacatcgtggtgcagttcaaggacgtgtacgccctgatgggccagaacgtgaccctggagtgcttcgccctgggcaaccccgtgcccgacatcagatggagaaaggtgctggagcccatgcccagcaccgccgagatcagcaccagcggcgccgtgctgaagatcttcaacatccagctggaggacgagggcatctacgagtgcgaggccgagaacatcagaggcaaggacaagcaccaggccagaatctacgtgcaggccttccccgagtgggtggagcacatcaacgacaccgaggtggacatcggcagcgacctgtactggccctgcgtggccaccggcaagcccatccccaccatcagatggctgaagaacggctacgcctaccacaagggcgagctgagactgtacgacgtgaccttcgagaacgccggcatgtaccagtgcatcgccgagaacacctacggcgccatctacgccaacgccgagctgaagatcctggccctggcccccaccttcgagatgaaccccatgaagaagaagatcctggccgccaagggcggcagagtgatcatcgagtgcaagcccaaggccgcccccaagcccaagttcagctggagcaagggcaccgagtggctggtgaacagcagcagaatcctgatctgggaggacggcagcctggagatcaacaacatcaccagaaacgacggcggcatctacacctgcttcgccgagaacaacagaggcaaggccaacagcaccggcaccctggtgatcaccgaccccaccagaatcatcctggcccccatcaacgccgacatcaccgtgggcgagaacgccaccatgcagtgcgccgccagcttcgaccccgccctggacctgaccttcgtgtggagcttcaacggctacgtgatcgacttcaacaaggagaacatccactaccagagaaacttcatgctggacagcaacggcgagctgctgatcagaaacgcccagctgaagcacgccggcagatacacctgcaccgcccagaccatcgtggacaacagcagcgccagcgccgacctggtggtgagaggcccccccggcccccccggcggcctgagaatcgaggacatcagagccaccagcgtggccctgacctggagcagaggcagcgacaaccacagccccatcagcaagtacaccatccagaccaagaccatcctgagcgacgactggaaggacgccaagaccgacccccccatcatcgagggcaacatggaggccgccagagccgtggacctgatcccctggatggagtacgagttcagagtggtggccaccaacaccctgggcagaggcgagcccagcatccccagcaacagaatcaagaccgacggcgccgcccccaacgtggcccccagcgacgtgggcggcggcggcggcagaaacagagagctgaccatcacctgggcccccctgagcagagagtaccactacggcaacaacttcggctacatcgtggccttcaagcccttcgacggcgaggagtggaagaaggtgaccgtgaccaaccccgacaccggcagatacgtgcacaaggacgagaccatgagccccagcaccgccttccaggtgaaggtgaaggccttcaacaacaagggcgacggcccctacagcctggtggccgtgatcaacagcgcccaggacgcccccagcgaggcccccaccgaggtgggcgtgaaggtgctgagcagcagcgagatcagcgtgcactgggagcacgtgctggagaagatcgtggagagctaccagatcagatactgggccgcccacgacaaggaggaggccgccaacagagtgcaggtgaccagccaggagtacagcgccagactggagaacctgctgcccgacacccagtacttcatcgaggtgggcgcctgcaacagcgccggctgcggcccccccagcgacatgatcgaggccttcaccaagaaggccccccccagccagccccccagaatcatcagcagcgtgagaagcggcagcagatacatcatcacctgggaccacgtggtggccctgagcaacgagagcaccgtgaccggctacaaggtgctgtacagacccgacggccagcacgacggcaagctgtacagcacccacaagcacagcatcgaggtgcccatccccagagacggcgagtacgtggtggaggtgagagcccacagcgacggcggcgacggcgtggtgagccaggtgaagatcagcggcgcccccaccctgagccccagcctgctgggcctgctgctgcccgccttcggcatcctggtgtacctggagttctag

SEQ ID NO: 251382 - protein, 18 aa, Artificial Sequence
  derived and/or modified sequence
MKAPGRLVLIILCSVVFS

SEQ ID NO: 251383 - protein, 302 aa, Artificial Sequence
  derived and/or modified sequence
MKAPGRLVLIILCSVVFSAVYILLCCWAGLPLCLATCLDHHFPTGSRPTVPGPLHFSGYSSVPDGKPLVREPCRSCAVVSSSGQMLGSGLGAEIDSAECVFRMNQAPTVGFEADVGQRSTLRVVSHTSVPLLLRNYSHYFQKARDTLYMVWGQGRHMDRVLGGRTYRTLLQLTRMYPGLQVYTFTERMMAYCDQIFQDETGKNRRQSGSFLSTGWFTMILALELCEEIVVYGMVSDSYCREKSHPSVPYHYFEKGRLDECQMYLAHEQAPRSAHRFITEKAVFSRWAKKRPIVFAHPSWRTE

SEQ ID NO: 251384 - DNA, 909 bp, Artificial Sequence
  derived and/or modified sequence
atgaaggcccccggcagactggtgctgatcatcctgtgcagcgtggtgttcagcgccgtgtacatcctgctgtgctgctgggccggcctgcccctgtgcctggccacctgcctggaccaccacttccccaccggcagcagacccaccgtgcccggccccctgcacttcagcggctacagcagcgtgcccgacggcaagcccctggtgagagagccctgcagaagctgcgccgtggtgagcagcagcggccagatgctgggcagcggcctgggcgccgagatcgacagcgccgagtgcgtgttcagaatgaaccaggcccccaccgtgggcttcgaggccgacgtgggccagagaagcaccctgagagtggtgagccacaccagcgtgcccctgctgctgagaaactacagccactacttccagaaggccagagacaccctgtacatggtgtggggccagggcagacacatggacagagtgctgggcggcagaacctacagaaccctgctgcagctgaccagaatgtaccccggcctgcaggtgtacaccttcaccgagagaatgatggcctactgcgaccagatcttccaggacgagaccggcaagaacagaagacagagcggcagcttcctgagcaccggctggttcaccatgatcctggccctggagctgtgcgaggagatcgtggtgtacggcatggtgagcgacagctactgcagagagaagagccaccccagcgtgccctaccactacttcgagaagggcagactggacgagtgccagatgtacctggcccacgagcaggcccccagaagcgcccacagattcatcaccgagaaggccgtgttcagcagatgggccaagaagagacccatcgtgttcgcccaccccagctggagaaccgagtag

SEQ ID NO: 251385 - DNA, 909 bp, Artificial Sequence
  derived and/or modified sequence
atgaaggcaccgggccgcctggtgctcataattttgtgctccgtcgtctttagtgccgtttatatactcttatgttgctgggccgggttgccactgtgcttagccacatgtctagaccaccacttcccaaccggcagtagaccgaccgtgcccggcccccttcattttagcgggtattcttccgtgccggatggaaaacccttagtaagagaaccatgcaggagttgcgcagttgtctcttcatccggacagatgctcggctcaggcttaggagccgagatagactcggccgagtgcgtgttcaggatgaatcaggccccgacagtgggatttgaagccgacgtgggacagaggtctacattgagagttgtgagtcacacgtccgtacccctgttactacgaaattattcccactactttcagaaggctcgagatacactctatatggtctggggccagggccggcacatggaccgtgtgctcggtggtcgcacatatcgcaccctgttacaactaaccagaatgtatcccggcttgcaagtttatacatttacagaaagaatgatggcttactgcgatcagatatttcaggacgagacaggaaagaatcgccgacaatcaggtagttttctgagcacaggatggtttacaatgatccttgccttggagttgtgcgaagagatcgttgtttacggaatggtaagtgattcttactgtagagagaagagtcatcccagcgttccctatcattactttgagaaaggcaggctcgacgaatgtcagatgtatcttgcccacgaacaggctccccgatcagcccaccggttcattacagaaaaagctgtcttctctcggtgggccaaaaaacggcctatcgtttttgcacacccaagttggcgcactgagtag

SEQ ID NO: 251386 - DNA, 909 bp, Artificial Sequence
  derived and/or modified sequence
atgaaggcccctggccgcctggtgctgatcatcctgtgcagcgtggtgttttctgctgtgtacatcctgctgtgctgctgggccggcctgcccctgtgcctggccacctgcctggaccaccacttccccaccggcagccggcccaccgtgcccggccccctgcacttcagcggctacagctctgtgcctgatggcaagcccctggtgcgggagccctgccgcagctgtgctgtggtgagcagcagcggccagatgctgggcagcggcctgggcgctgagattgacagcgcagaatgtgtgttcaggatgaaccaggcccccaccgtgggctttgaagcagatgtgggccagaggagcaccctgcgggtggtgagccacacctctgtgcccctgctgctgaggaactacagccactacttccagaaggcccgggacaccctgtacatggtgtggggccagggccgccacatggacagagtgctgggcggccgcacctaccgcaccctgctgcagctgaccaggatgtacccaggcctgcaggtgtacaccttcacagagaggatgatggcctactgtgaccagatcttccaggatgagaccgggaagaacagacggcagagcggcagcttcctgagcacaggctggttcaccatgatcctggccctggagctgtgtgaggagatcgtggtgtatggcatggtgtctgacagctactgccgggagaagagccaccccagcgtgccctaccactactttgagaagggccgcctggatgagtgccagatgtacctggcccacgagcaggcccccaggtctgcccaccgcttcatcacagagaaggctgtgttcagccgctgggccaagaagaggcccatcgtgtttgcccaccccagctggaggacagaatag

SEQ ID NO: 251387 - DNA, 909 bp, Artificial Sequence
  derived and/or modified sequence
atgaaggcccccggccggctggtgctgatcatcctgtgcagcgtggtcttcagtgctgtgtacattctgctgtgttgctgggccggcctgccactttgtctggctacgtgtctggaccaccactttccgactggtagtagacctactgtccctggacctctgcattttagtggctatagctcagtccccgacggcaagcctctcgtccgagaaccttgtaggtcttgcgctgtggtgagttcaagcgggcaaatgttgggtagcggattaggggctgagattgattccgcagaatgtgttttccgcatgaatcaggctcctacagtgggctttgaggccgatgtggggcagcgttccacactgagggtggtcagtcacacaagcgtgcccttgctgctacgtaactactcccactatttccagaaggctcgggataccttgtatatggtgtggggacagggcagacatatggacagggttcttggaggccgaacttatagaaccttactgcagttaacccggatgtatcccgggctgcaggtttatacatttactgagcgaatgatggcgtactgtgatcagattttccaggacgaaactggaaaaaataggaggcagtccgggtctttcctcagcaccggctggtttacaatgattctcgccctcgagctatgtgaggaaatcgtggtgtatggtatggtatctgatagctattgtcgcgagaaatcgcatccctcggtcccctaccattacttcgagaaaggtaggctcgatgaatgtcagatgtacctggctcacgaacaggctccaagatctgcgcaccgcttcatcaccgaaaaggccgtcttctccagatgggccaaaaagaggcccatcgtctttgcccatcctagctggcgtactgaatag

SEQ ID NO: 251388 - DNA, 54 bp, Artificial Sequence
  derived and/or modified sequence
atgaaggctccgggtcggctcgtgctcatcatcctgtgctccgtggtcttctct

SEQ ID NO: 251389 - DNA, 909 bp, Artificial Sequence
  derived and/or modified sequence
atgaaggccccaggtcgtctggtgctgatcattctctgcagcgtggttttctccgcagtgtatatccttctgtgttgttgggcgggactaccactctgcctggccacttgcctggaccaccactttccaactggtagcaggccaacagtgcctgggccactgcacttcagcggatatagctcagtaccagacggtaagcctttagtccgggaaccatgtcggtcctgcgccgtggtgagttcttctggacagatgctcgggtcaggcttgggcgcagaaatcgactcagccgagtgtgtctttaggatgaatcaggctcctaccgtcggcttcgaggcagatgtcggacagcggtcaacactccgtgtggtcagccacacaagcgtgccgctgctgctgcggaattacagccactacttccaaaaggcacgagacaccctgtatatggtttggggacaagggaggcatatggatcgagtactgggcggacggacctaccgcacacttctacagctgacaagaatgtacccgggtctccaagtttatacattcaccgagcgcatgatggcctattgtgaccagatctttcaagacgaaaccggcaaaaacaggcgacaatccggatcttttcttagtacggggtggtttacaatgattctcgctcttgagctatgtgaagaaatcgtcgtttatggcatggtatcggactcttattgccgtgaaaaatcccacccctcagtgccataccattatttcgagaagggtagacttgatgagtgccaaatgtatcttgctcacgagcaggcccctcgaagcgcccaccgatttataaccgagaaggctgtcttctcccgctgggccaaaaagagacctattgtctttgcccacccgtcttggagaactgaatag

SEQ ID NO: 251390 - DNA, 1691 bp, Artificial Sequence
  derived and/or modified sequence
gcgcggatcagcttccagcccagtcggcccggcccgggggccatggagctccgagcggcggatcgcgagcctcctgcgaaccccagcctgcacgcccggttagcattcggccgggagatgcggcagtggaatctggaagggcggtgaaaaacctacgtcctgccctcgcccggcctctccattcgtcccccgggtagagaggtgcccggctcccaccccttcccagccccagccctggagacagcagcccctagactactgagggacagcgacagcatgaaggctccgggtcggctcgtgctcatcatcctgtgctccgtggtcttctctgccgtctacatcctcctgtgctgctgggccggcctgcccctctgcctggccacctgcctggaccaccacttccccacaggctccaggcccactgtgccgggacccctgcacttcagtggatatagcagtgtgccagatgggaagccgctggtccgcgagccctgccgcagctgtgccgtggtgtccagctccggccaaatgctgggctcaggcctgggtgctgagatcgacagtgccgagtgcgtgttccgcatgaaccaggcgcccaccgtgggctttgaggcggatgtgggccagcgcagcaccctgcgtgtcgtctcacacacaagcgtgccgctgctgctgcgcaactattcacactacttccagaaggcccgagacacgctctacatggtgtggggccagggcaggcacatggaccgggtgctcggcggccgcacctaccgcacgctgctgcagctcaccaggatgtaccccggcctgcaggtgtacaccttcacggagcgcatgatggcctactgcgaccagatcttccaggacgagacgggcaagaaccggaggcagtcgggctccttcctcagcaccggctggttcaccatgatcctcgcgctggagctgtgtgaggagatcgtggtctatgggatggtcagcgacagctactgcagggagaagagccacccctcagtgccttaccactactttgagaagggccggctagatgagtgtcagatgtacctggcacacgagcaggcgccccgaagcgcccaccgcttcatcactgagaaggcggtcttctcccgctgggccaagaagaggcccatcgtgttcgcccatccgtcctggaggactgagtagcttccgtcgtcctgccagtcgccatgccgttgcgaggcctccgggatgtcccatcccaagccatcacactccacaaaaacatttaatttatggatcctgcctcctgccacgtgctgggtggacctaaggttccttcccgccccattctggcgacacttggagccatctcaggcctcatgacttgaaggggagtggaggggggagccgtgtctcccccctccactccctgagtaattcacggcatttgggggctcaccccacctccaggtctgtcaagtggcctttgtccctggggctgatggcccccaactcaccagcatcatgaccttgtgccagtcctggtcctccctccccagccgctcctaccaccttttggtgccacacttctcaggctggccgccctggttggggcagccgagagcctggggttcattggtgaaggggccttggagttgtgactgccggggccgtatcaggaacgtacgggtaaacgtgtgttttctgga

SEQ ID NO: 251391 - protein, 218 aa, Artificial Sequence
  derived and/or modified sequence
MLGSGLGAEIDSAECVFRMNQAPTVGFEADVGQRSTLRVVSHTSVPLLLRNYSHYFQKARDTLYMVWGQGRHMDRVLGGRTYRTLLQLTRMYPGLQVYTFTERMMAYCDQIFQDETGKNRRQSGSFLSTGWFTMILALELCEEIVVYGMVSDSYCREKSHPSVPYHYFEKGRLDECQMYLAHEQAPRSAHRFITEKAVFSRWAKKRPIVFAHPSWRTE

SEQ ID NO: 251392 - protein, 201 aa, Artificial Sequence
  derived and/or modified sequence
MLGSGLGAEIDSAECVFRMNQAPTVGFEADVGQRSTLRVVSHTSVPLLLRNYSHYFQKARDTLYMVWGQGRHMDRVLGGRTYRTLLQLTRMYPGLQVYTFTERMMAYCDQIFQDETGKNRRQSGSFLSTGWFTMILALELCEEIVVYGMVSDSYCREKSHPSVPYHYFEKGRLDECQMYLAHEQAPRSAHRFITEKAVFSR

SEQ ID NO: 251393 - DNA, 657 bp, Artificial Sequence
  derived and/or modified sequence
atgctgggcagcggcctgggcgccgagatcgacagcgccgagtgcgtgttcagaatgaaccaggcccccaccgtgggcttcgaggccgacgtgggccagagaagcaccctgagagtggtgagccacaccagcgtgcccctgctgctgagaaactacagccactacttccagaaggccagagacaccctgtacatggtgtggggccagggcagacacatggacagagtgctgggcggcagaacctacagaaccctgctgcagctgaccagaatgtaccccggcctgcaggtgtacaccttcaccgagagaatgatggcctactgcgaccagatcttccaggacgagaccggcaagaacagaagacagagcggcagcttcctgagcaccggctggttcaccatgatcctggccctggagctgtgcgaggagatcgtggtgtacggcatggtgagcgacagctactgcagagagaagagccaccccagcgtgccctaccactacttcgagaagggcagactggacgagtgccagatgtacctggcccacgagcaggcccccagaagcgcccacagattcatcaccgagaaggccgtgttcagcagatgggccaagaagagacccatcgtgttcgcccaccccagctggagaaccgagtag

SEQ ID NO: 251394 - DNA, 606 bp, Artificial Sequence
  derived and/or modified sequence
atgctgggcagcggcctgggcgccgagatcgacagcgccgagtgcgtgttcagaatgaaccaggcccccaccgtgggcttcgaggccgacgtgggccagagaagcaccctgagagtggtgagccacaccagcgtgcccctgctgctgagaaactacagccactacttccagaaggccagagacaccctgtacatggtgtggggccagggcagacacatggacagagtgctgggcggcagaacctacagaaccctgctgcagctgaccagaatgtaccccggcctgcaggtgtacaccttcaccgagagaatgatggcctactgcgaccagatcttccaggacgagaccggcaagaacagaagacagagcggcagcttcctgagcaccggctggttcaccatgatcctggccctggagctgtgcgaggagatcgtggtgtacggcatggtgagcgacagctactgcagagagaagagccaccccagcgtgccctaccactacttcgagaagggcagactggacgagtgccagatgtacctggcccacgagcaggcccccagaagcgcccacagattcatcaccgagaaggccgtgttcagcagatag

SEQ ID NO: 251395 - DNA, 657 bp, Artificial Sequence
  derived and/or modified sequence
atgctgggatccggactaggcgcagagattgattccgctgagtgcgtcttccggatgaaccaggcacctacagtggggtttgaagctgacgtcggccaacgctccaccctcagagtggtgagccacaccagtgtgccactccttttacggaattacagccactacttccaaaaggcccgcgacacactctatatggtgtggggacagggcaggcacatggatcgtgtgctcggcggacggacttaccgcactctgctgcagctgacgcggatgtatcccggcctgcaggtctacacatttacggagcggatgatggcttattgtgatcagatatttcaagatgaaaccggaaagaatcggagacagtctggcagctttctcagtacagggtggtttaccatgattctggccctggaattgtgcgaggagattgtcgtgtacgggatggtttctgacagctactgccgggaaaaaagccatccgagtgttccgtatcactatttcgagaaaggtagactggacgagtgccagatgtacctcgctcatgaacaagccccccgaagtgcccacaggtttatcacggagaaagcggtctttagccgctgggcaaaaaagagaccgatagtttttgcgcatccttcttggagaacagaatag

SEQ ID NO: 251396 - DNA, 606 bp, Artificial Sequence
  derived and/or modified sequence
atgctgggctctggacttggtgctgaaattgacagtgctgagtgtgtgtttaggatgaaccaagcccccaccgtcggcttcgaagccgacgtgggtcagagatccacactcagggtggtatcccacacctcagtcccactcttgctcaggaactactcacattatttccagaaggcgcgcgacacgctgtatatggtgtggggacaggggaggcacatggatcgagtcctcggaggtcggacgtacagaactcttctgcagctcaccagaatgtacccggggctgcaggtatataccttcactgagcgcatgatggcttactgcgaccagatcttccaggatgagaccggcaagaaccgtcgacagtcaggtagctttctcagtacaggctggttcacgatgatccttgctttggagctgtgcgaagagatagtagtctacgggatggtctcggatagttactgtcgcgagaagtcccatccaagtgtgccctatcactactttgaaaagggccggctggacgagtgccaaatgtatctcgcccatgaacaagcacccaggtccgcccaccgatttattaccgagaaggcagtgtttagcagatag

SEQ ID NO: 251397 - DNA, 657 bp, Artificial Sequence
  derived and/or modified sequence
atgctgggtagcggcctaggtgcagagatcgactctgccgagtgcgtgttccgtatgaatcaagctccaacagtcggcttcgaagccgatgtgggacaaaggtcgaccctgagagtggtgagccatacatctgtgcctcttctgcttaggaactattctcattactttcaaaaggcgcgtgacacgctgtacatggtgtggggacagggccgacacatggatagagtcttgggcggccgaacctatagaacactgctgcagctcaccaggatgtaccccggcttacaggtgtatacctttacagagaggatgatggcctactgtgatcagatattccaggacgaaacaggtaagaacagacggcagtcaggctctttcctgtctaccggctggttcacaatgatccttgcacttgaactctgtgaggaaatcgtggtttacggtatggtgtccgactcctactgcagggagaagtcacacccctcagtgccttatcattattttgaaaaaggacgcctggacgagtgccagatgtaccttgctcacgagcaagctcctcggtcagcccatagattcataacggaaaaggctgtgtttagcaggtgggccaagaagaggcctatcgtattcgcacatccctcctggagaaccgagtag

SEQ ID NO: 251398 - DNA, 657 bp, Artificial Sequence
  derived and/or modified sequence
atgctgggcagcggcctgggcgctgagattgacagcgcagaatgtgtgttcaggatgaaccaggcccccaccgtgggctttgaagcagatgtgggccagaggagcaccctgcgggtggtgagccacacctctgtgcccctgctgctgaggaactacagccactacttccagaaggcccgggacaccctgtacatggtgtggggccagggccgccacatggacagagtgctgggcggccgcacctaccgcaccctgctgcagctgaccaggatgtacccaggcctgcaggtgtacaccttcacagagaggatgatggcctactgtgaccagatcttccaggatgagaccgggaagaacagacggcagagcggcagcttcctgagcacaggctggttcaccatgatcctggccctggagctgtgtgaggagatcgtggtgtatggcatggtgtctgacagctactgccgggagaagagccaccccagcgtgccctaccactactttgagaagggccgcctggatgagtgccagatgtacctggcccacgagcaggcccccaggtctgcccaccgcttcatcacagagaaggctgtgttcagccgctgggccaagaagaggcccatcgtgtttgcccaccccagctggaggacagaatag

SEQ ID NO: 251399 - DNA, 606 bp, Artificial Sequence
  derived and/or modified sequence
atgctgggcagcggcctgggcgctgagattgacagcgcagaatgtgtgttcaggatgaaccaggcccccaccgtgggctttgaagcagatgtgggccagaggagcaccctgcgggtggtgagccacacctctgtgcccctgctgctgaggaactacagccactacttccagaaggcccgggacaccctgtacatggtgtggggccagggccgccacatggacagagtgctgggcggccgcacctaccgcaccctgctgcagctgaccaggatgtacccaggcctgcaggtgtacaccttcacagagaggatgatggcctactgtgaccagatcttccaggatgagaccgggaagaacagacggcagagcggcagcttcctgagcacaggctggttcaccatgatcctggccctggagctgtgtgaggagatcgtggtgtatggcatggtgtctgacagctactgccgggagaagagccaccccagcgtgccctaccactactttgagaagggccgcctggatgagtgccagatgtacctggcccacgagcaggcccccaggtctgcccaccgcttcatcacagagaaggctgtgttcagcaggtag

SEQ ID NO: 251400 - DNA, 657 bp, Artificial Sequence
  derived and/or modified sequence
atgctgggcagcggcctgggcgccgagatcgacagcgccgagtgcgtattcaggatgaaccaggcccctacagttggattcgaggccgatgtgggccagcgaagcaccctacgcgttgtgagccatacttcagtacccctgctcctgcgtaattatagtcattactttcagaaggccagagacaccctgtatatggtctggggccagggccgtcatatggatcgggtactcgggggacggacctaccgcaccctcctgcagctgacgcggatgtatcctggcctgcaggtgtatacattcacagaaagaatgatggcatactgcgatcagatatttcaggatgaaaccggaaagaacaggcgccaatcaggttccttcctcagtactggatggttcacaatgattctcgccctggagctctgtgaggaaatcgtcgtttatgggatggtaagtgacagctactgtcgcgagaaatcccacccctctgtcccttaccattactttgagaagggcagactggatgagtgccagatgtatttggctcatgagcaggctccgcgctctgcccataggttcatcaccgaaaaggcagttttcagccggtgggcgaagaaaagaccgattgttttcgcccacccttcctggcggaccgagtag

SEQ ID NO: 251401 - DNA, 606 bp, Artificial Sequence
  derived and/or modified sequence
atgctgggcagcggcctgggcgccgagatcgacagcgccgagtgcgtgttccgaatgaaccaggcccctacagtcgggttcgaagcggacgtgggccaaaggtccacattgcgcgtggtatcccacacaagcgttccgttgcttttgagaaattactcccattatttccagaaggccagagatactctctacatggtgtggggacaggggcggcacatggaccgggtactcggagggcggacgtatcgcacactgctgcagctcacaagaatgtacccaggtctgcaggtgtacacattcactgagcgaatgatggcttattgcgaccagattttccaggatgaaactggaaagaatagacgacagtctgggtcctttctaagcacggggtggttcacaatgatattggcgctcgagttgtgtgaagaaatcgttgtatatggaatggtctctgactcctactgcagagagaagtctcatccttccgttccttaccattatttcgaaaaaggcaggctggatgagtgtcaaatgtacttggctcatgagcaagctcctcggagtgcacatcgctttatcacggagaaagctgtgttctcacggtag

SEQ ID NO: 251402 - DNA, 657 bp, Artificial Sequence
  derived and/or modified sequence
atgctgggcagcggcctgggcgccgagatcgacagcgccgagtgcgtgttcaggatgaaccaggctcccaccgttggcttcgaggctgacgtcggccagcgaagtactttgagagtcgtttcccatacgagcgtacctctcctcttgcgcaactacagtcattatttccagaaagctcgagacacattatacatggtctggggtcaggggcgccatatggaccgcgtcttggggggccggacctataggaccctgcttcagcttactcgcatgtatcccggattacaagtgtacactttcacagagcgaatgatggcatattgcgaccagatcttccaggatgaaacaggcaagaatcggcgccaaagcggttcctttctcagcaccggctggttcaccatgattctagcactggagctttgcgaggagattgtagtgtacgggatggtcagtgattcctactgtagagaaaagtcccaccctagcgtgccctaccactacttcgagaaaggccgcctcgatgagtgtcaaatgtacctggctcacgaacaggctcccaggtcagcccatagatttattacagagaaggctgtgttttcgaggtgggcgaagaagcgcccaatcgtctttgctcaccctagctggcgtactgaatag

SEQ ID NO: 251403 - DNA, 657 bp, Artificial Sequence
  derived and/or modified sequence
atgctggggtcaggtctcggagccgagatcgattcagcggagtgcgtgtttcggatgaaccaggcccctaccgtgggctttgaggccgacgtgggacaacgaagcactctgcgagtcgtcagtcatacatcggtcccactactccttcgcaactattcgcactacttccagaaagctcgcgacacgctgtatatggtgtggggccaggggcgtcacatggatagagtcctcgggggaagaacgtacaggactctcctgcagctaacaagaatgtacccaggactgcaggtgtacacgttcaccgaaaggatgatggcctactgcgaccaaatttttcaggatgaaactggcaagaatagacgacaaagtggatcatttttaagtactggttggtttacaatgattttagctcttgaactgtgtgaagaaatcgtagtgtacggtatggttagtgatagttattgcagggaaaagagccatccctctgttccctatcactattttgagaaggggcgacttgatgaatgtcaaatgtacttggctcacgaacaagcgcctagatctgctcatcggtttattacagagaaggccgtatttagcaggtgggccaaaaaaaggccaattgtattcgctcaccctagttggcgcacagagtag

SEQ ID NO: 251404 - DNA, 606 bp, Artificial Sequence
  derived and/or modified sequence
atgctgggttctggacttggcgctgaaatagactctgcagaatgcgtgttcagaatgaatcaggccccaacggtgggtttcgaagccgacgtgggccagcggtcaacccttagggtcgtgtcgcacacatctgtgcctctgcttctcaggaattacagtcactacttccagaaggcccgagatacgctgtacatggtatggggccaaggaaggcatatggatagggtgttaggcggaagaacttaccggacactgctccagttgacacgcatgtaccctggcctccaggtgtacacctttaccgaacggatgatggcctactgcgaccagatcttccaggatgagaccgggaaaaaccggagacagagtgggtcttttctgtccaccgggtggtttacgatgatcctggctctagaactatgcgaagaaattgttgtttatggcatggtgtctgattcctactgcagagaaaagagtcatccgagtgtcccctaccactattttgagaaagggagactggacgagtgccagatgtatctggcccatgagcaggctcctaggtctgctcatcgatttattaccgaaaaggccgtgttctcccgctag

SEQ ID NO: 251405 - DNA, 657 bp, Artificial Sequence
  derived and/or modified sequence
atgctgggctccggattaggcgctgaaatcgactcagcggagtgcgtcttccggatgaatcaggcacccacagttggattcgaagctgatgttggacagcggtctaccctgagagttgtgtcgcatacctccgtccctctcctgcttcggaactactcgcactacttccagaaagctagggacacattgtatatggtttgggggcaggggaggcacatggacagggtgctgggcggtaggacttacagaacacttctccagcttacccgtatgtatccagggttacaggtgtacaccttcaccgaacgcatgatggcttattgtgaccagatcttccaggatgaaacgggcaagaatcggcgtcaaagtggctccttcctatccaccggatggttcactatgattctagctctcgaactgtgtgaggagatagttgtgtatggaatggtttctgactcttactgccgggagaagtcacatccttcagtcccatatcattattttgaaaagggacggctggatgagtgccaaatgtatctcgctcatgaacaggcccctagatctgcccatcgcttcatcaccgagaaggccgtcttctcccgttgggcaaaaaaaagaccgattgtgttcgcgcacccttcttggaggacagagtag

SEQ ID NO: 251406 - protein, 338 aa, Artificial Sequence
  derived and/or modified sequence
MNSLSEANTKFMFDLFQQFRKSKENNIFYSPISITSALGMVLLGAKDNTAQQISKVLHFDQVTENTTEKAATYHVDRSGNVHHQFQKLLTEFNKSTDAYELKIANKLFGEKTYQFLQEYLDAIKKFYQTSVESTDFANAPEESRKKINSWVESQTNEKIKNLFPDGTIGNDTTLVLVNAIYFKGQWENKFKKENTKEEKFWPNKLEEKLTAEKLMEWTSLQNMRETCVDLHLPRFKMEESYDLKDTLRTMGMVNIFNGDADLSGMTWSHGLSVSKVLHKAFVEVTEEGVEAAAATAVVVVELSSPSTNEEFCCNHPFLFFIRQNKTNSILFYGRFSSP

SEQ ID NO: 251407 - DNA, 1017 bp, Artificial Sequence
  derived and/or modified sequence
atgaactccttgagcgaagcgaatacgaagttcatgtttgatcttttccagcagttcagaaaatccaaagagaacaacatcttctattctcctatcagtatcactagtgccttgggcatggtacttttaggcgcaaaagataacaccgcccagcagataagtaaagtattgcactttgaccaagtaactgagaataccacagagaaggcggctacctatcacgtggacagaagcggtaatgtacatcaccagtttcagaagctgctcacggaattcaacaaaagcaccgacgcttacgaacttaaaatcgctaacaaactgtttggagagaaaacataccagtttctccaagagtacctggatgctatcaagaagttctatcagaccagtgtggaatctaccgacttcgctaatgcacctgaagaatccaggaagaagattaatagctgggtggaatcacagaccaacgagaaaattaagaacctgttccccgatggaactattggtaatgacacaaccttagtgttggtcaatgcaatctactttaaggggcaatgggaaaacaagtttaaaaaagagaacactaaagaagagaagttctggccgaataagctggaggagaaactgactgctgagaagcttatggagtggacatccctgcagaacatgcgcgaaacttgtgtcgacctgcacctcccgagatttaagatggaggagtcatacgatcttaaagacacgttgcggactatggggatggtgaacatttttaacggcgacgcagatctgagtgggatgacctggagccacggactctcagtgagcaaggtgctgcacaaggcattcgttgaggtaactgaagagggtgttgaggccgccgccgcaaccgccgtagtggtggttgagctgtctagcccatccaccaatgaggagttctgttgtaatcatcctttcctgttttttatccgacagaacaagacaaactcaatcttattttacggacgatttagttcaccgtag

SEQ ID NO: 251408 - DNA, 1017 bp, Artificial Sequence
  derived and/or modified sequence
atgaacagcctgtctgaggccaacaccaagttcatgtttgacctcttccagcagttcaggaagagcaaggagaacaacatcttctacagccccatcagcatcaccagcgccctgggcatggtgctgctgggcgccaaggacaacacagcccagcagatcagcaaggtgctgcactttgaccaggtgacagagaacaccacagagaaggccgccacctaccacgtggacagaagtggaaatgtgcaccaccagttccagaagctgctgacagagttcaacaagagcacagatgcctatgagctgaagatcgccaacaagctgtttggagagaagacctaccagttcctgcaggagtacctggatgccatcaagaagttctaccagacctctgtggagagcacagactttgccaatgcccctgaggagagcaggaagaagatcaacagctgggtggagagccagaccaatgagaagatcaagaacctcttcccagatggcaccatcggaaatgacaccaccctggtgctggtgaatgccatctacttcaagggccagtgggagaacaagttcaagaaggagaacaccaaggaggagaagttctggcccaacaagctggaggagaagctgacagctgagaagctgatggagtggaccagcctgcagaacatgagggagacctgtgtggacctgcacctgccccgcttcaagatggaggagagctatgacctgaaggacaccctgcggaccatgggcatggtgaacatcttcaatggagatgctgacctgagcggcatgacctggagccacggcctgtctgtgtccaaggtgctgcacaaggcctttgtggaggtgacagaggagggcgtggaggccgctgctgccacagctgtggtggtggtggagctgagcagccccagcaccaatgaggagttctgctgcaaccaccccttcctgttcttcatccggcagaacaagaccaacagcatcctcttctacggccgcttcagcagcccctag

SEQ ID NO: 251409 - DNA, 1017 bp, Artificial Sequence
  derived and/or modified sequence
atgaacagcctgagcgaggccaacaccaagttcatgttcgacctgttccagcagttccgcaagagtaaggaaaacaacatattctattcgccaatcagtattacctccgcactggggatggtgttgcttggagccaaggataatactgcccagcagatctctaaagtgctgcattttgatcaagtgaccgaaaacacaaccgagaaggctgcgacctaccacgtggatagatccggcaatgtccatcatcaatttcaaaaactcctgacagagttcaataagtcaacagatgcttatgaactgaagattgccaataagctattcggggagaaaacctatcagtttctgcaggagtatctcgatgcgataaaaaagttttatcagacgtccgtcgaatccacggacttcgcgaatgcccccgaggagtctcgcaagaagatcaattcgtgggtagaaagccagacaaatgaaaaaatcaaaaatctcttcccagatggcaccatcggcaatgataccaccctggtcttggtgaacgcaatatatttcaaggggcagtgggagaataagtttaagaaggagaataccaaagaggaaaagttctggcctaacaaacttgaggagaaacttacagccgaaaagctgatggagtggacatcgctccaaaatatgcgggaaacgtgtgtagatcttcaccttccaaggtttaaaatggaggagagttacgacttaaaagacaccttgcgaactatgggcatggtaaatatttttaatggtgatgctgacttgagcgggatgacctggagccacggattgtcggtaagtaaggtcttacacaaggcttttgtcgaagttaccgaggaaggtgtggaggccgccgccgcgaccgcggtcgtcgtggtcgagctgtccagtccctctaccaacgaggagttctgctgcaaccacccttttttatttttcattcgccagaacaaaacaaactctattctgttttacggccggttttcttccccatag

SEQ ID NO: 251410 - DNA, 1017 bp, Artificial Sequence
  derived and/or modified sequence
atgaattccctgtctgaagccaacacaaagttcatgtttgacctctttcagcaattccgcaaatctaaggaaaataacatcttttacagtcccatctcaatcacatcagctctgggaatggtcttattgggtgcgaaggataacacggctcagcagataagtaaggtcctgcatttcgatcaggtgacagaaaatactacagaaaaagccgcaacttaccatgtggaccggagcggcaacgtgcaccaccaatttcagaagctgcttacagagtttaataagtcaacggatgcatatgaactcaagattgccaataagcttttcggcgaaaagacgtaccagtttcttcaggagtatctggacgcgataaaaaagttctaccagacctctgtcgagtccaccgatttcgcaaacgccccagaagagtcccggaaaaaaatcaactcctgggtcgaatctcagaccaacgaaaagatcaagaatctcttcccggacggcactatcgggaacgacactaccttagtgctggtcaacgccatctacttcaagggccagtgggagaacaagtttaaaaaggagaatacaaaagaggagaagttttggccaaacaaactggaggagaagttgaccgcggaaaaattaatggaatggacctcgttacagaatatgagggagacctgcgtggatctacacctacccaggtttaagatggaagaatcctacgacctcaaggatacgcttcggacgatggggatggtcaacatttttaatggcgacgccgatctgtcgggcatgacgtggagccacggcttgtccgtttccaaggttcttcacaaagcattcgttgaggtgactgaagaaggggtggaggccgctgcagcgaccgctgtggtggtggtggaactatcttctccaagcacaaatgaggagttctgctgcaatcacccctttttattctttatcagacagaacaagacaaatagcattctgttttatggtagatttagcagcccctag

SEQ ID NO: 251411 - DNA, 1562 bp, Artificial Sequence
  derived and/or modified sequence
ccttcattccacagacacacacagcctctctgcccacctctgcttcctctaggaacacaggagttccagatcacatcgagttcaccatgaattcactcagtgaagccaacaccaagttcatgttcgatctgttccaacagttcagaaaatcaaaagagaacaacatcttctattcccctatcagcatcacatcagcattagggatggtcctcttaggagccaaagacaacactgcacaacaaattagcaaggttcttcactttgatcaagtcacagagaacaccacagaaaaagctgcaacatatcatgttgataggtcaggaaatgttcatcaccagtttcaaaagcttctgactgaattcaacaaatccactgatgcatatgagctgaagatcgccaacaagctcttcggagaaaagacgtatcaatttttacaggaatatttagatgccatcaagaaattttaccagaccagtgtggaatctactgattttgcaaatgctccagaagaaagtcgaaagaagattaactcctgggtggaaagtcaaacgaatgaaaaaattaaaaacctatttcctgatgggactattggcaatgatacgacactggttcttgtgaacgcaatctatttcaaagggcagtgggagaataaatttaaaaaagaaaacactaaagaggaaaaattttggccaaacaagcttgaagagaaactcactgctgagaaattgatggaatggacaagtttgcagaatatgagagagacatgtgtcgatttacacttacctcggttcaaaatggaagagagctatgacctcaaggacacgttgagaaccatgggaatggtgaatatcttcaatggggatgcagacctctcaggcatgacctggagccacggtctctcagtatctaaagtcctacacaaggcctttgtggaggtcactgaggagggagtggaagctgcagctgccaccgctgtagtagtagtcgaattatcatctccttcaactaatgaagagttctgttgtaatcaccctttcctattcttcataaggcaaaataagaccaacagcatcctcttctatggcagattctcatccccatagatgcaattagtctgtcactccatttagaaaatgttcacctagaggtgttctggtaaactgattgctggcaacaacagattctcttggctcatatttcttttctatctcatcttgatgatgatagtcatcatcaagaatttaatgattaaaatagcatgcctttctctctttctcttaataagcccacatataaatgtacttttccttccagaaaaatttcccttgaggaaaaatgtccaagataagatgaatcatttaataccgtgtcttctaaatttgaaatataattctgtttctgacctgttttaaatgaaccaaaccaaatcatactttctcttcaaatttagcaacctagaaacacacatttctttgaatttaggtgatacctaaatccttcttatgtttctaaattttgtgattctataaaacacatcatcaataaaataatgacataaaatc

SEQ ID NO: 251412 - DNA, 1017 bp, Artificial Sequence
  derived and/or modified sequence
atgaacagcctgagcgaggccaacaccaagttcatgttcgacctgttccagcagttcagaaagagcaaggagaacaacatcttctacagccccatcagcatcaccagcgccctgggcatggtgctgctgggcgccaaggacaacaccgcccagcagatcagcaaggtgctgcacttcgaccaggtgaccgagaacaccaccgagaaggccgccacctaccacgtggacagaagcggcaacgtgcaccaccagttccagaagctgctgaccgagttcaacaagagcaccgacgcctacgagctgaagatcgccaacaagctgttcggcgagaagacctaccagttcctgcaggagtacctggacgccatcaagaagttctaccagaccagcgtggagagcaccgacttcgccaacgcccccgaggagagcagaaagaagatcaacagctgggtggagagccagaccaacgagaagatcaagaacctgttccccgacggcaccatcggcaacgacaccaccctggtgctggtgaacgccatctacttcaagggccagtgggagaacaagttcaagaaggagaacaccaaggaggagaagttctggcccaacaagctggaggagaagctgaccgccgagaagctgatggagtggaccagcctgcagaacatgagagagacctgcgtggacctgcacctgcccagattcaagatggaggagagctacgacctgaaggacaccctgagaaccatgggcatggtgaacatcttcaacggcgacgccgacctgagcggcatgacctggagccacggcctgagcgtgagcaaggtgctgcacaaggccttcgtggaggtgaccgaggagggcgtggaggccgccgccgccaccgccgtggtggtggtggagctgagcagccccagcaccaacgaggagttctgctgcaaccaccccttcctgttcttcatcagacagaacaagaccaacagcatcctgttctacggcagattcagcagcccctag

SEQ ID NO: 251413 - DNA, 507 bp, Artificial Sequence
  derived and/or modified sequence
atgagaagcatcagaaagagatggaccatctgcaccatcagcctgctgctgatcttctacaagaccaaggagatcgccagaaccgaggagcaccaggagacccagctgatcggcgacggcgagctgagcctgagcagaagcctggtgaacagcagcgacaagatcatcagaaaggccggcagcagcatcttccagcacaacgtggagggctggaagatcaacagcagcctggtgctggagatcagaaagaacatcctgagattcctggacgccgagagagacgtgagcgtggtgaagagcagcttcaagcccggcgacgtgatccactacgtgctggacagaagaagaaccctgaacatcagccacgacctgcacagcctgctgcccgaggtgagccccatgaagaacagaagattcaagacctgcgccgtggtgggcaacagcggcatcctgctggacagcgagtgcggcaaggagatcgacagccacaacttcgtgatcagatag

SEQ ID NO: 251414 - DNA, 507 bp, Artificial Sequence
  derived and/or modified sequence
atgcggtctatccgtaagcgatggactatctgcacaatttccctcctgctcatcttttacaagacaaaggagattgctcgcacagaagagcaccaagagacacagctaattggggacggagaactcagtctgtcacggagcctagtgaatagttccgacaaaatcatacgtaaagcgggaagcagtattttccagcacaacgtcgaagggtggaagatcaattcctccctagtgctcgaaatccgtaaaaatattctaagattcttggatgctgaaagagacgtctctgtggtgaagtctagtttcaagccaggggacgttatacattacgtgttagacagacgacgcacactgaatatctcacatgacctgcacagcctgctgccagaggtttcgcccatgaagaatcgccgtttcaaaacctgtgccgtggttgggaactcaggaatccttctggactctgagtgcggaaaggagatcgactcacataattttgtgataagatag

SEQ ID NO: 251415 - DNA, 507 bp, Artificial Sequence
  derived and/or modified sequence
atgaggagcatcaggaagcgctggaccatctgcaccatcagcctgctgctgatcttctacaagaccaaggagatcgccaggacagaggagcaccaggagacccagctgattggagatggagagctgagcctgagccgcagcctggtgaacagcagtgacaagatcatcaggaaggccggcagcagcatcttccagcacaacgtggagggctggaagatcaacagcagcctggtgctggagatcaggaagaacatcctgcgcttcctggatgctgagagagatgtgtctgtggtgaagagcagcttcaagccaggagatgtgatccactacgtgctggacagaagaaggaccctgaacatcagccatgacctgcacagcctgctgcctgaggtgagccccatgaagaacagacgcttcaagacctgtgctgtggtgggcaacagcggcatcctgctggacagtgaatgtgggaaggagattgacagccacaactttgtgatcagatag

SEQ ID NO: 251416 - DNA, 507 bp, Artificial Sequence
  derived and/or modified sequence
atgcggagcatccggaagcggtggaccatctgcaccatcagcctgcttttaatcttttacaaaacaaaggaaatcgcccggacagaagagcatcaagagacccagttgattggggatggagaactcagtctcagtcggtcactggtgaattcctccgataagatcatcagaaaggctggatcatctatcttccagcacaacgttgaaggatggaaaattaattctagcctggtcttagaaatcagaaaaaacattctgaggttcctggacgctgagcgcgacgtgtcagtggtgaagagcagcttcaagcctggcgacgtgatccactacgtcctggatcggcggcgcactctgaacatatcgcatgacttacacagtctgctgcctgaggtgagtccgatgaagaatcggcgctttaagacatgcgcagtcgtcggcaactccggcatactgctagactccgagtgtggaaaggagattgactcccacaacttcgttattaggtag

SEQ ID NO: 251417 - DNA, 507 bp, Artificial Sequence
  derived and/or modified sequence
atgcgttctatcagaaagcggtggaccatatgtacaatctcattgctattaattttctacaagactaaagagattgccaggactgaagagcatcaggagactcagcttattggggatggggagcttagtctcagtcggtctctggtgaacagtagtgataaaattatacgcaaggcgggaagttcgatttttcagcataacgtcgagggctggaagatcaacagttctttggtactcgaaatacgcaaaaacatcttgagatttctcgacgcagagcgtgacgtctcagtggtgaaatcttctttcaagccaggagatgtcattcattacgttctggacagacgccgaactctgaatatttctcacgatctgcacagccttttgcctgaagtgtctccaatgaaaaaccggaggttcaaaacctgtgctgtcgtggggaatagtgggatcttgttagactccgagtgcggtaaggagatcgatagccataatttcgtgatacgatag

SEQ ID NO: 251418 - DNA, 1794 bp, Artificial Sequence
  derived and/or modified sequence
aacctgagccccagggaggcggcgcggagcgaccctggcagagctggcgcaaacagggcgagaggtcgctgggcagcgttcgaggaccagagggagctcggccacagaagaccccagtgatctgatcccgggatcccggctccaagctctcctcgcattttacagatttcacccccgcgactatctccccaaaacggagcctttatatcaagagaaggtgcgggagctggggcaaccaggactttctcgggcacccaagatgcgctccattaggaagaggtggacgatctgcacaataagtctgctcctgatcttttataagacaaaagaaatagcaagaactgaggagcaccaggagacgcaactcatcggagatggtgaattgtctttgagtcggtcacttgtcaatagctctgataaaatcattcgaaaggctggctcttcaatcttccagcacaatgtagaaggttggaaaatcaattcctctttggtcctagagataaggaagaacatacttcgtttcttagatgcagaacgagatgtgtcagtggtcaagagcagttttaagcctggtgatgtcatacactatgtgcttgacaggcgccggacactaaacatttctcatgatctacatagcctcctacctgaagtttcaccaatgaagaatcgcaggtttaagacctgtgcagttgttggaaattctggcattctgttagacagtgaatgtggaaaggagattgacagtcacaattttgtaataaggtgagctttcttctgctttttgagattgtaagtttttcaaagatattttacttgggggtggaaaactgttagaaaattttaaagtattactaaaacctcaaacaaatatttgtctatgatatccttttctgtgcaacatttaaattacatttaccctggaatagaatattataattattgcgtagttgaaagaaaaagtgatcctgtcatagcaacaagattcacacagctttttttggtgaggtgaggggggaggcaaatggcaattttattaaatttaatattccacacaaacttttttcttagtatctcttcttcatactcattagttttgtgtgattttatttgttgtataaagattatgaatattactatggaatgatgtaatagatttatgttaatgttactttttattaataattatctaggagatagtaagaacatagtttagcaagtttatatttgatatcctgagccatatttctttaatttctctttatatgtggtatttgtgtatgttagtatatttgaattttatgtttttttaacataattaagcgtgcatgtttgtttttcattaacggttaaaagatatttgatgaattgtgtgtttgattaacctattaactgaaaaaaactcaacagtagaaatggaattataatcacatcataaatataagcagtttttaatgatcaatttttatatctgtacagtttttttggattgttttagttccttagaaaaattagctaaatgacagaaacatggatattgaaatatgaaatagtacaatataaagatagatagaaaagtatgctgagttgacatgttgaaaaacacagtctcttgaagatatactggaatacattatttttgaatattttgaatattttttgaatatttttaaataaagtcttaaaagcataaataggtaactacttttaaaaaaaaagtcatgagaaatcacactcaagcattatcaagtgaagaaaattcataatagcaaataaaactgcaaacattttacctta

SEQ ID NO: 251419 - protein, 431 aa, Artificial Sequence
  derived and/or modified sequence
MMLRFSMCRGNDEGFAMEQIWLLLLLTIRVLPGSAQFNGYNCDANLHSRFPAERDISVYCGVQAITMKINFCTVLFSGYSETDLALNGRHGDSHCRGFINNNTFPAVVIFIINLSTLEGCGNNLVVSTIPGVSAYGNATSVQVGNISGYIDTPDPPTIISYLPGLLYKFSCSYPLEYLVNNTQLASSSAAISVRENNGTFVSTLNLLLYNDSTYNQQLIIPSIGLPLKTKVFAAVQATNLDGRWNVLMDYCYTTPSGNPNDDIRYDLFLSCDKDPQTTVIENGRSQRGRFSFEVFRFVKHKNQKMSTVFLHCVTKLCRADDCPFLMPICSHRERRDAGRRTTWSPQSSSGSAVLSAGPIITRSDETPTNNSQLGSPSMPPFQLNAITSALISGMVILGVTSFSLLLCSLALLHRKGPTSLVLNGIRNPVFD

SEQ ID NO: 251420 - DNA, 1296 bp, Artificial Sequence
  derived and/or modified sequence
atgatgctgagattcagcatgtgcagaggcaacgacgagggcttcgccatggagcagatctggctgctgctgctgctgaccatcagagtgctgcccggcagcgcccagttcaacggctacaactgcgacgccaacctgcacagcagattccccgccgagagagacatcagcgtgtactgcggcgtgcaggccatcaccatgaagatcaacttctgcaccgtgctgttcagcggctacagcgagaccgacctggccctgaacggcagacacggcgacagccactgcagaggcttcatcaacaacaacaccttccccgccgtggtgatcttcatcatcaacctgagcaccctggagggctgcggcaacaacctggtggtgagcaccatccccggcgtgagcgcctacggcaacgccaccagcgtgcaggtgggcaacatcagcggctacatcgacacccccgacccccccaccatcatcagctacctgcccggcctgctgtacaagttcagctgcagctaccccctggagtacctggtgaacaacacccagctggccagcagcagcgccgccatcagcgtgagagagaacaacggcaccttcgtgagcaccctgaacctgctgctgtacaacgacagcacctacaaccagcagctgatcatccccagcatcggcctgcccctgaagaccaaggtgttcgccgccgtgcaggccaccaacctggacggcagatggaacgtgctgatggactactgctacaccacccccagcggcaaccccaacgacgacatcagatacgacctgttcctgagctgcgacaaggacccccagaccaccgtgatcgagaacggcagaagccagagaggcagattcagcttcgaggtgttcagattcgtgaagcacaagaaccagaagatgagcaccgtgttcctgcactgcgtgaccaagctgtgcagagccgacgactgccccttcctgatgcccatctgcagccacagagagagaagagacgccggcagaagaaccacctggagcccccagagcagcagcggcagcgccgtgctgagcgccggccccatcatcaccagaagcgacgagacccccaccaacaacagccagctgggcagccccagcatgccccccttccagctgaacgccatcaccagcgccctgatcagcggcatggtgatcctgggcgtgaccagcttcagcctgctgctgtgcagcctggccctgctgcacagaaagggccccaccagcctggtgctgaacggcatcagaaaccccgtgttcgactag

SEQ ID NO: 251421 - DNA, 1296 bp, Artificial Sequence
  derived and/or modified sequence
atgatgctgagattctccatgtgcagaggcaacgatgaaggctttgctatggagcagatctggctgcttcttttgttgacaataagggtgctcccgggcagcgctcagtttaacggctacaactgcgacgctaatttgcactcacgcttcccagccgagagggatataagcgtgtattgcggagttcaggccatcacaatgaagatcaacttctgcaccgtcttattttctggctattccgagaccgacctcgccctcaacggccgacacggcgatagccactgtcgtggttttatcaacaacaatactttccctgccgtcgtgattttcatcatcaatttgtccaccctggaggggtgtggaaataacctggttgtgtctacaatccccggtgtgtccgcctacgggaatgccacctccgtgcaggtagggaacatttcaggatatattgatacgcccgaccctcccacgataatatcctacctgccagggctgctttacaagttttcctgcagttatccattggagtacttagtcaacaacacccagctggcatccagctcagcagcgatcagcgtgagggagaacaatggtacatttgtgagcacattaaatttgttgttatataacgatagtacctataaccagcaattaatcattccttcgatcgggctgcctctcaagaccaaggtgtttgcagcagtgcaggctacgaacctggatggacgatggaacgtcctgatggactactgctacaccacaccctccggaaatcctaatgatgatattcgatatgacctgttcctcagctgcgacaaagaccctcagaccacagttatcgagaacggtcggtcccaacggggccgcttttccttcgaggtttttagattcgtgaagcacaagaatcaaaaaatgtcaacagtgttcctccactgtgtgacaaaactctgcagagcagacgactgccctttcctgatgcctatatgttcccaccgcgagagaagggacgctgggaggcgcaccacatggagtcctcagtcctcttcaggctccgccgtgttatctgccggtccaatcataaccaggtctgacgagacgccgaccaacaacagccagctgggaagcccttccatgcccccttttcagctcaacgcgataacttccgcacttataagcggtatggttatattaggcgtgacgtccttttcattgcttctgtgttccctcgcgctcctgcacaggaagggtccaaccagccttgtcctgaacggtattaggaatcccgtgtttgattag

SEQ ID NO: 251422 - DNA, 1296 bp, Artificial Sequence
  derived and/or modified sequence
atgatgctgcgcttctccatgtgcagaggaaatgatgagggctttgccatggagcagatctggctgctgctgctgctgaccatccgggtgctgcccggcagcgcccagttcaacggctacaactgtgatgccaacctgcacagccgcttccctgctgagcgggacatctctgtgtactgcggcgtgcaggccatcaccatgaagatcaacttctgcaccgtgctcttcagcggctacagcgagacagacctggccctgaatggccgccacggggacagccactgccggggcttcatcaacaacaacaccttccctgctgtggtgatcttcatcatcaacctgagcaccctggagggctgcggcaacaacctggtggtgtccaccatccctggggtgtctgcctatggaaatgccacctctgtgcaggtgggcaacatcagcggctacatcgacaccccagacccccccaccatcatctcctacctgcccggcctgctgtacaagttcagctgcagctaccccctggagtacctggtgaacaacacccagctggccagcagcagcgctgccatctctgtgagagaaaataatggcacctttgtgtccaccctgaacctgctgctgtacaatgacagcacctacaaccagcagctgatcatccccagcatcggcctgcccctgaagaccaaggtgtttgctgctgtgcaggccaccaacctggatggccgctggaatgtgctgatggactactgctacaccacccccagcggcaaccccaatgatgacatccgctatgacctcttcctgagctgtgacaaggacccccagaccaccgtgattgaaaatggccgcagccagaggggccgcttctcctttgaggtgttccgctttgtgaagcacaagaaccagaagatgagcacagtgttcctgcactgtgtgaccaagctgtgcagagcagatgactgccccttcctgatgcccatctgcagccaccgggagaggagagatgctggaagaaggaccacctggagcccccagagcagcagcggcagcgctgtgctgtctgctggccccatcatcaccaggagtgatgagacccccaccaacaacagccagctgggcagccccagcatgccacccttccagctgaatgccatcaccagcgccctgatcagcggcatggtgatcctgggcgtgaccagcttcagcctgctgctgtgcagcctggccctgctgcacaggaagggccccaccagcctggtgctgaatggcatccggaaccctgtgtttgattag

SEQ ID NO: 251423 - DNA, 1296 bp, Artificial Sequence
  derived and/or modified sequence
atgatgctgcggttcagcatgtgccggggcaacgacgagggcttcgccatggagcagatctggctgttgcttttgctcaccatccgcgtgcttcccggctcagcacagttcaatgggtataattgtgacgctaacctacactctcgtttccctgccgaaagagatatttccgtttactgcggcgtgcaggctatcactatgaagatcaatttctgtaccgtactattttcgggatactcagagacagacttagccttaaacggccgccacggcgattcccattgtcgggggttcatcaataataatacattccccgctgtcgtgattttcatcattaacctttcgaccctcgaaggttgtggcaacaatcttgtggtgagtaccatcccaggagtttctgcatacgggaatgccacatctgttcaggtcggcaacatttcggggtacattgacacacccgatcctcctaccatcatcagctacctgcctggtctgctgtacaaattttcctgctcctaccctctggaatacctcgtgaacaatacgcagcttgcgagcagcagcgcagccatatccgttcgcgaaaacaacgggaccttcgtaagcacacttaatctcctgctctacaatgattcaacatacaatcagcagctgattatcccctcaatcgggcttcctctcaaaacaaaggtgttcgcggccgtgcaggcaacaaacctggatggacgctggaatgtgctgatggactattgctacaccacccccagcgggaatcccaacgacgacatcaggtatgacctgtttttgtcttgcgacaaagacccacaaactacggtcatagaaaacggccgcagccagagaggccgcttctctttcgaggtgttccgattcgttaaacataaaaatcaaaagatgtcgactgtgtttttacattgcgtcacaaagctgtgtagagctgacgattgtccgttcctgatgcccatatgcagccatagagagcggagagacgctggacgtcgcacgacctggagcccccagagctcatccgggtccgccgtcctgtccgcaggccccataattacccggtctgatgaaactccgacaaacaatagtcaactgggaagcccttcaatgcctccatttcagcttaacgctattacatccgccctaatttcaggtatggttatacttggtgtaaccagcttttcccttctgctgtgcagtctggccctactgcatcggaagggaccgaccagtctggtgctgaatggcatcaggaatccagttttcgactag

SEQ ID NO: 251424 - DNA, 1296 bp, Artificial Sequence
  derived and/or modified sequence
atgatgctgagatttagcatgtgccggggaaatgatgagggcttcgccatggaacagatttggttgctcctgctgctgaccattcgtgttctgccaggcagcgcgcagtttaacggttataactgtgatgcgaatctccacagccggtttcccgctgagagggatatttcagtttattgtggggtacaggcaataaccatgaaaatcaacttctgtactgtactgttttcaggctatagcgagacagatttggccctgaatggacgccacggagactctcactgccgaggatttatcaataataatacatttcctgctgtcgttattttcatcatcaacttatcaaccctggaaggatgtgggaacaatctcgtggtgagtactatacctggagtttctgcgtatggcaatgccacaagtgtgcaggtaggcaacatctcaggctatatagacaccccagaccctcctaccatcatcagttacctgccaggtctcctctataaatttagttgctcttacccactggagtatttagttaataacactcagctcgcttcatcatcagcagcaataagcgtgcgtgagaataacggcacgttcgtaagtacgctgaacctgctgctctacaatgactccacttacaatcagcagctcatcataccctccattggactgccacttaagacaaaggtgtttgccgctgtgcaggctacaaatcttgatggtcggtggaatgttctcatggattactgctatacaacgccatccggaaacccaaacgacgacatccggtacgatttatttctttcgtgcgacaaggatccccaaacaacagttatagagaacgggcgatcccagcggggacgcttctctttcgaggtcttcaggttcgtaaagcataaaaaccagaaaatgtctaccgtcttcctgcattgcgtgactaagctctgtagggcggatgactgcccctttctcatgccgatatgttcgcacagggagagaagagacgcaggtcgacgtacaacgtggtccccacaatcgagttccggaagcgctgtgttatccgctggaccgattatcacccgcagcgatgaaactcccacgaataattcccagctcggctccccaagcatgccgccattccaactgaacgccatcacttccgctctgatctccggcatggtcattttgggtgtcacttctttttcattgctcctctgctctctggccctgcttcacaggaagggaccgacttcgttagtgcttaacggaattaggaaccctgtgttcgattag

SEQ ID NO: 251425 - DNA, 3619 bp, Artificial Sequence
  derived and/or modified sequence
taaagggtgttaacataatcccccaatcccatacaattcaatttcagaaaagtatttagggactgtgctaaaatagcatctccaagcttgctatggcaagatgatgctcaggttttccatgtgcaggggaaatgatgaaggttttgcaatggaacaaatatggttgctgctgcttctaacaattagagtgcttccggggtctgctcagttcaacggctacaactgtgatgccaacctccacagtagatttcctgctgaaagagacatcagtgtctattgtggagtgcaggctattacgatgaagattaatttttgcacggtacttttctcgggttattcggaaacagatctggcactgaatggaaggcatggggactcccactgcagagggttcatcaataacaacacctttccagcagtggtcatttttatcatcaatctcagcaccttggagggctgtggaaacaacctggtggtatccacaattcctggagtcagtgcttatggaaatgcaacttcagtgcaagtaggaaatatttcaggatatattgatactccagacccaccaacaatcatcagctatctacctgggcttctttacaaatttagttgtagttatccattggaatacctggttaataatacccagcttgcttcgtcctcagcggctatttctgtgagagagaacaatggcacatttgtcagcactttgaacctgctcctttataacgattcaacctacaaccagcagttaattatccccagtataggattacctttgaaaaccaaagtatttgcagctgtccaagccactaatttggatggcagatggaatgttttaatggattattgctatactaccccatcaggaaacccaaatgatgacattcgatatgatcttttccttagctgtgacaaggaccctcagaccaccgtcattgagaatggccgaagccagcggggccggttttcttttgaagtgttccgatttgtgaaacacaagaatcagaaaatgtccactgtcttcttgcactgcgttaccaagctctgcagagcagatgactgccccttccttatgccgatttgcagccacagagaaaggagagatgctgggaggaggacgacttggagcccccagagctcttctggcagcgcggtgctctctgctggtcccatcattactcggagtgatgagactccaaccaacaattcgcaacttggttctccaagtatgcctcccttccagctgaacgccatcaccagcgcactgatatcaggaatggtcattctgggagttacgagcttttctcttcttctgtgctcactggcccttctgcacaggaagggacccacaagtttagtgttgaatggcataagaaacccagtctttgactgactataacagattcctgctctctggagaaggcttcactgactaaactatgtgtgactgcagtcagtgttccgtctgaatttcatgtcagtccacattcaatatttgtaggtttgataaatttcacagtatagcttgtcagcataatgatagtgaaagaagtttattatattgctattgtcacttatgtacgtggcgagccgtatttttatgccaccagtgaatatattgacaataagtgaaaaatattcaggacttagggcttacaggatcagtaatatttcattttatttcagttttcttttgattgttggttaaaagataaaaggtgggagtagacaaaaaatgaaatgtgttgcatttcccccttaagcattaatggcatttagatttgcacacgtggtcctagaataaatgttgctttttgttttaatccggatattcccagcttcaggatgtgttttaataggactggccaatttggatacctgagatttaactactcattctatgacctcctgtgtttttggccgattttcatgtctgaccatattcattttaaaagaaactcttgggacatatctcttaacctggggcacccttttgtgtagaagatagtgaaaatagttgttagcttccaaggctactgctaagtggccctagatcattattcattagaataggaatggctgcgatcagttttcttcttctggttcaggtgagaacaccagcacatgttaactctcctcccaggtaaacagttcagctgctgttgcagctgtgcttccagcagtgaggtaactatgcaaagattatttttaattcaagaatcatcacatgtgaaaacaagctgtagttgtgaaaagagttcctagaagggtttttaacaatttagattccctttttcctaaaacaaaaaggaaacttaggttaagtgtagtttgcagaacattgttggaatctacataaaaagatattccttcccccatattttcgatgccaggcaataatcaggagagggtttctttttaaggtatcttcttgtaggtgtcataattgccatgaataaacaatattttcctctaacagtaaactgcaagaagcttctgatcctttatcagttttgcaaaaaagcaagctttaagcagcccatgttcttacaaaaaaaatcaacattctctttgtttaagctacctatgcactgaacaaacaaaacaatttaatagccaacaccaaaacccagcatgtgaagttactagaattgccatgttaactataagcaattgctgtaatcactaatttctattcaacatttgtgacccattagtccggacttaatttactatactgcatgcaaatcatcaagcaattgcttcaaaggaaatgtctacaatgtgagttaataattaaatcaatcctcaagttgaaaaacactttttctccaatttgcctgaatatttcaggaggaagtgtttatattataataattagctatataattgcatcaactttttatttcaaggtatagttgccaagtaaagtgggatctggaaagtctctggataatttctttacaaaaaaagtttaaatcacataaaaagccaatctactcttccctgtgttactttaaaataactttgaagtgactattctgagctttatctgtgttaacatgattaactgaccatactactaatgtgaccctgtatatacatggatagtattgaaatatgctggtaaatctatttcagatactttaagtgaattgccattgattctacgattaagttctgtgaataggacattatatcatttaagctgttttgtcaatttgatttttatgcttttggaacggctgctgtttcagctgttggccttttcaattctatactccattttatagaattgaataatggacacatgtcacttgggaagcaacgtaagtatcacattattttttgccaccctttcatcataaatggaagaatcagagttataatgagataaaccaggtctgttttttacaactttgttcttataaatctgcagttatatggagtatttagttatactgaattttacagttattatagtgtgaaaaaccttacaaaatatgtgcaaatgtttcttcagttttaatacctcaaactgttttttgcacttcaggggtaaggtctgatgacatgtaaaagatgatcgtttaataaaataattgtttaaaatgtt

SEQ ID NO: 251426 - DNA, 1531 bp, Artificial Sequence
  derived and/or modified sequence
tcccccaatcccatacaattcaatttcagaaaagtatttagggactgtgctaaaatagcatctccaagcttgctatggcaagatgatgctcaggttttccatgtgcaggggaaatgatgaaggatacacctctgtgttggggacaacagtgtgggtctagagtttccaatgtcttccaggagttcttgggacccatcatgagaaggaagtggtggagcatggagcatggaataaatgttttgcaatggaacaaatatggttgctgctgcttctaacaattagagtgcttccggggtctgctcagttcaacggctacaactgtgatgccaacctccacagtagatttcctgctgaaagagacatcagtgtctattgtggagtgcaggctattacgatgaagattaatttttgcacggtacttttctcgggttattcggaaacagatctggcactgaatggaaggcatggggactcccactgcagagggttcatcaataacaacacctttccagcagtggtcatttttatcatcaatctcagcaccttggagggctgtggaaacaacctggtggtatccacaattcctggagtcagtgcttatggaaatgcaacttcagtgcaagtaggaaatatttcaggatatattgatactccagacccaccaacaatcatcagctatctacctgggcttctttacaaatttagttgtagttatccattggaatacctggttaataatacccagcttgcttcgtcctcagcggctatttctgtgagagagaacaatggcacatttgtcagcactttgaacctgctcctttataacgattcaacctacaaccagcagttaattatccccagtataggattacctttgaaaaccaaagtatttgcagctgtccaagccactaatttggatggcagatggaatgttttaatggattattgctatactaccccatcaggaaacccaaatgatgacattcgatatgatcttttccttagctgtgacaaggaccctcagaccaccgtcattgagaatggccgaagccagcggggccggttttcttttgaagtgttccgatttgtgaaacacaagaatcagaaaatgtccactgtcttcttgcactgcgttaccaagctctgcagagcagatgactgccccttccttatgccgatttgcagccacagagaaaggagagatgctgggaggaggacgacttggagcccccagagctcttctggcagcgcggtgctctctgctggtcccatcattactcggagtgatgagactccaaccaacaattcgcaacttggttctccaagtatgcctcccttccagctgaacgccatcaccagcgcactgatatcaggaatggtcattctgggagttacgagcttttctcttcttctgtgctcactggcccttctgcacaggaagggacccacaagtttagtgttgaatggcataagaaacccagtctttgactgactataacagattcctgctctctggagaaggcttcactga

SEQ ID NO: 251427 - DNA, 2189 bp, Artificial Sequence
  derived and/or modified sequence
agtatgtataaagtgcttagaagagggcctggaacataggacatggatgaagctggaaaccatcattctcagcagactaacacaggaacagaaaaccaaacaccagtgttccagatttgcattaagctgtcacccggtggctgtgtaactagctgcttttgtgactgttacagccgcaaaagccttaacagacctgcagttacagactcagggaaaagcttgtactgttgtttgtggatcgcagggaagccagagttgcagctgactttctgtccacgagatggcggtagaggagcacagaaaaaagaaaccatcttgggctgttaatcatgttgactgttgagaagctaagagggaagccgatctgtcattagggtgaaaaaaaaagtcactgtaacaggagtcaagaaggggcttagaacctagtcatgtgaatattttcaagtttttcttgccttgtgttttttcatcaaatgaggttcagtgaattcgggactcagtaactccattagtgactgcacccacatagacctttttctaaaagtctccacatttgtccagttgtttcctccttggtccaatgccaacgctccgtcaatgctattgccacccccattctgcctcttccaaaagcctgcatcagtcatggagtcctcttcacctgaaataagcacttagtataaaccgatgcaactggttttgtgctggaagacaagcttagcaacgacatttcaaaaagagcagctcttctctcatttgaagccttgactcttttctgaaaaagtttggtaaggtcaggcatttgaacactcagtcacatgcggcagaacctagcacatggaggacagctgactccacagaaccagggatttgggttttgcaatggaacaaatatggttgctgctgcttctaacaattagagtgcttccggggtctgctcagttcaacggctacaactgtgatgccaacctccacagtagatttcctgctgaaagagacatcagtgtctattgtggagtgcaggctattacgatgaagattaatttttgcacggtacttttctcgggttattcggaaacagatctggcactgaatggaaggcatggggactcccactgcagagggttcatcaataacaacacctttccagcagtggtcatttttatcatcaatctcagcaccttggagggctgtggaaacaacctggtggtatccacaattcctggagtcagtgcttatggaaatgcaacttcagtgcaagtaggaaatatttcaggatatattgatactccagacccaccaacaatcatcagctatctacctgggcttctttacaaatttagttgtagttatccattggaatacctggttaataatacccagcttgcttcgtcctcagcggctatttctgtgagagagaacaatggcacatttgtcagcactttgaacctgctcctttataacgattcaacctacaaccagcagttaattatccccagtataggattacctttgaaaaccaaagtatttgcagctgtccaagccactaatttggatggcagatggaatgttttaatggattattgctatactaccccatcaggaaacccaaatgatgacattcgatatgatcttttccttagctgtgacaaggaccctcagaccaccgtcattgagaatggccgaagccagcggggccggttttcttttgaagtgttccgatttgtgaaacacaagaatcagaaaatgtccactgtcttcttgcactgcgttaccaagctctgcagagcagatgactgccccttccttatgccgatttgcagccacagagaaaggagagatgctgggaggaggacgacttggagcccccagagctcttctggcagcgcggtgctctctgctggtcccatcattactcggagtgatgagactccaaccaacaattcgcaacttggttctccaagtatgcctcccttccagctgaacgccatcaccagcgcactgatatcaggaatggtcattctgggagttacgagcttttctcttcttctgtgctcactggcccttctgcacaggaagggacccacaagtttagtgttgaatggcataagaaacccagtctttgactgactataacagattcctgctctctggagaaggcttcactgactaaactatgtgtgactgca

SEQ ID NO: 251428 - protein, 1122 aa, Artificial Sequence
  derived and/or modified sequence
MAAATVGRDTLPEHWSYGVCRDGRVFFINDQLRCTTWLHPRTGEPVNSGHMIRSDLPRGWEEGFTEEGASYFIDHNQQTTAFRHPVTGQFSPENSEFILQEEPNPHMSKQDRNQRPSSMVSETSTAGTASTLEAKPGPKIIKSSSKVHSFGKRDQAIRRNPNVPVVVRGWLHKQDSSGMRLWKRRWFVLADYCLFYYKDSREEAVLGSIPLPSYVISPVAPEDRISRKYSFKAVHTGMRALIYNSSTAGSQAEQSGMRTYYFSADTQEDMNAWVRAMNQAAQVLSRSSLKRDMEKVERQAVPQANHTESCHECGRVGPGHTRDCPHRGHDDIVNFERQEQEGEQYRSQRDPLEGKRDRSKARSPYSPAEEDALFMDLPTGPRGQQAQPQRAEKNGMLPASYGPGEQNGTGGYQRAFPPRTNPEKHSQRKSNLAQVEHWARAQKGDSRSLPLDQTLPRQGPGQSLSFPENYQTLPKSTRHPSGGSSPPPRNLPSDYKYAQDRASHLKMSSEERRAHRDGTVWQLYEWQQRQQFRHGSPTAPICLGSPEFTDQGRSRSMLEVPRSISVPPSPSDIPPPGPPRVFPPRRPHTPAERVTVKPPDQRRSVDISLGDSPRRARGHAVKNSSHVDRRSMPSMGYMTHTVSAPSLHGKSADDTYLQLKKDLEYLDLKMTGRDLLKDRSLKPVKIAESDTDVKLSIFCEQDRVLQDLEDKIRALKENKDQLESVLEVLHRQMEQYRDQPQHLEKIAYQQKLLQEDLVHIRAELSRESTEMENAWNEYLKLENDVEQLKQTLQEQHRRAFFFQEKSQIQKDLWRIEDVTAGLSANKENFRILVESVKNPERKTVPLFPHPPVPSLSTSESKPPPQPSPPTSPVRTPLEVRLFPQLQTYVPYRPHPPQLRKVTSPLQSPTKAKPKVQEDEAPPRPPLPELYSPEDQPPAVPPLPREATIIRHTSVRGLKRQSDERKRDRELGQCVNGDSRVELRSYVSEPELATLSGDMAQPSLGLVGPESRYQTLPGRGLSGSTSRLQQSSTIAPYVTLRRGLNAESSKATFPRPKSALERLYSGDHQRGKMSAEEQLERMKRHQKALVRERKRTLGQGERTGLPSSRYLSRPLPGDLGSVC

SEQ ID NO: 251429 - DNA, 3366 bp, Artificial Sequence
  derived and/or modified sequence
atggcagccgctaccgtggggcgagacaccctgcctgaacactggtcctacggcgtctgcagggatggacgtgtcttcttcattaatgaccagttgaggtgtacaacatggctgcatccacgtactggggaaccagttaactccggccatatgatccgaagtgacctaccacggggttgggaagagggtttcacggaggagggagcttcctacttcatagaccataaccagcagacgactgcgttccgacatcctgttacggggcagttttctcccgagaattcagaattcatcttgcaggaagaaccaaatccccatatgtccaagcaggacaggaatcaacgtccttccagcatggtgagcgaaacctctacagctgggacagcctccacactggaagctaaaccaggtcctaagatcattaagtcgtccagcaaagtacatagtttcggtaaaagggatcaggctatccgacgtaatccaaatgttccggtagtggtccgcgggtggctacacaaacaggactcatcaggaatgagattgtggaaacgacggtggttcgtcctggccgattactgcctgttctattacaaggatagtcgcgaggaggccgtgctaggaagcataccattgccttcatacgtaatcagtccggtggccccggaggatcgaatctcaaggaaatactctttcaaggccgtacacaccgggatgcgagcgctaatttacaattcctctaccgctgggtctcaggcagagcagtcagggatgcggacttattatttctccgctgacactcaggaggacatgaacgcatgggtgagagcgatgaaccaggctgcacaggtgctgagccgctcgtcacttaagcgcgacatggagaaggttgagagacaggctgtacctcaggcgaatcacacggaatcttgtcacgagtgtggacgcgttggaccgggacacacacgcgactgtcctcacagagggcacgacgacatcgtgaacttcgagcgccaagagcaagagggggagcaatataggtcccagcgtgatccacttgaaggaaaacgggatcgaagtaaggcccgctccccttatagtccagccgaagaggatgctctttttatggatttgcccaccggcccacgtgggcaacaagcgcagccgcagagagcggagaagaacggcatgttgcccgccagttatggcccgggtgaacagaatggtaccggaggctatcaacgggctttcccgccacgtacgaatcctgaaaagcattcccagaggaagtctaaccttgcgcaggttgagcactgggcgcgagcccagaagggggacagcaggtcactgcccctcgatcagacgctgccccggcaaggtcctgggcagtccctaagttttccagagaattaccagacactgccgaagagcacaagacaccccagcggtggaagtagtccgcctccccgaaatctcccttctgactacaaatatgctcaagaccgagcctcccatctgaaaatgtccagtgaggagagacgggctcacagagacggcacagtctggcagctgtacgagtggcagcaacgacagcaattcaggcatggaagccctaccgcccctatctgtctaggctcacccgagttcaccgatcagggtagatcacgttctatgctggaggtcccgcgtagcatctcggttcctcctagcccctcagacattccccctcccgggcccccccgggttttccctccacgacggccacacacccctgcagagagagtgaccgtgaagccaccggatcagagacggtccgtggatattagcctcggggatagtcctcgccgggcccgagggcatgctgtcaagaacagtagccacgtggatcgacgatcaatgccgtcgatgggatacatgacccacaccgtttctgcacctagcctgcacggaaaaagtgccgacgatacttacctacagctgaagaaggacctagaatatctggatttgaaaatgacaggccgcgatttgttgaaagaccgttcgttaaagccagtcaagattgcggaatcagacacagacgtcaagctgtctatcttttgtgaacaggaccgtgtgcttcaggatctcgaagacaaaatccgggctctgaaggagaataaggaccagctggagtccgtgctcgaggtactgcacagacaaatggagcaatacagggaccagcctcaacaccttgagaaaatcgcttaccagcagaaactcctccaggaggacttggtgcacattagagcagagctgtcccgggaatctactgaaatggagaatgcttggaatgagtatctgaagctcgagaatgacgtagagcagctcaagcaaactctgcaggaacagcatcgccgtgctttttttttccaagaaaaatcacagattcagaaagatttgtggcgaattgaagacgtcactgctggactatcagccaacaaggagaatttcaggatcctggtggagagtgttaagaatccggagcgcaaaacagtgccattatttccacatccccctgtccccagcctctctacatctgagtccaagccgccgccccagccaagcccccctacgagccctgtccggactcctctcgaggtcagactgtttccacagctccagacttatgttccataccgaccacacccaccgcagctgaggaaggtgacctcccctctgcagtctcctacaaaagctaaacctaaagtggaggatgaggcacctccccgacctccattacccgaattatatagtccagaggaccagccccccgccgtccctccgttgccaagagaggcaacaattatccgccatacctctgtaagaggtctgaagcggcaatctgatgagcgcaagagggatcgggaactggggcagtgtgtgaatggcgattccagagtggaactgcgctcttatgtgagcgagcctgagctggcgaccctctctggggacatggcacagccaagccttggactggtaggccccgaaagcagatatcagaccctgccaggccggggcttgagcggttcaactagcagattgcagcagtcatctaccatcgccccatatgtcacactcagaaggggccttaacgctgagagctcgaaggcgacttttcctagacctaaaagtgctctcgagagactatattcaggcgaccatcaacgcggcaaaatgtccgcggaggaacaactggagcggatgaagcgccatcaaaaggcacttgtccgggaaaggaaaaggactttaggtcagggagagcgcacagggctcccctcctctagatacctatctagaccattgccaggcgacctgggtagcgtctgttag

SEQ ID NO: 251430 - DNA, 3369 bp, Artificial Sequence
  derived and/or modified sequence
atggcagccgcgaccgttggcagagatactctgccagaacattggtcatatggcgtttgtagggacgggagggttttcttcattaacgaccagcttcgttgtaccacttggcttcatccccgcaccggcgagccagtcaactctggccatatgattcgctccgacctgccaaggggctgggaggaaggattcaccgaggagggagcttcctattttatagaccataaccagcaaaccacagccttccggcaccctgttaccggccagttttcccctgaaaattcagagttcatcctgcaggaagagcctaaccctcatatgagtaagcaggatcgcaaccagagaccaagttcgatggtgagtgagacctcaaccgccggaacagcgagcactttggaggccaaaccgggtcccaagatcataaagtcttctagtaaggtgcatagtttcgggaagagggatcaggccatccggcgtaaccctaatgtgccagttgtggtccgggggtggcttcataagcaagacagctcaggaatgagactgtggaagagaaggtggttcgtgctggctgattactgcttgttttattacaaggactcccgcgaggaggcagtgctcggatcaattcccttgccctcttacgtgatctctccagtggcacccgaggatcgtatcagtagaaagtactctttcaaggcggtccacacaggcatgcgtgcactgatatacaattcaagcactgcaggatcacaagctgagcagtccgggatgaggacctactacttctctgcagacactcaggaagacatgaatgcctgggtgcgagccatgaaccaggccgcacaggtgttgtcccgttctagtctcaaacgtgacatggagaaggtggagcgtcaggccgtgccgcaggcaaaccatactgaatcatgccatgagtgcgggagagtaggccctggacatactcgggattgtccgcaccggggccacgacgacattgtgaacttcgaacgccaggaacaagagggtgagcagtacaggtctcagagggatccgttagagggtaaacgagaccggtctaaagcgcggtccccatattcccctgctgaggaagatgcgctcttcatggatctgcccaccggaccaagagggcaacaggcccagccccaacgcgcagagaaaaatggcatgctacccgctagctacggaccaggggaacaaaatggtaccggggggtaccaacgcgcgtttcctccccgcacgaatccagagaagcatagccagagaaaatccaatctcgcgcaggtggaacattgggcacgagctcagaaaggcgacagcagatccttgccgctggaccaaacactccctaggcagggacccggacagagcctcagtttccccgaaaactatcagaccctgcccaaaagtacacgccatccctccgggggttccagtcctcctccgcgcaatctgccatcagactataaatatgcacaggatagagcaagtcatctaaaaatgagtagcgaagagcggagagctcacagagatggtacggtttggcaactgtatgagtggcagcagagacagcaattccgacacggatcccccaccgcccccatttgccttggcagcccggaatttacggatcagggccgcagtagatcaatgttggaggtgccacgtagcatttccgtgcctccaagcccatcagacatcccgccgcccggccctccgcgggtgtttccacctcgcagaccccacactcccgctgagcgagttacagtcaaaccgcctgatcagagacgatccgtggacatcagcctgggcgactctcccaggcgcgctcgtggccatgccgtgaagaactcttcccacgtcgaccgcaggagcatgccctcgatgggatacatgacccacactgtgtccgcccccagcctccacggaaagagcgcagatgacacatacctgcaactcaagaaggacttagaatatctggacttgaagatgaccgggcgggacctgctgaaggaccggagcctgaaacccgtcaagatagccgaatccgacacagatgtgaagctctccattttctgcgagcaagatagggtacttcaagacctcgaggacaagattcgggcacttaaagagaacaaggaccagcttgaatccgttctcgaagtactgcacagacagatggagcagtatcgtgaccagccccagcatttggagaaaattgcctatcagcagaaactgctacaggaggatctcgtgcacataagagcagaactctcccgggaaagcacagaaatggagaatgcatggaatgaatacctcaagctcgagaacgacgtggagcaacttaaacagacacttcaagagcaacacaggagggcatttttttttcaggagaaaagccaaatccaaaaggatctgtggaggatcgaggatgtgaccgctggcctgagcgctaacaaagagaacttccgaatcctcgtcgaatcagtgaaaaatcccgagcgtaagactgtgcccctcttcccacacccccccgtaccctcattgtctacttctgagtccaagccccctccccagcccagcccaccaacatctcccgtgcgcacacctttggaggtaagactgttcccacagctgcaaacctatgtgccctataggcctcacccaccacagctgcggaaagtgacctctcccctgcagtccccaacaaaagctaaaccaaaggtgcaagaagatgaagctccgcctaggccacccctaccagaactgtacagtcccgaagatcagcctcctgctgtaccaccgctcccaagggaggcgactatcatacgccacacaagcgtacggggccttaaacgtcaatccgacgaacgaaagcgcgatagagagttgggtcagtgcgtgaatggggactccagggtcgaactccgctcgtacgtcagtgagcccgaactcgctaccctgagtggcgacatggcgcagccctcactaggactggtgggacctgagagtcggtatcagacactgccagggcgcggattgtctggcagtacatcccggcttcagcaatcaagcactattgctccctacgttacacttaggagaggcttaaacgcggagtcatcaaaagctacctttccccgtcctaaaagcgctttggagaggttgtactcaggcgaccaccagagaggcaagatgtccgctgaggaacaacttgaaagaatgaaacgccatcagaaagccctggtacgagaacggaaacggaccctgggtcagggggagaggaccggtctacctagctcacgttatctgtctcgaccattgccaggcgacctcggttcggtttgttag

SEQ ID NO: 251431 - DNA, 3366 bp, Artificial Sequence
  derived and/or modified sequence
atggctgctgccaccgtgggccgggacaccctgcctgagcactggagctatggagtgtgcagagatggccgggtcttcttcatcaatgaccagctgcgctgcaccacctggctgcaccccaggactggagagcctgtgaacagcggccacatgatccgcagtgacctgccccggggctgggaggagggcttcacagaggagggcgccagctacttcatcgaccacaaccagcagaccacagccttccgccaccctgtgacaggccagttctccccagaaaattctgagttcatcctgcaggaggagcccaacccccacatgagcaagcaggacaggaaccagaggcccagctccatggtgtctgagaccagcacagctggaacagccagcaccctggaggccaagccaggccccaagatcatcaagagcagcagcaaggtgcacagctttgggaagagggaccaggccatcagaagaaaccccaacgtgcctgtggtggtgcggggctggctgcacaagcaggacagcagcggcatgaggctgtggaagaggcgctggtttgtgctggccgactactgcctcttctactacaaggacagccgggaggaggccgtgctgggcagcatccccctgcccagctatgtgatcagccctgtggcccctgaggaccgcatcagcaggaagtacagcttcaaggctgtgcacacaggcatgagggccctgatctacaacagcagcacagctggcagccaggccgagcagagcggcatgaggacctactacttctctgctgacacccaggaggacatgaatgcctgggtgcgggccatgaaccaggccgcccaggtgctgagccgcagcagcctgaagagggacatggagaaggtggagcggcaggccgtgccccaggccaaccacacagagagctgccatgaatgtggccgggtgggccctggccacacccgggactgcccccaccggggccatgatgacatcgtgaactttgagcggcaggagcaggagggggagcagtaccgcagccagagggaccccctggagggcaagagggacaggagcaaggcccggagcccctacagccctgctgaggaggatgccctcttcatggacctgcccaccggcccccggggccagcaggcccagccccagagagctgagaagaatggcatgctgcctgccagctatggccctggagagcagaatggaactggaggctaccagagggccttcccccccaggaccaaccctgagaagcacagccagaggaagagcaacctggcccaggtggagcactgggcccgggcccagaagggggacagccgcagcctgcccctggaccagaccctgccccggcagggccctggccagagcctgtccttccctgagaactaccagaccctgcccaagagcaccaggcaccccagcggcggcagcagccccccaccaagaaacctgcccagcgactacaagtatgcccaggaccgggccagccacctgaagatgagcagcgaggagcggcgggcccacagagatggcaccgtgtggcagctgtatgagtggcagcagaggcagcagttccgccacggcagccccacagcccccatctgcctgggcagccctgagttcacagaccagggccgcagccgctccatgctggaggtgcccaggagcatctctgtgccccccagccccagcgacatccccccacctggcccccccagggtcttccccccaagaagaccccacaccccagctgagcgggtgacagtgaagcccccagaccagaggagatctgtggacatcagcctgggggacagcccccggcgggcccggggccatgctgtgaagaacagcagccacgtggacagaagatccatgcccagcatgggctacatgacccacacagtgtctgcccccagcctgcacggcaagtctgcagatgacacctacctgcagctgaagaaggacctggagtacctggacctgaagatgacaggccgggacctgctgaaggacaggagcctgaagcctgtgaagattgctgagagtgacacagatgtgaagctgagcatcttctgtgagcaggacagagtgctgcaggacctggaggacaagatccgggccctgaaggagaacaaggaccagctggagagcgtgctggaggtgctgcaccggcagatggagcagtacagagaccagccccagcacctggagaagatcgcctaccagcagaagctgctgcaggaggacctggtgcacatccgggcagagctgagccgggagagcacagagatggagaatgcctggaatgagtacctgaagctggagaatgatgtggagcagctgaagcagaccctgcaggagcagcacagaagagccttcttcttccaggagaagagccagatccagaaggacctgtggagaattgaagatgtgacagctggcctgagcgccaacaaggagaacttccgcatcctggtggagagcgtgaagaaccctgagaggaagacagtgcccctcttcccccacccccctgtgcccagcctgagcaccagcgagagcaagcccccaccccagcccagcccccccaccagccctgtgaggacccccctggaggtgcggctcttcccccagctgcagacctacgtgccctaccggccccaccccccccagctgaggaaggtgaccagccccctgcagagccccaccaaggccaagcccaaggtggaggatgaggccccacccaggcctcccctgcctgagctgtacagccctgaggaccagcccccagctgtgccccccctgccccgggaggccaccatcatccgccacacctctgtgcggggcctgaagaggcagagtgatgagaggaagagggaccgggagctgggccagtgtgtgaatggagacagccgggtggagctgcggagctatgtgtctgagcctgagctggccaccctgagcggggacatggcccagcccagcctgggcctggtgggccctgagagccgctaccagaccctgcccggccggggcctgagcggcagcaccagccggctgcagcagagcagcaccatcgccccctacgtgaccctgcggcggggcctgaatgctgagagcagcaaggccaccttcccccggcccaagagcgccctggagcggctgtacagcggggaccaccagaggggcaagatgtctgctgaggagcagctggagaggatgaagaggcaccagaaggccctggtgcgggagaggaagaggaccctgggccagggcgagaggacaggcctgcccagcagccgctacctgagccggcccctgcccggggacctgggctctgtgtgctag

SEQ ID NO: 251432 - DNA, 3369 bp, Artificial Sequence
  derived and/or modified sequence
atggctgctgccaccgtgggccgggacaccctgcctgagcactggagctatggagtgtgcagagatggccgggtcttcttcatcaatgaccagctgcgctgcaccacctggctgcaccccaggactggagagcctgtgaacagcggccacatgatccgcagtgacctgccccggggctgggaggagggcttcacagaggagggcgccagctacttcatcgaccacaaccagcagaccacagccttccgccaccctgtgacaggccagttctccccagaaaattctgagttcatcctgcaggaggagcccaacccccacatgagcaagcaggacaggaaccagaggcccagctccatggtgtctgagaccagcacagctggaacagccagcaccctggaggccaagccaggccccaagatcatcaagagcagcagcaaggtgcacagctttgggaagagggaccaggccatcagaagaaaccccaacgtgcctgtggtggtgcggggctggctgcacaagcaggacagcagcggcatgaggctgtggaagaggcgctggtttgtgctggccgactactgcctcttctactacaaggacagccgggaggaggccgtgctgggcagcatccccctgcccagctatgtgatcagccctgtggcccctgaggaccgcatcagcaggaagtacagcttcaaggctgtgcacacaggcatgagggccctgatctacaacagcagcacagctggcagccaggccgagcagagcggcatgaggacctactacttctctgctgacacccaggaggacatgaatgcctgggtgcgggccatgaaccaggccgcccaggtgctgagccgcagcagcctgaagagggacatggagaaggtggagcggcaggccgtgccccaggccaaccacacagagagctgccatgaatgtggccgggtgggccctggccacacccgggactgcccccaccggggccatgatgacatcgtgaactttgagcggcaggagcaggagggggagcagtaccgcagccagagggaccccctggagggcaagagggacaggagcaaggcccggagcccctacagccctgctgaggaggatgccctcttcatggacctgcccaccggcccccggggccagcaggcccagccccagagagctgagaagaatggcatgctgcctgccagctatggccctggagagcagaatggaactggaggctaccagagggccttcccccccaggaccaaccctgagaagcacagccagaggaagagcaacctggcccaggtggagcactgggcccgggcccagaagggggacagccgcagcctgcccctggaccagaccctgccccggcagggccctggccagagcctgtccttccctgagaactaccagaccctgcccaagagcaccaggcaccccagcggcggcagcagccccccaccaagaaacctgcccagcgactacaagtatgcccaggaccgggccagccacctgaagatgagcagcgaggagcggcgggcccacagagatggcaccgtgtggcagctgtatgagtggcagcagaggcagcagttccgccacggcagccccacagcccccatctgcctgggcagccctgagttcacagaccagggccgcagccgctccatgctggaggtgcccaggagcatctctgtgccccccagccccagcgacatccccccacctggcccccccagggtcttccccccaagaagaccccacaccccagctgagcgggtgacagtgaagcccccagaccagaggagatctgtggacatcagcctgggggacagcccccggcgggcccggggccatgctgtgaagaacagcagccacgtggacagaagatccatgcccagcatgggctacatgacccacacagtgtctgcccccagcctgcacggcaagtctgcagatgacacctacctgcagctgaagaaggacctggagtacctggacctgaagatgacaggccgggacctgctgaaggacaggagcctgaagcctgtgaagattgctgagagtgacacagatgtgaagctgagcatcttctgtgagcaggacagagtgctgcaggacctggaggacaagatccgggccctgaaggagaacaaggaccagctggagagcgtgctggaggtgctgcaccggcagatggagcagtacagagaccagccccagcacctggagaagatcgcctaccagcagaagctgctgcaggaggacctggtgcacatccgggcagagctgagccgggagagcacagagatggagaatgcctggaatgagtacctgaagctggagaatgatgtggagcagctgaagcagaccctgcaggagcagcacagaagagccttcttcttccaggagaagagccagatccagaaggacctgtggagaattgaagatgtgacagctggcctgagcgccaacaaggagaacttccgcatcctggtggagagcgtgaagaaccctgagaggaagacagtgcccctcttcccccacccccctgtgcccagcctgagcaccagcgagagcaagcccccaccccagcccagcccccccaccagccctgtgaggacccccctggaggtgcggctcttcccccagctgcagacctacgtgccctaccggccccaccccccccagctgaggaaggtgaccagccccctgcagagccccaccaaggccaagcccaaggtgcaggaggatgaggccccaccccggccccccctgcctgagctgtacagccctgaggaccagcccccagctgtgccccccctgccccgggaggccaccatcatccgccacacctctgtgcggggcctgaagaggcagagtgatgagaggaagagggaccgggagctgggccagtgtgtgaatggagacagccgggtggagctgcggagctatgtgtctgagcctgagctggccaccctgagcggggacatggcccagcccagcctgggcctggtgggccctgagagccgctaccagaccctgcccggccggggcctgagcggcagcaccagccggctgcagcagagcagcaccatcgccccctacgtgaccctgcggcggggcctgaatgctgagagcagcaaggccaccttcccccggcccaagagcgccctggagcggctgtacagcggggaccaccagaggggcaagatgtctgctgaggagcagctggagaggatgaagaggcaccagaaggccctggtgcgggagaggaagaggaccctgggccagggcgagaggacaggcctgcccagcagccgctacctgagccggcccctgcccggggacctgggctctgtgtgctag

SEQ ID NO: 251433 - DNA, 3366 bp, Artificial Sequence
  derived and/or modified sequence
atggccgccgccaccgtgggccgggacaccctgcccgagcactggtcctatggcgtatgtagagacggccgcgtctttttcattaacgatcagctccgctgtactacctggctgcaccccaggacaggcgagcctgtaaatagcggccacatgattcgctccgaccttccacgaggctgggaggaaggttttaccgaagagggggcaagctacttcatcgatcacaatcaacagaccactgcctttcgccaccctgttacagggcagttttctcctgaaaatagtgaatttatcctgcaggaagaacccaaccctcatatgtctaaacaagacagaaaccaacgaccaagctcgatggtgagcgagacttccactgctgggactgcgtcaactttagaagcaaaacctggcccgaaaataatcaagagctcttcgaaagttcattcctttggtaagcgggatcaggccatcagaaggaatccaaacgtgcccgtggtagtaagaggctggcttcacaaacaggactcgtctggtatgcgcctgtggaagaggcgatggttcgttttagcggactactgtctcttctattacaaggacagcagagaggaggcagtgctcggcagtatccccttgccatcttacgtgatctcccccgtggcccctgaagacaggatttcaagaaagtatagctttaaggccgtacacactggaatgagagcgttgatttataatagttccactgctggatcccaagccgagcagagtgggatgaggacatattattttagcgctgatacccaggaggacatgaatgcttgggtgcgagccatgaaccaggctgcacaagttctgtcacgttcttctctgaaacgggatatggagaaggttgagaggcaggccgtgccccaagccaatcacaccgagtcttgccacgagtgtggccgcgtcggccccggccacactcgggactgcccacatcgggggcatgacgatattgttaattttgagcgacaggagcaggagggcgagcagtacagatcacagcgtgatccgttagaaggtaagagggataggtcaaaagcgcgctcaccctactcccctgccgaagaggatgcgttgttcatggacctcccaactggacccagaggacagcaagcccagccccaaagagccgagaaaaacggaatgctgccggccagttatggcccgggtgagcagaacggaaccggcgggtatcagagagcattcccaccccgcaccaatcccgagaagcattcccaaaggaaatccaatctggcacaggtggagcattgggcacgagctcagaagggtgacagcaggtcgctaccactcgatcagactcttcctcgacaggggcccgggcagtccttatcctttccagagaattaccaaactctgcccaaatcaacacggcatcccagtggaggcagctctccaccacctcggaatctaccctcagattataagtatgcccaggacagggcatctcaccttaagatgtcatctgaagaacgtcgggcccacagggacggcacagtgtggcagctctatgaatggcagcagcggcagcagtttcgccacggctctccgaccgctcccatttgtctgggtagcccggagttcacagatcaggggcgaagcagaagtatgctggaggttccccgatccattagcgttccaccctcccctagcgatattcccccacctggaccccctagagttttcccccccagacgaccgcacacacccgccgaacgagttacagtgaaacctccagaccagaggcgctccgtggatatctcattaggcgactctccacggcgcgcaagaggtcatgccgtgaagaatagcagccatgttgacaggagatcgatgccttctatgggttacatgactcacaccgtgagcgccccatccctgcacggtaagtcagctgacgatacatacctccagttaaagaaggatctggagtacctggaccttaaaatgactggacgtgatcttctcaaggacaggtccctgaagcctgtcaaaatagccgaatctgatactgacgtgaaactttccatcttctgtgagcaggacagagtgcttcaggaccttgaagacaaaattcgggccttaaaagaaaacaaggatcaactggagtcagttctggaggtgctgcaccggcagatggagcaatatagagatcaacctcagcacctggagaaaattgcctaccagcaaaaactcctccaggaagacctcgtgcacatcagagcagagttatcgagggagagcacagagatggaaaatgcctggaatgagtatcttaagctggagaacgatgtagagcagctgaagcagaccctccaggaacagcatcgccgcgctttttttttccaggagaaatcacaaatccaaaaagatctatggagaatcgaggatgtgaccgctggactgtctgctaacaaggagaacttccgaatcctggtggaatcagtcaagaatcccgagagaaagactgtgccgttgttcccccacccgcctgtgcccagtttgagtaccagtgagtccaagcccccaccgcagcccagcccccctacctcacccgtgagaactcctctggaggtacggctattcccacagctgcagacatatgtcccataccggcctcacccccctcagctgaggaaggttacaagcccactccagtcccctacaaaagcaaaaccgaaagtggaagacgaggcaccccctcgcccccctctgcccgaactctactcccccgaagaccaaccccctgcggtcccaccactgcccagggaagcgacaattatcagacacacgtccgtacgtggcctgaaacgccaatcagatgaacggaaacgagacagagaactgggccaatgtgtgaacggggactctagagtcgagctgaggtcatacgtgagcgagcccgaacttgcaaccctgtccggagatatggctcagcccagcctgggattagtgggaccagagagcagatatcaaacactcccaggaaggggcctgagcgggagtacctcccgtttgcagcagtcgtccactatcgcaccctatgtgacgctgcgccgcggactgaatgccgagtctagcaaggcaactttcccgagacctaaatcggctctggagcgattgtattccggcgaccatcagcgcggcaaaatgagtgccgaggaacagctggagcgcatgaagcgtcatcagaaagccttagtgagggagcgaaaacgtaccctgggtcagggagagcggacgggccttcctagctcgagataccttagtcggcccctgccgggagacctggggagtgtgtgctag

SEQ ID NO: 251434 - DNA, 3369 bp, Artificial Sequence
  derived and/or modified sequence
atggccgccgccaccgtgggccgggacaccctgcccgagcactggtcttatggcgtgtgcagggatggacgcgtcttctttataaacgatcaattgaggtgcaccacctggcttcatccacggacaggggagcccgtgaatagcggccatatgatccgttcggacctcccccgcgggtgggaggaggggttcaccgaggaaggcgcctcatattttatagatcacaaccagcagacaacggcctttcgccatcctgtgaccggacaattctctccagagaatagtgagtttattctccaagaggagccgaatccccatatgagtaagcaagacaggaatcaacgtcctagttccatggttagcgagacctctaccgccggaaccgctagcacgctcgaagcgaagcccggtcccaagataatcaagtcctctagtaaggtgcatagttttggcaagagagatcaggcaattcggcgtaatcccaatgtgccggtcgtcgtccgagggtggcttcacaaacaggatagcagcgggatgaggctgtggaagagacgatggtttgtgctcgcagattattgccttttttattacaaggattcccgggaggaggccgtcctgggttctatcccactgcccagttacgttattagtccagtcgcaccagaggaccgaatcagcaggaaatactctttcaaggcggtacataccgggatgcgggctttaatttacaattcctctaccgctggcagccaggctgagcagtcgggtatgagaacatactacttcagtgccgacacccaggaggatatgaatgcctgggtgcgggcaatgaaccaggccgctcaagtgttgagcaggagcagcctgaaaagggacatggagaaagtcgaaaggcaggccgtcccacaagcgaatcatactgagtcttgccacgagtgcgggagggtgggacccgggcatacgcgcgactgtccacacaggggccacgatgatatcgttaatttcgagcgacaagaacaagaaggcgaacaatataggagtcagcgagatcctctcgagggaaagcgggacagatccaaagccagatctccctacagccccgccgaggaagacgccttgttcatggacctgcccacaggtcctcggggacagcaggcacagccccaacgggccgagaaaaatggtatgctccccgcaagttacggcccaggcgagcagaatgggactgggggctatcagagggctttcccgccacggactaatccagagaagcactctcagaggaaaagtaacctagctcaagtggagcattgggccagggcccagaagggtgactcacgctccttgcctttggaccaaacactgcctagacaggggccaggccaatctctgagcttccctgagaactaccagaccttgcctaagagcacaaggcacccgagcggtggttcttctccgcctcctcggaatctgccttccgactataaatacgctcaggatcgcgcctcgcatctaaaaatgagctctgaagaacgccgcgcccacagagatgggactgtctggcagctgtacgagtggcaacagaggcagcagtttaggcatggctcccccacagctccaatttgtcttggctcaccagagtttaccgaccaggggcgcagtcgcagcatgctcgaagtgccccgttcgatctctgttccaccgagcccgtcagatatcccaccccctggcccccctcgggtattccccccccgacgcccacacactcctgccgagcgggtaacagttaagccccccgatcagcgcagaagcgttgacatttctctaggggacagcccgagacgggctagaggccacgctgtaaagaatagcagccacgtagacagacgttccatgccgagcatgggctacatgactcatactgtgtcagccccctccctgcacggcaagtccgccgatgacacatacctccagctgaagaaggacctggagtaccttgatctcaaaatgactggaagggatctgcttaaggaccgatcgttaaagcccgtcaagattgccgagagcgacaccgatgtgaaattgtctattttttgcgaacaagaccgagttttacaggacctggaggataaaattcgggctcttaaagagaacaaagaccagctagagagtgtcctcgaggtccttcataggcagatggaacagtaccgcgaccaaccccagcacctcgaaaaaatagcctaccagcagaagcttctccaggaggacctggtccacattcgggcggaactttcacgcgaaagtactgaaatggagaacgcgtggaacgaatatctgaagctcgaaaatgatgtggaacagctgaagcagactctccaagaacagcataggagagcttttttttttcaagaaaagtcacaaattcaaaaagatttatggcgaatcgaggatgtcaccgctggcctatcggcaaacaaggagaattttagaatcctcgtcgagtccgttaaaaaccccgaacgtaaaaccgttcctctattcccccatcctcctgtgccatccttgagcacctcggagtcaaagccccccccacagcccagccctcctacatcccctgtgagaactccattagaggtcagactatttccacagctccagacctacgtgccctacaggcctcacccaccacagctcagaaaggtgacttctcccctgcaatctcccactaaagccaagcccaaagttcaagaggatgaggctccaccccgaccaccactgccagagctgtattcccctgaggatcagccacctgccgtcccgccactaccgcgtgaggcgacgataattcgccataccagtgtgcgaggtctgaagcgccaaagtgacgagcgtaagcgggaccgggaactcggacaatgcgtcaacggagactcacgggtggaactgagaagctacgtttctgagcccgagctcgcaactttatcaggggacatggcgcaacccagcctgggtttggttgggcctgagagcaggtaccagactctacctggtcggggactctcaggctctacctcgcgcttgcagcagtctagtaccattgccccttacgtcacgttacgcagaggccttaacgcagagtcatcaaaggcaactttccctcgcccaaagagtgccttggagcggttatatagcggggaccaccagcgtgggaagatgtctgccgaggagcaactggagcgcatgaaacgccaccaaaaagccctggttagagagaggaagcggactctgggtcagggggaaaggaccgggctaccaagcagccgttaccttagtcgccctttgccaggagacctcgggagtgtttgctag

SEQ ID NO: 251435 - DNA, 4804 bp, Artificial Sequence
  derived and/or modified sequence
gctcggcgaacatggcggcggcgacggtcgggcgggacactttacctgagcattggtcctacggggtgtgccgggatggccgcgtcttcttcatcaatgaccagctccgctgcacgacctggctgcatccgcgcaccggggagcccgtcaactcgggccacatgatccgctcagacctgccccgcggctgggaggagggcttcacggaggagggcgccagctacttcatcgaccataaccagcagaccacagcattcaggcatcctgtgacgggacagttttctccagaaaatagtgaattcattcttcaagaagagccgaatccacatatgtcgaagcaagacagaaaccaaagaccgtccagcatggtcagtgaaacatccacggctgggaccgcctccaccctggaggccaagcctggacccaagatcataaagtccagcagtaaagtccacagctttgggaagagagaccaggccattcggaggaaccccaatgttcccgtggtggtgaggggctggctgcacaagcaggacagttctgggatgaggctgtggaaaaggaggtggtttgtgcttgctgattactgcttattttactataaagacagccgagaagaagcggtcctcgggagcatccccttgcccagctacgtgatctctcctgtggcccctgaggatcgcataagccgcaaatattcctttaaggctgtgcacacggggatgcgagcgctcatctataacagctccacagcgggctctcaggccgagcagtcaggcatgaggacctactacttcagtgccgacacccaggaggacatgaacgcttgggtcagggccatgaaccaggctgcacaggtgctgtctcgatcgtcactgaagagggatatggagaaggtggagcggcaggctgtcccccaggccaaccacacagagtcctgtcacgaatgtggccgggtgggacccggacatacgagagattgtcctcatcgtggccatgatgacattgtcaacttcgagaggcaggagcaggagggagagcagtaccgttcccagagggacccactggagggcaagcgggaccggagcaaggccaggtctccgtactcgccagccgaggaggatgccttgtttatggatttacccactggcccaagaggccagcaggcacagccccaacgggcagagaagaatggaatgctgcctgcctcatatggcccaggagaacagaatgggactggtgggtaccagcgggcctttcctcccaggaccaaccctgaaaaacacagccaaaggaagagcaatctggcccaggtggagcactgggcaagggcccagaaaggggatagcaggagtcttcccttggaccagacgcttcctcgccagggtcctggccaatccctgtccttcccagaaaactaccagactcttcccaagagcacccgacacccctcggggggctcctcgccacctccccgaaacctgccaagtgactacaagtatgcgcaggaccgagccagccacctgaagatgtcgagtgaagagcgccgggcgcaccgggatggcaccgtgtggcagctctacgagtggcagcagcgccagcagttccggcacggcagccccacagcgcccatctgccttggctccccagagttcaccgaccagggccggagcaggagcatgctagaggtgccccgctccatctctgtgcctccatctccctcggacatccctcccccaggacccccaagggtcttcccaccccggcggccacacacaccagcagagcgagtcacagtgaagccaccggaccagaggaggagtgtggacatctcgctgggggattctccaaggagggcacggggccacgctgtcaagaactcatctcatgtggaccgacgctccatgccctccatgggttacatgacccacaccgtcagcgctcccagtttacatggaaaatcggctgatgatacctacctccagctgaagaaagacctggagtacctggatctaaagatgacaggccgggaccttctcaaggatcgaagtctgaagcctgtgaagatcgctgagagcgacactgacgtcaaactgagcatcttctgtgaacaagacagggtcctccaggacttggaagacaagatacgagcccttaaagagaacaaagaccagctagaatctgtgctggaggtgttgcacagacagatggagcagtaccgagaccagccccagcacttggagaagattgcctaccagcagaagttgctgcaggaggaccttgtccatatccgagctgagctctccagagagtccactgagatggaaaatgcttggaacgaatacctgaagttggagaatgatgtggaacagctgaagcagaccctgcaggagcaacacagaagagccttttttttccaggagaaatcgcagatacagaaagatctatggagaattgaagatgtcactgcaggcctgagtgcaaataaagagaacttcagaattctagtggagtcagtaaaaaatccggagagaaaaacggtgcctttgtttcctcacccgcctgtgccttcactctcaacttctgagagcaagccgcccccacagcccagtcctcccaccagccctgtgcggacccctctggaggttcgactcttcccccagctgcaaacctacgtgccgtaccgacctcacccaccccagctgaggaaagtgacatccccccttcagtcaccaactaaggcgaagcccaaagttgaagatgaagcacctcccaggcccccactccccgaactctacagcccagaggaccagcccccggctgtgccgcctctgccaagagaggccaccatcatccggcacacatctgtgcggggcctcaagcggcagtcagacgagaggaagcgagaccgggagctggggcagtgtgtgaatggggattccagggtggagctgcggtcgtatgtcagtgagcctgagctggcgaccctcagcggggacatggcccagccctccctaggacttgtgggccctgagagcaggtaccagacgctgccaggcagagggctctcagggtccacgtcaaggctccagcagtcgtccaccattgctccctacgtcacactccggaggggtctcaatgccgaaagcagcaaggcgaccttccctagacctaagagtgccttggagcgcctgtactcaggggatcaccagcgaggcaagatgagtgcagaggagcagctggagcgcatgaagcgacaccagaaggccctggtccgagagcgcaagaggacactgggccaaggggagaggacgggcctgccctcatctcgctacctcagccggccgctccctggagatcttggctcagtatgttaggaggggccaggcagcggggcagggacagggagccgagtgcccctcagagtcccccaaacacaagcacatcacacctcccagtgagagagctgtccattgacctacatggttcagagaacaccccacggggctgtttgtccacgacccaggctggacgaatgcctggtcagagggtgacctgaaccagagctggagtgaggatcaaacaggcccaggagcctgaggaaatacccagtcagtcctcccagccgcgatggagaggggcctttgcaggcgttcggaatctcggctgaattcaggacctgggaatacagggttcagagaggagaggaggaagatggtgacatgatttggttagaagcacaagcaaactgatcagcctcccagacctgccagcagatgctgtgtgagggtgatggagcacggggtcacacccctgccccaagggccactggtctccctgggcttgcagtgcagaggcctcagggtgtctgggattgctggggaggcctgtgctgccccctggtggcgcttcctggcgctgcgccctgtccacagtcaccttaggtccctttggaaacattccatttgacttttccctgttgtttgaaatcccatgtttccctaaacctctagcctgattgttctttccctaattcattgcacaagctcctttgcttttagtgttaccgctcattgcctctctaatcctgcctgattgtgtttacagaagcttctgatttgcattgaacatgctctaactggcctgtgctacttattaccgggcttgtaatagcggttcttgtctccatagcctgttgagtgttcccagatgtgactcacctttctgctgccctcttcatgcaggcctactgactcataattcacttgtcccaaaagccaccccacaagcctgagccaacctgctgcctgacgccacagtcattggcagaggtctgggcattattaatttataaaaatccatgctttacacctggacagtagacagggacttcagagattgcacgtttgaatacattctcccaagactgaggttgttcggttttaattcctgtagtccaatcacacaatttcttatggaaaaccttttgtgtttctggtatttaataacttgaagggatagcaaaatatactgtgtattcagagggcctctctgcagctgctagctcagacaccaaaggggtaaggcccaggacattcatatctttaaaagctgcaaacctggtaacctttaaacttttaaaacaaatgtcatatggggtaacactgaccttttataatttgatgtctcaaatgtagagattatctaaaaatcgtaacttgaataccttgtaatttttctcttaaaaaagaagacttgtgtaagtctctgcatcaacgccaataaacatgttgcttaataataa

SEQ ID NO: 251436 - DNA, 4803 bp, Artificial Sequence
  derived and/or modified sequence
ccgcgctcggcgaacatggcggcggcgacggtcgggcgggacactttacctgagcattggtcctacggggtgtgccgggatggccgcgtcttcttcatcaatgaccagctccgctgcacgacctggctgcatccgcgcaccggggagcccgtcaactcgggccacatgatccgctcagacctgccccgcggctgggaggagggcttcacggaggagggcgccagctacttcatcgaccataaccagcagaccacagcattcaggcatcctgtgacgggacagttttctccagaaaatagtgaattcattcttcaagaagagccgaatccacatatgtcgaagcaagacagaaaccaaagaccgtccagcatggtcagtgaaacatccacggctgggaccgcctccaccctggaggccaagcctggacccaagatcataaagtccagcagtaaagtccacagctttgggaagagagaccaggccattcggaggaaccccaatgttcccgtggtggtgaggggctggctgcacaagcaggacagttctgggatgaggctgtggaaaaggaggtggtttgtgcttgctgattactgcttattttactataaagacagccgagaagaagcggtcctcgggagcatccccttgcccagctacgtgatctctcctgtggcccctgaggatcgcataagccgcaaatattcctttaaggctgtgcacacggggatgcgagcgctcatctataacagctccacagcgggctctcaggccgagcagtcaggcatgaggacctactacttcagtgccgacacccaggaggacatgaacgcttgggtcagggccatgaaccaggctgcacaggtgctgtctcgatcgtcactgaagagggatatggagaaggtggagcggcaggctgtcccccaggccaaccacacagagtcctgtcacgaatgtggccgggtgggacccggacatacgagagattgtcctcatcgtggccatgatgacattgtcaacttcgagaggcaggagcaggagggagagcagtaccgttcccagagggacccactggagggcaagcgggaccggagcaaggccaggtctccgtactcgccagccgaggaggatgccttgtttatggatttacccactggcccaagaggccagcaggcacagccccaacgggcagagaagaatggaatgctgcctgcctcatatggcccaggagaacagaatgggactggtgggtaccagcgggcctttcctcccaggaccaaccctgaaaaacacagccaaaggaagagcaatctggcccaggtggagcactgggcaagggcccagaaaggggatagcaggagtcttcccttggaccagacgcttcctcgccagggtcctggccaatccctgtccttcccagaaaactaccagactcttcccaagagcacccgacacccctcggggggctcctcgccacctccccgaaacctgccaagtgactacaagtatgcgcaggaccgagccagccacctgaagatgtcgagtgaagagcgccgggcgcaccgggatggcaccgtgtggcagctctacgagtggcagcagcgccagcagttccggcacggcagccccacagcgcccatctgccttggctccccagagttcaccgaccagggccggagcaggagcatgctagaggtgccccgctccatctctgtgcctccatctccctcggacatccctcccccaggacccccaagggtcttcccaccccggcggccacacacaccagcagagcgagtcacagtgaagccaccggaccagaggaggagtgtggacatctcgctgggggattctccaaggagggcacggggccacgctgtcaagaactcatctcatgtggaccgacgctccatgccctccatgggttacatgacccacaccgtcagcgctcccagtttacatggaaaatcggctgatgatacctacctccagctgaagaaagacctggagtacctggatctaaagatgacaggccgggaccttctcaaggatcgaagtctgaagcctgtgaagatcgctgagagcgacactgacgtcaaactgagcatcttctgtgaacaagacagggtcctccaggacttggaagacaagatacgagcccttaaagagaacaaagaccagctagaatctgtgctggaggtgttgcacagacagatggagcagtaccgagaccagccccagcacttggagaagattgcctaccagcagaagttgctgcaggaggaccttgtccatatccgagctgagctctccagagagtccactgagatggaaaatgcttggaacgaatacctgaagttggagaatgatgtggaacagctgaagcagaccctgcaggagcaacacagaagagccttttttttccaggagaaatcgcagatacagaaagatctatggagaattgaagatgtcactgcaggcctgagtgcaaataaagagaacttcagaattctagtggagtcagtaaaaaatccggagagaaaaacggtgcctttgtttcctcacccgcctgtgccttcactctcaacttctgagagcaagccgcccccacagcccagtcctcccaccagccctgtgcggacccctctggaggttcgactcttcccccagctgcaaacctacgtgccgtaccgacctcacccaccccagctgaggaaagtgacatccccccttcagtcaccaactaaggcgaagcccaaagttcaggaagatgaagcacctcccaggcccccactccccgaactctacagcccagaggaccagcccccggctgtgccgcctctgccaagagaggccaccatcatccggcacacatctgtgcggggcctcaagcggcagtcagacgagaggaagcgagaccgggagctggggcagtgtgtgaatggggattccagggtggagctgcggtcgtatgtcagtgagcctgagctggcgaccctcagcggggacatggcccagccctccctaggacttgtgggccctgagagcaggtaccagacgctgccaggcagagggctctcagggtccacgtcaaggctccagcagtcgtccaccattgctccctacgtcacactccggaggggtctcaatgccgaaagcagcaaggcgaccttccctagacctaagagtgccttggagcgcctgtactcaggggatcaccagcgaggcaagatgagtgcagaggagcagctggagcgcatgaagcgacaccagaaggccctggtccgagagcgcaagaggacactgggccaaggggagaggacgggcctgccctcatctcgctacctcagccggccgctccctggagatcttggctcagtatgttaggaggggccaggcagcggggcagggacagggagccgagtgcccctcagagtcccccaaacacaagcacatcacacctcccagtgagagagctgtccattgacctacatggttcagagaacaccccacggggctgtttgtccacgacccaggctggacgaatgcctggtcagagggtgacctgaaccagagctggagtgaggatcaaacaggcccaggagcctgaggaaatacccagtcagtcctcccagccgcgatggagaggggcctttgcaggcgttcggaatctcggctgaattcaggacctgggaatacagggttcagagaggagaggaggaagatggtgacatgatttggttagaagcacaagcaaactgatcagcctcccagacctgccagcagatgctgtgtgagggtgatggagcacggggtcacacccctgccccaagggccactggtctccctgggcttgcagtgcagaggcctcagggtgtctgggattgctggggaggcctgtgctgccccctggtggcgcttcctggcgctgcgccctgtccacagtcaccttaggtccctttggaaacattccatttgacttttccctgttgtttgaaatcccatgtttccctaaacctctagcctgattgttctttccctaattcattgcacaagctcctttgcttttagtgttaccgctcattgcctctctaatcctgcctgattgtgtttacagaagcttctgatttgcattgaacatgctctaactggcctgtgctacttattaccgggcttgtaatagcggttcttgtctccatagcctgttgagtgttcccagatgtgactcacctttctgctgccctcttcatgcaggcctactgactcataattcacttgtcccaaaagccaccccacaagcctgagccaacctgctgcctgacgccacagtcattggcagaggtctgggcattattaatttataaaaatccatgctttacacctggacagtagacagggacttcagagattgcacgtttgaatacattctcccaagactgaggttgttcggttttaattcctgtagtccaatcacacaatttcttatggaaaaccttttgtgtttctggtatttaataacttgaagggatagcaaaatatactgtgtattcagagggcctctctgcagctgctagctcagacaccaaaggggtaaggcccaggacattcatatctttaaaagctgcaaacctggtaacctttaaacttttaaaacaaatgtcatatggggtaacactgaccttttataatttgatgtctcaaatgtagagattatctaaaaatcgtaacttgaataccttgtaatttttctcttaaaaaagaagacttgtgtaagtctctgcatcaacgccaataaacatgttgctt

SEQ ID NO: 251437 - DNA, 3366 bp, Artificial Sequence
  derived and/or modified sequence
atggcggcagccacagtggggcgtgacactttgcctgagcattggagctacggcgtctgccgagacggcagagtcttttttatcaatgatcagctgagatgtaccacctggctccacccaagaacaggggaacctgtgaattctggacatatgattcgctcagacctccctcggggttgggaggagggtttcacggaagagggggcatcctacttcattgatcataatcagcagactaccgcatttagacaccctgtgaccggacagtttagtcccgagaacagtgagttcatcttacaggaggaacctaacccacacatgagtaagcaggataggaaccagcgaccgtccagcatggtctcagaaaccagcactgctggcacggcaagtaccctggaggcaaagccgggacccaagatcattaagtcttccagcaaagtccacagtttcggcaagagagaccaggccatcagaaggaaccccaacgtgcccgtggtggttcgcggttggctccataagcaagactcaagcggaatgcgactgtggaaacgcagatggttcgtgttagccgattattgtctgttttattacaaggattctagagaggaggcagtgctggggagtatacctctccctagttacgtcatctccccagtggcccctgaagatcggattagtcggaagtattcttttaaagccgtgcacaccgggatgcgggctctgatttacaactccagtacggccggaagccaagcagaacagtccggtatgaggacttactatttctctgcagatacccaggaggacatgaatgcttgggtccgggcaatgaatcaagctgcccaggtattatcccgtagctctctgaagagagacatggaaaaagtggagaggcaggccgtgccacaggctaatcatactgaaagttgccacgaatgcggccgtgttggccctgggcatactagggattgtccacacagggggcatgacgatatcgtgaatttcgagcggcaagaacaggagggtgagcagtacagatcccaaagggatcccctcgaagggaaaagagatcgttcaaaagcaagatctccatactcccctgcggaggaggatgcactgttcatggatctccccaccgggccaagaggccagcaagcccagccacaacgagctgaaaaaaatgggatgcttcctgcatcttacggtccaggagagcaaaatggtaccggaggctatcagagagcattcccgcctcgcacaaatcccgagaagcactcacagcgaaagtctaacctggctcaggtggagcattgggcgagggctcaaaagggcgattcaagaagtttgccactggatcagacgctcccaagacaaggccctgggcagtctctctcatttcctgagaactaccaaactttgcctaaatctacacgccacccttctggtgggagctcccctccccctcgaaatttaccatctgattacaaatacgcccaggaccgggcttcccacttgaagatgtctagcgaggagcggagggctcaccgggacggaacagtttggcagttgtacgagtggcagcagcgacagcaattcaggcacggcagcccaaccgcccctatctgcctaggatctccagaatttacagatcagggtcgaagccgctccatgctggaggtgcctaggagcatctcagttcctccatcacctagcgacatcccgcctcccggaccaccacgtgttttcccccctcgcagaccacatacacccgctgaaagggtgaccgttaaaccaccggaccagcgcaggagcgttgatatttcacttggtgattctccgaggagggcaagggggcacgccgtgaagaatagtagccacgtggatagacggagcatgcccagtatgggctacatgacacacaccgtctctgcgcctagccttcatggcaaatctgctgacgatacgtatctacaactgaaaaaagatttggagtatctggatcttaagatgactggcagggatctcttaaaagaccgttctttaaagccagtgaaaatcgccgaaagtgacactgacgtgaagctatccattttctgcgaacaggatagagtactccaggatttggaagacaagatccgcgctctgaaggagaacaaggatcagttggagtccgtactcgaggtgttacataggcaaatggagcagtaccgagatcagccacagcatttggaaaagatcgcgtatcagcagaagctgctccaggaggacttggtgcacattcgagcggaactcagccgggagtccactgaaatggaaaacgcttggaatgagtaccttaagctggagaatgatgtcgaacagctcaagcagacactccaggaacagcaccggcgagctttcttttttcaggaaaaaagtcagattcagaaagatctttggagaatagaggacgtcacagcagggttgagcgctaacaaggagaatttcaggatccttgtcgaatctgtaaaaaatcctgagcgaaaaacagtgccgctgttcccccaccctcctgtcccgagcctgtcaacttccgagagtaagccccctccgcagccctctcctccaacttcacccgtcagaactcccctagaagtcaggcttttccctcaactgcaaacatatgtcccctacaggcctcacccaccccagctaaggaaagtgaccagccccctccagtctcccacaaaggcgaagcctaaggtggaagacgaggccccaccccgacctccactgcctgagttgtattctcccgaagatcagcctccggcagtccccccactgccaagagaggctaccataattcgacacaccagtgtgagaggacttaagcggcagtccgacgaaagaaagcgggatcgggaacttggccagtgtgtgaatggggatagtcgggtagagttacgaagttacgtgagtgaacctgaacttgcaacattgtcaggagacatggctcagccctctctggggctcgtgggtcccgagagcaggtatcagactctccccggaaggggcctgagtggttccacttcccgtctgcaacagtcctcaaccatcgcgccttatgtcaccctcagaagaggtctgaacgctgagtcaagcaaagctactttcccacgtccaaagagtgccctggagaggctgtatagcggcgatcaccagcgagggaagatgtctgcagaggagcaattagaaagaatgaagagacaccagaaggccctcgtccgagagcgaaagcgtacattaggccaaggagagcgcacaggcctgccttcctcccgctacctgagtagacctctgccaggcgacttaggtagcgtatgctag

SEQ ID NO: 251438 - DNA, 3369 bp, Artificial Sequence
  derived and/or modified sequence
atggctgccgcaaccgtgggcagggataccctccctgagcactggtcttatggtgtctgcagagacggacgtgttttcttcattaatgatcaacttagatgcacgacctggttacaccctcgaaccggtgaaccggtgaactccggacacatgatcagatctgacctacccaggggttgggaggagggatttaccgaggagggggctagttactttatagaccacaaccaacagaccacggcattccgccaccccgtgaccggacagttttctccggaaaatagcgagtttatccttcaggaagaaccaaatccacatatgtccaagcaggatcgtaaccagagacccagtagtatggtatctgagacgtcgaccgctgggactgcaagcaccctggaggccaagccagggccaaagataatcaagagttcttccaaagtccactctttcgggaagcgagaccaggcaatacgcaggaatcctaacgtccccgtcgtcgttagggggtggcttcataagcaggactcttcaggtatgagactgtggaagcgcagatggtttgtgctggcagactactgtctattctactataaggactcacgtgaggaagcagtactggggtcaatacctcttccgtcctatgtgatctctcctgtggctcccgaggacaggatatctagaaagtacagcttcaaggccgttcatactgggatgcgtgccctcatctacaattcaagtaccgccggttcacaagccgagcaatctgggatgcgcacctactatttttcagccgacacgcaggaagatatgaacgcctgggtgcgggcaatgaaccaggctgcccaagtactgtccaggtcttctctgaagcgcgacatggagaaagtggagcgccaggcagttccccaggccaatcacaccgagtcctgtcacgagtgcggtcgggttggaccagggcacacacgcgactgcccacataggggccatgacgacattgtcaattttgaacgccaggagcaagagggcgagcagtaccgcagccagagagatcctctggaggggaagcgcgatcggagcaaggccaggtccccatatagtcccgcagaggaggatgcactgtttatggacctccccaccggcccacggggacaacaagctcagcctcagcgggcagaaaagaatggcatgttacctgcttcctatgggcctggcgagcagaacggcacaggtggctatcagcgggcatttcccccaaggaccaaccccgagaagcacagccagcgcaagtcaaatctcgcgcaggtcgagcactgggctcgggcacaaaagggagatagtcgctcactcccgctcgaccagactttgcctcggcagggcccaggccaatctctatcttttccggaaaactatcaaaccctccctaaaagcactcggcacccctccggcggttctagcccccctcccaggaacttgcccagcgactataaatacgcgcaggaccgggcaagtcacctcaaaatgtcctccgaggagaggcgtgctcatagggacggcactgtttggcagctgtacgaatggcagcagcggcagcagttcagacatggatctcccacagcccctatttgcctcggtagtcctgagtttacagaccagggtagaagtcgctccatgctggaggtgcctcggtccatctctgtgcctcccagcccttctgatatcccaccgccaggaccaccccgagtcttcccgcctagaaggccacatacccctgccgaaagagtgactgttaagcccccagaccagaggaggtcagtagacatttcgctcggcgatagtccacgacgtgccagaggccatgctgttaagaacagctcccacgttgaccggagatcaatgccttctatgggatacatgacgcataccgtcagcgccccttctctgcatggcaagtccgctgacgacacatatctgcaactgaagaaggatctggagtatctggacttgaagatgacggggagggacctgcttaaagataggagtctgaagcccgttaaaatcgcggagtctgacacagacgtcaagctgagtattttctgcgaacaggaccgggtactgcaggacctcgaggacaaaattcgggctcttaaggagaacaaagaccagctggagtctgttctggaagtcttacaccggcagatggagcagtatagggatcagccgcagcacttggagaaaatcgcataccagcaaaaactcttgcaagaggatctcgtgcatattagagccgaattgagtagagaaagcactgagatggagaacgcctggaatgagtatctaaagttagaaaatgatgttgagcaactcaagcagactctccaggagcagcaccggcgagcgtttttcttccaggagaagagtcagatccagaaagacctctggaggattgaagacgtgacagctggcctgagcgccaataaggaaaattttcggatcctggtggagagcgtcaagaacccggaacgtaaaactgtgccactgttcccgcacccgccagtgcctagcctgtctacaagcgaatccaaacctcctccacagcctagccccccaacttctccggtgcgaacacccctggaggtacggttgttccctcagcttcagacctatgtgccttacaggccgcatccccctcaactgcgaaaagttacatccccactccaatcccctactaaggctaaacccaaagtgcaggaggacgaagctccccctagaccacctttacctgagctgtactcacctgaagatcagccacccgcagtcccaccactgccccgagaggccacaattatacggcataccagcgtaaggggcctgaagaggcagtcagacgagagaaagcgtgatagggaactcggtcagtgcgtcaacggagactcccgcgtcgaactcagatcctacgtgtctgagccagaactcgctacgttatccggggatatggcgcaacccagcctgggcctggtaggcccagagtctcggtaccagacccttccgggaaggggcctgtccggaagcacttcgaggttgcaacaatccagtactatcgccccatatgtcacgttgcgccgaggtctgaatgcagagtcctccaaagctacatttcctcgacccaagtccgcactggaacgtttgtatagcggcgaccatcaacggggtaaaatgtctgctgaggagcagctcgagaggatgaaacgccatcaaaaggccctggttcgggaaagaaagaggacactggggcagggggagagaacggggttgccatccagccgatatctcagtcggcctctgcccggtgacctcggcagcgtgtgctag

SEQ ID NO: 251439 - DNA, 3366 bp, Artificial Sequence
  derived and/or modified sequence
atggccgccgccaccgtgggcagagacaccctgcccgagcactggagctacggcgtgtgcagagacggcagagtgttcttcatcaacgaccagctgagatgcaccacctggctgcaccccagaaccggcgagcccgtgaacagcggccacatgatcagaagcgacctgcccagaggctgggaggagggcttcaccgaggagggcgccagctacttcatcgaccacaaccagcagaccaccgccttcagacaccccgtgaccggccagttcagccccgagaacagcgagttcatcctgcaggaggagcccaacccccacatgagcaagcaggacagaaaccagagacccagcagcatggtgagcgagaccagcaccgccggcaccgccagcaccctggaggccaagcccggccccaagatcatcaagagcagcagcaaggtgcacagcttcggcaagagagaccaggccatcagaagaaaccccaacgtgcccgtggtggtgagaggctggctgcacaagcaggacagcagcggcatgagactgtggaagagaagatggttcgtgctggccgactactgcctgttctactacaaggacagcagagaggaggccgtgctgggcagcatccccctgcccagctacgtgatcagccccgtggcccccgaggacagaatcagcagaaagtacagcttcaaggccgtgcacaccggcatgagagccctgatctacaacagcagcaccgccggcagccaggccgagcagagcggcatgagaacctactacttcagcgccgacacccaggaggacatgaacgcctgggtgagagccatgaaccaggccgcccaggtgctgagcagaagcagcctgaagagagacatggagaaggtggagagacaggccgtgccccaggccaaccacaccgagagctgccacgagtgcggcagagtgggccccggccacaccagagactgcccccacagaggccacgacgacatcgtgaacttcgagagacaggagcaggagggcgagcagtacagaagccagagagaccccctggagggcaagagagacagaagcaaggccagaagcccctacagccccgccgaggaggacgccctgttcatggacctgcccaccggccccagaggccagcaggcccagccccagagagccgagaagaacggcatgctgcccgccagctacggccccggcgagcagaacggcaccggcggctaccagagagccttcccccccagaaccaaccccgagaagcacagccagagaaagagcaacctggcccaggtggagcactgggccagagcccagaagggcgacagcagaagcctgcccctggaccagaccctgcccagacagggccccggccagagcctgagcttccccgagaactaccagaccctgcccaagagcaccagacaccccagcggcggcagcagccccccccccagaaacctgcccagcgactacaagtacgcccaggacagagccagccacctgaagatgagcagcgaggagagaagagcccacagagacggcaccgtgtggcagctgtacgagtggcagcagagacagcagttcagacacggcagccccaccgcccccatctgcctgggcagccccgagttcaccgaccagggcagaagcagaagcatgctggaggtgcccagaagcatcagcgtgccccccagccccagcgacatccccccccccggcccccccagagtgttcccccccagaagaccccacacccccgccgagagagtgaccgtgaagccccccgaccagagaagaagcgtggacatcagcctgggcgacagccccagaagagccagaggccacgccgtgaagaacagcagccacgtggacagaagaagcatgcccagcatgggctacatgacccacaccgtgagcgcccccagcctgcacggcaagagcgccgacgacacctacctgcagctgaagaaggacctggagtacctggacctgaagatgaccggcagagacctgctgaaggacagaagcctgaagcccgtgaagatcgccgagagcgacaccgacgtgaagctgagcatcttctgcgagcaggacagagtgctgcaggacctggaggacaagatcagagccctgaaggagaacaaggaccagctggagagcgtgctggaggtgctgcacagacagatggagcagtacagagaccagccccagcacctggagaagatcgcctaccagcagaagctgctgcaggaggacctggtgcacatcagagccgagctgagcagagagagcaccgagatggagaacgcctggaacgagtacctgaagctggagaacgacgtggagcagctgaagcagaccctgcaggagcagcacagaagagccttcttcttccaggagaagagccagatccagaaggacctgtggagaatcgaggacgtgaccgccggcctgagcgccaacaaggagaacttcagaatcctggtggagagcgtgaagaaccccgagagaaagaccgtgcccctgttcccccacccccccgtgcccagcctgagcaccagcgagagcaagccccccccccagcccagcccccccaccagccccgtgagaacccccctggaggtgagactgttcccccagctgcagacctacgtgccctacagaccccaccccccccagctgagaaaggtgaccagccccctgcagagccccaccaaggccaagcccaaggtggaggacgaggccccccccagaccccccctgcccgagctgtacagccccgaggaccagccccccgccgtgccccccctgcccagagaggccaccatcatcagacacaccagcgtgagaggcctgaagagacagagcgacgagagaaagagagacagagagctgggccagtgcgtgaacggcgacagcagagtggagctgagaagctacgtgagcgagcccgagctggccaccctgagcggcgacatggcccagcccagcctgggcctggtgggccccgagagcagataccagaccctgcccggcagaggcctgagcggcagcaccagcagactgcagcagagcagcaccatcgccccctacgtgaccctgagaagaggcctgaacgccgagagcagcaaggccaccttccccagacccaagagcgccctggagagactgtacagcggcgaccaccagagaggcaagatgagcgccgaggagcagctggagagaatgaagagacaccagaaggccctggtgagagagagaaagagaaccctgggccagggcgagagaaccggcctgcccagcagcagatacctgagcagacccctgcccggcgacctgggcagcgtgtgctag

SEQ ID NO: 251440 - DNA, 3369 bp, Artificial Sequence
  derived and/or modified sequence
atggccgccgccaccgtgggcagagacaccctgcccgagcactggagctacggcgtgtgcagagacggcagagtgttcttcatcaacgaccagctgagatgcaccacctggctgcaccccagaaccggcgagcccgtgaacagcggccacatgatcagaagcgacctgcccagaggctgggaggagggcttcaccgaggagggcgccagctacttcatcgaccacaaccagcagaccaccgccttcagacaccccgtgaccggccagttcagccccgagaacagcgagttcatcctgcaggaggagcccaacccccacatgagcaagcaggacagaaaccagagacccagcagcatggtgagcgagaccagcaccgccggcaccgccagcaccctggaggccaagcccggccccaagatcatcaagagcagcagcaaggtgcacagcttcggcaagagagaccaggccatcagaagaaaccccaacgtgcccgtggtggtgagaggctggctgcacaagcaggacagcagcggcatgagactgtggaagagaagatggttcgtgctggccgactactgcctgttctactacaaggacagcagagaggaggccgtgctgggcagcatccccctgcccagctacgtgatcagccccgtggcccccgaggacagaatcagcagaaagtacagcttcaaggccgtgcacaccggcatgagagccctgatctacaacagcagcaccgccggcagccaggccgagcagagcggcatgagaacctactacttcagcgccgacacccaggaggacatgaacgcctgggtgagagccatgaaccaggccgcccaggtgctgagcagaagcagcctgaagagagacatggagaaggtggagagacaggccgtgccccaggccaaccacaccgagagctgccacgagtgcggcagagtgggccccggccacaccagagactgcccccacagaggccacgacgacatcgtgaacttcgagagacaggagcaggagggcgagcagtacagaagccagagagaccccctggagggcaagagagacagaagcaaggccagaagcccctacagccccgccgaggaggacgccctgttcatggacctgcccaccggccccagaggccagcaggcccagccccagagagccgagaagaacggcatgctgcccgccagctacggccccggcgagcagaacggcaccggcggctaccagagagccttcccccccagaaccaaccccgagaagcacagccagagaaagagcaacctggcccaggtggagcactgggccagagcccagaagggcgacagcagaagcctgcccctggaccagaccctgcccagacagggccccggccagagcctgagcttccccgagaactaccagaccctgcccaagagcaccagacaccccagcggcggcagcagccccccccccagaaacctgcccagcgactacaagtacgcccaggacagagccagccacctgaagatgagcagcgaggagagaagagcccacagagacggcaccgtgtggcagctgtacgagtggcagcagagacagcagttcagacacggcagccccaccgcccccatctgcctgggcagccccgagttcaccgaccagggcagaagcagaagcatgctggaggtgcccagaagcatcagcgtgccccccagccccagcgacatccccccccccggcccccccagagtgttcccccccagaagaccccacacccccgccgagagagtgaccgtgaagccccccgaccagagaagaagcgtggacatcagcctgggcgacagccccagaagagccagaggccacgccgtgaagaacagcagccacgtggacagaagaagcatgcccagcatgggctacatgacccacaccgtgagcgcccccagcctgcacggcaagagcgccgacgacacctacctgcagctgaagaaggacctggagtacctggacctgaagatgaccggcagagacctgctgaaggacagaagcctgaagcccgtgaagatcgccgagagcgacaccgacgtgaagctgagcatcttctgcgagcaggacagagtgctgcaggacctggaggacaagatcagagccctgaaggagaacaaggaccagctggagagcgtgctggaggtgctgcacagacagatggagcagtacagagaccagccccagcacctggagaagatcgcctaccagcagaagctgctgcaggaggacctggtgcacatcagagccgagctgagcagagagagcaccgagatggagaacgcctggaacgagtacctgaagctggagaacgacgtggagcagctgaagcagaccctgcaggagcagcacagaagagccttcttcttccaggagaagagccagatccagaaggacctgtggagaatcgaggacgtgaccgccggcctgagcgccaacaaggagaacttcagaatcctggtggagagcgtgaagaaccccgagagaaagaccgtgcccctgttcccccacccccccgtgcccagcctgagcaccagcgagagcaagccccccccccagcccagcccccccaccagccccgtgagaacccccctggaggtgagactgttcccccagctgcagacctacgtgccctacagaccccaccccccccagctgagaaaggtgaccagccccctgcagagccccaccaaggccaagcccaaggtgcaggaggacgaggccccccccagaccccccctgcccgagctgtacagccccgaggaccagccccccgccgtgccccccctgcccagagaggccaccatcatcagacacaccagcgtgagaggcctgaagagacagagcgacgagagaaagagagacagagagctgggccagtgcgtgaacggcgacagcagagtggagctgagaagctacgtgagcgagcccgagctggccaccctgagcggcgacatggcccagcccagcctgggcctggtgggccccgagagcagataccagaccctgcccggcagaggcctgagcggcagcaccagcagactgcagcagagcagcaccatcgccccctacgtgaccctgagaagaggcctgaacgccgagagcagcaaggccaccttccccagacccaagagcgccctggagagactgtacagcggcgaccaccagagaggcaagatgagcgccgaggagcagctggagagaatgaagagacaccagaaggccctggtgagagagagaaagagaaccctgggccagggcgagagaaccggcctgcccagcagcagatacctgagcagacccctgcccggcgacctgggcagcgtgtgctag

SEQ ID NO: 251441 - protein, 490 aa, Artificial Sequence
  derived and/or modified sequence
MRPAFALCLLWQALWPGPGGGEHPTADRAGCSASGACYSLHHATMKRQAAEEACILRGGALSTVRAGAELRAVLALLRAGPGPGGGSKDLLFWVALERRRSHCTLENEPLRGFSWLSSDPGGLESDTLQWVEEPQRSCTARRCAVLQATGGVEPAGWKEMRCHLRANGYLCKYQFEVLCPAPRPGAASNLSYRAPFQLHSAALDFSPPGTEVSALCRGQLPISVTCIADEIGARWDKLSGDVLCPCPGRYLRAGKCAELPNCLDDLGGFACECATGFELGKDGRSCVTSGEGQPTLGGTGVPTRRPPATATSPVPQRTWPIRVDEKLGETPLVPEQDNSVTSIPEIPRWGSQSTMSTLQMSLQAESKATITPSGSVISKFNSTTSSATPQAFDSSSAVVFIFVSTAVVVLVILTMTVLGLVKLCFHESPSSQPRKESMGPPGLESDPEPAALGSSSAHCTNNGVKVGDCDLRDRAEGALLAESPLGSSDA

SEQ ID NO: 251442 - protein, 210 aa, Artificial Sequence
  derived and/or modified sequence
GTNSRAMCCVPPGRYLRAGKCAELPNCLDDLGGFACECATGFELGKDGRSCVTSGEGQPTLGGTGVPTRRPPATATSPVPQRTWPIRVDEKLGETPLVPEQDNSVTSIPEIPRWGSQSTMSTLQMSLQAESKATITPSGSVISKFNSTTSSATPQAFDSSSAVVFIFVSTAVVVLVILTMTVLGLVKLCFHESPSSQPRKESMGPPGLES

SEQ ID NO: 251443 - DNA, 2267 bp, Artificial Sequence
  derived and/or modified sequence
ctcctcttgctctaagcagggtgtttgaccttctagtcgactgcgtcccctgtacccggcgccagctgtgttcctgaccccagaataactcagggctgcaccgggcctggcagcgctccgcacacatttcctgtcgcggcctaagggaaactgttggccgctgggcccgcggggggattcttggcagttggggggtccgtcgggagcgagggcggaggggaagggagggggaaccgggttggggaagccagctgtagagggcggtgaccgcgctccagacacagctctgcgtcctcgagcgggacagatccaagttgggagcagctctgcgtgcggggcctcagagaatgaggccggcgttcgccctgtgcctcctctggcaggcgctctggcccgggccgggcggcggcgaacaccccactgccgaccgtgctggctgctcggcctcgggggcctgctacagcctgcaccacgctaccatgaagcggcaggcggccgaggaggcctgcatcctgcgaggtggggcgctcagcaccgtgcgtgcgggcgccgagctgcgcgctgtgctcgcgctcctgcgggcaggcccagggcccggagggggctccaaagacctgctgttctgggtcgcactggagcgcaggcgttcccactgcaccctggagaacgagcctttgcggggtttctcctggctgtcctccgaccccggcggtctcgaaagcgacacgctgcagtgggtggaggagccccaacgctcctgcaccgcgcggagatgcgcggtactccaggccaccggtggggtcgagcccgcaggctggaaggagatgcgatgccacctgcgcgccaacggctacctgtgcaagtaccagtttgaggtcttgtgtcctgcgccgcgccccggggccgcctctaacttgagctatcgcgcgcccttccagctgcacagcgccgctctggacttcagtccacctgggaccgaggtgagtgcgctctgccggggacagctcccgatctcagttacttgcatcgcggacgaaatcggcgctcgctgggacaaactctcgggcgatgtgttgtgtccctgccccgggaggtacctccgtgctggcaaatgcgcagagctccctaactgcctagacgacttgggaggctttgcctgcgaatgtgctacgggcttcgagctggggaaggacggccgctcttgtgtgaccagtggggaaggacagccgacccttggggggaccggggtgcccaccaggcgcccgccggccactgcaaccagccccgtgccgcagagaacatggccaatcagggtcgacgagaagctgggagagacaccacttgtccctgaacaagacaattcagtaacatctattcctgagattcctcgatggggatcacagagcacgatgtctacccttcaaatgtcccttcaagccgagtcaaaggccactatcaccccatcagggagcgtgatttccaagtttaattctacgacttcctctgccactcctcaggctttcgactcctcctctgccgtggtcttcatatttgtgagcacagcagtagtagtgttggtgatcttgaccatgacagtactggggcttgtcaagctctgctttcacgaaagcccctcttcccagccaaggaaggagtctatgggcccgccgggcctggagagtgatcctgagcccgctgctttgggctccagttctgcacattgcacaaacaatggggtgaaagtcggggactgtgatctgcgggacagagcagagggtgccttgctggcggagtcccctcttggctctagtgatgcatagggaaacaggggacatgggcactcctgtgaacagtttttcacttttgatgaaacggggaaccaagaggaacttacttgtgtaactgacaatttctgcagaaatcccccttcctctaaattccctttactccactgaggagctaaatcagaactgcacactccttccctgatgatagaggaagtggaagtgcctttaggatggtgatactgggggaccgggtagtgctggggagagatattttcttatgtttattcggagaatttggagaagtgattgaacttttcaagacattggaaacaaatagaacacaatataatttacattaaaaaataatttctaccaaaatggaaaggaaatgttctatgttgttcaggctaggagtatattggttcgaaatcccagggaaaaaaataaaaataaaaaattaaaggattgttgataacccag

SEQ ID NO: 251444 - DNA, 630 bp, Artificial Sequence
  derived and/or modified sequence
gggacaaactctcgggcgatgtgttgtgtccctcccgggaggtacctccgtgctggcaaatgcgcagagctccctaactgcctagacgacttgggaggctttgcctgcgaatgtgctacgggcttcgagctggggaaggacggccgctcttgtgtgaccagtggggaaggacagccgacccttggggggaccggggtgcccaccaggcgcccgccggccactgcaaccagccccgtgccgcagagaacatggccaatcagggtcgacgagaagctgggagagacaccacttgtccctgaacaagacaattcagtaacatctattcctgagattcctcgatggggatcacagagcacgatgtctacccttcaaatgtcccttcaagccgagtcaaaggccactatcaccccatcagggagcgtgatttccaagtttaattctacgacttcctctgccactcctcaggctttcgactcctcctctgccgtggtcttcatatttgtgagcacagcagtagtagtgttggtgatcttgaccatgacagtactggggcttgtcaagctctgctttcacgaaagcccctcttcccagccaaggaaggagtctatgggcccgccgggcctggagagt

SEQ ID NO: 251445 - DNA, 1473 bp, Artificial Sequence
  derived and/or modified sequence
atgagacccgccttcgccctgtgcctgctgtggcaggccctgtggcccggccccggcggcggcgagcaccccaccgccgacagagccggctgcagcgccagcggcgcctgctacagcctgcaccacgccaccatgaagagacaggccgccgaggaggcctgcatcctgagaggcggcgccctgagcaccgtgagagccggcgccgagctgagagccgtgctggccctgctgagagccggccccggccccggcggcggcagcaaggacctgctgttctgggtggccctggagagaagaagaagccactgcaccctggagaacgagcccctgagaggcttcagctggctgagcagcgaccccggcggcctggagagcgacaccctgcagtgggtggaggagccccagagaagctgcaccgccagaagatgcgccgtgctgcaggccaccggcggcgtggagcccgccggctggaaggagatgagatgccacctgagagccaacggctacctgtgcaagtaccagttcgaggtgctgtgccccgcccccagacccggcgccgccagcaacctgagctacagagcccccttccagctgcacagcgccgccctggacttcagcccccccggcaccgaggtgagcgccctgtgcagaggccagctgcccatcagcgtgacctgcatcgccgacgagatcggcgccagatgggacaagctgagcggcgacgtgctgtgcccctgccccggcagatacctgagagccggcaagtgcgccgagctgcccaactgcctggacgacctgggcggcttcgcctgcgagtgcgccaccggcttcgagctgggcaaggacggcagaagctgcgtgaccagcggcgagggccagcccaccctgggcggcaccggcgtgcccaccagaagaccccccgccaccgccaccagccccgtgccccagagaacctggcccatcagagtggacgagaagctgggcgagacccccctggtgcccgagcaggacaacagcgtgaccagcatccccgagatccccagatggggcagccagagcaccatgagcaccctgcagatgagcctgcaggccgagagcaaggccaccatcacccccagcggcagcgtgatcagcaagttcaacagcaccaccagcagcgccaccccccaggccttcgacagcagcagcgccgtggtgttcatcttcgtgagcaccgccgtggtggtgctggtgatcctgaccatgaccgtgctgggcctggtgaagctgtgcttccacgagagccccagcagccagcccagaaaggagagcatgggcccccccggcctggagagcgaccccgagcccgccgccctgggcagcagcagcgcccactgcaccaacaacggcgtgaaggtgggcgactgcgacctgagagacagagccgagggcgccctgctggccgagagccccctgggcagcagcgacgcctag

SEQ ID NO: 251446 - DNA, 633 bp, Artificial Sequence
  derived and/or modified sequence
ggcaccaacagcagagccatgtgctgcgtgccccccggcagatacctgagagccggcaagtgcgccgagctgcccaactgcctggacgacctgggcggcttcgcctgcgagtgcgccaccggcttcgagctgggcaaggacggcagaagctgcgtgaccagcggcgagggccagcccaccctgggcggcaccggcgtgcccaccagaagaccccccgccaccgccaccagccccgtgccccagagaacctggcccatcagagtggacgagaagctgggcgagacccccctggtgcccgagcaggacaacagcgtgaccagcatccccgagatccccagatggggcagccagagcaccatgagcaccctgcagatgagcctgcaggccgagagcaaggccaccatcacccccagcggcagcgtgatcagcaagttcaacagcaccaccagcagcgccaccccccaggccttcgacagcagcagcgccgtggtgttcatcttcgtgagcaccgccgtggtggtgctggtgatcctgaccatgaccgtgctgggcctggtgaagctgtgcttccacgagagccccagcagccagcccagaaaggagagcatgggcccccccggcctggagagctag

SEQ ID NO: 251447 - DNA, 1473 bp, Artificial Sequence
  derived and/or modified sequence
atgagacctgcattcgctctgtgtttgctgtggcaagcactgtggcccggtcctggtgggggcgaacaccccactgcagaccgagctggttgtagtgcatccggagcttgttacagcctgcaccatgccaccatgaagaggcaagctgctgaggaggcctgcatcctgagaggtggagctctcagcacagtaagagccggggctgaactgcgggccgttctcgccctgctgagggctggcccgggcccaggcgggggctcgaaagacctgctgttttgggtggctctagagcggaggcgcagtcactgcactctggaaaatgagccattgagggggttttcctggttaagcagtgatcccggaggcctcgaaagtgatacactccagtgggtcgaggagcctcagcggtcctgcactgcccgccgatgcgccgtactgcaagcaacaggcggggtggagccagctgggtggaaggaaatgaggtgccacctccgagcaaacggttatctttgcaaataccagttcgaggttctatgccctgccccccggcccggcgctgcatcaaatctcagctacagggcaccttttcagctgcactcagcagccctggacttctccccccccggcaccgaagtgtcagccctctgtcgaggccagctgccaattagtgtaacctgcattgctgacgagattggggcaaggtgggataagctgagcggcgacgtgctgtgtccatgccctggccgttacctgcgggctgggaagtgtgctgagctgccaaactgtctggacgacctgggcgggtttgcatgcgagtgcgccaccggcttcgagctgggaaaagatggccgttcttgtgtaacaagtggagaaggtcagccgactctggggggcaccggggtgcctacaaggagaccccccgcgaccgcgacaagtcccgtcccgcaacgtacctggcccatcagagtcgatgagaagctgggggagacacctctggtccctgagcaggacaatagcgtgacgtccatcccagagatcccgcgatggggctctcagtctaccatgtcaacccttcagatgagcttacaggctgagtccaaggccacaatcacccctagtggttctgtgatcagcaaattcaactccacaaccagctctgctaccccacaggcattcgactcctcgagtgcagtcgtgtttatatttgtatcaacggccgtggtcgtcctagtgattttgaccatgactgtcttgggcctggtgaaattgtgtttccacgaatcgccgagtagccagcccaggaaagagagtatgggcccacccggtctagaatccgacccagagcccgccgctctgggcagctctagtgctcactgtaccaataacggagtgaaggtgggagactgtgatcttagagacagggccgagggggctctactggcagaatctccactcggctctagcgatgcctag

SEQ ID NO: 251448 - DNA, 633 bp, Artificial Sequence
  derived and/or modified sequence
ggcaccaattcaagggcaatgtgctgcgtcccgcccggcagatatcttcgcgccgggaaatgtgcagaacttccgaactgtctggatgatctgggtggctttgcatgcgaatgtgccaccggctttgagctcgggaaagatggccgatcctgtgtgactagtggtgaggggcagcctactctgggtggcaccggcgtgcccactcgaagacccccagcaactgccacctcccctgttccacagaggacgtggcctattagagtcgacgagaagctgggggagacaccgttagtgcccgaacaggacaatagtgttactagtattcctgaaattcctaggtggggctcccagtccaccatgagtacgcttcagatgtctctacaggctgaaagtaaggccacgattaccccctctggaagtgtgatctcaaagttcaactcaaccacctcgagcgcaactccacaagccttcgattctagttcagcagttgtattcatattcgtctcaactgcggtggtcgtcctggtaattctgacaatgaccgtgttgggcctagtgaaactttgtttccatgaatctccttccagccagcctcgcaaggagagcatggggccaccaggactcgagagctag

SEQ ID NO: 251449 - DNA, 1473 bp, Artificial Sequence
  derived and/or modified sequence
atgaggcctgcctttgccctgtgcctgctgtggcaggccctgtggccaggccctgggggcggggagcaccccacagctgacagagctggctgcagcgccagcggggcctgctacagcctgcaccacgccaccatgaagaggcaggccgctgaggaggcctgcatcctgcggggcggggccctgagcacagtgcgggccggggctgagctgcgggctgtgctggccctgctgcgggccggccctggccctgggggcggcagcaaggacctgctcttctgggtggccctggagaggagaagaagccactgcaccctggagaatgagcccctgcggggcttctcctggctgagcagtgaccccggcggcctggagagtgacaccctgcagtgggtggaggagccccagaggagctgcacagcccggcgctgtgctgtgctgcaggccactggaggagtggagcctgctggctggaaggagatgcgctgccacctgcgggccaacggctacctgtgcaagtaccagtttgaggtgctgtgcccagcccccaggcctggggccgccagcaacctgagctaccgggcccccttccagctgcacagcgctgccctggacttcagccccccaggcacagaggtgtctgccctgtgccggggccagctgcccatctctgtgacctgcatcgcagatgaaattggagcccgctgggacaagctgtctggagatgtgctgtgcccctgccccggccgctacctgcgggccgggaaatgtgccgagctgcccaactgcctggatgacctgggcggctttgcctgtgaatgtgccactggatttgagctgggcaaggatggccgcagctgtgtgaccagcggggagggccagcccaccctgggcggcactggagtgcccacccggcggcccccagccacagccaccagccctgtgccccagaggacctggcccatccgggtggatgagaagctgggggagacccccctggtgcctgagcaggacaacagcgtgaccagcatccctgagatcccccgctggggcagccagagcaccatgagcaccctgcagatgagcctgcaggccgagagcaaggccaccatcaccccatctggcagcgtcatcagcaagttcaacagcaccaccagcagcgccaccccccaggcctttgacagcagcagcgctgtggtgttcatctttgtgtccacagctgtggtggtgctggtgatcctgaccatgacagtgctgggcctggtgaagctgtgcttccacgagagccccagcagccagcccaggaaggagagcatgggccccccaggcctggagagtgaccctgagcctgctgccctgggcagcagcagcgcccactgcaccaacaacggggtgaaggtgggggactgtgacctgcgggacagagctgagggcgccctgctggccgagagccccctgggcagcagtgatgcctag

SEQ ID NO: 251450 - DNA, 633 bp, Artificial Sequence
  derived and/or modified sequence
ggcaccaacagccgggccatgtgctgcgtgcccccaggccgctacctgcgggccgggaaatgtgccgagctgcccaactgcctggatgacctgggcggctttgcctgtgaatgtgccaccggctttgagctgggcaaggatggccgcagctgtgtgaccagcggggagggccagcccaccctgggcggcaccggggtgcccacccggcggcccccagccacagccaccagccctgtgccccagaggacctggcccatccgggtggatgagaagctgggggagacccccctggtgcctgagcaggacaacagcgtgaccagcatccctgagatcccccgctggggcagccagagcaccatgagcaccctgcagatgagcctgcaggccgagagcaaggccaccatcacccccagcggcagcgtcatcagcaagttcaacagcaccaccagcagcgccaccccccaggcctttgacagcagcagcgctgtggtgttcatctttgtgtccacagctgtggtggtgctggtgatcctgaccatgacagtgctgggcctggtgaagctgtgcttccacgagagccccagcagccagcccaggaaggagagcatgggccccccaggcctggagagctag

SEQ ID NO: 251451 - DNA, 1473 bp, Artificial Sequence
  derived and/or modified sequence
atgcggcccgccttcgccctgtgcctgctgtggcaggccctgtggcccggcccaggtgggggcgagcaccccacagcagaccgcgcggggtgcagtgcatcgggggcgtgttatagcctccatcacgcaacgatgaagcgtcaggctgctgaagaggcttgcattctgaggggaggcgctctcagtacggtgcgcgccggagccgaactgcgcgccgtacttgcactgttgcgggccgggcccggcccgggggggggctcaaaggacctcttattctgggttgccttagagcggagacgctcacattgtactctcgaaaatgagccactcaggggattcagttggctctccagtgatccaggtggacttgaatctgatacccttcagtgggtggaggagccccagaggtcctgcacagctaggagatgtgcagtcctgcaggcaacaggcggcgtggagccggctggctggaaagaaatgcgatgccacttgagagccaatggctatctctgcaagtaccaatttgaggtgttgtgccccgcccccagacccggagcagcctctaaccttagctacagagctccattccagctacacagcgccgccttggattttagcccacccggaaccgaagtgtccgctctgtgcaggggtcaactcccgatctctgtcacctgtatagccgacgagattggcgcccggtgggataaactgtccggggacgttctgtgcccctgtcctggaagatatctgcgggcgggaaagtgcgcggagctgcccaactgtctggatgacctggggggcttcgcctgcgagtgtgctacaggttttgagcttggtaaggatggacggagctgtgtgactagtggcgaaggccaacctacactcggcggcaccggcgttccaacgaggagaccccctgctaccgctacttcgcctgtgcctcagcgaacgtggcctatcagagtggacgaaaagctgggcgagaccccattggtccctgaacaggataacagtgtgaccagcatccctgaaattccccggtggggatcacaaagcaccatgtccaccctccagatgagtctgcaagcggagtccaaagccacaattactccgtccggttctgtaatttccaagtttaactccacaaccagttctgccacaccccaagcttttgattccagttccgcagtggtgttcattttcgtcagtaccgccgtcgtggtgctcgtgattcttacaatgacggtgctgggtttggtgaaactgtgctttcacgagagtccatcatcgcaaccacggaaagagtcaatggggcctccgggcctggagagcgacccagaaccagcagccttgggatctagttcagcccactgcactaataacggggtaaaagttggagattgcgatcttagggaccgggccgagggggcactgctcgccgagagcccgctggggtcctccgatgcgtag

SEQ ID NO: 251452 - DNA, 633 bp, Artificial Sequence
  derived and/or modified sequence
ggcaccaacagccgggccatgtgctgcgtgccccccggccggtacttacgcgccggcaagtgcgcggagttaccaaattgtctcgacgatctgggtggctttgcatgtgagtgtgcaactggatttgaactcggaaaagacggcaggagctgcgtcacgagcggcgaagggcagccgacgctcgggggaaccggtgttcctactaggagacctcctgccacggcaacatcgccagtacctcagcgaacgtggcccattagagttgatgagaaactgggagaaactcccctggtgcccgaacaagataactccgtgacctcaattcctgagattcctagatggggcagccaatctactatgagcacacttcaaatgtccttgcaggccgagtccaaagctacgatcacgccctcaggctctgtgatctctaagttcaactccaccaccagctccgcgacaccacaggccttcgattcctcatctgctgtggtgtttatttttgtgagcaccgccgtcgtggtgcttgttatccttacaatgacagtgctgggtcttgtcaagctgtgtttccatgagagtccttcatcgcagccccgcaaggagtcaatggggcctccaggccttgaatcgtag

SEQ ID NO: 251453 - DNA, 1473 bp, Artificial Sequence
  derived and/or modified sequence
atgagacctgcctttgccctgtgtttgctgtggcaggcattgtggccaggaccgggaggaggagaacatccaaccgctgaccgggctggctgtagcgcctcaggtgcgtgttatagtctccaccacgcaaccatgaaaagacaggcagctgaagaggcctgcattttgcggggaggtgctttgtccaccgtaagggccggtgctgagttacgcgcagtcctggccctgctcagagccggaccagggcctggcggaggcagcaaggatctactcttttgggttgcacttgagaggaggcgctcacattgcacactggagaacgaacctctgcggggtttttcttggctgagctctgaccctgggggtctagaatcagacactcttcagtgggttgaagagccccagagaagctgcaccgcacggcgatgcgctgttcttcaagctacaggtggcgtcgagcctgcagggtggaaggagatgaggtgtcatctcagggcaaacgggtatctgtgtaaatatcagttcgaagtcctgtgtcctgcacctcgccctggagccgcttctaacctctcttacagggctccttttcagctgcattccgccgcattagacttcagcccccctgggaccgaggtgtcggctctgtgtcgcggacagcttcccatcagcgtgacctgcatcgccgacgaaataggcgctaggtgggataaactgagcggagacgtgctgtgcccatgccctgggcgatacctgcgggctggtaagtgcgccgaactacccaattgcttagatgaccttgggggattcgcctgtgagtgcgctacgggattcgaattgggtaaagacgggaggagttgcgttaccagtggtgagggacagccaacgttgggcggtacaggggtccctacacggagaccaccagctacagccacaagtcctgtcccgcaacgcacctggcctattcgggtcgacgagaagctcggcgaaacacctctggttccggagcaggacaattccgtcacgagtatacctgagatccctaggtggggctctcagagcaccatgtcaactctgcaaatgtctctgcaggcagagtcgaaggccacaatcactcctagcggctccgttatttctaaattcaattctaccacctcatccgccactcctcaagcattcgactcttcatccgctgtcgtgtttatcttcgtcagcacggccgtcgttgtattggtgattttaacaatgaccgtcttaggtcttgtgaagctctgttttcacgaatccccgtcctcacagccgagaaaggagagtatggggccacccggtcttgaaagtgaccctgagcccgctgcgctaggtagctcttctgcccactgtacaaacaatggcgtgaaagttggagactgtgatctgagggatcgggctgaaggggcactgctggccgagtcaccgttaggctcctcagatgcctag

SEQ ID NO: 251454 - DNA, 633 bp, Artificial Sequence
  derived and/or modified sequence
ggtacaaacagcagggccatgtgttgcgtacctcccggacggtacttgcgcgcaggcaagtgtgcagagcttcccaactgcctggacgatctgggtggattcgcctgcgaatgcgctactgggttcgagttagggaaggatgggcgatcatgcgtcacgtccggtgaaggtcagccaacgctgggcggaacaggagtacctactagaaggcctccagctaccgccacatcccccgtgcctcagcggacctggccaataagggtagacgagaaactgggtgaaacaccgctggtgcctgaacaggataacagcgtgaccagcattccagaaataccacgatggggctcacagagcactatgtcaacccttcagatgtccttgcaagccgagagtaaagccaccatcacgccttcaggaagtgtgattagtaagtttaactccactacttcctctgcgacaccccaggcctttgacagtagtagtgctgttgtcttcatttttgtgtccacagcggtggtggtgttagtgatccttacaatgacggtgcttggcctggttaaactgtgtttccacgagtccccctcatcgcagccacgcaaggagtcaatgggccctccaggtctggaatcttag

SEQ ID NO: 251455 - protein, 243 aa, Artificial Sequence
  derived and/or modified sequence
MTGIAAASFFSNTCRFGGCGLHFPTLADLIEHIEDNHIDTDPRVLEKQELQQPTYVALSYINRFMTDAARREQESLKKKIQPKLSLTLSSSVSRGNVSTPPRHSSGSLTPPVTPPITPSSSFRSSTPTGSEYDEEEVDYEESDSDESWTTESAISSEAILSSMCMNGGEEKPFACPVPGCKKRYKNVNGIKYHAKNGHRTQIRVRKPFKCRCGKSYKTAQGLRHHTINFHPPVSAEIIRKMQQ

SEQ ID NO: 251456 - DNA, 732 bp, Artificial Sequence
  derived and/or modified sequence
atgaccggcatcgccgccgccagcttcttcagcaacacctgcagattcggcggctgcggcctgcacttccccaccctggccgacctgatcgagcacatcgaggacaaccacatcgacaccgaccccagagtgctggagaagcaggagctgcagcagcccacctacgtggccctgagctacatcaacagattcatgaccgacgccgccagaagagagcaggagagcctgaagaagaagatccagcccaagctgagcctgaccctgagcagcagcgtgagcagaggcaacgtgagcaccccccccagacacagcagcggcagcctgaccccccccgtgaccccccccatcacccccagcagcagcttcagaagcagcacccccaccggcagcgagtacgacgaggaggaggtggactacgaggagagcgacagcgacgagagctggaccaccgagagcgccatcagcagcgaggccatcctgagcagcatgtgcatgaacggcggcgaggagaagcccttcgcctgccccgtgcccggctgcaagaagagatacaagaacgtgaacggcatcaagtaccacgccaagaacggccacagaacccagatcagagtgagaaagcccttcaagtgcagatgcggcaagagctacaagaccgcccagggcctgagacaccacaccatcaacttccacccccccgtgagcgccgagatcatcagaaagatgcagcagtag

SEQ ID NO: 251457 - DNA, 732 bp, Artificial Sequence
  derived and/or modified sequence
atgacgggcattgccgccgcctcgtttttctcaaatacctgtcgattcgggggctgtggacttcactttcccactctcgccgacttaattgagcatatcgaggacaatcacattgacaccgatcccagagtgctggagaaacaagaactccagcaacctacatacgttgcactatcatacataaatcgcttcatgaccgatgccgcccggcgagaacaagagagtctcaagaaaaaaattcagcccaaactgtcactcactctctcgagctctgtttcaaggggtaacgtgtctacacccccccgtcatagtagtggttcactgactccgcccgtcacaccccctatcacaccgagctctagcttccgcagttccaccccaacaggaagcgagtatgatgaagaggaagttgactacgaggagtcagactctgatgagagctggacaacagaatcagctatcagttctgaggcaattctgtccagtatgtgtatgaacggaggcgaagaaaagccttttgcctgtccagttccgggctgcaaaaaaagatacaagaatgttaacggcatcaaatatcacgcaaagaacgggcatcgaacccagattcgcgtgcgcaaacctttcaagtgccgatgtgggaaaagctacaagactgcacaggggctccggcatcacacaatcaacttccatccccctgtcagtgccgaaatcatccggaaaatgcaacagtag

SEQ ID NO: 251458 - DNA, 732 bp, Artificial Sequence
  derived and/or modified sequence
atgactggaattgctgctgccagcttcttcagcaacacctgccgctttggaggctgcggcctgcacttccccaccctggccgacctgattgagcacatcgaggacaaccacatcgacacagacccccgggtgctggagaagcaggagctgcagcagcccacctacgtggccctgagctacatcaaccgcttcatgacagatgctgcccggcgggagcaggagagcctgaagaagaagatccagcccaagctgagcctgaccctgagcagctctgtgtccagaggaaatgtgtccaccccacccaggcacagcagcggcagcctgaccccacctgtgaccccacccatcacccccagcagcagcttccgcagcagcacccccaccggctctgaatatgatgaggaggaggtggactatgaggagagtgacagtgatgagagctggaccacagagagcgccatcagcagcgaggccatcctgagctccatgtgcatgaatggaggagaggagaagccctttgcctgccctgtgcccggctgcaagaagcgctacaagaatgtgaatggcatcaagtaccacgccaagaatggccacaggacccagatccgggtgaggaagcccttcaagtgccgctgtgggaagagctacaagacagcccagggcctgcggcaccacaccatcaacttccacccccctgtgtctgctgagatcatcaggaagatgcagcagtag

SEQ ID NO: 251459 - DNA, 3125 bp, Artificial Sequence
  derived and/or modified sequence
atctctctcgccccctctccctccgtcccgtcctcgccgctcccctcaccccgcctctctccccctcccccagcccctcctctcctcaccccacccggcctccctccctccctcgcccgcccggcgctcgcagagccgacaccaggggggctctcgatgtagcaccatgacaggcatcgccgccgcctccttcttctccaatacctgccgattcgggggctgcggactccacttccccaccctggccgacctcatcgagcacatcgaggacaaccacatcgatacagatccacgggttttagaaaaacaagaattacagcagccaacctatgttgccctgagttacataaatagattcatgacagatgctgcccgccgagagcaggagtccctaaagaagaagattcagccgaagctctcgctgactctgtccagctcagtgtctcgagggaatgtgtccactcccccacgccacagcagtggaagccttactccccccgtgaccccacccatcaccccctcctcttcattccgcagcagcactccgacaggcagcgagtatgacgaggaggaggtggactatgaggagtcggacagcgatgagtcctggaccacagagagtgccatcagctccgaagccatcctcagctccatgtgcatgaatggaggggaagagaagccttttgcctgcccagttcctggatgtaaaaagagatacaagaatgtgaatggcataaagtatcacgctaagaatggtcacagaacacagattcgtgtccgcaaaccattcaagtgtcgctgtgggaagagttacaagacagctcagggcctgcggcaccacacaatcaatttccatcccccggtgtcggctgagattatcaggaagatgcagcaataacatgctggtcataactgtgccaagaaatcctcaccagcagttgctgattttgaaaacagccaccttttttcaggggaagcattcagcaaccctttaaagaaaaagaattaaatgcatgctttaaattttttctgtaattttggaatgatgtatctttgtagagttaatgattttgtacatttgcacatgtaatcatcatacccattttcattactttgatataaggtgctaaacaaaaaaagctctaggttcttcagcacatttcccccaaaacaaaataaaattgagggcatgttgcatattgttgaattgtattgcggtggtatcaacctggggggaggaggggctggcactgagatttttttttcaagattgtaatgtgattgaagttttcaacacatcaactcacatatgttcaaaaccaaaataataccttcattatcaaactggttaccatgccttacataatggagttagtatttgtgagtagaaagactttaggtaatggaaatataaataagaaagaatgtttaacataatatgctaaaaatattttcatatttaaataacatacgtaaaggtgtgctttctgtgttttatattatcttgcaaatccttttgccctttaaaaagctgaaaatcttgccatctgacttactagtcattttagtgttataaatggcattttgtacaaaatagtctattcagttcgttcattcatttaacacacattgattgagtgcctgctgggtacaagggattcaatttatgcctattgatatctgcggaccaagatacccatttagtgaaatacttttttccctgaaatctgttagaaaagactttgaaatacttcagtgcaaagtgtgtgtgtgtgaagtttagttatatcttcatcttcagatgaagttttaaagcactttgtagttctctattgccaacaatttaatgtttatgtgttgccaattcttgcaaccactgccctaccaaacctgtgggttgcaaatcagaactaaaattctaagcacgtttcaaagatgaacacttttgttaagacccctattgcctcttcttcatgctcattttttactttttttaaaaggtacttttctcatcacattgtagagaggtctgcattctcattggaaatgtctgtttagctttataaaacaaacactttgctgaaataggaaaatgagccttattgacaattaagtgcttcttgcagcaggtggtcaaagaaaagcatgactaatacgacctattagagtaatctacatctggaccattccttaagtttttcctcaccgacagtaccatcatgccttgagtgttcttttctcccaagtgctattccttaaacacgagagtttaccagttgcctaataatgcaataaaaaatgctttgagatagctaactgcccataaaacaaactcaaattgcttataaagtttcttcccatgttcccatttgatgaaaagtcttacatcacatataactgggaagcaggggtccctcctcaattttcagacattttgaaaggatgacagttctgtttgttagatgagtaaacctctatattcataagttctaaaatccttcattatgagggattcaaagtatttataaaaacactgccctctaaaaatttcctcagatctgaagtatggtcttggtcctgaatatacagtgttatcctatgtttaaaagggtgatccagacatgagacgcaactagttggtgcataagaaggccccacttggctatttcatatctacctacaattgaccaaaaaaaattttttaggccagcaattattatttagcttcgctctttctagtgcaagaaactgcaggctggatcagtagttcaacagctaaacagtcataaaatagtcattgtgcatgttaaatttctttcaatgctttcaaagataaattccaatttctatttacttattcattgtgacagtattactaaacaggtaaggatgggaatattttgttatactgtgtatagtgaatgtattgtactgtgtctgtgaaaactgtgctttaaattatattttcatatgttttgttggggacagagcacattaagtctgaaagcaacagaggtttgttttagaactgaaggcaatttaatcaaaattcctgtcaagaaaagctgcttataaatgtaaatgaaatcacatttaaaataaactgcctctgacccaaaaataaa

SEQ ID NO: 251460 - DNA, 732 bp, Artificial Sequence
  derived and/or modified sequence
atgaccggcatcgccgccgccagcttcttcagcaacacctgccggtttggggggtgtggccttcatttccccaccctcgccgacctgatcgaacacatcgaggataaccacatagacactgatcctagagtcctggaaaagcaggagttgcagcagcctacatacgtagccctgtcttacattaatagattcatgacagacgccgctcgccgagaacaggagtcactgaagaaaaagatccaacctaaacttagcctcaccctatcttcttccgtgtcgaggggcaacgtcagcacccctcccaggcactctagtggctctctgactcctcctgtcactcctcctataactcctagctcctcatttcgcagcagtacgcccacagggtcggagtacgatgaagaagaagtggattatgaagagagtgattccgatgagtcatggaccactgagtcagctatctccagtgaggctattctgagctccatgtgtatgaacgggggtgaggaaaaaccatttgcttgtcccgtgccaggctgtaagaaacgctacaagaacgtcaacggcatcaagtaccacgctaaaaacgggcacagaactcaaattagggttcgaaaacctttcaaatgtcgatgtgggaaatcttacaagacagctcagggcctgcggcatcataccattaactttcatccccccgtctccgccgaaattatccgtaaaatgcaacagtag

SEQ ID NO: 251461 - DNA, 732 bp, Artificial Sequence
  derived and/or modified sequence
atgactggcatcgcagccgcatcttttttcagtaacacctgccggttcggcggatgtggcctccacttccccactctggcagacctgatcgagcatatagaagacaatcacatagacactgaccccagggtacttgaaaaacaggagttgcagcagcccacatatgtagccctgtcttacataaaccgcttcatgaccgacgcagcgcgacgggaacaagaaagtctgaagaaaaagatacagccaaagcttagcctgaccttatcttcgtccgtcagccggggaaacgtctctaccccacctagacactctagtggaagtttaactccacctgtgacccccccaatcacaccgagttcatctttccggtcatcaactccgaccggaagtgaatatgacgaggaggaggtggactacgaagaatctgattccgatgaatcatggacaacggagagcgcgatctcgtctgaggccatcctgtcctctatgtgcatgaacgggggtgaggagaagccttttgcatgccctgttccgggatgcaagaagcggtataagaatgtaaacggcatcaaataccacgccaagaatggccaccggactcagatccgggtgcggaaaccgtttaaatgccggtgcggtaaaagctacaaaaccgcccagggccttcggcaccatacaatcaattttcacccgcctgtaagcgccgaaattattcggaaaatgcagcagtag

SEQ ID NO: 251462 - protein, 466 aa, Artificial Sequence
  derived and/or modified sequence
MPQTLSASDMVTPGSLSPPPTEPTDGEQAGQPLLDGAPSSASLETLIQHLVPTADYYPEKAYIFTFLLSSRLFIEPRELLARVCHLCIEQQQLDKPVLDKARVRKFGPKLLQLLAEWTETFPRDFQEESTIGHLKDVVGRIAPCDEAYRKRMHQLLQALHQKLAALRQGPEGLVGADKPISYRTKPPASIHRELLGVCSDPYTLAQQLTHVELERLRHIGPEEFVQAFVNKDPLASTKPCFSDKTSNLEAYVKWFNRLCYLVATEICMPAKKKQRAQVIEFFIDVARECFNIGNFNSLMAIISGMNMSPVSRLKKTWAKVRTAKFFILEHQMDPTGNFCNYRTALRGAAHRSLTAHSSREKIVIPFFSLLIKDIYFLNEGCANRLPNGHVNFEKFLELAKQVGEFITWKQVECPFEQDASITHYLYTAPIFSEDGLYLASYESESPENQTEKERWKALRSSILGKT

SEQ ID NO: 251463 - DNA, 1401 bp, Artificial Sequence
  derived and/or modified sequence
atgccccagaccctgagcgccagcgacatggtgacccccggcagcctgagccccccccccaccgagcccaccgacggcgagcaggccggccagcccctgctggacggcgcccccagcagcgccagcctggagaccctgatccagcacctggtgcccaccgccgactactaccccgagaaggcctacatcttcaccttcctgctgagcagcagactgttcatcgagcccagagagctgctggccagagtgtgccacctgtgcatcgagcagcagcagctggacaagcccgtgctggacaaggccagagtgagaaagttcggccccaagctgctgcagctgctggccgagtggaccgagaccttccccagagacttccaggaggagagcaccatcggccacctgaaggacgtggtgggcagaatcgccccctgcgacgaggcctacagaaagagaatgcaccagctgctgcaggccctgcaccagaagctggccgccctgagacagggccccgagggcctggtgggcgccgacaagcccatcagctacagaaccaagccccccgccagcatccacagagagctgctgggcgtgtgcagcgacccctacaccctggcccagcagctgacccacgtggagctggagagactgagacacatcggccccgaggagttcgtgcaggccttcgtgaacaaggaccccctggccagcaccaagccctgcttcagcgacaagaccagcaacctggaggcctacgtgaagtggttcaacagactgtgctacctggtggccaccgagatctgcatgcccgccaagaagaagcagagagcccaggtgatcgagttcttcatcgacgtggccagagagtgcttcaacatcggcaacttcaacagcctgatggccatcatcagcggcatgaacatgagccccgtgagcagactgaagaagacctgggccaaggtgagaaccgccaagttcttcatcctggagcaccagatggaccccaccggcaacttctgcaactacagaaccgccctgagaggcgccgcccacagaagcctgaccgcccacagcagcagagagaagatcgtgatccccttcttcagcctgctgatcaaggacatctacttcctgaacgagggctgcgccaacagactgcccaacggccacgtgaacttcgagaagttcctggagctggccaagcaggtgggcgagttcatcacctggaagcaggtggagtgccccttcgagcaggacgccagcatcacccactacctgtacaccgcccccatcttcagcgaggacggcctgtacctggccagctacgagagcgagagccccgagaaccagaccgagaaggagagatggaaggccctgagaagcagcatcctgggcaagacctag

SEQ ID NO: 251464 - DNA, 1401 bp, Artificial Sequence
  derived and/or modified sequence
atgccacaaaccctgagtgcaagtgacatggttactcctgggagcttgtctcctccaccgacagagcccacggatggagaacaggccggccaacctcttttggatggagcccccagttctgcatccctggaaactctaatccaacacctcgtgccgaccgccgattactaccccgagaaggcttacatattcacctttctgctgtcttctcggttatttattgagcccagagaattgctggccagggtgtgtcatctatgtatagagcagcagcaattggataagccggtgctggataaagccagggtgagaaaatttggaccaaaattattgcagctgctggcggaatggactgaaaccttcccaagagactttcaggaggagagcaccatcggacatcttaaagatgtcgtgggccggattgccccatgtgatgaagcctatagaaaaaggatgcaccagcttctgcaagcactgcaccagaaactggccgccctcagacagggaccagagggcctggtcggcgcagataaacccattagctatcggaccaagccacctgcatctatccatcgtgagctgctgggcgtctgttccgatccctataccctggctcagcagctgacccacgtcgagttagagaggttgcggcatatcgggccagaggagtttgtgcaggcctttgtgaataaggaccctcttgccagcactaaaccctgttttagcgacaagacatctaaccttgaagcttatgttaagtggttcaatcgactgtgctacttagtcgcaacggagatctgcatgcctgccaaaaagaagcaacgtgctcaggtgatcgaattttttatcgatgtcgcacgcgaatgttttaacatcgggaattttaattccctgatggcgattattagcggcatgaatatgagtcccgtttctaggctcaaaaagacgtgggcaaaggtaaggacagccaagttttttatcctggagcatcagatggacccaactggaaacttctgtaactataggactgcgctgcggggggccgctcatcgctccctgactgcccattccagtagggaaaagatcgtgataccatttttttctttgctgatcaaggacatctatttcctgaatgagggatgtgccaaccgcctgcccaatggacatgtcaactttgaaaaattcctggagctcgccaaacaagtgggggaattcattacctggaagcaggttgaatgtccgttcgaacaggatgcgtctatcacccactatttgtatacagccccaatattctctgaagatggcttgtacctggcgtcatacgaatccgagagtccagaaaatcaaaccgagaaagagaggtggaaagccttacggagctctatcctcggcaaaacgtag

SEQ ID NO: 251465 - DNA, 1401 bp, Artificial Sequence
  derived and/or modified sequence
atgcctcagacactatctgcttccgatatggtcactccagggtcactctcaccgcctccaacagagcccaccgatggcgagcaggcaggccagccgctgttggacggcgcaccctcatctgcgtccctcgagacactgattcagcacttggtcccaacagctgattattatcctgagaaagcttacatcttcacatttctcctatcaagcaggctattcatcgagccgagggaacttctggccagggtctgccatctctgcatcgagcaacaacaactcgacaaacccgtcctcgacaaggcaagagtgcggaagtttggtcccaaacttcttcagctcctcgctgaatggacagaaacgttccctagggactttcaggaagagagcaccatcggtcacttgaaggacgttgtggggcgtatcgctccttgtgatgaggcctaccgaaaacggatgcaccaactgttgcaggccctgcaccagaagctcgccgctttgaggcaggggcctgaaggtctggtaggcgccgataaacccatctcatacagaactaagccgcccgcaagtattcaccgcgaactgctaggggtctgttctgatccctacacacttgctcaacagctgacacatgtggagctggaaaggctgaggcacattgggccagaggagtttgtgcaggccttcgttaacaaggacccacttgcatccaccaaaccctgcttctcggacaaaactagcaacctggaagcatacgtgaagtggttcaatcgcctgtgctacttggtggcgacagaaatttgtatgccggcaaaaaagaagcaacgggcccaggtaatcgaattcttcattgacgttgcgcgcgaatgtttcaatattggcaatttcaactcactgatggcaattatctcaggaatgaacatgtccccagtttcccgcctgaaaaagacatgggccaaggtgagaaccgccaaattctttatcttggagcatcaaatggatcctactggaaatttttgcaactatagaacagccttgcgtggagccgctcaccggagcctgactgcacactcatcccgcgagaaaatagtcatccccttcttctcgttactcattaaagacatttacttcttgaatgaaggttgtgccaatcggctgccgaatgggcacgtgaactttgagaagtttctggaacttgctaaacaggtgggcgagtttataacatggaaacaagtcgagtgtccctttgaacaagatgccagcataacgcattatttgtacacagcaccgattttttcagaggatggactctacctcgctagttatgaatccgaatctcccgaaaatcagacagaaaaggaacgctggaaagccctacggagctctatcctgggaaagacttag

SEQ ID NO: 251466 - DNA, 1401 bp, Artificial Sequence
  derived and/or modified sequence
atgccccagaccctgagcgccagtgacatggtgaccccaggcagcctgagccccccacccacagagcccacagatggagagcaggccggccagcccctgctggatggagcccccagcagcgccagcctggagaccctcatccagcacctggtgcccacagctgactactacccagagaaggcctacatcttcaccttcctgctgagcagccgcctcttcatcgagccccgggagctgctggcccgggtgtgccacctgtgcatcgagcagcagcagctggacaagcctgtgctggacaaggcccgggtgaggaagtttggccccaagctgctgcagctgctggccgagtggacagagaccttcccccgggacttccaggaggagagcaccatcggccacctgaaggatgtggtgggcagaattgccccctgtgatgaggcctacaggaagaggatgcaccagctgctgcaggccctgcaccagaagctggccgccctgcggcagggccctgagggcctggtgggcgctgacaagcccatctcctaccgcaccaagcccccagccagcatccaccgggagctgctgggcgtgtgcagcgacccctacaccctggcccagcagctgacccacgtggagctggagcggctgcggcacatcggccctgaggagtttgtgcaggcctttgtgaacaaggaccccctggccagcaccaagccctgcttcagtgacaagaccagcaacctggaggcctacgtgaagtggttcaaccggctgtgctacctggtggccacagagatctgcatgcctgccaagaagaagcagagggcccaggtgattgagttcttcattgatgtggcccgggagtgcttcaacatcggcaacttcaacagcctgatggccatcatcagcggcatgaacatgagccctgtgtcccggctgaagaagacctgggccaaggtgaggacagccaagttcttcatcctggagcaccagatggaccccactggaaacttctgcaactacagaacagccctgcggggggccgcccacaggagcctgacagcccacagcagccgggagaagatcgtcatccccttcttcagcctgctgatcaaggacatctacttcctgaatgaaggctgtgccaaccggctgcccaatggacatgtgaactttgagaagttcctggagctggccaagcaggtgggggagttcatcacctggaagcaggtggagtgcccctttgagcaggatgccagcatcacccactacctgtacacagcccccatcttctctgaagatggcctgtacctggccagctatgaaagtgagagccctgagaaccagacagagaaggagcgctggaaggccctgcggagcagcatcctgggcaagacctag

SEQ ID NO: 251467 - DNA, 1401 bp, Artificial Sequence
  derived and/or modified sequence
atgccccagaccctgagcgccagcgacatggtgacccccggcagcttatctccaccaccaaccgagcctacagacggagaacaggcaggtcagcctcttctcgacggggctccctccagcgcaagtctggagacactgatccagcacttggtaccaaccgccgactattaccccgagaaggcttatattttcactttccttctttcgtcgagacttttcatcgaacctcgcgaactgctggcccgggtctgccacctttgcatcgaacagcagcagctagacaaacctgtgctcgataaagcccgcgtgcgcaagtttgggcccaagctgttgcagctcctggctgagtggacggagacgttcccccgggactttcaggaggaatcaactatcggtcacctgaaggacgtcgtgggccgaattgccccttgcgatgaagcgtatagaaagcggatgcaccagctgctgcaggcattgcatcaaaagctagccgcactcaggcaagggccagagggtctcgtcggcgctgacaaacccatctcataccgaaccaaacctcctgctagtattcatcgagagctgcttggcgtgtgtagtgatccgtacacactggcacagcagctcacccatgtcgagctagaaaggttgcgccatatcggacccgaagaatttgtccaggcatttgttaataaggacccactggcttctactaagccttgctttagtgataaaacatccaatctggaggcatatgtgaagtggttcaatcgcctgtgctacctggtcgcgacagaaatatgtatgcctgccaagaaaaagcaaagagcacaggtgatcgagtttttcatcgatgtggcccgcgaatgcttcaatatcggcaacttcaacagtttgatggccatcatatcagggatgaacatgagccccgtgtctcgccttaaaaagacctgggctaaggtgagaactgcgaagtttttcatcttggaacatcaaatggatcctactgggaatttctgtaactatagaactgccctgagaggcgctgcccatagatcactgactgcccatagttctcgcgaaaagattgtcatcccctttttctctctcctaattaaggacatttacttcctgaatgaaggatgtgccaatagacttccgaatgggcacgtaaattttgagaagttccttgaactggcgaagcaggttggggagttcatcacctggaaacaggtggagtgcccatttgaacaggatgccagcattactcattatctttatactgctcccatcttcagcgaggatgggctatatcttgcttcttatgaaagcgagtctccagagaaccagacagagaaggagcggtggaaggccttgcggtcaagcattcttggaaaaacctag

SEQ ID NO: 251468 - DNA, 1401 bp, Artificial Sequence
  derived and/or modified sequence
atgccccagaccctgagcgccagcgacatggtgacccccggcagccttagccctcctcccacagagcccaccgatggcgagcaagcaggccagccactgctcgacggcgccccttcatctgctagcctggaaaccctaatccagcacttggtacctactgccgactactaccccgaaaaagcatacatctttacgttcttactctcctctagacttttcattgaacctcgggaactcctggccagggtctgtcacctctgcatcgagcagcagcagttggataagcctgtcttggataaggcccgggtccggaagttcgggccaaagctgcttcagttgctggctgaatggactgaaacattcccccgggacttccaggaagagagtactattggccatcttaaagacgttgtaggaaggatcgccccttgtgatgaggcgtaccggaaacgcatgcaccagcttctgcaggcccttcaccagaagctggccgcattgaggcagggcccagaggggctggtgggagccgataagcctatatcctaccgtactaaacccccagcttctatacaccgggagttgctgggcgtgtgtagcgacccctacactctcgcccagcagctgacccacgttgaactcgaacgcctgaggcacatcggtcccgaggagtttgtgcaggctttcgtaaataaggaccccctcgcaagtactaaaccttgtttttcagataagacatcaaacttggaagcgtatgttaaatggtttaaccgtctgtgctacttagtggccactgagatctgcatgccggccaaaaaaaagcagcgggcacaggtaattgaattttttattgacgttgcccgcgagtgttttaacatcggcaactttaatagccttatggccataattagtgggatgaatatgagccctgtttcgagactgaaaaagacttgggcgaaagtccgtaccgccaaattcttcatcctggagcatcagatggatccgacaggcaatttttgcaattaccggaccgcgttgcggggcgccgcccacaggtcacttacagctcactcatctagggagaagattgttatccctttcttcagcctgttgatcaaggatatttatttcttgaacgaagggtgtgccaatcgattgcccaacggccatgtaaatttcgagaaatttttagagctggctaagcaagtaggagaatttataacctggaaacaggtggagtgcccgtttgaacaggatgcaagcatcacacactatctttatactgccccgattttctcggaggacggtctgtatctggcttcatatgaatccgaaagccctgagaaccagacggaaaaggaacgatggaaggctcttagaagttcaatccttggtaagacgtag

SEQ ID NO: 251469 - DNA, 1401 bp, Artificial Sequence
  derived and/or modified sequence
atgccccagacactatccgcaagcgacatggtaacacccggatcactcagcccacctcccacagaacccaccgatggcgagcaagcaggtcagccattactggacggagccccatcatccgctagccttgaaactctcatccagcacctagttcctacagccgattactacccggagaaagcctacatttttaccttcctgctgtcctctaggctgtttatcgagcctcgggagctgctcgctcgggtgtgtcacctatgtatcgagcagcagcaactcgataagcccgtgttagataaagccagggttcgcaaattcggccctaaactattgcagctgttagcagagtggactgaaaccttcccgagggacttccaggaagaatccaccatcggacatttgaaagatgtggtgggtcggattgctccttgtgacgaggcatatagaaaaaggatgcaccagcttctgcaggccctccaccaaaaactcgctgccctccgtcaggggccagaaggattagttggagccgataagccgatatcatacaggacaaagccacccgcatctatccatagggagctgcttggggtctgttcagacccttatactcttgcccaacagcttacacatgtcgagctggagcggctgcgccacatcggccctgaagagtttgtacaggcttttgtcaacaaggatcctctagctagtacaaaaccctgcttctccgataagacatccaatctcgaagcctatgtgaaatggtttaaccggctctgctatcttgtggctacagaaatctgtatgccggcaaagaaaaaacagagggcccaggttattgagtttttcatagacgtagctcgagagtgttttaacataggcaacttcaattctctgatggcaatcatctccgggatgaatatgtcacccgtatcgcggttgaagaagacgtgggccaaagtcaggaccgctaagtttttcattttagaacatcagatggaccctacgggcaacttttgtaactacaggaccgccctcaggggcgcagctcataggagtctcaccgcccattccagcagagagaagattgtcattccttttttctcgctacttatcaaagacatttactttctcaatgaaggatgtgccaatcgtttgcctaatggacacgtcaacttcgagaagtttctggagctggctaagcaagtaggagagtttatcacttggaaacaggtggaatgcccattcgagcaggatgcgtctatcacacattacctctatactgctccaatctttagcgaggacggcctctacctcgcatcttacgagtcggagagtcccgagaaccagaccgagaaagagaggtggaaggcccttagatctagcattttgggcaaaacatag

SEQ ID NO: 251470 - DNA, 1401 bp, Artificial Sequence
  derived and/or modified sequence
atgccacagaccctgagcgcatcagacatggtcacccctggatcgctctctccgccacctaccgagccaaccgacggggagcaggcaggccaacctctgctcgatggggcaccgagctcagcatctctggagaccctgatacaacacctggtccctacagccgactactacccggagaaagcatatatatttacttttctgctgtcaagccggctcttcatagagccacgggaactgctggcacgggtgtgtcacctgtgcattgagcagcaacagctcgacaagcccgtccttgataaagcgcgtgtccgcaagttcggccctaagctgctccagcttcttgcagagtggaccgagaccttcccacgggacttccaggaggagtccactatcggtcatctcaaagacgtcgtgggaagaattgcgccatgtgacgaagcataccgtaagcggatgcatcagctgctgcaagccctgcatcagaaactagctgccctccgccaaggcccagagggcttagtgggcgctgacaagccaatctcctatagaaccaaaccaccagccagcatccaccgggaacttttaggcgtgtgttcggacccttacaccttagctcagcaacttacacatgtggaactggagcgtttgcgccacatcggcccagaagagtttgtgcaggctttcgtgaacaaggatccgctggcgagcacaaagccctgcttctccgacaagacatcaaacttagaggcatacgtcaaatggtttaaccgcctgtgttacctggtggctactgaaatctgcatgcctgcaaagaaaaagcagagggcccaggttattgagttcttcatagatgtggcccgtgagtgcttcaatatcgggaacttcaactctctcatggccatcatatcaggaatgaatatgagtcctgtcagcaggttaaaaaaaacttgggcaaaagtgagaacggccaaatttttcatcctggagcaccaaatggatcccaccggcaacttctgcaattaccgcactgctcttaggggcgcagcccatcggagtctgactgcccattctagccgcgagaagatcgtgattccttttttttccctccttatcaaggatatctatttcctcaacgagggttgcgcaaacagattgccaaatggacatgttaactttgagaagttcctggagctggcaaagcaggtgggtgagttcattacctggaaacaggtcgaatgtcccttcgaacaagatgcctctataacacactacttgtacaccgccccaatcttctccgaggatgggctctacttggcctcctacgagtcagaatctccagaaaaccagacagagaaggagagatggaaggccctcagatccagtattcttgggaaaacctag

SEQ ID NO: 251471 - DNA, 2239 bp, Artificial Sequence
  derived and/or modified sequence
cgggcggcggcggcggcggcggcggcggcggcggcggcggcgggcggcgccccggtccgcggcgccgaggctcgcaccgggagctgcccatgggccgggcccggagttccggcgcgccgggagccggcagacatgccacagacgctgagtgcctccgacatggtcaccccaggcagcctcagcccaccccccaccgagcccacagatggcgaacaggctgggcagcccctcctggatggagcgccatcctcagcctccctggaaacactgatccagcacctggtgcccacagccgactactaccccgagaaagcctacatcttcaccttcctgctgagctctcgcctcttcatcgagccccgggagctcctggcccgggtctgccacctgtgcatcgagcagcagcagctggacaagccggtgctggacaaggcccgggtccggaagttcggccccaaactgctgcagctgttggccgagtggaccgagaccttcccaagggacttccaggaagagtcgactatcgggcaccttaaggacgtcgtgggccgcatcgccccctgtgacgaggcataccggaagaggatgcatcagctcctacaggctctgcaccagaagctggcggctctgcgccaggggccagaaggtctggtgggtgccgacaagcccatctcctacaggaccaagccaccagcctccatccacagggagctccttggtgtctgcagcgacccctacacactggcccagcagctgacccacgtggaactggagcggctgcggcacatcgggcctgaggagtttgtccaggcctttgtgaacaaggaccctctggccagcacaaagccctgcttcagtgacaagaccagcaacctggaggcttatgtgaaatggttcaacaggctgtgctacctggtggcaactgagatctgcatgccagccaagaagaagcagagggcccaggtgattgagttcttcatcgacgtggcccgcgagtgcttcaacatcggcaacttcaactccctcatggccatcatctccggcatgaacatgagccctgtctccaggctgaagaagacctgggccaaagtgaggacggccaagtttttcatcctcgagcaccagatggacccaacggggaatttctgcaactacaggacagccctgcgcggggcggcccaccgctccctgacggcccacagcagccgagagaagattgtcattcctttcttcagcctgctcatcaaagacatctacttcctgaatgagggctgcgccaaccgccttcccaatggacacgtcaactttgagaaattcctggagctggccaagcaggtgggggagttcatcacctggaaacaagtggagtgtcccttcgagcaagacgccagcatcacccactacctgtacaccgcccccatcttcagtgaggatggtctttatttggcttcttacgaaagtgagagcccagagaaccaaacagaaaaagaaagatggaaagctctaagatcttctattttggggaagacatgaaagcgctgagctgagggacgaggaagagctggagcccgcagaagccgtccacagccctgcctcagtggcccagtgggcagaggccagggagtgcctcactattttgcaaatgccgaccctgtggcctgctgcccgccccccccccccccacagtggccatacgggcacaggagaccttttatgggactttggccctggcaggacccagggcctccagacgtgcgggcggcacatgccttggggacatcctgccttcaggaccgtggggcctggtcagtctgtccatcctcggcaaggacacaacactgccccagagggtgggaccactgcaagctcgagaccttgcttggtgacatgtgccactttggccaccacccacagtctgtcaccacgtggcttgggaacttctggagccacagcaggcatcacggtgcgacgtgagatgcctgcgccagccccgagcccactggcagccactgccattccacccatggtccctcaccctgccctgccgacgagcttgtctctgcagccccaggtacccccttcctggatgctgctggccccaggagatagctttccggtgacagctgtggaacgcgtcaacaggacaaactggacacatggagttacagtgtgtacacggcagtcccgccacccagcccccttgtaaactctagtcactataaacacacccgtacgccta

SEQ ID NO: 251472 - DNA, 2395 bp, Artificial Sequence
  derived and/or modified sequence
ggggggaagaatctagaagaggcctgcccctgagtggggcaagaggagtagacaagagatgggtcctgcaggagagttgagaggccatgagaagacggagaatgaaggctgtgctgtgaggaaggggccctgacaatactcccaggaagtgaccactggactcaagctggcacaaagtggctgtggggggagcctgcccagccaggagccccgggaccagcagctcccactcaggtgcacccaactcaggtgtgcccccactcaggtcctcactgctccttgccattgcaggcagacatgccacagacgctgagtgcctccgacatggtcaccccaggcagcctcagcccaccccccaccgagcccacagatggcgaacaggctgggcagcccctcctggatggagcgccatcctcagcctccctggaaacactgatccagcacctggtgcccacagccgactactaccccgagaaagcctacatcttcaccttcctgctgagctctcgcctcttcatcgagccccgggagctcctggcccgggtctgccacctgtgcatcgagcagcagcagctggacaagccggtgctggacaaggcccgggtccggaagttcggccccaaactgctgcagctgttggccgagtggaccgagaccttcccaagggacttccaggaagagtcgactatcgggcaccttaaggacgtcgtgggccgcatcgccccctgtgacgaggcataccggaagaggatgcatcagctcctacaggctctgcaccagaagctggcggctctgcgccaggggccagaaggtctggtgggtgccgacaagcccatctcctacaggaccaagccaccagcctccatccacagggagctccttggtgtctgcagcgacccctacacactggcccagcagctgacccacgtggaactggagcggctgcggcacatcgggcctgaggagtttgtccaggcctttgtgaacaaggaccctctggccagcacaaagccctgcttcagtgacaagaccagcaacctggaggcttatgtgaaatggttcaacaggctgtgctacctggtggcaactgagatctgcatgccagccaagaagaagcagagggcccaggtgattgagttcttcatcgacgtggcccgcgagtgcttcaacatcggcaacttcaactccctcatggccatcatctccggcatgaacatgagccctgtctccaggctgaagaagacctgggccaaagtgaggacggccaagtttttcatcctcgagcaccagatggacccaacggggaatttctgcaactacaggacagccctgcgcggggcggcccaccgctccctgacggcccacagcagccgagagaagattgtcattcctttcttcagcctgctcatcaaagacatctacttcctgaatgagggctgcgccaaccgccttcccaatggacacgtcaactttgagaaattcctggagctggccaagcaggtgggggagttcatcacctggaaacaagtggagtgtcccttcgagcaagacgccagcatcacccactacctgtacaccgcccccatcttcagtgaggatggtctttatttggcttcttacgaaagtgagagcccagagaaccaaacagaaaaagaaagatggaaagctctaagatcttctattttggggaagacatgaaagcgctgagctgagggacgaggaagagctggagcccgcagaagccgtccacagccctgcctcagtggcccagtgggcagaggccagggagtgcctcactattttgcaaatgccgaccctgtggcctgctgcccgccccccccccccccacagtggccatacgggcacaggagaccttttatgggactttggccctggcaggacccagggcctccagacgtgcgggcggcacatgccttggggacatcctgccttcaggaccgtggggcctggtcagtctgtccatcctcggcaaggacacaacactgccccagagggtgggaccactgcaagctcgagaccttgcttggtgacatgtgccactttggccaccacccacagtctgtcaccacgtggcttgggaacttctggagccacagcaggcatcacggtgcgacgtgagatgcctgcgccagccccgagcccactggcagccactgccattccacccatggtccctcaccctgccctgccgacgagcttgtctctgcagccccaggtacccccttcctggatgctgctggccccaggagatagctttccggtgacagctgtggaacgcgtcaacaggacaaactggacacatggagttacagtgtgtacacggcagtcccgccacccagcccccttgtaaactctagtcactataaacacaccc

SEQ ID NO: 251473 - protein, 254 aa, Artificial Sequence
  derived and/or modified sequence
MAAASAGATRLLLLLLMAVAAPSRARGSGCRAGTGARGAGAEGREGEACGTVGLLLEHSFEIDDSANFRKRGSLLWNQQDGTLSLSQRQLSEEERGRLRDVAALNGLYRVRIPRRPGALDGLEAGGYVSSFVPACSLVESHLSDQLTLHVDVAGNVVGVSVVTHPGGCRGHEVEDVDLELFNTSVQLQPPTTAPGPETAAFIERLEMEQAQKAKNPQEQKSFFAKYWHIILGGAVLLTALRPAAPGPAPPPQEA

SEQ ID NO: 251474 - DNA, 765 bp, Artificial Sequence
  derived and/or modified sequence
atggcagccgctagtgcgggagctacaaggctcctgctactgttgttgatggcagtagccgctccctcacgtgccaggggctccggctgcagagccggtacaggggctagaggcgcaggggctgaggggagggaaggcgaagcctgcggaacggtgggcttactgttagaacattccttcgagattgatgactccgcaaacttccgaaagcgtggcagtctgctgtggaaccaacaagacggcaccctgtctttaagccaacgccaactttccgaggaagagcgtggcagactgcgagatgtcgctgccctcaatgggttataccgtgttcggattcccagacgccctggggcactggatggccttgaggcaggaggctatgtgtccagttttgtgccagcatgttcgctggttgaaagccacctcagcgaccaattaaccctccacgtggacgtcgcaggaaacgtcgttggggtgtctgtagtaactcaccccggtgggtgccggggacacgaagtggaagatgtggacctggaactgtttaacaccagcgtgcagttacagccccctacaaccgccccagggccagaaaccgctgcatttatcgaacgcctggagatggagcaggcccagaaggcgaagaacccccaggagcagaagtcattttttgcaaagtattggcacatcatccttggtggagccgtgctgctgaccgctctgaggccagctgctccagggcctgccccaccaccccaggaagcctag

SEQ ID NO: 251475 - DNA, 765 bp, Artificial Sequence
  derived and/or modified sequence
atggccgctgcaagtgcaggcgccacccggctgcttctcctgctgctgatggcagtggcggccccaagcagggcgagggggtcagggtgtcgcgcagggacgggcgctcgtggggcgggtgccgaggggcgcgagggtgaggcctgcggcactgtggggctactgctcgagcattctttcgagattgacgattctgcgaacttccgaaaaagaggaagtctgttgtggaaccaacaagatggtacactcagtttatctcagcggcagctatccgaggaagagcgagggcgattgcgggacgtggcagcactgaacggcctttaccgcgtgcggatacctagacggccaggggcgctcgacggcctcgaagccggcggctacgtgtcaagttttgtgcctgcttgcagtctcgtggaaagtcatcttagtgatcagctgactctgcacgttgatgtggccggcaacgtggtcggtgtgtcagtggttactcatcctggcggttgccggggccacgaggtcgaggacgtggacctagaattattcaacacttccgttcagttacaaccccctacgaccgccccaggacccgaaacagctgcctttatagaacggcttgaaatggaacaagcacagaaagcaaaaaacccacaggaacagaaatcattttttgcgaaatactggcatattattttaggcggcgcagtcttgctcacagctctcaggcccgcagcccccgggccagctccaccaccacaagaggcgtag

SEQ ID NO: 251476 - DNA, 765 bp, Artificial Sequence
  derived and/or modified sequence
atggcagcagcatccgccggagccacaagactgttactccttctgttaatggctgtagcagccccttctcgggccagaggctctggatgcagagcgggtacgggcgccagaggcgcgggagcagaggggagagaaggtgaggcatgtggcacagtaggtttactgcttgaacacagtttcgaaattgatgattctgcaaattttaggaagcgcgggtctctcctgtggaatcaacaagacgggacactcagcctgagtcaacggcagctctcagaagaagaacgtggccggcttcgcgatgtagcagctctcaacggcctgtaccgagtgcgaattcccaggcgccctggtgccctggacggcttggaagcaggaggatatgtgagctcattcgtgcctgcatgtagccttgtcgagagccacctaagcgaccagcttactctccatgtcgatgtggccggcaacgtcgtcggggtcagcgttgtcacacatccaggcggatgccgagggcacgaagttgaggatgtcgacttagagttattcaataccagtgttcagctccaaccaccgacaacggctcccggccctgaaacagcagcttttattgagaggttggaaatggaacaggcccagaaagcaaaaaacccacaggaacagaagagcttcttcgcaaagtattggcatatcatccttggcggggcagttctcctgactgcattaagacccgcagcacccggcccagccccacccccccaggaagcttag

SEQ ID NO: 251477 - DNA, 765 bp, Artificial Sequence
  derived and/or modified sequence
atggccgccgccagcgccggcgccaccagactgctgctgctgctgctgatggccgtggccgcccccagcagagccagaggcagcggctgcagagccggcaccggcgccagaggcgccggcgccgagggcagagagggcgaggcctgcggcaccgtgggcctgctgctggagcacagcttcgagatcgacgacagcgccaacttcagaaagagaggcagcctgctgtggaaccagcaggacggcaccctgagcctgagccagagacagctgagcgaggaggagagaggcagactgagagacgtggccgccctgaacggcctgtacagagtgagaatccccagaagacccggcgccctggacggcctggaggccggcggctacgtgagcagcttcgtgcccgcctgcagcctggtggagagccacctgagcgaccagctgaccctgcacgtggacgtggccggcaacgtggtgggcgtgagcgtggtgacccaccccggcggctgcagaggccacgaggtggaggacgtggacctggagctgttcaacaccagcgtgcagctgcagccccccaccaccgcccccggccccgagaccgccgccttcatcgagagactggagatggagcaggcccagaaggccaagaacccccaggagcagaagagcttcttcgccaagtactggcacatcatcctgggcggcgccgtgctgctgaccgccctgagacccgccgcccccggccccgccccccccccccaggaggcctag

SEQ ID NO: 251478 - DNA, 765 bp, Artificial Sequence
  derived and/or modified sequence
atggcggcagcaagcgctggcgcaacaagacttctgctgctcctgttgatggcagtggcggcgcccagcagggcaaggggctcaggttgtagggcggggacgggcgcacggggcgccggcgcggagggtagagagggtgaggcctgcggcacagtgggcctcctcctggagcattccttcgaaatcgacgatagcgccaattttagaaaaagaggatcacttctctggaaccagcaagatggtaccctgagcctttcccagcgacagttatcggaggaggagcggggtagactgcgcgacgtggcagcattgaacggactttaccgtgtgcggattccgagaaggcctggagcactggatggcctggaagcgggggggtacgtctctagcttcgtgcccgcttgcagcctcgttgaatctcacctaagcgatcagttgacactgcatgtggacgttgcgggaaacgtggtgggggtgagcgtcgtgactcacccaggaggatgtcgtggacatgaagtcgaggatgttgacctggagctgtttaatacctcagtacaactccagcccccaacgaccgccccggggcctgaaactgctgcattcatcgaaagactggagatggagcaagcccagaaggcaaaaaatcctcaggagcaaaaaagttttttcgccaagtattggcatataatcctgggcggagcagtactgttgacagcactgcgccccgctgcccctggccccgccccccccccccaggaggcctag

SEQ ID NO: 251479 - DNA, 765 bp, Artificial Sequence
  derived and/or modified sequence
atggctgctgccagcgctggggccacccggctgctgctgctgctgctgatggctgtggccgcccccagccgggcccggggcagcggctgccgggccggcaccggggcccggggagctggagctgagggccgggagggggaggcctgtggcaccgtgggcctgctgctggagcacagctttgaaattgatgattctgccaacttcaggaagaggggcagcctgctgtggaaccagcaggacggcaccctgagcctgagccagaggcagctgtctgaggaggagcggggccgcctgagagatgtggccgccctgaatggcctgtacagagtgcgcatcccccggcggcctggggccctggatggcctggaggccggcggctacgtgagcagctttgtgcctgcctgcagcctggtggagagccacctgagtgaccagctgaccctgcacgtggatgtggccggaaatgtggtgggcgtgtctgtggtgacccaccctgggggctgccggggccacgaggtggaggatgtggacctggagctgttcaacacctctgtgcagctgcagccccccaccacagcccctggccctgagacagctgccttcatcgagcggctggagatggagcaggcccagaaggccaagaacccccaggagcagaagagcttctttgccaagtactggcacatcatcctgggcggcgctgtgctgctgacagccctgcggcctgctgcccctggccctgcccccccaccccaggaggcctag

SEQ ID NO: 251480 - DNA, 2033 bp, Artificial Sequence
  derived and/or modified sequence
ttcctcccggcgtgctccgcggctcttggctcacagccgtcccttcgctggtgggaagaagccgagatggcggcagccagcgctggggcaacccggctgctcctgctcttgctgatggcggtagcagcgcccagtcgagcccggggcagcggctgccgggccgggactggtgcgcgaggggctggggcggaaggtcgagagggcgaggcctgtggcacggtggggctgctgctggagcactcatttgagatcgatgacagtgccaacttccggaagcggggctcactgctctggaaccagcaggatggtaccttgtccctgtcacagcggcagctcagcgaggaggagcggggccgactccgggatgtggcagccctgaatggcctgtaccgggtccggatcccaaggcgacccggggccctggatggcctggaagctggtggctatgtctcctcctttgtccctgcgtgctccctggtggagtcgcacctgtcggaccagctgaccctgcacgtggatgtggccggcaacgtggtgggcgtgtcggtggtgacgcaccccgggggctgccggggccatgaggtggaggacgtggacctggagctgttcaacacctcggtgcagctgcagccgcccaccacagccccaggccctgagacggcggccttcattgagcgcctggagatggaacaggcccagaaggccaagaacccccaggagcagaagtccttcttcgccaaatactggcacatcatcctggggggggccgtgttgctcacagccctgcgtcctgctgcgccagggcccgcgccaccgccacaggaggcctgatggatgtacatcattcccgtcgtcctgttcctcatgatgtcaggagcgccagacaccgggggccagggtgggggtgggggtgggggtggtggtgggggtagtggccggtgagggcccaggctggtcagcgtcccgtcttgcacacccaggggcctccctttctgctggagtcccctgtgtcctcagccatcccaagaagggtttgctggtccctcctttccccccgtcccacgaggccacctgggccagccccttgtcctctgccttctgctggcagaggagcagctggactggggcctttggcacagcagccggtgtctcctgcgcccgcctcccccatggccccatgcagccccaggggcttcccccctgcccatggagtagagcccgagatcctggccactatgccagttctgacctcgcatccccctaccccgagcccatgcagtctgggaacatgccgccttctctccagcctctgtgcctttgttccaggtggtctcaccctcctgtccctggctgggctaggtggtcctgtccaggctcctgcagcgcccccctcactttgacactggactaggatgcagcctcccttctgtgtccccttgagggtaccctgggtcccctcatcaggggcagaggcatgaaagagtcggggctggatggccgggggcttctgggcccgacgcctagtgcagcccctggggtcgtggtttgacatttgtctgcctggtgcaaacaaggaatccttgcctttaaggtgacaggccctccacaggcttccagacttgaaggaaaaggtttaagaaagaaaacaaaaccaacagttagtggagtcaaagcccagacactgtaaatagaaccccctccaccaccccccgccgcccagcatcctacctggactgcggtgctacgagggcctgcgggcctttgctgtgtgccaccctccctgtaagtctatttaaaaacatcgacgatacattgaaatgtgtgaacgttttgaaaagctacagcttccagcagccaaaagcaactgttgttttggcaagacggtcctgatgtacaagcttgattgaaattcactgctcacttgatacgttattcagaaacccaaggaatggctgtccccatcctcatgtggctgtgtggagctcagctgtgttgtgtggcagtttattaaactgtcccccagatcgacacgc

SEQ ID NO: 251481 - DNA, 765 bp, Artificial Sequence
  derived and/or modified sequence
atggccgccgccagcgccggcgccacccggctgctgctgctgctgctgatggcagtggcagccccgtcgcgggcccgaggctcagggtgtagagcagggacgggcgctcgcggcgccggagctgagggacgggaaggtgaagcatgcggtactgtgggactcctattagagcacagttttgaaatagacgattccgccaactttcgcaagagagggtctcttttgtggaatcagcaggacggtactctttctctttctcagcgccagctgtcggaggaagagaggggacgcctgagagacgtcgccgctttgaatggtctctacagggtaagaattccaagacgacctggggccctggacggccttgaagcgggggggtacgtatctagtttcgtgcccgcctgcagtctggtcgagtcacatctgtcagatcagctcaccctgcatgttgatgtagccggaaatgtggtgggcgtgtcggttgtgactcatccaggcggctgccgcgggcacgaggtagaggatgtggacttagagctctttaatacaagcgtacagctccaacctcctactacagctcccggtcccgaaacagccgccttcatcgagcgccttgagatggagcaggcgcagaaagcaaagaatccgcaggagcagaagagttttttcgctaagtactggcacataatcttgggcggtgctgtgctcctaacggccctgaggccagcggctcctggtccagcgccaccacctcaggaagcctag

SEQ ID NO: 251482 - RNA, 765 nt, Artificial Sequence
  derived and/or modified sequence
auggccgcugcaagugcaggcgccacccggcugcuucuccugcugcugauggcaguggcggccccaagcagggcgagggggucagggugucgcgcagggacgggcgcucguggggcgggugccgaggggcgcgagggugaggccugcggcacuguggggcuacugcucgagcauucuuucgagauugacgauucugcgaacuuccgaaaaagaggaagucuguuguggaaccaacaagaugguacacucaguuuaucucagcggcagcuauccgaggaagagcgagggcgauugcgggacguggcagcacugaacggccuuuaccgcgugcggauaccuagacggccaggggcgcucgacggccucgaagccggcggcuacgugucaaguuuugugccugcuugcagucucguggaaagucaucuuagugaucagcugacucugcacguugauguggccggcaacguggucggugugucagugguuacucauccuggcgguugccggggccacgaggucgaggacguggaccuagaauuauucaacacuuccguucaguuacaacccccuacgaccgccccaggacccgaaacagcugccuuuauagaacggcuugaaauggaacaagcacagaaagcaaaaaacccacaggaacagaaaucauuuuuugcgaaauacuggcauauuauuuuaggcggcgcagucuugcucacagcucucaggcccgcagcccccgggccagcuccaccaccacaagaggcguag

SEQ ID NO: 251483 - RNA, 765 nt, Artificial Sequence
  derived and/or modified sequence
auggcagcagcauccgccggagccacaagacuguuacuccuucuguuaauggcuguagcagccccuucucgggccagaggcucuggaugcagagcggguacgggcgccagaggcgcgggagcagaggggagagaaggugaggcauguggcacaguagguuuacugcuugaacacaguuucgaaauugaugauucugcaaauuuuaggaagcgcgggucucuccuguggaaucaacaagacgggacacucagccugagucaacggcagcucucagaagaagaacguggccggcuucgcgauguagcagcucucaacggccuguaccgagugcgaauucccaggcgcccuggugcccuggacggcuuggaagcaggaggauaugugagcucauucgugccugcauguagccuugucgagagccaccuaagcgaccagcuuacucuccaugucgauguggccggcaacgucgucggggucagcguugucacacauccaggcggaugccgagggcacgaaguugaggaugucgacuuagaguuauucaauaccaguguucagcuccaaccaccgacaacggcucccggcccugaaacagcagcuuuuauugagagguuggaaauggaacaggcccagaaagcaaaaaacccacaggaacagaagagcuucuucgcaaaguauuggcauaucauccuuggcggggcaguucuccugacugcauuaagacccgcagcacccggcccagccccacccccccaggaagcuuag

SEQ ID NO: 251484 - protein, 666 aa, Artificial Sequence
  derived and/or modified sequence
MALFYVARYPGPDAAAAAGPEGAEAGAHGRARALLERLQSRARERQQQREPAQTEAAASTEPATRRRRRPRRRRRVNDAEPGSPEAPQGKRRKADGEDAGAESNEEAPGEPSAGSSEEAPGEPSAGSSEEAPGERSTSASAEAAPDGPALEEAAGPLVPGLVLGGFGKRKAPKVQPFLPRWLAEPNCVRRNVTEDLVPIEDIPDVHPDLQKQLRAHGISSYFPVQAAVIPALLESAACGFLVGRGGYRPSDLCVSAPTGSGKTLAFVIPVVQALLSRVVCHIRALVVLPTKELAQQVSKVFNIYTDATPLRVSLVTGQKSLAKEQESLVQKTADGYRCLADIVVATPGRLVDHIDQTPGFSLQQLRFLIIDEADRMIDSMHQSWLPRVVAAAFQSEDPADPCALLQRRQAQAVTAASTCCPQMPLQKLLFSATLTQNPEKLQQLGLHQPRLFSTGLAHRGLEDTDGDGDSGKYAFPVGLTHHYVPCSLSSKPLVVLHLVLEMGFSRVLCFTNSRENSHRLFLLVQAFGGVDVAEFSSRYGPGQRRMILKQFEQGKIQLLISTDATARGIDVQGVELVVNYDAPQYLRTYVHRVGRTARAGKTGQAFTLLLKVQERRFLRMLTEAGAPELQRHELSSKLLQPLVPRYEEALSQLEESVKEERKQRAA

SEQ ID NO: 251485 - DNA, 2001 bp, Artificial Sequence
  derived and/or modified sequence
atggctctgttctatgtggcaagatatcctggacctgacgctgcggctgcggccgggcctgagggtgctgaggcaggggctcacggacgcgctagggcccttttagaaagactgcaatccagagcccgggaacggcaacagcagcgtgaaccagcacagactgaggcagctgcaagcaccgagcctgcaactcgccgtaggcgtagaccgaggaggcgccgccgggttaatgacgccgagcccggttcacccgaggctccgcaaggaaagaggagaaaagccgacggtgaagacgcaggagccgagagcaacgaggaagcaccaggggaaccaagcgccggcagctccgaggaggctcccggagaacccagcgccggaagctcagaagaggcgcccggggaacgttcaacatccgctagcgcagaagccgcacccgatggccctgctctggaagaagccgctggcccactggtgcctggccttgtcctcggtggatttggcaaaagaaaggcaccgaaggtgcaaccgtttctgccaaggtggctggcagagcccaactgtgttcgacgcaacgtgactgaggacctggtgcctatcgaagacattcccgacgttcatcccgaccttcagaagcagctcagagcccacgggatctctagctactttccagtacaggcagccgtgattcccgccctcctagagagtgcagcgtgtggctttctggtaggcagaggtggatatcgtccaagtgacctgtgtgtgagtgccccgactggttccggcaagacccttgcatttgttattcccgtggtccaggcacttctgagtagggttgtgtgtcatattcgtgccctcgttgtgctccctactaaggaactggcacagcaggtctcaaaggttttcaacatatatacagacgcaacccccttgcgcgtgagtctggtgacagggcagaagagcctggctaaagagcaagagtctctcgtccagaaaaccgcagacgggtatcgttgtttggccgacatcgtagtcgctactccaggtagactggtggatcatatcgatcagactcccggctttagtcttcagcagttgagatttctaataattgatgaggcagatagaatgattgatagcatgcatcagagctggctcccgcgcgtcgtggctgctgcttttcaatctgaagatccggcagatccttgtgccttactgcagcgaaggcaggcccaggctgtcaccgccgcctctacctgctgtccgcaaatgccacttcagaaactgctgttctcggccacattgactcagaatccagagaaactccaacaactgggactgcaccagccccgtctattctctacgggactggctcataggggcctggaggacactgatggggatggcgacagtggtaagtatgcgttccctgttggactcacacatcattacgttccatgttccttgagctctaaacccctcgtcgtgctgcaccttgtcctggaaatgggcttcagtagagtgttatgctttactaattcgagggaaaacagtcatagacttttccttctagttcaagctttcggaggcgtggatgtagctgagttttcctctcgttatgggcctggacagcgtcgcatgattttgaaacagttcgaacaaggtaaaatacagctcctgattagtaccgatgctaccgccaggggcattgacgtccagggagtggaacttgtcgttaattacgatgctccacagtacttgaggacatacgttcatagagtcggacgaacggcgcgcgccggaaagaccggccaggctttcactcttctgttgaaagtgcaggagcgacgttttctgcggatgctgaccgaggctggcgctcctgaactccagcgccacgagctgtccagtaaactgctacagcccttagtcccaagatatgaagaggccctctcacagctcgaggaatctgtcaaggaagagaggaaacaacgagcagcctag

SEQ ID NO: 251486 - DNA, 2001 bp, Artificial Sequence
  derived and/or modified sequence
atggccctcttctacgtggcccgctacccaggcccagatgctgctgctgctgctggccctgagggcgctgaggccggggcccacggccgggcccgggccctgctggagcggctgcagagccgggcccgggagcggcagcagcagcgggagcccgcccagacagaggccgccgccagcacagagcccgccaccaggagaagaagaagaccaagaagaagaagaagagtgaatgatgctgagcccggcagccctgaggccccccagggcaagaggaggaaggcagatggagaagatgctggagctgagagcaatgaggaggcccctggagagcccagcgctggcagcagcgaggaggcccctggagagcccagcgctggcagcagcgaggaggcccctggagagaggagcaccagcgccagcgctgaggccgccccagatggccctgccctggaggaggccgccggccccctggtgcccggcctggtgctgggcggctttgggaagaggaaggcccccaaggtgcagcccttcctgccccgctggctggccgagcccaactgtgtgagaagaaatgtgacagaggacctggtgcccatcgaggacatcccagatgtgcacccagacctgcagaagcagctgcgggcccacggcatcagcagctacttccctgtgcaggccgctgtgatcccagccctgctggagagcgctgcctgtggcttcctggtgggccggggcggctaccggcccagcgacctgtgtgtgtctgcccccaccggcagcggcaagaccctggccttcgtcatccctgtggtgcaggccctgctgagccgggtggtgtgccacatccgggccctggtggtgctgcccaccaaggagctggcccagcaggtgtccaaggtgttcaacatctacacagatgccacccccctgcgggtgtccctggtgacaggccagaagagcctggccaaggagcaggagagcctggtgcagaagacagcagatggctaccgctgcctggccgacatcgtggtggccaccccaggccgcctggtggaccacatcgaccagaccccaggcttcagcctgcagcagctgcgcttcctgatcattgatgaagctgacaggatgattgacagcatgcaccagagctggctgccccgggtggtggccgccgccttccagagcgaggaccctgctgacccctgtgccctgctgcagaggcggcaggcccaggccgtgacagctgccagcacctgctgcccccagatgcccctgcagaagctgctcttcagcgccaccctgacccagaaccctgagaagctgcagcagctgggcctgcaccagcccaggctcttcagcacaggcctggcccaccggggcctggaggacacagatggagatggagacagcggcaagtatgccttccctgtgggcctgacccaccactacgtgccctgcagcctgagcagcaagcccctggtggtgctgcacctggtgctggagatgggcttcagccgggtgctgtgcttcaccaacagccgggagaacagccacaggctcttcctgctggtgcaggcctttggaggagtggatgtggccgagttcagcagccgctatggccctggccagaggaggatgatcctgaagcagtttgagcagggcaagatccagctgctgatcagcacagatgccacagcccggggcattgatgtgcagggcgtggagctggtggtgaactatgatgccccccagtacctgcggacctacgtgcaccgggtgggccgcacagcccgggccggcaagacaggccaggccttcaccctgctgctgaaggtgcaggagcggcgcttcctgaggatgctgacagaggccggggcccctgagctgcagagacatgagctgagcagcaagctgctgcagcccctggtgcccaggtatgaggaggccctgagccagctggaggagagcgtgaaggaggagaggaagcagagagctgcctag

SEQ ID NO: 251487 - DNA, 2001 bp, Artificial Sequence
  derived and/or modified sequence
atggccctgttctacgtggcccggtaccccggccccgacgccgccgcagctgcaggacctgagggagccgaggccggggcacacggtcgcgcccgcgctttactggaacgactccaatctcgggcacgggagcgccagcaacagcgggagcccgctcagactgaggctgccgcaagtaccgagccagccactcggaggaggaggaggccccgaaggcggaggagagttaacgacgccgaaccagggagccctgaagccccccaagggaagagaaggaaagcagacggggaggatgctggcgctgaaagcaatgaggaggcacctggtgaaccctctgccggttcatctgaagaggccccaggcgagcccagcgccggatcttcagaagaggctcccggagaacggtctacgtctgcctccgctgaggccgccccggatggccccgcgctggaagaggcagcaggtccgctggtgccggggctagtgttggggggatttggcaagcggaaggcacctaaagtacagccgttcttgccccgatggctggccgagccaaattgtgtgagaaggaatgtcacagaggacctggttccaatcgaggacatcccagacgttcacccggacctccagaaacagcttagggctcatggtatttcctcctatttcccagtacaggctgccgtgatcccagcactgcttgagtccgccgcctgcggctttctggtggggagagggggatatcggcccagcgatctttgcgtgagtgctcctaccggaagtggcaagactttagctttcgtaatccccgtggtgcaagctttgctgtcaagggtagtttgtcatatccgcgcccttgtggtgctgcccacgaaagaattggcacagcaggtgtctaaggtgtttaacatatacacagacgctacacccctccgcgtctcactcgtaaccgggcagaaatccctggcaaaggaacaggagtctttggtgcagaagaccgccgacggctaccggtgcctcgcggatatcgtagtcgccactcccggccgtctggtcgatcatatagaccagacccctggctttagtctccaacagcttcgctttctgattattgacgaggccgatcgcatgatagacagtatgcatcagagctggttaccgagagttgtagctgccgcattccaatctgaagaccccgccgacccttgcgccctcttacagcgaagacaagcacaggcagtgaccgccgcatctacatgctgcccccaaatgcccctacaaaagctcctcttttccgccacactgactcagaaccctgagaagctacagcagctcggtctccaccagccccggttgttctctacaggtctggctcatagagggctggaggacacagatggggacggcgatagtggaaagtacgctttccctgtggggctgacccaccactacgtgccatgcagtctgtcttctaagccactagtagttctccacttggtgctggaaatggggtttagcagggttctgtgcttcactaactctcgggagaatagccatcggctgtttctgctcgtacaggcatttggaggcgtagacgtggccgaatttagtagccgctacggcccaggccagagacgcatgatccttaagcaattcgagcagggcaagattcagttacttatctctacggatgctacagcccgcggtatagacgtgcagggtgtggagctggtggtgaactatgacgctccacaatacctgcgcacttacgtacatagagttggccgcacggctagagcgggcaagaccgggcaagcttttacattgctgttaaaggtgcaggagcgacgctttctccgcatgctcaccgaggctggggcccctgagctgcagcggcacgagctctcaagcaaattgctgcagcctttggtgcctcggtacgaggaggccctcagccaactcgaggagtctgtcaaggaggagcgaaagcagagggctgcttag

SEQ ID NO: 251488 - DNA, 2001 bp, Artificial Sequence
  derived and/or modified sequence
atggctctcttttatgtggcgagataccccggacctgatgcagccgcagccgctgggccagaaggagccgaggcaggggctcacgggagagctcgagctctcctcgagaggttgcaaagccgggcaagggaaagacaacaacagcgtgaacccgcacagacggaggcggcagcgagcacagaaccagccacccggaggcgccgtcgccctaggcggaggaggcgcgttaacgacgccgagcccggttcccccgaagcccctcaggggaaacgacgtaaggccgatggagaagatgccggtgccgagtcaaacgaagaagctccgggtgaaccatctgcgggttcttcagaggaagccccaggggaaccgagcgcaggttctagtgaagaagcgcctggcgaaaggagcactagtgcttcagctgaagccgcacccgatggtcctgcattagaggaagcggctgggcctcttgtccccggactcgtccttggcggttttggtaaacggaaggcacctaaggtccaacctttcctgccacggtggctcgctgagcccaactgcgtgagacggaacgtgacagaggatctcgtgccaatcgaagatatcccagacgtgcatcctgatcttcagaaacagctgagagcccatggaatcagttcatatttcccggtgcaggctgccgtcatcccagctctgctggaatctgctgcttgcggcttcctcgttgggagggggggataccggccatctgacctgtgcgtttcggcgccaaccggatcgggcaaaacgctcgcatttgttatccccgtggtgcaggctctgctgagtcgtgtcgtttgccacatccgggctctcgtagtgctgcctacaaaagagctggctcagcaggtgagtaaagtgttcaacatttacaccgacgccactccactgcgcgtctccctcgtgacgggacagaagtcattggcgaaggagcaggagagcttggtgcaaaagaccgctgatggttatcggtgcctggctgacatcgtcgtggccacacccggtcggctggtggatcacatcgaccagacacctggcttttccttacagcagctgcgcttcttaattatcgacgaagctgaccggatgattgactctatgcatcagtcatggctgccgagggtcgttgccgctgctttccagtctgaggatcctgccgatccatgtgcactgctgcaacggagacaggcccaggcagtgaccgccgcaagcacatgctgccctcaaatgccactgcagaaacttctctttagcgccactctaactcagaatccagagaagttacagcagctcggtttgcatcaacctaggctgttttccactggcctagctcatcggggactcgaggatactgacggagatggcgacagcggcaagtacgcctttcccgttggattgacccatcattacgtcccgtgctcccttagttcgaagccactagtcgtactgcatctggtcctcgaaatgggattctcccgcgtactgtgtttcacaaacagcagggagaactcacacaggctgttccttcttgttcaagcgttcgggggtgtagacgtagcggagttctcgagtaggtacgggccaggacagcggcgtatgatacttaaacagttcgagcagggaaaaattcagttgctgattagcaccgacgcaacagccaggggcatcgatgtccagggcgtcgaattggtagtgaactatgatgccccacaatacttgcggacatacgtgcatcgcgtagggagaactgccagggcgggtaagaccggtcaggccttcacccttctgctcaaagtgcaggagcggcgttttttgcgcatgcttacagaagctggtgcccctgagttacagagacacgaactttcgtccaagctcctgcagcctctcgtgccacggtacgaggaagccctgagtcaactggaggagtcagtgaaagaggaacgcaagcagagagctgcttag

SEQ ID NO: 251489 - DNA, 4718 bp, Artificial Sequence
  derived and/or modified sequence
gcagcgcgccacgcccgagtcccaggcgtgcggctggccatggcgctgttctacgtcgcgcggtacccgggccccgatgcggcagctgcggcggggccggagggcgcggaggccggggcgcacggcagggcccgcgcgctgctcgagcggctgcagagccgggcccgcgaacggcagcagcagcgggagcccgcgcagaccgaggcggctgcatcgaccgagccggcgaccaggaggcgacggcggccccggcggcggcggcgggtgaacgacgcggagccggggagcccggaggcgccgcagggaaagcgacggaaggcggacggcgaggacgcgggcgcagaaagcaacgaggaggcgccaggggagcccagcgcagggagcagcgaggaggcgccaggggagcccagcgcagggagcagcgaggaggcgccgggggagcgcagcaccagcgccagcgccgaggcggccccagatggaccggccctggaggaggcggccggacccctggtccccggcctggtgctgggggggttcgggaagaggaaggcgccgaaggtccagcctttcctgccaaggtggctggctgagcctaactgtgtcagaaggaatgtcaccgaagacctggttcctatcgaggacatccctgacgtccatcctgacctgcagaagcagctgcgggcacacggcatctcgtcctactttccagtccaggcagctgtgattcctgccctcctggagagcgcagcctgtgggtttctggtgggcagaggtggctaccggcctagcgacctctgtgtttctgccccaacaggcagtgggaagacactggccttcgtcatccctgtggtgcaggccctgctttcgagagtggtctgccacatccgtgccctggttgtgctgcccaccaaggagctggcccagcaggtgagcaaagttttcaacatctacacagatgccacacctctgagagtctccctggttacgggacagaagtctctggccaaggagcaggagagcctcgtccagaaaacagctgatgggtaccgctgcttggctgacatcgtggtagccacccccggccgcctggtggaccacatcgaccagaccccaggattcagcctccagcagctccgcttcctgattatcgacgaggctgaccggatgattgacagcatgcatcagtcctggctgccgcgggtggtggcggccgccttccagagcgaggaccccgcggacccctgtgccctgctccagcgaaggcaggcccaggctgtgacagccgccagcacctgctgtccccagatgcccctgcagaagctgctcttctcagctactctgacccagaaccctgaaaagctgcagcagctgggcctccaccagccccggcttttctccacagggctagcacacaggggcctggaagatacagatggggacggggattcggggaagtatgcctttcctgttgggctcacgcaccactacgtgccctgcagcctcagctctaagccgctggtcgtcctgcacctggtcctggagatgggcttctcgagggttctctgcttcactaactcccgagagaactcccacaggctcttcctgctggtgcaagcttttgggggtgtggacgtggctgagttctcctcgcgctacgggcctggccagaggaggatgatcctgaagcagtttgaacaggggaagatccagctgctcatcagcacggacgccaccgcgcgaggcatcgacgtgcagggtgtggagctggtggtgaactacgacgccccccagtacctgagaacctacgtgcaccgggttgggaggacagctcgcgctgggaaaactggacaggccttcacactgctcctgaaagtgcaggagaggagattcctccgaatgctaactgaagctggggcacctgagttgcagcggcacgagctctccagcaagctgctgcagccgctggttcctcggtacgaggaggccctgtcccagctggaggagtctgtcaaggaagagcgcaagcagagggcggcctaggctggggctcagagggccggagggactgaacgctcaccaccctgaccctccttccagagcagtgctgatcactggatcctgtatgtgaggaaaggaatcccccagtggacacagccttcctccccaagcacgtggtctctgcgccaggcagcccgggcgtcagagctcaagcacctgccccgactggagacttcagggcttgtcactttcagagtgtggaggtcaggatggctgcgggcaatgaagccttagtaaaacggtgaaaagtactcccagacggacgcgggcacccgtcatgcttttgctgagagttgggggcattaaccttgagctaatgttaaaaatcaagctcttggccaggcatggtggctcatgcctgtaattccagcactttgggaggccaaggcgggtggatcacctgaggtcacgagttcgagaccagcctgaccaacatggagaaaccctgtctctactaaaaatacaaaattagccaggcgtggtggtgcatgcctgtaatccagctacttgggaggctgaggcaggaaaatggcttgaacccgggaggtggaggttgcagtgagctgagattgcgccactgcactccagcctgggcaacaagagcaaaactccgtctcaaaaaaaaaaattgccgggcgcggtggcaaatgcctgtaatcccagcactttgggaggccgaggcaggtggatcacaaggtcaggagatagagaccatcattgctaacatggtgaaaccccgtctctactaaaaatacaaaaaaaaaaaaaaaacaactagccgggcgtggtggcgggcacctatagtcccagctactcgggaggctgaggcaggagaatggcgtgaacccgggaggcggagcttgcagtgagcggagactgcgccactgcactccagcctgggcaacagagtgagactccgtcaaaaaaaaagctctcctccccagatttgtgaaccttgtgactgttcagtggacacctcacatattgctggtgggaaggtcacgtggagacagctgggcaaagccttggggcgttaaacacagagtcactcatgacccagcacttcctctcctatgcaccttgtacaccccagatcaatgaaacctacatccacacagaaacgtacacaaatctctcagcagcactgttcacagtagccaaaaactagaaaccacatgtccgtcagctgatgaatggagaataaaacgtgggaaatccacaccaggagagaaaaaggagtgaggcaccagcataggcaccccgtggatgaacccggaacctgacgctaactgaaggaaggctccggctatagggagtgtcccaggcacagccagagattgaagggtgccggggccgggagttggtgggggttggggctggggacacagtggccagtgtgtgggtttgttttggggatgatgaaaatgttcttaggttgtgtgtggtgatggctgctcacctctataaaccttttactaaaaaccatggactgggtggatacagtgtgtgaattctctcagtccagtgctttgtttgaaaaaggtggatgatgccaacatcactaaccgccagggagacgcaggccacggccacacccggctcactggagttgtgaggatggaaacaccagcccaccccactcagttcagacctcagcttagatgcaaagaatgtctgggatggggactggcagctgattagagatgcaaccactgaacctgtggactgtgttcaaacaaatgccagcagaacacaaaaggcgactgttacaggaggcagaaagaaatgatttaggtagacggggtaaagccagtccccagcagaaaatttgccttttaacaaaaagcagctcaaaaatagctccctttctaacctcggggttcaaaatcacttctcacgacaagcagccagaaagagcagactgtgaatcacagatgagacagctcgggcacaggagtgcggggggtgtctcctgggtgatcaccaaacttcacacttccacaatgggccccagtaaaacagtggaccctaataagcacattcccgtccccttaggtgcactaagggaagctaaaagcagactgaggggtgcctgtaaccccaagaagatgtctgggagcagacccagagaccctcgcagaaaagtgtcacagagcagcacagactgagtctgacagaaactctctatacaaatagcacaccttgtcccagctaaaaccctgggccctgggaggacaagacatccctcctctaacccctcgtcactagcccatttgtaaaaaccttgacaggccgggcacggtggctcacacctgtaatcccagcactttgggaggctgaggcaggcgcatcacctgaggtcaggagatcgagaccatcctggccaacatggtgaaaccccatctctactaaaaatacaaaacttagctgagcgtggtggcgtgtgcctggagtcccaactactcaagaggctgaggcaggagaatcacttgcccgggaggtggaggttgcagtgggccaagatcagcccactgcactgcagcctggcgacagaaaaaaaagaaaccttgacatctttactacaacttagcaacccgctcaggccccctctgcaacggagagctcttcttcctttttgcttattaaacttctgctccaaa

SEQ ID NO: 251490 - DNA, 2001 bp, Artificial Sequence
  derived and/or modified sequence
atggccctgttctacgtggccagataccccggccccgacgccgccgccgccgccggccccgagggcgccgaggccggcgcccacggcagagccagagccctgctggagagactgcagagcagagccagagagagacagcagcagagagagcccgcccagaccgaggccgccgccagcaccgagcccgccaccagaagaagaagaagacccagaagaagaagaagagtgaacgacgccgagcccggcagccccgaggccccccagggcaagagaagaaaggccgacggcgaggacgccggcgccgagagcaacgaggaggcccccggcgagcccagcgccggcagcagcgaggaggcccccggcgagcccagcgccggcagcagcgaggaggcccccggcgagagaagcaccagcgccagcgccgaggccgcccccgacggccccgccctggaggaggccgccggccccctggtgcccggcctggtgctgggcggcttcggcaagagaaaggcccccaaggtgcagcccttcctgcccagatggctggccgagcccaactgcgtgagaagaaacgtgaccgaggacctggtgcccatcgaggacatccccgacgtgcaccccgacctgcagaagcagctgagagcccacggcatcagcagctacttccccgtgcaggccgccgtgatccccgccctgctggagagcgccgcctgcggcttcctggtgggcagaggcggctacagacccagcgacctgtgcgtgagcgcccccaccggcagcggcaagaccctggccttcgtgatccccgtggtgcaggccctgctgagcagagtggtgtgccacatcagagccctggtggtgctgcccaccaaggagctggcccagcaggtgagcaaggtgttcaacatctacaccgacgccacccccctgagagtgagcctggtgaccggccagaagagcctggccaaggagcaggagagcctggtgcagaagaccgccgacggctacagatgcctggccgacatcgtggtggccacccccggcagactggtggaccacatcgaccagacccccggcttcagcctgcagcagctgagattcctgatcatcgacgaggccgacagaatgatcgacagcatgcaccagagctggctgcccagagtggtggccgccgccttccagagcgaggaccccgccgacccctgcgccctgctgcagagaagacaggcccaggccgtgaccgccgccagcacctgctgcccccagatgcccctgcagaagctgctgttcagcgccaccctgacccagaaccccgagaagctgcagcagctgggcctgcaccagcccagactgttcagcaccggcctggcccacagaggcctggaggacaccgacggcgacggcgacagcggcaagtacgccttccccgtgggcctgacccaccactacgtgccctgcagcctgagcagcaagcccctggtggtgctgcacctggtgctggagatgggcttcagcagagtgctgtgcttcaccaacagcagagagaacagccacagactgttcctgctggtgcaggccttcggcggcgtggacgtggccgagttcagcagcagatacggccccggccagagaagaatgatcctgaagcagttcgagcagggcaagatccagctgctgatcagcaccgacgccaccgccagaggcatcgacgtgcagggcgtggagctggtggtgaactacgacgccccccagtacctgagaacctacgtgcacagagtgggcagaaccgccagagccggcaagaccggccaggccttcaccctgctgctgaaggtgcaggagagaagattcctgagaatgctgaccgaggccggcgcccccgagctgcagagacacgagctgagcagcaagctgctgcagcccctggtgcccagatacgaggaggccctgagccagctggaggagagcgtgaaggaggagagaaagcagagagccgcctag

SEQ ID NO: 251491 - protein, 345 aa, Artificial Sequence
  derived and/or modified sequence
MSSNSSLLVAVQLCYANVNGSCVKIPFSPGSRVILYIVFGFGAVLAVFGNLLVMISILHFKQLHSPTNFLVASLACADFLVGVTVMPFSMVRTVESCWYFGRSFCTFHTCCDVAFCYSSLFHLCFISIDRYIAVTDPLVYPTKFTVSVSGICISVSWILPLMYSGAVFYTGVYDDGLEELSDALNCIGGCQTVVNQNWVLTDFLSFFIPTFIMIILYGNIFLVARRQAKKIENTGSKTESSSESYKARVARRERKAAKTLGVTVVAFMISWLPYSIDSLIDAFMGFITPACIYEICCWCAYYNSAMNPLIYALFYPWFRKAIKVIVTGQVLKNSSATMNLFSEHI

SEQ ID NO: 251492 - protein, 318 aa, Artificial Sequence
  derived and/or modified sequence
VNGSCVKIPFSPGSRVILYIVFGFGAVLAVFGNLLVMISILHFKQLHSPTNFLVASLACADFLVGVTVMPFSMVRTVESCWYFGRSFCTFHTCCDVAFCYSSLFHLCFISIDRYIAVTDPLVYPTKFTVSVSGICISVSWILPLMYSGAVFYTGVYDDGLEELSDALNCIGGCQTVVNQNWVLTDFLSFFIPTFIMIILYGNIFLVARRQAKKIENTESYKARVARRERKAAKTLGVTVVAFMISWLPYSIDSLIDAFMGFITPACIYEICCWCAYYNSAMNPLIYALFYPWFRKAIKVIVTGQVLKNSSATMNLFSE

SEQ ID NO: 251493 - DNA, 1038 bp, Artificial Sequence
  derived and/or modified sequence
atgagcagcaacagcagcctgctggtggccgtgcagctgtgctacgccaacgtgaacggcagctgcgtgaagatccccttcagccccggcagcagagtgatcctgtacatcgtgttcggcttcggcgccgtgctggccgtgttcggcaacctgctggtgatgatcagcatcctgcacttcaagcagctgcacagccccaccaacttcctggtggccagcctggcctgcgccgacttcctggtgggcgtgaccgtgatgcccttcagcatggtgagaaccgtggagagctgctggtacttcggcagaagcttctgcaccttccacacctgctgcgacgtggccttctgctacagcagcctgttccacctgtgcttcatcagcatcgacagatacatcgccgtgaccgaccccctggtgtaccccaccaagttcaccgtgagcgtgagcggcatctgcatcagcgtgagctggatcctgcccctgatgtacagcggcgccgtgttctacaccggcgtgtacgacgacggcctggaggagctgagcgacgccctgaactgcatcggcggctgccagaccgtggtgaaccagaactgggtgctgaccgacttcctgagcttcttcatccccaccttcatcatgatcatcctgtacggcaacatcttcctggtggccagaagacaggccaagaagatcgagaacaccggcagcaagaccgagagcagcagcgagagctacaaggccagagtggccagaagagagagaaaggccgccaagaccctgggcgtgaccgtggtggccttcatgatcagctggctgccctacagcatcgacagcctgatcgacgccttcatgggcttcatcacccccgcctgcatctacgagatctgctgctggtgcgcctactacaacagcgccatgaaccccctgatctacgccctgttctacccctggttcagaaaggccatcaaggtgatcgtgaccggccaggtgctgaagaacagcagcgccaccatgaacctgttcagcgagcacatctag

SEQ ID NO: 251494 - DNA, 957 bp, Artificial Sequence
  derived and/or modified sequence
gtgaacggcagctgcgtgaagatccccttcagccccggcagcagagtgatcctgtacatcgtgttcggcttcggcgccgtgctggccgtgttcggcaacctgctggtgatgatcagcatcctgcacttcaagcagctgcacagccccaccaacttcctggtggccagcctggcctgcgccgacttcctggtgggcgtgaccgtgatgcccttcagcatggtgagaaccgtggagagctgctggtacttcggcagaagcttctgcaccttccacacctgctgcgacgtggccttctgctacagcagcctgttccacctgtgcttcatcagcatcgacagatacatcgccgtgaccgaccccctggtgtaccccaccaagttcaccgtgagcgtgagcggcatctgcatcagcgtgagctggatcctgcccctgatgtacagcggcgccgtgttctacaccggcgtgtacgacgacggcctggaggagctgagcgacgccctgaactgcatcggcggctgccagaccgtggtgaaccagaactgggtgctgaccgacttcctgagcttcttcatccccaccttcatcatgatcatcctgtacggcaacatcttcctggtggccagaagacaggccaagaagatcgagaacaccgagagctacaaggccagagtggccagaagagagagaaaggccgccaagaccctgggcgtgaccgtggtggccttcatgatcagctggctgccctacagcatcgacagcctgatcgacgccttcatgggcttcatcacccccgcctgcatctacgagatctgctgctggtgcgcctactacaacagcgccatgaaccccctgatctacgccctgttctacccctggttcagaaaggccatcaaggtgatcgtgaccggccaggtgctgaagaacagcagcgccaccatgaacctgttcagcgagtag

SEQ ID NO: 251495 - DNA, 1038 bp, Artificial Sequence
  derived and/or modified sequence
atgtcttctaatagcagcctcctggtcgccgtgcagctctgctacgcaaacgtcaacggaagctgcgtgaaaattcctttttcccccgggtctcgcgtcattctgtacattgtgttcggatttggtgccgtgttagccgtgtttggcaacctccttgtgatgatctcaattttgcacttcaagcagctccactctcctactaactttctcgtcgcctctctcgcttgcgccgatttcctggttggggtgaccgttatgccattttctatggttcggacggttgaaagttgttggtacttcggcagatctttctgtacattccatacatgctgtgacgtagcgttttgctatagttcactcttccacctgtgcttcattagtattgacaggtatatcgccgtcactgatccacttgtttatcccactaagttcactgtgtctgtgtccggaatatgtatttcagtttcctggatcctccctctgatgtactcgggtgcggtgttttacactggcgtgtatgatgatggactggaggagttgagcgatgccctgaattgcattggtggctgccagacagtggtgaatcaaaactgggtgcttacagacttcctgtccttcttcattccaacattcattatgatcattctctacggtaatatattcctcgtggctcgacgccaggccaaaaagattgagaatacgggatcaaaaacagaaagttctagcgagagctataaagcacgcgtggccagacgagagcgcaaagctgccaagaccctcggagtaacagtggtggcctttatgattagctggctcccttactccatcgatagcctcatcgacgctttcatgggctttattaccccagcttgcatttacgagatctgttgctggtgtgcttattacaacagcgcgatgaatccgttaatctacgcattattttacccctggttcaggaaggccattaaagtaatcgtgacgggccaggtgctcaaaaacagctccgctacaatgaaccttttctccgaacatatttag

SEQ ID NO: 251496 - DNA, 957 bp, Artificial Sequence
  derived and/or modified sequence
gtgaacgggtcatgcgtgaaaataccctttagccctggaagccgagtgatcttgtacattgtgttcggattcggggcagtgctggccgtctttggcaacctcctcgtaatgatctcaatcctgcatttcaaacaattgcactccccaacaaactttcttgtggcgagcctcgcctgtgctgacttcctcgttggtgtgactgttatgcccttcagcatggtccgcacagtggagagttgttggtattttggtcggagtttctgtacattccacacttgttgcgatgtggctttctgttattcaagcctgttccacctctgctttattagcatcgatagatatatagccgttacggatcctctggtataccctactaagttcacagtatcagtgtcagggatctgcattagcgtctcatggattctcccacttatgtactccggtgctgtgttttacacaggggtctacgacgatggcctcgaagagctcagcgacgcactcaactgcattggcgggtgccaaaccgtggtgaatcaaaactgggtgctcactgacttccttagcttcttcattcctaccttcatcatgatcatcctatatggcaacatcttcttagtcgctcggagacaggccaaaaagatagaaaatacagaatcatataaagcacgcgtggcgcgtagagaaagaaaagccgccaagaccctgggtgtaacagtggtggcattcatgatcagttggttaccatatagcatcgatagcctgattgacgccttcatgggatttatcactccggcatgcatctacgaaatttgctgttggtgcgcatactataactccgccatgaatccactgatttacgccctgttttacccttggtttcgcaaggcgatcaaagtgatcgtcacagggcaggttctgaagaattcttcagcaacgatgaacctcttcagtgaatag

SEQ ID NO: 251497 - DNA, 1038 bp, Artificial Sequence
  derived and/or modified sequence
atgagcagcaacagcagcctgctggtggccgtgcagctgtgctacgccaacgtgaatggcagctgtgtgaagatccccttcagccctggcagcagggtcatcctgtacatcgtgtttggatttggagctgtgctggccgtgtttggaaacctgctggtgatgatcagcatcctgcacttcaagcagctgcacagccccaccaacttcctggtggccagcctggcctgtgccgacttcctggtgggcgtgacagtgatgcccttctccatggtgaggacagtggagagctgctggtacttcggccgctccttctgcaccttccacacctgctgtgatgtggccttctgctacagcagcctcttccacctgtgcttcatcagcattgaccgctacatcgctgtgacagaccccctggtgtaccccaccaagttcaccgtgtctgtgtctggcatctgcatctctgtgtcctggatcctgcccctgatgtacagcggggctgtgttctacacaggagtgtatgatgatggcctggaggagctgagtgatgccctgaactgcattggaggctgccagacagtggtgaaccagaactgggtgctgacagacttcctgtccttcttcatccccaccttcatcatgatcatcctgtatggcaacatcttcctggtggcccggcggcaggccaagaagattgagaacacaggcagcaagacagagagcagcagcgagagctacaaggcccgggtggcccggcgggagaggaaggccgccaagaccctgggcgtgacagtggtggccttcatgatctcctggctgccctacagcattgacagcctgattgatgccttcatgggcttcatcaccccagcctgcatctatgagatctgctgctggtgtgcctactacaacagcgccatgaaccccctcatctatgccctcttctacccctggttcaggaaggccatcaaggtgattgtgacaggccaggtgctgaagaacagcagcgccaccatgaacctcttcagcgagcacatctag

SEQ ID NO: 251498 - DNA, 957 bp, Artificial Sequence
  derived and/or modified sequence
gtgaatggcagctgtgtgaagatccccttcagccctggcagcagggtcatcctgtacatcgtgtttggatttggagctgtgctggccgtgtttggaaacctgctggtgatgatcagcatcctgcacttcaagcagctgcacagccccaccaacttcctggtggccagcctggcctgtgccgacttcctggtgggcgtgacagtgatgcccttctccatggtgaggacagtggagagctgctggtacttcggccgctccttctgcaccttccacacctgctgtgatgtggccttctgctacagcagcctcttccacctgtgcttcatcagcattgaccgctacatcgctgtgacagaccccctggtgtaccccaccaagttcaccgtgtctgtgtctggcatctgcatctctgtgtcctggatcctgcccctgatgtacagcggggctgtgttctacacaggagtgtatgatgatggcctggaggagctgagtgatgccctgaactgcatcggcggctgccagacagtggtgaaccagaactgggtgctgacagacttcctgtccttcttcatccccaccttcatcatgatcatcctgtatggcaacatcttcctggtggcccggcggcaggccaagaagattgaaaatacagagagctacaaggcccgggtggcccggcgggagaggaaggccgccaagaccctgggcgtgacagtggtggccttcatgatctcctggctgccctacagcattgacagcctgattgatgccttcatgggcttcatcaccccagcctgcatctatgagatctgctgctggtgtgcctactacaacagcgccatgaaccccctcatctatgccctcttctacccctggttcaggaaggccatcaaggtgattgtgacaggccaggtgctgaagaacagcagcgccaccatgaacctcttcagcgagtag

SEQ ID NO: 251499 - DNA, 1038 bp, Artificial Sequence
  derived and/or modified sequence
atgagcagcaacagcagcctgctggtggccgtgcagctgtgctacgccaatgtgaacgggtcttgcgtgaagattcctttcagccctggaagtcgagtcatcctctacattgttttcggattcggggccgttttagccgtcttcggcaacctgctggtgatgatatctatactccacttcaagcagctccattctccaaccaactttctagttgcatcactggcctgtgctgattttttggtgggagttactgttatgcctttttcaatggtacggactgttgagtcatgctggtactttggtagatctttttgcaccttccacacatgttgcgacgtggccttttgctactcatctctgttccatctttgcttcataagtattgatcggtatatcgctgtgacagaccccctggtgtacccgacaaagttcacagtaagcgtctccgggatctgcatctccgtatcttggattctccccctcatgtatagcggcgccgttttttataccggcgtgtatgacgacggcttagaggaactgagcgatgctctcaactgcatcggcgggtgtcagaccgttgttaaccagaactgggtgttaacagacttcctttctttcttcattcctacatttattatgataattctgtacggcaacatctttctggtagcccgccggcaggcgaagaaaattgagaataccggtagcaaaactgaatccagctccgagtcttataaagcacgggttgcacggagagagcggaaggctgcgaagacccttggcgtgaccgtagtcgcgtttatgatcagctggctgccctatagcatcgacagtctaatcgatgcattcatgggcttcattacacctgcatgcatctatgaaatctgttgctggtgcgcctattataatagcgctatgaaccccttgatctacgctctgttttacccatggtttcggaaggctatcaaagtgatagtgacggggcaagttctgaagaatagtagtgctaccatgaacctcttctccgaacatatctag

SEQ ID NO: 251500 - DNA, 957 bp, Artificial Sequence
  derived and/or modified sequence
gtgaacggcagctgcgtgaagatccccttcagccccggcagccgggttattctctatattgtgttcggattcggagcagtgttggcagtattcggcaacctgctggttatgattagtatcctgcatttcaagcaactgcacagccccaccaactttctggttgcttcgcttgcatgtgccgactttctggtcggcgtgactgtcatgccgttttctatggtaagaacagtcgagtcctgttggtatttcggaaggtccttctgcacattccacacatgttgtgatgtggcattctgctactcaagcctgtttcacctgtgtttcatcagtatagacagatacattgcagtgactgatccgcttgtgtatccaaccaagttcacagtgtctgtgtccggcatttgcatttcagtgagttggattctacctctgatgtactccggtgcggtcttttatactggggtgtacgacgatggactggaggaattgagtgatgccttaaattgcataggcggatgccagacggtggtcaaccagaactgggtcctcaccgatttcctgtcattcttcatccccactttcatcatgatcattctttacggaaacattttcttagttgcccgcagacaggcgaagaaaattgagaatacggaaagctacaaggcaagagttgcccggagggaaaggaaagctgctaaaacccttggcgtcacagtggtggcattcatgataagttggctaccatattcaatcgactccttgatcgacgcctttatgggtttcatcactcccgcttgtatctacgagatctgttgttggtgcgcctactacaatagcgccatgaacccgctgatttatgcattgttctacccttggttcagaaaagctataaaggtcatcgtcaccggccaggtgctgaaaaattcgtctgcaactatgaacctttttagtgaatag

SEQ ID NO: 251501 - DNA, 1038 bp, Artificial Sequence
  derived and/or modified sequence
atgagcagcaactcctccctgcttgtagccgtgcaactatgttatgccaatgtgaacgggtcgtgcgtgaaaatcccgttctcccctggtagtagagtgatcttatacatcgtcttcggcttcggcgcagtcctggcagtctttggcaacctgttggtcatgatttccatcctgcatttcaaacaactgcacagcccaacaaactttttagtggcgtcactggcctgtgccgactttctggtgggtgtcactgtaatgcctttctcaatggtgcgtactgtggagtcctgttggtattttgggcgttccttctgtacctttcatacgtgttgtgatgtggccttttgttacagtagtctgtttcacctctgcttcatctcaatagatcggtatattgccgtaactgatcccctggtgtatcccactaagtttactgtaagtgtctcggggatctgtatctcagtgtcgtggatcctgcctctaatgtactcaggcgctgtgttctacacaggagtgtacgatgatggacttgaagaactgtctgatgcactcaattgtattggaggctgccagactgtcgtcaaccagaactgggtgctcacggatttcctatcatttttcatcccgacctttattatgattatcctgtatggcaatatctttctggtcgctcgcagacaggcaaagaaaattgaaaacacgggtagcaaaactgagagcagcagcgagagctacaaggcccgagtggctcgtcgcgagaggaaggcagcaaaaaccctgggggtgacggtagtggcttttatgatatcttggctgccttattccatcgacagtctgatcgatgctttcatgggcttcattacccctgcatgcatctacgaaatttgctgttggtgcgcctactacaattcagcaatgaatcctctcatctacgctctgttttatccttggtttaggaaggcaatcaaggtgatcgttactggtcaggttctaaaaaacagttctgctacaatgaacctgttttccgagcacatctag

SEQ ID NO: 251502 - DNA, 957 bp, Artificial Sequence
  derived and/or modified sequence
gttaacggcagctgcgtgaagatcccattctccccaggtagccgtgtgatcctctacattgtatttgggtttggtgcggttctcgcagtctttggtaatctcctggtaatgatcagtatcctccactttaaacagttgcactcaccaacaaatttcctggtcgcatccctggcttgcgccgacttcctcgttggtgtgaccgttatgcccttttccatggtgcggaccgtggaatcctgctggtactttggacggtcattctgcacgttccatacttgctgtgacgtggcattctgctattccagcctctttcatctttgctttatctcaatcgacaggtacatcgccgtgaccgatccacttgtttatccgaccaaattcacggtgagcgtcagtgggatttgtatctccgtttcgtggattttacccctgatgtactcaggtgcggtgttctacaccggcgtctatgacgatgggctggaggaactgtctgatgccctcaattgcatcggcggatgtcaaaccgtggttaatcaaaactgggtgttgaccgattttctcagtttttttattcctacgttcattatgattattttatatggtaacatttttctggtggctcgacggcaggccaagaaaattgagaataccgaatcctataaggccagggtggcacgacgtgagaggaaggccgctaaaaccttgggcgtcactgtggtggccttcatgatctcctggttaccttattctatcgactctctgattgacgcatttatgggcttcattacccccgcatgcatctacgaaatatgttgctggtgtgcctactacaattctgctatgaatccactgatatacgcccttttttacccgtggttcaggaaggccataaaggtgattgtcacaggccaagtgcttaaaaacagttccgcgacaatgaacttgttttcagaatag

SEQ ID NO: 251503 - DNA, 1038 bp, Artificial Sequence
  derived and/or modified sequence
atgagcagcaattcatccctgctggtggctgtgcagctgtgctacgcgaacgtgaatgggtcctgtgtgaaaatccccttctcgccgggatcccgggtgattctgtacatagtgtttggctttggggctgtgctggctgtgtttggaaacctcctggtgatgatttcaatcctccatttcaagcagctgcactctccgaccaattttctcgttgcctctctggcctgcgctgatttcttggtgggtgtgactgtgatgcccttcagcatggtcaggacggtggagagctgctggtattttgggaggagtttttgtactttccacacctgctgtgatgtggcattttgttactcttctctctttcacttgtgcttcatctccatcgacaggtacattgcggttactgaccccctggtctatcctaccaagttcaccgtatctgtgtcaggaatttgcatcagcgtgtcctggatcctgcccctcatgtacagcggtgctgtgttctacacaggtgtctatgacgatgggctggaggaattatctgatgccctaaactgtataggaggttgtcagaccgttgtaaatcaaaactgggtgttgacagattttctatccttctttatacctacctttattatgataattctgtatggtaacatatttcttgtggctagacgacaggcgaaaaagatagaaaatactggtagcaagacagaatcatcctcagagagttacaaagccagagtggccaggagagagagaaaagcagctaaaaccctgggggtcacagtggtagcatttatgatttcatggttaccatatagcattgattcattaattgatgcctttatgggctttataacccctgcctgtatttatgagatttgctgttggtgtgcttattataactcagccatgaatcctttgatttatgctttattttacccatggtttaggaaagcaataaaagttattgtaactggtcaggttttaaagaacagttcagcaaccatgaatttgttttctgaacatatataa

SEQ ID NO: 251504 - DNA, 954 bp, Artificial Sequence
  derived and/or modified sequence
gtgaatgggtcctgtgtgaaaatccccttctcgccgggatcccgggtgattctgtacatagtgtttggctttggggctgtgctggctgtgtttggaaacctcctggtgatgatttcaatcctccatttcaagcagctgcactctccgaccaattttctcgttgcctctctggcctgcgctgatttcttggtgggtgtgactgtgatgcccttcagcatggtcaggacggtggagagctgctggtattttgggaggagtttttgtactttccacacctgctgtgatgtggcattttgttactcttctctctttcacttgtgcttcatctccatcgacaggtacattgcggttactgaccccctggtctatcctaccaagttcaccgtatctgtgtcaggaatttgcatcagcgtgtcctggatcctgcccctcatgtacagcggtgctgtgttctacacaggtgtctatgacgatgggctggaggaattatctgatgccctaaactgtataggaggttgtcagaccgttgtaaatcaaaactgggtgttgacagattttctatccttctttatacctacctttattatgataattctgtatggtaacatatttcttgtggctagacgacaggcgaaaaagatagaaaatactgagagttacaaagccagagtggccaggagagagagaaaagcagctaaaaccctgggggtcacagtggtagcatttatgatttcatggttaccatatagcattgattcattaattgatgcctttatgggctttataacccctgcctgtatttatgagatttgctgttggtgtgcttattataactcagccatgaatcctttgatttatgctttattttacccatggtttaggaaagcaataaaagttattgtaactggtcaggttttaaagaacagttcagcaaccatgaatttgttttctgaa

SEQ ID NO: 251505 - protein, 306 aa, Artificial Sequence
  derived and/or modified sequence
MSNVNLSVSDFWRVMMRVCWLVRQDSRHQRIRLPHLEAVVIGRGPETKITDKKCSRQQVQLKAECNKGYVKVKQVGVNPTSIDSVVIGKDQEVKLQPGQVLHMVNELYPYIVEFEEEAKNPGLETHRKRKRSGNSDSIERDAAQEAEAGTGLEPGSNSGQCSVPLKKGKDAPIKKESLGHWSQGLKISMQDPKMQVYKDEQVVVIKDKYPKARYHWLVLPWTSISSLKAVAREHLELLKHMHTVGEKVIVDFAGSSKLRFRLGYHAIPSMSHVHLHVISQDFDSPCLKNKKHWNSFNTEYFLESQE

SEQ ID NO: 251506 - protein, 192 aa, Artificial Sequence
  derived and/or modified sequence
MMRVCWLVRQDSRHQRIRLPHLEAVVIGRGPETKITDKKCSRQQVQLKAECNKGYVKVKQVGVNPTSIDSVVIGKDQEVKLQPGQVLHMVNELYPYIVEFEEEAKNPGLETHRKRKRSGNSDSIERDAAQEAEAGTGLEPGSNSGQCSVPLKKGKDAPIKKESLGHWSQGLKISMQDPKMQPCTSSCDQPGF

SEQ ID NO: 251507 - DNA, 921 bp, Artificial Sequence
  derived and/or modified sequence
atgtcaaacgtcaatctgagcgttagcgacttttggagagttatgatgagagtttgttggctcgtcaggcaggacagcaggcaccagcgcatccggctgccacatctcgaagcagtagtgattggacgtggccctgagacaaagattaccgataaaaaatgtagtcgacagcaggtccaactcaaggcggagtgtaataaggggtatgtcaaggtaaaacaagttggagtcaacccaacctccattgacagcgtggtcatcgggaaggaccaggaagtgaaactgcagcccgggcaggtactgcacatggttaacgaactatacccgtacatcgttgagtttgaagaggaagctaagaaccccgggttagagacacatcgcaaacggaagcggagtggcaattctgatagcattgagagagacgccgcacaggaagcggaggccggcacaggtttagagccaggttctaacagcggccagtgttctgtgcctcttaagaaaggaaaagacgcgccgataaaaaaagaaagcttgggacactggagccagggtctgaaaatcagtatgcaagaccccaaaatgcaggtatacaaagatgaacaagtcgtagtcattaaagacaaataccctaaggcaaggtaccactggctggtgctcccctggacatcaatatctagcctgaaagctgtcgctcgcgaacacctagaactgttgaaacatatgcataccgtcggagagaaagtgattgtcgacttcgctggttcaagcaaactccgatttagactggggtatcatgccatcccaagcatgagccatgtacacctccacgtcattagccaggacttcgattcaccttgtttgaagaacaagaaacattggaattccttcaataccgagtacttcctggaatctcaagagtag

SEQ ID NO: 251508 - DNA, 921 bp, Artificial Sequence
  derived and/or modified sequence
atgagcaacgtgaacttgagcgtgtccgacttctggcgcgtgatgatgcgggtatgttggcttgtgcggcaggacagtcggcaccaaagaattcggctacctcacctcgaggcagtcgtgatcggccgaggaccggaaaccaagatcaccgacaaaaagtgctctaggcagcaagtccagctgaaagctgagtgcaacaaaggttatgtcaaggtgaaacaggtgggtgtaaatcctaccagcatcgactcagtcgttatcggaaaggaccaggaagtgaaactccagcctggtcaggtgctccacatggtcaacgaactgtatccctatatagtggagttcgaggaggaggccaaaaatcccggtttagagacacaccggaagagaaagcgcagtggcaacagcgactcaattgagagggatgcagctcaggaagcagaggccggtaccggactcgagccagggtctaacagcggacaatgctcagtacctttgaagaaaggcaaggatgccccaatcaaaaaggaaagtctcggccactggtcccaaggattgaagatctcaatgcaggatccgaagatgcaggtgtataaagatgagcaggtggtggtcattaaagataagtacccgaaggcccggtatcactggctggtcctgccttggacgtctatttcctcacttaaagccgtggcccgtgaacacctcgagctcctcaagcacatgcataccgtgggcgagaaagttattgtggattttgctggttcatcaaaactccgctttcgcctcggctaccacgccatccctagcatgtcacatgtccacctacacgttatcagccaggacttcgatagtccctgtctgaagaataaaaagcactggaactcttttaatacagaatattttctggagtctcaagaatag

SEQ ID NO: 251509 - DNA, 921 bp, Artificial Sequence
  derived and/or modified sequence
atgagcaatgtgaacctgtctgtgtctgacttctggagggtgatgatgagggtgtgctggctggtgcggcaggacagccgccaccagaggatccggctgccccacctggaggccgtggtgattggccggggccctgagaccaagatcacagacaagaagtgcagccggcagcaggtgcagctgaaggccgagtgcaacaagggctacgtgaaggtgaagcaggtgggcgtgaaccccaccagcattgacagcgtggtgattggcaaggaccaggaggtgaagctgcagcccggccaggtgctgcacatggtgaatgagctgtacccctacatcgtggagtttgaggaggaggccaagaaccctggcctggagacccacaggaagaggaagaggagcggcaacagcgacagcattgaaagagatgctgcccaggaggccgaggccggcaccggcctggagcccggcagcaacagcggccagtgcagcgtgcccctgaagaagggcaaggatgcccccatcaagaaggagagcctgggccactggagccagggcctgaagatctccatgcaggaccccaagatgcaggtgtacaaggatgagcaggtggtggtgatcaaggacaagtaccccaaggcccgctaccactggctggtgctgccctggaccagcatcagcagcctgaaggctgtggcccgggagcacctggagctgctgaagcacatgcacacagtgggggagaaggtgattgtggactttgctggcagcagcaagctgcgcttccggctgggctaccacgccatccccagcatgagccacgtgcacctgcacgtgatcagccaggactttgacagcccctgcctgaagaacaagaagcactggaacagcttcaacacagagtacttcctggagagccaggagtag

SEQ ID NO: 251510 - DNA, 921 bp, Artificial Sequence
  derived and/or modified sequence
atgagcaacgtgaacctgagcgtgagcgacttctggcgggtgatgatgcgggtgtgttggcttgtgcggcaggatagtagacatcagaggatcaggctccctcatttggaggccgtggtgatcggcaggggcccagagacgaagatcaccgataaaaaatgtagccggcagcaggttcaactaaaagcagagtgcaacaaggggtatgtcaaagtaaagcaggtcggcgtgaatcccacaagtatcgactccgtggttatcgggaaggatcaggaagtgaagctccagccgggccaagtcttgcacatggttaatgaactctatccatatatcgttgagtttgaggaagaagcgaagaacccaggcttagagactcacaggaagcgaaaaaggtctgggaacagcgacagcatagagcgggatgcggcacaagaagcagaagccgggaccggactggagcccggatctaattctggacagtgctctgtgcccctgaagaagggcaaggatgcgccaatcaagaaggagagtctcgggcattggagccagggcctgaaaatttccatgcaggatccaaaaatgcaggtttacaaggacgaacaagtggtggtgatcaaggacaaataccctaaagctaggtaccactggttggtcttgccttggacaagtattagctctctcaaagccgttgctcgtgaacatcttgagcttttgaaacatatgcacaccgtaggagagaaggtcatcgttgacttcgccggaagtagtaaactgaggtttcggctcggctaccatgcgatccccagcatgagccacgtgcacctgcacgtgatctcacaagacttcgactcaccctgccttaaaaataaaaaacactggaatagtttcaacactgaatacttcctggagagccaggaatag

SEQ ID NO: 251511 - DNA, 921 bp, Artificial Sequence
  derived and/or modified sequence
atgagcaacgtgaacctgagcgtgagcgacttctggcgggtgatgatgcgggtgtgctggctcgtcaggcaagattcacgacaccagcgaatacggctgccccacctcgaagctgtggttattgggcggggccccgaaaccaaaattaccgataagaagtgcagcaggcagcaagtgcagctcaaggcagagtgtaacaagggctatgttaaggttaaacaagtcggcgtcaatcctaccagtattgactccgtagtgatcggaaaagaccaagaagtcaagcttcagcctggccaagtgttgcacatggttaatgagctgtacccctatattgtggagttcgaggaggaggccaaaaacccgggccttgaaacccacaggaagcgtaagagaagcggaaattcagacagcattgaacgggatgccgcccaggaagctgaagccggcaccggtctggagcccgggtctaattccggccagtgttcggtacctcttaagaagggtaaggatgccccgatcaagaaggagagtctagggcactggtctcaggggctgaagatttctatgcaagaccctaagatgcaagtgtacaaggatgagcaggttgtggtgattaaagataagtatccaaaggcccggtatcattggctggtgcttccgtggacatctatctcatcccttaaggccgtcgctagagagcacctcgagctgctgaaacacatgcacactgtgggggagaaggtgattgtggactttgcaggatcttctaagttacggtttcgcctgggttaccatgccattccctcaatgtcacacgtccacttacatgtgatctcccaagattttgactccccatgcctgaagaataaaaaacattggaattcctttaatactgaatactttctggagagccaggagtag

SEQ ID NO: 251512 - DNA, 921 bp, Artificial Sequence
  derived and/or modified sequence
atgtcaaatgttaacttgagtgtctctgacttctggcgggtcatgatgagagtgtgttggctggtccgccaggattctcgacatcagcgcattcgcctgccccatctggaagctgtggtgataggtagagggccagaaacaaaaataaccgacaagaagtgttcccgccagcaggtccagcttaaggcagagtgcaataagggatacgtaaaggttaagcaggtaggagtcaacccgacttctattgatagtgtagttattggaaaagatcaggaagtcaaactccagcctggccaggtgttacacatggtcaacgaactctacccttacatcgtggagttcgaggaagaggctaaaaaccctggccttgagacccacaggaagcgcaaaagatcaggaaacagtgattcaattgagcgcgacgctgcccaggaagcggaagctggcacaggcttagagccagggtccaattctggacagtgttccgtgcccctgaaaaaaggcaaagacgctccaatcaaaaaggaaagcctgggtcactggagccagggtctgaagattagcatgcaggacccgaagatgcaggtttacaaggacgaacaggtggttgtgatcaaagataagtatcccaaagctcgataccactggttggtgctcccatggacatctatttcaagcttgaaagcggtcgcacgcgagcacctcgagctgctcaaacacatgcatacagtcggcgagaaggtgatagtcgacttcgccggatcatcaaagctgagatttcgactggggtaccatgccatccccagcatgtctcacgtgcacctccacgtgataagtcaggacttcgattctccctgtctcaagaacaaaaaacactggaattccttcaataccgaatatttcttggagtctcaggaatag

SEQ ID NO: 251513 - DNA, 921 bp, Artificial Sequence
  derived and/or modified sequence
atgagcaatgtgaacctttctgtgagtgacttctggagagtcatgatgagggtgtgctggctggtccggcaagattcccgtcaccaaaggataaggctgccgcatctcgaagcagtggtcatcggacggggtcccgaaaccaaaattaccgataaaaagtgcagtcgacagcaggtccagctcaaggccgagtgtaacaaagggtacgtgaaagtgaaacaggtcggcgtgaatccaacttccatcgatagtgtagtaatcgggaaagaccaagaggttaagctgcaaccgggtcaagtcctacacatggtgaatgaattatatccatacatcgttgagttcgaggaggaagccaagaaccctgggctggaaactcacaggaagaggaaacggtctggtaacagcgactcaattgagagggacgctgcccaggaggccgaggctggaaccggcttagaacctgggagcaactccgggcaatgcagcgtgccccttaagaaaggtaaggatgcccctatcaaaaaagaatctttgggtcactggagccagggcctgaagattagcatgcaggacccgaagatgcaggtgtataaagatgagcaagtggtggtcataaaggacaagtatccaaaggctcggtaccattggcttgtgttaccatggacaagcattagctcactcaaagccgtcgctcgagagcatctggagctcctgaaacatatgcatacagtcggagaaaaggtgattgtggacttcgccggtagcagtaagcttaggttccgtctgggctaccacgccatacccagtatgtcccacgtacatctccacgtgatcagccaggacttcgatagcccgtgcttgaagaataagaaacattggaattcttttaataccgagtactttctcgaatcacaggagtag

SEQ ID NO: 251514 - DNA, 1873 bp, Artificial Sequence
  derived and/or modified sequence
attttcacaacagcctcctgagtcccatcattatcatggtttataggtgaggaaattgagactagggtggtgaagtcacttgcctcaagatgaacagctggtagatcacatgcgtggtggcaccgggtgtggccctggaggactcgtgctagtggatctgtttttctagtgattcttttgttttgtcccttagagtgatgatgcgggtgtgctggttggtgagacaggacagccggcaccagcgaatcagacttccacatttggaagcagttgtgattgggcgtggcccagagaccaagatcactgataagaaatgttctcgacagcaagtacagttgaaagcagagtgtaacaagggatatgtcaaggtaaagcaggtaggagtcaatcccaccagcattgactcagtcgtaattgggaaggaccaagaggtgaagctgcagcctggccaggttctccacatggtgaatgaactttatccatatattgtagagtttgaggaagaggcaaagaaccctggcctggaaacacacaggaagagaaagagatcaggcaacagtgattctatagaaagggatgctgctcaggaagctgaggctgggacagggctggaacctgggagcaactctggccaatgctctgtgcccctaaagaagggaaaagatgcacctatcaaaaaggaatccctgggccactggagtcaaggcttgaagatttctatgcaggaccccaaaatgcagccatgtacatcttcatgtgatcagccaggattttgattctccttgccttaaaaacaaaaaacattggaattctttcaatacagaatacttcctagaatcacaagctgtgatcgagatggtacaagaggctggtagagtaactgtccgagatgggatgcctgagctcttgaagctgccccttcgttgtcatgagtgccagcagctgctgccttccattcctcagctgaaagaacatctcaggaagcactggacacagtgattctgcagagcctgagctgctgctgtggtgtggcccactggagcaaactgctggcacctattctgggttgcttgtgaacttctactcatttcctaaattaaaacatgcagctttttcacaaatttattctattattgagtggccacaatgtagagtggctcaaagtacttcaggattaggaatttgggtttgtcatagatgtattctctggtgagggtggctgggatatacctgacccaccatcttcagaaggacccatgtcaggtctgaccattgggagcaaagccatgttcacactgacctaatgcagagtatggaagcattgggctggttatacatttctgtttcttagatttatcctccgcctctgtaggcatggacaacctttaatcagagcatctagagtggcctcttgtttatcctgaagatactgatgggtcttgttttctgttagtctgttttgtaatattcttttcccttccttcatggggaggcttagtttgtccagtccttccatgcccttctatcccagattacctaaatgttcccttctcaggaattctgtctcatcagttcttcacagtgagaaaagaggctagatgatggtgtggggggttggagttttcttctaataccgagggttcctggctgtgaggaaacagccacatgttcgtcatgattgagctgtgaagtcttcttggacctgttgtctgaaaataaagttaatttgtttgaggcatctctcttaagtaggtggaaactattgaagttcagctaacaatcacagcataggttctgatgcatggaaaggtggttggtgaatgaaaaagttgcgtagagccactactttctttttccctgagaataaatttgg

SEQ ID NO: 251515 - DNA, 921 bp, Artificial Sequence
  derived and/or modified sequence
atgagcaacgtgaacctgagcgtgagcgacttctggagagtgatgatgagagtgtgctggctggtgagacaggacagcagacaccagagaatcagactgccccacctggaggccgtggtgatcggcagaggccccgagaccaagatcaccgacaagaagtgcagcagacagcaggtgcagctgaaggccgagtgcaacaagggctacgtgaaggtgaagcaggtgggcgtgaaccccaccagcatcgacagcgtggtgatcggcaaggaccaggaggtgaagctgcagcccggccaggtgctgcacatggtgaacgagctgtacccctacatcgtggagttcgaggaggaggccaagaaccccggcctggagacccacagaaagagaaagagaagcggcaacagcgacagcatcgagagagacgccgcccaggaggccgaggccggcaccggcctggagcccggcagcaacagcggccagtgcagcgtgcccctgaagaagggcaaggacgcccccatcaagaaggagagcctgggccactggagccagggcctgaagatcagcatgcaggaccccaagatgcaggtgtacaaggacgagcaggtggtggtgatcaaggacaagtaccccaaggccagataccactggctggtgctgccctggaccagcatcagcagcctgaaggccgtggccagagagcacctggagctgctgaagcacatgcacaccgtgggcgagaaggtgatcgtggacttcgccggcagcagcaagctgagattcagactgggctaccacgccatccccagcatgagccacgtgcacctgcacgtgatcagccaggacttcgacagcccctgcctgaagaacaagaagcactggaacagcttcaacaccgagtacttcctggagagccaggagtag

SEQ ID NO: 251516 - protein, 210 aa, Artificial Sequence
  derived and/or modified sequence
MGSLPSRRKSLPSPSLSSSVQGQGPVTMEAERSKATAVALGSFPAGGPAELSLRLGEPLTIVSEDGDWWTVLSEVSGREYNIPSVHVAKVSHGWLYEGLSREKAEELLLLPGNPGGAFLIRESQTRRGSYSLSVRLSRPASWDRIRHYRIHCLDNGWLYISPRLTFPSLQALVDHYSEGWPAPWQGYTPTCDCAEDTTQLERAGQLPPVF

SEQ ID NO: 251517 - DNA, 633 bp, Artificial Sequence
  derived and/or modified sequence
atgggcagcctgcccagcagaagaaagagcctgcccagccccagcctgagcagcagcgtgcagggccagggccccgtgaccatggaggccgagagaagcaaggccaccgccgtggccctgggcagcttccccgccggcggccccgccgagctgagcctgagactgggcgagcccctgaccatcgtgagcgaggacggcgactggtggaccgtgctgagcgaggtgagcggcagagagtacaacatccccagcgtgcacgtggccaaggtgagccacggctggctgtacgagggcctgagcagagagaaggccgaggagctgctgctgctgcccggcaaccccggcggcgccttcctgatcagagagagccagaccagaagaggcagctacagcctgagcgtgagactgagcagacccgccagctgggacagaatcagacactacagaatccactgcctggacaacggctggctgtacatcagccccagactgaccttccccagcctgcaggccctggtggaccactacagcgagggctggcccgccccctggcagggctacacccccacctgcgactgcgccgaggacaccacccagctggagagagccggccagctgccccccgtgttctag

SEQ ID NO: 251518 - DNA, 633 bp, Artificial Sequence
  derived and/or modified sequence
atggggtcgcttccatcaaggcgaaagagcctaccttccccaagcttaagtagtagcgttcaggggcagggtccagtaacaatggaggcggagagaagcaaagcgacggcagttgcactgggttcctttccagctggagggccagctgaactcagccttcgactcggggagccactgactattgtatccgaggacggggattggtggaccgtactgtccgaagttagcggaagggagtacaatattcctagtgtgcacgtcgcgaaggtgtcccatggctggctctatgaaggcttgagccgggagaaggccgaggagttgctgctcctcccaggcaatcctggcggggcttttcttattagggagagccagactcgcagaggttcttactccctaagcgttagactgtctaggcctgcatcctgggatcgcatccgacattaccgaattcactgtttggacaatggatggctctacatcagtccacgactcacttttccgtcactgcaagccctggtggatcactacagtgaagggtggccggcaccctggcaaggatacacccccacatgtgattgcgccgaagacaccacacaactcgagcgtgctgggcagctgccacccgtgttttag

SEQ ID NO: 251519 - DNA, 633 bp, Artificial Sequence
  derived and/or modified sequence
atgggcagcctgcccagcaggaggaagagcctgcccagccccagcctgagcagctctgtgcagggccagggccctgtgaccatggaggccgagaggagcaaggccacagctgtggccctgggcagcttccctgctgggggccctgctgagctgagcctgcggctgggggagcccctgaccatcgtgtctgaagatggagactggtggacagtgctgtctgaggtgtctggccgggagtacaacatccccagcgtgcacgtggccaaggtgagccacggctggctgtatgagggcctgagccgggagaaggccgaggagctgctgctgctgcccggcaaccctgggggcgccttcctgatccgggagagccagacccggcggggcagctacagcctgtctgtgcggctgagcaggcctgcctcctgggaccgcatccgccactaccgcatccactgcctggacaatggctggctgtacatcagcccccggctgaccttccccagcctgcaggccctggtggaccactacagcgagggctggccagccccctggcagggctacacccccacctgtgactgtgccgaggacaccacccagctggagagagctggccagctgccccctgtgttctag

SEQ ID NO: 251520 - DNA, 633 bp, Artificial Sequence
  derived and/or modified sequence
atgggcagcctgcccagccggcggaagagcctgcccagccccagcctgagcagctctgtgcagggtcaggggccggtgacgatggaggctgagaggtccaaagccacagccgtcgccctgggaagctttccagccggggggccagcggagttgagtctgaggctgggagaaccccttacaattgtgtccgaagacggcgactggtggactgtgttgtcagaggtctctgggcgtgagtataatattccaagtgtgcacgtcgccaaggtgagtcacggctggctgtatgaagggctgagcagggagaaggcagaggaactcctgttactcccgggaaaccccgggggcgctttcctaatccgggagagccagactcggcgcggatcatactcactgagcgtgcgcctttcccgaccagcctcatgggatagaattagacactaccggattcactgtctggacaatgggtggctgtacatatcgcctcgtttgactttcccttctttacaggctctggtggaccattattctgaaggttggcctgctccctggcaggggtacacacctacctgcgattgtgccgaggacacaactcaactcgagcgcgctggtcagctgccaccagtattttag

SEQ ID NO: 251521 - DNA, 633 bp, Artificial Sequence
  derived and/or modified sequence
atgggaagtctacccagtcgcaggaaaagtctcccctccccaagtctgtccagctccgtccaggggcagggtcctgtaacaatggaagccgaaaggtcaaaggcgactgcggtggctctcgggagctttcccgctgggggaccagccgagctctctctgcgccttggtgagccgctgaccattgtgagcgaagacggggattggtggacagtcctttctgaggtctctgggagagaatataatattccctctgtgcatgtcgcaaaggtaagccacggatggctgtatgaaggattgagtagggagaaagctgaggagctactcttgctccctgggaatcccggaggcgcattcctgatacgggagtctcagactcggagaggaagctacagcctatccgtgcggctttcccgcccagcctcatgggatcgtatccggcactaccgcatccattgtctcgataacgggtggctgtacatttcacctcgcttgacatttcctagccttcaagccctggtcgaccactattctgagggttggccagccccttggcagggttatacccctacctgtgattgtgcagaggatactacacagttggaaagagcagggcagctgcctcccgtcttctag

SEQ ID NO: 251522 - DNA, 2171 bp, Artificial Sequence
  derived and/or modified sequence
tgcgtctcagcagagctgtcttcccaagcctttgatgacaaaccaatttccctcgatgatgtgcttctgagtgctctgctgaggaacaatgggaagtctgcccagcagaagaaaatctctgccaagcccaagcttgagttcctctgtccaaggccagggacctgtgaccatggaagcagagagaagcaaggccacagccgtggccctgggcagtttcccggcaggtggcccggccgagctgtcgctgagactcggggagccattgaccatcgtctctgaggatggagactggtggacggtgctgtctgaagtctcaggcagagagtataacatccccagcgtccacgtggccaaagtctcccatgggtggctgtatgagggcctgagcagggagaaagcagaggaactgctgttgttacctgggaaccctggaggggccttcctcatccgggagagccagaccaggagaggctcttactctctgtcagtccgcctcagccgccctgcatcctgggaccggatcagacactacaggatccactgccttgacaatggctggctgtacatctcaccgcgcctcaccttcccctcactccaggccctggtggaccattactctgagggctggcccgctccctggcaaggatatacccctacctgtgactgtgcagaggacaccactcaactggaaagagctggacagctccctcctgttttctgaagctgccacaggggaggagtctcttctcagtgagggtctccgggagtccctcagcttctacatcagcctgaatgacgaggctgtctctttggatgatgcctaggcccaaaggagaggccaaaagggaaaccaaggctgcacacctagaaccccaattcagcctcctgggcaccccagaggcaaggctgtgcactcagggagggagggtgggacacagaggtgcatctagggtcccacctgtacccttgctctttcctctcttagcccttagaagtcacctacttccttccagtgccatgatcccacctgcgacctctagtgcgagtgcagagaaggtgggaccagggccagggttccaaaaagagaataagcctcctggggggtctgacctagttagttcttgagtttggggtttccagtaccatctggatgccctgcctgttgagccccattctacatccccaccattaaccaggccccacccacaaggtagaaacaacccctagagtcaacgagaaagtcattttcagaaaatctacaagtctcgttgagaccaccaccatacctcagaaggtaggactgtggcctagaagggaaaggaaagctgagatgatgtcttaccgtagcagcagatcttggatggtccaggctctatgtgacctccagagcaaagagaaagacttcggacagtctaggtcctcaaatgtcccccattgaggacaacagccccagctctttttcttttttttgagacggagtcttgccctgttgcccatgctggagtgcaatggcacgatctcagctcactgcaacctccatctcctggattcaaacaattctcctgcctcagcctccagaatagctgggattacaggcgtacaccaccatgcctggctaatttttttgtatttttagtagacatggggtttcaccacattggccaggctggtgtcgaactcctgacctcaggtgatccacccaccttggcctcccaaagtgctgggattacaggtgtgagccacggcacccagcctagctctcagatctctatttcattttgtggcttaccattccctagcacactggccttgccatcttgtggccgaataaaaaataacacctcttaagtctagcacactgcagtgaggccaggcacctcagtgctgggcaggggcatcagaaggtgctaagccctctctccacaatgccaagacggagaccacagcctacaccaaatccagcccttgatttccctgctgcctccataaacagaaagaggtctgctggatccgctaagggatcagggagaggaagaaagagggatggggtgggaggcaccccctccagtgctcctactggttcccaagctacaggtggggtgggaaaggctttatcaggtatcatcaacaggttctcaattaaagatttgatttattcaagtatgtgaaaa

SEQ ID NO: 251523 - protein, 397 aa, Artificial Sequence
  derived and/or modified sequence
MGQAGCKGLCLSLFDYKTEKYVIAKNKKVGLLYRLLQASILAYLVVWVFLIKKGYQDVDTSLQSAVITKVKGVAFTNTSDLGQRIWDVADYVIPAQNEGIPDGACSKDSDCHAGEAVTAGNGVKTGRCLRRENLARGTCEIFAWCPLETSSRPEEPFLKEAEDFTIFIKNHIRFPKFNFSNNVMDVKDRSFLKSCHFGPKNHYCPIFRLGSVIRWAGSDFQDIALEGGVIGINIEWNCDLDKAASECHPHYSFSRLDNKLSKSVSSGYNFRFARYYRDAAGVEFRTLMKAYGIRFDVMVNGKGAFFCDLVLIYLIKKREFYRDKKYEEVRGLEDSSQEAEDEASGLGLSEQLTSGPGLLGMPEQQELQEPPEAKRGSSSQKGNGSVCPQLLEPHRST

SEQ ID NO: 251524 - DNA, 1194 bp, Artificial Sequence
  derived and/or modified sequence
atgggccaggccggctgcaagggcctgtgcctgagcctgttcgactacaagaccgagaagtacgtgatcgccaagaacaagaaggtgggcctgctgtacagactgctgcaggccagcatcctggcctacctggtggtgtgggtgttcctgatcaagaagggctaccaggacgtggacaccagcctgcagagcgccgtgatcaccaaggtgaagggcgtggccttcaccaacaccagcgacctgggccagagaatctgggacgtggccgactacgtgatccccgcccagaacgagggcatccccgacggcgcctgcagcaaggacagcgactgccacgccggcgaggccgtgaccgccggcaacggcgtgaagaccggcagatgcctgagaagagagaacctggccagaggcacctgcgagatcttcgcctggtgccccctggagaccagcagcagacccgaggagcccttcctgaaggaggccgaggacttcaccatcttcatcaagaaccacatcagattccccaagttcaacttcagcaacaacgtgatggacgtgaaggacagaagcttcctgaagagctgccacttcggccccaagaaccactactgccccatcttcagactgggcagcgtgatcagatgggccggcagcgacttccaggacatcgccctggagggcggcgtgatcggcatcaacatcgagtggaactgcgacctggacaaggccgccagcgagtgccacccccactacagcttcagcagactggacaacaagctgagcaagagcgtgagcagcggctacaacttcagattcgccagatactacagagacgccgccggcgtggagttcagaaccctgatgaaggcctacggcatcagattcgacgtgatggtgaacggcaagggcgccttcttctgcgacctggtgctgatctacctgatcaagaagagagagttctacagagacaagaagtacgaggaggtgagaggcctggaggacagcagccaggaggccgaggacgaggccagcggcctgggcctgagcgagcagctgaccagcggccccggcctgctgggcatgcccgagcagcaggagctgcaggagccccccgaggccaagagaggcagcagcagccagaagggcaacggcagcgtgtgcccccagctgctggagccccacagaagcacctag

SEQ ID NO: 251525 - DNA, 1194 bp, Artificial Sequence
  derived and/or modified sequence
atggggcaggccggatgcaaaggactgtgtctctcactgttcgattacaagacagaaaagtatgtgatcgccaagaacaaaaaggtgggtctgctctatcgcctgttacaggcatcgatactcgcttatctcgtggtctgggtttttctgatcaaaaaaggatatcaggacgtggacaccagtctccagtccgctgtgattactaaggtcaaaggcgtcgcattcacaaacacgagcgaccttggccagaggatctgggacgtagccgattatgttatccctgcccaaaatgagggaattcctgacggagcttgtagcaaagacagtgattgccatgccggcgaggcagtgaccgccgggaatggtgtgaaaactggacggtgcctgaggcgcgagaacctggcaaggggcacatgcgagatcttcgcttggtgtccactggagactagtagtaggcccgaggaaccgttcttaaaggaagccgaggacttcactatctttatcaagaatcacatcaggttcccaaaattcaacttctccaataatgttatggatgtgaaggatagatcctttctgaagtcctgtcatttcggcccaaagaatcactactgtccgatatttcgcttaggctctgttatccggtgggccggatcagacttccaagacatcgcactggagggcggtgtaatcggaattaatatcgaatggaactgcgacttggataaggccgcttcagagtgccacccccactattccttttcacggttggacaacaagctcagcaagtctgtcagctctggttataactttcgctttgctcggtactacagggatgctgccggtgtcgaatttcggacactgatgaaagcgtatggcattcgattcgatgtgatggtgaatggaaagggcgcatttttttgcgatctagttttaatttaccttatcaaaaagagggaattttatagagataagaaatacgaagaggtcagaggtctcgaagatagcagccaggaggccgaggacgaggcatctggactaggcctttccgaacagttaaccagcggcccagggttgctcggcatgcccgaacagcaggaactgcaggagccgcccgaggccaagagaggatcgtcttcacaaaagggcaacggatctgtgtgccctcagctcttagagccccacagatccacttag

SEQ ID NO: 251526 - DNA, 1194 bp, Artificial Sequence
  derived and/or modified sequence
atgggccaggccggctgcaagggcctgtgcctgagcctgtttgactacaagacagagaagtatgtgattgccaagaacaagaaggtgggcctgctgtaccgcctgctgcaggccagcatcctggcctacctggtggtgtgggtgttcctgatcaagaagggctaccaggatgtggacaccagcctgcagagcgctgtgatcaccaaggtgaagggcgtggccttcaccaacaccagtgacctgggccagaggatctgggatgtggccgactatgtgatcccagcccagaatgaaggcatcccagatggagcctgcagcaaggacagcgactgccacgccggggaggccgtgacagctggaaatggagtgaagacaggccgctgcctgcggcgggagaacctggcccggggcacctgtgagatctttgcctggtgccccctggagaccagcagcaggcctgaggagcccttcctgaaggaggccgaggacttcaccatcttcatcaagaaccacatccgcttccccaagttcaacttcagcaacaacgtgatggatgtgaaggacaggagcttcctgaagagctgccacttcggccccaagaaccactactgccccatcttccggctgggcagcgtcatccgctgggccggcagtgacttccaggacatcgccctggagggcggcgtcatcggcatcaacatcgagtggaactgtgacctggacaaggccgccagcgagtgccacccccactacagcttcagccggctggacaacaagctgagcaagtctgtgagcagcggctacaacttccgctttgcccgctactacagagatgctgctggggtggagttccgcaccctgatgaaggcctacggcatccgctttgatgtgatggtgaatggcaagggggccttcttctgtgacctggtgctgatctacctgatcaagaagcgggagttctacagagacaagaagtatgaggaggtgcggggcctggaggacagcagccaggaggccgaggatgaggccagcggcctgggcctgtctgagcagctgaccagcggccctggcctgctgggcatgcctgagcagcaggagctgcaggagcccccagaggccaagaggggcagcagcagccagaagggaaatggatctgtgtgcccccagctgctggagccccacaggagcacctag

SEQ ID NO: 251527 - DNA, 1194 bp, Artificial Sequence
  derived and/or modified sequence
atgggccaggccggctgcaagggcctgtgcctgagcctgttcgactacaagaccgaaaagtacgtgattgctaagaacaagaaggtcggtctgttatatcggctgttgcaggcgtccattctcgcctatttggtggtatgggtcttcctcatcaaaaaaggataccaagacgtggatacctctctccagtcagctgtgattacaaaagtgaagggcgtggcattcacaaatacctcagacctcggacaacgtatttgggatgttgcagactacgtgattcctgcacaaaatgagggcattcctgacggagcctgttcaaaggattccgactgtcacgccggagaggctgtgacggccggtaatggtgtgaagacaggcagatgcctgaggcgcgagaacttggcgagggggacgtgcgaaatcttcgcgtggtgtccgctggagacctcatctcgacctgaagaaccattccttaaggaagcagaagattttaccatctttataaaaaaccacatcaggtttccaaaatttaatttttcaaacaatgtgatggatgtgaaagataggagttttttgaaaagctgtcacttcgggccgaagaaccactactgtcccatatttagactaggcagcgtgatccgatgggccggctctgactttcaggatattgctttagaaggcggggttattggcatcaatattgaatggaattgtgacctggacaaagctgcctcggagtgccacccccattacagtttctccaggttggataacaagttgtcaaagtcggtgtcttccggatataacttccgctttgccaggtattatagggacgccgcgggtgtcgagtttaggaccttgatgaaagcctatgggatccggttcgatgtcatggttaacggcaaaggggccttcttttgtgatttggtcctcatttacctgatcaagaagcgggaattttaccgcgataagaaatatgaagaggtgcggggactggaggactcctcccaggaagctgaggacgaggctagcggccttggtttgagcgagcaattaacctcaggaccagggcttctaggcatgccggaacagcaagagctccaggagccacccgaggccaagagaggctcctcttcacaaaagggaaatgggagcgtctgcccacagttgctcgaaccgcataggtccacctag

SEQ ID NO: 251528 - DNA, 1863 bp, Artificial Sequence
  derived and/or modified sequence
ggtccgcaagcccggctgagagcgcgccatggggcaggcgggctgcaaggggctctgcctgtcgctgttcgactacaagaccgagaagtatgtcatcgccaagaacaagaaggtgggcctgctgtaccggctgctgcaggcctccatcctggcgtacctggtcgtatgggtgttcctgataaagaagggttaccaagacgtcgacacctccctgcagagtgctgtcatcaccaaagtcaagggcgtggccttcaccaacacctcggatcttgggcagcggatctgggatgtcgccgactacgtcattccagcccagaatgaaggcattcctgatggcgcgtgctccaaggacagcgactgccacgctggggaagcggttacagctggaaacggagtgaagaccggccgctgcctgcggagagagaacttggccaggggcacctgtgagatctttgcctggtgcccgttggagacaagctccaggccggaggagccattcctgaaggaggccgaagacttcaccattttcataaagaaccacatccgtttccccaaattcaacttctccaacaatgtgatggacgtcaaggacagatctttcctgaaatcatgccactttggccccaagaaccactactgccccatcttccgactgggctccgtgatccgctgggccgggagcgacttccaggatatagccctggagggtggcgtgataggaattaatattgaatggaactgtgatcttgataaagctgcctctgagtgccaccctcactattcttttagccgtctggacaataaactttcaaagtctgtctcctccgggtacaacttcagatttgccagatattaccgagacgcagccggggtggagttccgcaccctgatgaaagcctacgggatccgctttgacgtgatggtgaacggcaagggtgctttcttctgcgacctggtactcatctacctcatcaaaaagagagagttttaccgtgacaagaagtacgaggaagtgaggggcctagaagacagttcccaggaggccgaggacgaggcatcggggctggggctatctgagcagctcacatctgggccagggctgctggggatgccggagcagcaggagctgcaggagccacccgaggcgaagcgtggaagcagcagtcagaaggggaacggatctgtgtgcccacagctcctggagccccacaggagcacgtgaattgcctctgcttacgttcaggccctgtcctaaacccagccgtctagcacccagtgatcccatgcctttgggaatcccaggatgctgcccaacgggaaatttgtacattgggtgctatcaatgccacatcacagggaccagccatcacagagcaaagtgacctccacgtctgatgctggggtcatcaggacggacccatcatggctgtctttttgccccaccccctgccgtcagttcttcctttctccgtggctggcttcccgcactagggaacgggttgtaaatggggaacatgacttccttccggagtccttgagcacctcagctaaggaccgcagtgccctgtagagttcctagattacctcactgggaatagcattgtgcgtgtccggaaaagggctccatttggttccagcccactcccctctgcaagtgccgcagcttccctcagagcatactctccagtggatccaagtactctctctcctaaagacaccaccttcctgccagctgtttgcccttaggccagtacacagaattaaagtgggggagatggcagacgctttctgggacctgcccaagatatgtattctctgacactcttatttggtcataaaacaataaatggtgtcaatttcaaa

SEQ ID NO: 251529 - DNA, 1194 bp, Artificial Sequence
  derived and/or modified sequence
atgggacaggccggttgtaagggtctttgtctgtcactttttgattacaagaccgaaaagtatgtgatcgccaaaaacaagaaggtggggctactgtacaggcttctccaggcatccatccttgcctatctcgtcgtgtgggtgtttttaattaagaaggggtaccaagatgttgatacatccttgcagagcgctgtgataacaaaggtgaagggcgtggcattcacaaacacgtctgatttaggacagcgcatttgggatgtcgcagactatgtgatcccagctcagaacgagggcattcccgatggtgcgtgtagcaaggattccgattgccacgcaggagaggccgttacggccggaaacggcgtgaaaaccggccgatgccttagaagggagaacctcgcacgtggcacgtgcgagattttcgcatggtgtcccctggaaacaagtagccgcccagaagaaccctttctgaaggaggcagaggattttacgatctttatcaagaaccatatacgattccccaaattcaattttagcaacaatgtgatggacgttaaagaccggtcattcttgaaatcatgccattttggtcctaagaaccattactgcccaatattccggctggggtccgtcattcgatgggcagggtccgactttcaggacatcgccctggagggtggagttataggaataaacatcgagtggaactgcgacctcgacaaggctgcgtcagagtgccaccctcattattccttcagtcgcctcgacaacaaacttagtaaatctgtctcatccggatacaatttcaggttcgctaggtactacagagacgcagccggtgtcgagttccgcaccctgatgaaggcttatggaattagattcgacgttatggtaaacggcaaaggcgcttttttctgcgatctcgttctgatatacctgattaagaagcgcgagttttacagggataagaagtatgaagaggtacggggtctcgaagattcaagtcaggaggcagaagacgaagcctcaggtttgggactatccgaacagctgacctctggcccaggccttctcgggatgccagagcagcaggaactacaggagccacccgaggccaagcgcggaagcagcagtcaaaagggaaatggatcggtttgcccacaacttctggagccccaccgaagcacatag

SEQ ID NO: 251530 - DNA, 1302 bp, Artificial Sequence
  derived and/or modified sequence
atggccgcccgagtgctgatcattggaagtggcgggagggagcataccctggcctggaagcttgcccagtcacaccacgtcaagcaagtactcgtggccccaggcaacgccggaacagcatgcagtgaaaagatcagcaacactgccatatcaatttccgatcacacagcactggcacaattctgcaaagagaagaagatcgaatttgtcgtcgtcgggccagaagcgccgctggcagccggtattgtgggcaatcttaggagcgcaggagtacagtgctttggaccaaccgccgaggctgcccagctggaatcaagcaagaggttcgcaaaagaatttatggatcgtcacggaattccaaccgcgcagtggaaagcatttaccaagcctgaagaagcctgcagctttatattgtctgcagacttcccggccctggtggtaaaggcgtctggtttggctgccgggaagggagtcattgtagctaaaagcaaggaggaggcctgcaaggcggttcaggagataatgcaggagaaggctttcggcgccgcaggagagacgattgtgattgaagaattgttggatggagaagaggtttcatgcctgtgtttcaccgatggcaaaaccgtggctcctatgcctcctgcgcaggaccataagaggctgctcgaaggagatgggggccctaataccggtggcatgggcgcctattgccccgctccccaggtcagcaacgacctgctgctcaaaattaaagacacagtgcttcagcgcacagtggacggcatgcaacaagaaggtaccccttacacagggattttatacgccggtatcatgcttacaaagaatggccccaaagtgctggagtttaattgccggttcggagaccccgagtgtcaggtgattctcccattattgaagagcgacttatacgaagttatccaaagcaccctcgatgggctgctgtgtacctccctcccggtctggttagagaaccacaccgcattaaccgtagtgatggcttcgaagggctatccaggggactacacaaagggggttgagatcactggttttcccgaagcgcaggccctgggcctagaggtttttcatgccgggaccgcactgaagaatgggaaagtggttacacacggaggcagagtcctggcagtgaccgccatccgggagaacttgattagtgcattggaggaggccaagaagggcctcgcagctatcaaatttgaaggagcaatttaccgcaaggacgtgggcttcagagccatcgcctttctgcagcaacccaggtag

SEQ ID NO: 251531 - DNA, 699 bp, Artificial Sequence
  derived and/or modified sequence
atggccgccagagtcttgataatcggatccggtggccgcgaacacaccctggcctggaaattggcacaatcacaccatgtcaaacaggtgctggtcgccccaggaaacgccggcactgcctgttccgaaaaaatctcaaatacagcaatctccatttcggatcacactgcactagcacagttttgcaaggagaaaaagatagagttcgtggtggttggccccgaggcccccctcgccgcagggattgtcgggaacctgcggtcagccggcgtgcagtgttttggacccacggctgaggccgcccagttggaatctagcaagcggttcgcgaaagagtttatggaccggcatggaatccccacagcccagtggaaggcctttaccaagccagaagaggcctgcagctttattctgtctgccgatttccctgccctagttgtgaaagcctccggactggcggccggtaaaggcgtgatcgtggctaagagcaaagaagaagcttgcaaagcagtgcaagaaatcatgcaggaaaaagccttcggagccgctggtgaaacaatcgtgattgaggagctgttagatggagaagaggtgagctgtctttgtttcaccgatgggaaaactgttgctccaatgcccccggcccaagaccacaagagactgcttgagggggatggcgggcctaacaccggaggatag

SEQ ID NO: 251532 - DNA, 726 bp, Artificial Sequence
  derived and/or modified sequence
atggcggcgcgggttcttatcatcggaagcggtggcagagaacacacactggcctggaaacttgctcagtcacaccatgtgaaacaggtgcttgtggctccaggaaatgcaggcaccgcttgtagcgagaagattagcaataccgcaatctccattagtgaccacacagctctcgcccaattctgtaaggagaagaagatcgaatttgtcgtggtggggcccgaagcgcccttggccgctggcatcgttgggaatctcagatctgcaggagtccagtgctttggaccgacagctgaggcggcccagttggagtcctccaaacgtttcgccaaggaattcatggaccgccacggaatacccactgcccaatggaaagcgttcactaaaccggaggaggcttgttcctttatcctgtccgccgactttccagccctcgtagtgaaagctagcggactggccgctgggaagggtgtaatcgtggcaaagagcaaggaggaagcttgcaaagcggttcaggagattatgcaggagaaggcctttggtgccgccggagagacgatcgtgatcgaggaacttctggacggcgaggaggttagttgcctctgctttacagacggcaaaactgtagctcctatgccccctgcccaggatcacaagcgtctgttagagggcgacggtgggcccaatactggcggcatgggcgcctactgccctgcaccacagtag

SEQ ID NO: 251533 - DNA, 417 bp, Artificial Sequence
  derived and/or modified sequence
atggcagccagagtgctcattattggttccggtggacgcgaacataccttagcatggaaactggcgcagtcgcaccatgtcaagcaggtactggtggcacctgggaacgcaggcacagcctgctccgagaagatctctaataccgcgataagcatttccgaccacaccgcattggctcagttttgcaaagagaagaaaattgaattcgtggtcgtgggacccgaagcgcctttggccgcgggcatcgttggtaatctgcggtcagcgggagtgcaatgtttcggaccaacagcggaagcagcgcagttagaatcatctaagaggtttgcaaaagaattcatggacaggcacggcatccctaccgcacagtggaaagcctttaccaaaccagaagaagcatgctcctttattttatag

SEQ ID NO: 251534 - DNA, 411 bp, Artificial Sequence
  derived and/or modified sequence
atggctgccagggtgcttatcatcggaagcggcggccgggaacacacactggcatggaaactcgcacagtctcatcacgtgaaacaagtgcttgtcgcaccgggtaatgccggaaccgcctgttccgagaagatctctaacaccgccatctcaatctcagatcataccgcactggcccaattttgcaaagaaaagaaaatcgagttcgttgtggtgggaccggaagcaccattagcagcgggtattgtgggtaacctaaggagcgccggcgtgcaatgcttcggacctaccgcggaggcagcccagctggagtccagcaagagatttgctaaggagtttatggataggcacgggattccgactgcccagtggaaggcctttacaaagcccgaggaggcatgtagtttctag

SEQ ID NO: 251535 - DNA, 1302 bp, Artificial Sequence
  derived and/or modified sequence
atggccgcccgggtgctgatcatcggcagcggcggccgggagcacaccctggcctggaagctggcccagagccaccacgtgaagcaggtgctggtggcccctggaaatgccggcacagcctgcagcgagaagatcagcaacacagccatcagcatcagtgaccacacagccctggcccagttctgcaaggagaagaagattgaatttgtggtggtgggccctgaggcccccctggccgccggcatcgtgggcaacctgcggtctgctggggtgcagtgcttcggccccacagctgaggccgcccagctggagagcagcaagagatttgccaaggagttcatggacagacatggcatccccacagcccagtggaaggccttcaccaagccagaggaggcctgcagcttcatcctgtctgctgacttccctgccctggtggtgaaggccagcggcctggccgccggcaagggcgtgattgtggccaagagcaaggaggaggcctgcaaggctgtgcaggagatcatgcaggagaaggccttcggggctgctggggagaccatcgtgattgaggagctgctggatggagaggaggtgtcctgcctgtgcttcacagatggcaagacagtggcccccatgcccccagcccaggaccacaagaggctgctggagggagatggcggccccaacacaggaggcatgggcgcctactgcccagccccccaggtgtccaatgacctgctgctgaagatcaaggacacagtgctgcagaggacagtggatggcatgcagcaggagggcaccccctacacaggcatcctgtatgccggcatcatgctgaccaagaatggccccaaggtgctggagttcaactgccgctttggagaccctgagtgccaggtgatcctgcccctgctgaagagtgacctgtatgaggtgatccagagcaccctggatggcctgctgtgcaccagcctgcctgtgtggctggagaaccacacagccctgactgtggtgatggccagcaagggctacccaggggactacaccaagggcgtggagatcaccggcttccctgaggcccaggccctgggcctggaggtgttccacgccggcacagccctgaagaatggcaaggtggtgacccacggcggccgggtgctggccgtgacagccatccgggagaacctgatcagcgccctggaggaggccaagaagggcctggccgccatcaagtttgagggcgccatctacaggaaggatgtgggcttccgggccatcgccttcctgcagcagcccaggtag

SEQ ID NO: 251536 - DNA, 699 bp, Artificial Sequence
  derived and/or modified sequence
atggccgcccgggtgctgatcatcggcagcggcggccgggagcacaccctggcctggaagctggcccagagccaccacgtgaagcaggtgctggtggcccctggaaatgccggcacagcctgcagcgagaagatcagcaacacagccatcagcatcagtgaccacacagccctggcccagttctgcaaggagaagaagattgaatttgtggtggtgggccctgaggcccccctggccgccggcatcgtgggcaacctgcggtctgctggggtgcagtgcttcggccccacagctgaggccgcccagctggagagcagcaagagatttgccaaggagttcatggacagacatggcatccccacagcccagtggaaggccttcaccaagccagaggaggcctgcagcttcatcctgtctgctgacttccctgccctggtggtgaaggccagcggcctggccgccggcaagggcgtgattgtggccaagagcaaggaggaggcctgcaaggctgtgcaggagatcatgcaggagaaggccttcggggctgctggggagaccatcgtgattgaggagctgctggatggagaggaggtgtcctgcctgtgcttcacagatggcaagacagtggcccccatgcccccagcccaggaccacaagaggctgctggagggagatggcggccccaacacaggaggatag

SEQ ID NO: 251537 - DNA, 726 bp, Artificial Sequence
  derived and/or modified sequence
atggccgcccgggtgctgatcatcggcagcggcggccgggagcacaccctggcctggaagctggcccagagccaccacgtgaagcaggtgctggtggcccctggaaatgccggcacagcctgcagcgagaagatcagcaacacagccatcagcatcagtgaccacacagccctggcccagttctgcaaggagaagaagattgaatttgtggtggtgggccctgaggcccccctggccgccggcatcgtgggcaacctgcggtctgctggggtgcagtgcttcggccccacagctgaggccgcccagctggagagcagcaagagatttgccaaggagttcatggacagacatggcatccccacagcccagtggaaggccttcaccaagccagaggaggcctgcagcttcatcctgtctgctgacttccctgccctggtggtgaaggccagcggcctggccgccggcaagggcgtgattgtggccaagagcaaggaggaggcctgcaaggctgtgcaggagatcatgcaggagaaggccttcggggctgctggggagaccatcgtgattgaggagctgctggatggagaggaggtgtcctgcctgtgcttcacagatggcaagacagtggcccccatgcccccagcccaggaccacaagaggctgctggagggagatggcggccccaacacaggaggcatgggcgcctactgcccagccccccagtag

SEQ ID NO: 251538 - DNA, 417 bp, Artificial Sequence
  derived and/or modified sequence
atggccgcccgggtgctgatcatcggcagcggcggccgggagcacaccctggcctggaagctggcccagagccaccacgtgaagcaggtgctggtggcccctggaaatgccggcacagcctgcagcgagaagatcagcaacacagccatcagcatcagtgaccacacagccctggcccagttctgcaaggagaagaagattgaatttgtggtggtgggccctgaggcccccctggccgccggcatcgtgggcaacctgcggtctgctggggtgcagtgcttcggccccacagctgaggccgcccagctggagagcagcaagagatttgccaaggagttcatggacagacatggcatccccacagcccagtggaaggccttcaccaagccagaggaggcctgcagcttcatcctgtag

SEQ ID NO: 251539 - DNA, 411 bp, Artificial Sequence
  derived and/or modified sequence
atggccgcccgggtgctgatcatcggcagcggcggccgggagcacaccctggcctggaagctggcccagagccaccacgtgaagcaggtgctggtggcccctggaaatgccggcacagcctgcagcgagaagatcagcaacacagccatcagcatcagtgaccacacagccctggcccagttctgcaaggagaagaagattgaatttgtggtggtgggccctgaggcccccctggccgccggcatcgtgggcaacctgcggtctgctggggtgcagtgcttcggccccacagctgaggccgcccagctggagagcagcaagagatttgccaaggagttcatggacagacatggcatccccacagcccagtggaaggccttcaccaagccagaggaggcctgcagcttctag

SEQ ID NO: 251540 - DNA, 1302 bp, Artificial Sequence
  derived and/or modified sequence
atggccgcccgggtgctgatcatcggcagcggcggccgggagcacaccctggcttggaagctcgcccagagccatcacgtgaagcaggtgctcgtagcccccggaaacgccggcacagcctgctccgagaagatcagcaataccgccatctccatcagcgaccacactgcgttagcccagttctgtaaggaaaagaagatcgaattcgttgtcgtgggccccgaggcgcccttggccgctggtattgtcgggaatctgaggagtgcgggggttcagtgttttggacccaccgccgaggccgcgcagctggaatcgtccaagcgcttcgccaaggagtttatggatcgacacggtatccccactgcccagtggaaggcctttactaagcctgaggaggcctgtagtttcatattatccgcagatttcccagccctcgtcgttaaagcctcaggtttagcagccggtaaaggagtcatagtggctaagtcaaaggaagaggcctgcaaagctgtgcaggagattatgcaggaaaaggctttcggagctgcgggcgaaacaatcgtcattgaggaactgctggacggcgaggaggtcagctgtctctgcttcacagacgggaagacagtagcaccgatgcccccagcccaggatcacaaacgcctcctggagggcgacggcgggcctaataccgggggaatgggcgcttactgtccagctcctcaagtcagtaacgatttactcttaaaaatcaaagatactgtgcttcagcgtacagtggacggcatgcagcaggagggaactccttacaccggaatcctgtatgccggtattatgctcaccaagaacggtccaaaagttctggagttcaattgtaggttcggcgacccagagtgtcaggtgatactgccattgctcaagtccgatctctatgaagttatccagtccactctggacggcttgttatgcaccagcttacccgtatggctggagaaccacacagcgctcacggtggtcatggcatctaaggggtatcctggagattatacaaagggggttgaaataactggatttcccgaagcgcaagccttaggcctggaagtctttcatgccggaaccgccctgaaaaacgggaaagtggtgacccacggaggccgggtgctcgctgtcacagccatccgagaaaatctcatcagcgcactagaagaggccaagaaaggccttgctgcgattaagtttgaaggagccatctacaggaaagatgtgggattccgcgcgatcgcattcctacagcagccccgttag

SEQ ID NO: 251541 - DNA, 699 bp, Artificial Sequence
  derived and/or modified sequence
atggccgcccgggtgctgatcatcggcagcggcggccgggagcacacactggcatggaagttggcgcagtctcatcacgtcaaacaggtgttggtggccccgggtaacgctggcacagcctgctctgaaaagatatcgaacacagcaatttccatcagtgatcatacagccttagcacagttctgcaaagagaaaaagatcgagtttgttgtagtcggccctgaagcccctctggccgccggaatagtggggaatctgcgatcagcaggcgtgcaatgcttcgggcccaccgccgaggccgctcagctggaatcttccaaaaggttcgccaaggagttcatggatcgacacggcattccaaccgcccagtggaaagcgttcaccaagcctgaagaagcttgctcattcatactgtctgcggactttcctgctctggtggtaaaagctagtgggctggccgcaggcaagggggtgattgtagcgaaatccaaggaagaggcatgcaaggcagtgcaagaaattatgcaggagaaggccttcggcgccgctggcgagacaattgtgattgaagaattgttggacggcgaagaagtgagctgcctgtgttttaccgacgggaagactgtggcacccatgccccccgcccaagaccataagcggctgctcgaaggagacggcggacccaatactggtggatag

SEQ ID NO: 251542 - DNA, 726 bp, Artificial Sequence
  derived and/or modified sequence
atggccgcccgggtgctgatcatcggcagcggcggccgggagcacactcttgcatggaaactcgcgcagtctcatcatgtgaagcaagtcttggtggctccaggcaacgctggaaccgcgtgctcggagaaaataagcaacacagcaatctcaatcagcgaccacactgcacttgcccagttttgcaaagagaagaaaatcgaattcgttgttgtaggccccgaagcccctctcgctgctggcattgtgggcaacctgcgttcggcaggagtgcagtgttttgggcctactgcggaagctgcccagctcgagagtagtaaacgatttgcaaaggagttcatggacaggcatggcataccgactgcacagtggaaagcattcactaagcccgaggaggcctgcagctttattttgtccgccgacttccccgctcttgtggtgaaggcctctggcctggcggccggaaaaggggtaatcgtcgcaaaatcaaaggaggaagcttgtaaggctgttcaggaaattatgcaggaaaaggccttcggcgccgccggggaaacaattgtgatcgaagaacttctcgatggagaggaggtgagttgcctgtgcttcacagatgggaagaccgtggcccccatgccaccagcccaggaccacaagcgactgttagagggagatggtggacccaacacaggcggcatgggagcctattgtcctgctccgcagtag

SEQ ID NO: 251543 - DNA, 417 bp, Artificial Sequence
  derived and/or modified sequence
atggccgcccgggtgctgatcatcggcagcggcggccgggagcacaccctggcctggaaactggcacagtctcatcacgttaaacaggtgctagttgctccaggcaatgcaggaaccgcatgcagtgagaaaatttcaaacactgcaatttctatcagtgatcacacagcgctggctcagttctgcaaagaaaagaaaatcgagttcgttgttgtcggtcctgaggccccactggccgccggtattgtcggaaatctgagatccgctggggtacagtgctttggcccaaccgccgaggccgcccagcttgagtcttccaagagatttgccaaggagtttatggaccggcacggaatcccaaccgctcagtggaaggcattcaccaagcccgaggaggcatgctccttcatcctctag

SEQ ID NO: 251544 - DNA, 411 bp, Artificial Sequence
  derived and/or modified sequence
atggccgcccgggtgctgatcatcggcagcggcggccgggagcacacactagcctggaaactcgcccagagccaccacgtgaagcaggtactggtcgctcccgggaatgcaggcacagcctgcagcgaaaagatcagcaacactgccatcagtatctccgaccacactgcgctggcccagttctgtaaagaaaaaaagatcgagttcgtagtggtgggccccgaggcgcctctggcagcaggaatcgtcgggaacctccgatcagcaggagtccagtgcttcggtcctactgccgaagcggcacaactggagagtagtaagaggttcgccaaggaatttatggaccgtcacgggatcccaactgcccagtggaaggcctttacaaaacctgaggaagcttgtagcttttag

SEQ ID NO: 251545 - DNA, 2149 bp, Artificial Sequence
  derived and/or modified sequence
ccgacttccggcgagcgggcaagcgggaaccaggtggccacccggtgtcggtttcattttcctttggaatttctgctttacagacagaacaatggcagcccgagtacttataattggcagtggaggaagggaacatacgctggcctggaaacttgcacagtctcatcatgtcaaacaagtgttggttgccccaggaaacgcaggcactgcctgctctgaaaagatttcaaataccgccatctcaatcagtgaccacactgcccttgctcaattctgcaaagagaagaaaattgaatttgtagttgttggaccagaagcacctctggctgctgggattgttgggaacctgaggtctgcaggagtgcaatgctttggcccaacagcagaagcggctcagttagagtccagcaaaaggtttgccaaagagtttatggacagacatggaatcccaaccgcacaatggaaggctttcaccaaacctgaagaagcctgcagcttcattttgagtgcagacttccctgctttggttgtgaaggccagtggtcttgcagctggaaaaggggtgattgttgcaaagagcaaagaagaggcctgcaaagctgtacaagagatcatgcaggagaaagcctttggggcagctggagaaacaattgtcattgaagaacttcttgacggagaagaggtgtcgtgtctgtgtttcactgatggcaagactgtggcccccatgcccccagcacaggaccataagcgattactggagggagatggtggccctaacacagggggaatgggagcctattgtccagcccctcaggtttctaatgatctattactaaaaattaaagatactgttcttcagaggacagtggatggcatgcagcaagagggtactccatatacaggtattctctatgctggaataatgctgaccaagaatggcccaaaagttctagagtttaattgccgttttggtgatccagagtgccaagtaatcctcccacttcttaaaagtgatctttatgaagtgattcagtccaccttagatggactgctctgcacatctctgcctgtttggctagaaaaccacaccgccctaactgttgtcatggcaagtaaaggttatcctggagactacaccaagggtgtagagataacagggtttcctgaggctcaagctctaggactggaggtgttccatgcaggcactgccctcaaaaatggcaaagtagtaactcatgggggtagagttcttgcagtcacagccatccgggaaaatctcatatcagcccttgaggaagccaagaaaggactagctgctataaagtttgagggagcaatttataggaaagacgtcggctttcgtgccatagctttcctccagcagcccaggtaaaactctaagcaagttagctgtagtgccatttcagaaactggcctaaatggctatgtagaacatttcattaaccctataagtcattcagtattcttttctctctgtgggagtgatacagtcttggtttgtattttgtttgaatcaaaactggttatagcaatactcaaatggaaaaaacttcatgatagcgtaagtttggaaagtttagcaaaatcacagtggtactgatttttatttgttttctattttttttattttatatttttaatttttttaacagggtcttcctctctcgcccaagttctcatgcctcagcctcccaaatagctgggactacaggcacaggccaccacacctggctaatttttttgtattttttgtggagatggggtttcaccatgttgccaaggccagtctgaaatcctgggctcaagtgatcctcctgctttggcctcccaaaatgctgggattataggcatgagccgctgcacttggcctgatactgatttttattccttgcgttatcacatagtgttgtatttgaaacatagttcatggttttatcaaagaactgaagatgagaatactggtcatctaactttgtaatttgatttgattatactgtaaagtttgacagtctcattttatcactgcgtttgtatctattactaaaatgtattttttgacctcttactgattcattgttggtatgtacaaactgttgacttgtaaaatcaataaagtcttagttggaaa

SEQ ID NO: 251546 - DNA, 837 bp, Artificial Sequence
  derived and/or modified sequence
cgcataagttgtcagtccccagcagtgtttgggagccttaacaggcttgctaagtgcctgagattaaaggcgaagaggaagaagagcaagaagggcaacccggtgtttaacacacggctttcaggcgctctcagacagaacaatggcagcccgagtacttataattggcagtggaggaagggaacatacgctggcctggaaacttgcacagtctcatcatgtcaaacaagtgttggttgccccaggaaacgcaggcactgcctgctctgaaaagatttcaaataccgccatctcaatcagtgaccacactgcccttgctcaattctgcaaagagaagaaaattgaatttgtagttgttggaccagaagcacctctggctgctgggattgttgggaacctgaggtctgcaggagtgcaatgctttggcccaacagcagaagcggctcagttagagtccagcaaaaggtttgccaaagagtttatggacagacatggaatcccaaccgcacaatggaaggctttcaccaaacctgaagaagcctgcagcttcattttgagtgcagacttccctgctttggttgtgaaggccagtggtcttgcagctggaaaaggggtgattgttgcaaagagcaaagaagaggcctgcaaagctgtacaagagatcatgcaggagaaagcctttggggcagctggagaaacaattgtcattgaagaacttcttgacggagaagaggtgtcgtgtctgtgtttcactgatggcaagactgtggcccccatgcccccagcacaggaccataagcgattactggagggagatggtggccctaacacaggggg

SEQ ID NO: 251547 - DNA, 1036 bp, Artificial Sequence
  derived and/or modified sequence
cccgtccctggcggacaaccgggcctacgagtagctaaacggcaggggggacccaaacaggggagaagggtgaacatcttaactcggttctgaaacagggagtcttgggttacctcggaaaaggcgaagttcctcgagggaaaaggaagggagcggctgggggggcggttggggggggcccggaaaatggatcccaggcccaggcggggccctagcggggcctgagccggggaacgactgcgtctccgaagaaaggtgccaaagaaggctaggtttcattttcctttggaatttctgctttacagacagaacaatggcagcccgagtacttataattggcagtggaggaagggaacatacgctggcctggaaacttgcacagtctcatcatgtcaaacaagtgttggttgccccaggaaacgcaggcactgcctgctctgaaaagatttcaaataccgccatctcaatcagtgaccacactgcccttgctcaattctgcaaagagaagaaaattgaatttgtagttgttggaccagaagcacctctggctgctgggattgttgggaacctgaggtctgcaggagtgcaatgctttggcccaacagcagaagcggctcagttagagtccagcaaaaggtttgccaaagagtttatggacagacatggaatcccaaccgcacaatggaaggctttcaccaaacctgaagaagcctgcagcttcattttgagtgcagacttccctgctttggttgtgaaggccagtggtcttgcagctggaaaaggggtgattgttgcaaagagcaaagaagaggcctgcaaagctgtacaagagatcatgcaggagaaagcctttggggcagctggagaaacaattgtcattgaagaacttcttgacggagaagaggtgtcgtgtctgtgtttcactgatggcaagactgtggcccccatgcccccagcacaggaccataagcgattactggagggagatggtggccctaacacagggggaatgggagcctattgtccagcccctcag

SEQ ID NO: 251548 - DNA, 697 bp, Artificial Sequence
  derived and/or modified sequence
agccgtctctcttgaggcgaccgtgtccgcataagttgtcagtccccagcagtgtttgggagccttaacaggcttgctaagtgcctgagattaaaggcgaagaggaagaagagcaagaagggcaacccggtgtttaacacacggctttcaggcgctctcaggtggcgccaagttcagtttcgacagggatatgcatccgggagagaatttttcagcccccgcccccactggcatgtgagaggaggaactcgctgttgccctgtgtcttccccaacagaacaatggcagcccgagtacttataattggcagtggaggaagggaacatacgctggcctggaaacttgcacagtctcatcatgtcaaacaagtgttggttgccccaggaaacgcaggcactgcctgctctgaaaagatttcaaataccgccatctcaatcagtgaccacactgcccttgctcaattctgcaaagagaagaaaattgaatttgtagttgttggaccagaagcacctctggctgctgggattgttgggaacctgaggtctgcaggagtgcaatgctttggcccaacagcagaagcggctcagttagagtccagcaaaaggtttgccaaagagtttatggacagacatggaatcccaaccgcacaatggaaggctttcaccaaacctgaagaagcctgcagcttcattttgag

SEQ ID NO: 251549 - DNA, 715 bp, Artificial Sequence
  derived and/or modified sequence
ttttggcgctcccccccggcgctcctggaaacactgcgtggcaccccgtaccactgtcacattataaacgtgctaaggcttgggtgtctcggctggggagcagtcaggcagcgcccagggcgggagggaatcagactagattctcgccgcggagacccagggccgcgcggaccaatggggcagggaagccgtcgtagggcggggcagtgaggggcggtgccgcgctggtcccgcgccggtcccggtgggccgacttccggcgagcgggcaagcgggaaccaggtggccacccggtgtcgacagaacaatggcagcccgagtacttataattggcagtggaggaagggaacatacgctggcctggaaacttgcacagtctcatcatgtcaaacaagtgttggttgccccaggaaacgcaggcactgcctgctctgaaaagatttcaaataccgccatctcaatcagtgaccacactgcccttgctcaattctgcaaagagaagaaaattgaatttgtagttgttggaccagaagcacctctggctgctgggattgttgggaacctgaggtctgcaggagtgcaatgctttggcccaacagcagaagcggctcagttagagtccagcaaaaggtttgccaaagagtttatggacagacatggaatcccaaccgcacaatggaaggctttcaccaaacctgaagaagcctgcagcttc

SEQ ID NO: 251550 - DNA, 1302 bp, Artificial Sequence
  derived and/or modified sequence
atggctgccagggtgctgattataggaagcggaggcagggaacacaccctggcctggaaactggcacagagtcatcatgtgaaacaggtattagtcgcccctggtaatgccggaacagcctgtagcgaaaaaataagcaatacggccataagcataagcgatcatacggccctggcacagttctgtaaagagaaaaaaatcgaattcgttgtggtgggtcccgaagctcctctggccgcaggcattgtcggcaatctgcgatctgccggtgtgcagtgctttggccctacggctgaggcagcacagctggaaagctctaagcggttcgcgaaggagtttatggatagacatgggattccgacggctcagtggaaggccttcacaaagccggaggaggcgtgctcattcatcctctcggcagacttccctgccctcgtggtgaaggcctctggactggcggctggtaagggagttatcgtggccaagagtaaggaagaggcctgcaaagcggtgcaggaaataatgcaagagaaggcctttggagcagcaggcgaaacaatcgtgatcgaagagctgctcgatggagaggaagtgtcatgcctctgcttcacggacggcaaaaccgtcgcgcctatgccgccagcacaagatcacaaaagattgctggaaggcgatgggggacccaacactggcggtatgggtgcatactgccccgcaccccaggtttcaaacgatctgcttctcaaaatcaaggacactgtactgcagagaacagtggatgggatgcagcaggagggtactccctacaccggtatcctttacgccggaattatgctgaccaaaaacggacccaaggttctcgagttcaactgtcgctttggcgaccccgagtgtcaggtcatcttgccattgctgaaatccgatctgtacgaggtaatccagagcaccctcgatggattgttgtgcacatccctgcctgtttggcttgagaatcatacagcactgactgtcgttatggcgagcaaaggttaccccggagactacaccaaaggcgtggagattacaggattcccggaagcacaggccttgggcttagaagtattccacgccggaacagccttgaaaaatggtaaagtggtgacgcacggtgggagggtgctcgctgtaacagcgatccgggagaatttgatatccgcccttgaggaggcaaagaagggcctggctgccattaaattcgagggagccatatacaggaaggatgtgggcttcagggcgattgctttcctccagcagcctcggtag

SEQ ID NO: 251551 - DNA, 699 bp, Artificial Sequence
  derived and/or modified sequence
atggctgctcgtgtcctcattatcggctccggcggtagggaacacactctcgcatggaagttagcccagtcccatcacgtcaaacaagttctggttgctccaggcaatgctggaactgcttgcagcgagaagatttccaatacagccatctccataagtgatcacacagctctggcccaattttgtaaggagaagaagatcgagttcgtggtagttggaccagaagcacctctcgccgcaggtattgttggaaatctgcgcagtgccggagttcaatgctttgggcctactgcagaagcagcccaactggagtcctccaagagattcgcaaaggagtttatggatagacacggcattcctaccgcgcagtggaaagcttttaccaaacctgaggaagcttgctctttcatcctcagcgccgatttccccgcactggtagtgaaggcctcggggctggcggctggaaagggtgtcatagtggctaaatcaaaagaggaggcatgtaaagctgtccaggagattatgcaggagaaagcgttcggagctgccggagagacaattgtaatcgaagaactgctcgacggtgaagaagtgtcttgcttatgctttacagatggcaaaacggtggctccaatgccgccagcccaggaccacaaacgactcctagaaggcgatggtggaccaaacacagggggatag

SEQ ID NO: 251552 - DNA, 726 bp, Artificial Sequence
  derived and/or modified sequence
atggcggcacgtgtccttatcatagggtctggagggagggaacacaccttggcatggaagcttgcccagagccatcacgtgaagcaggtgctggtcgctccaggaaacgccggtaccgcatgtagtgagaagatctccaataccgctatttctatcagcgatcacaccgcactcgctcagttttgtaaagagaagaagatcgaattcgttgtggttggtccagaggcaccattggccgcaggcattgtgggcaatttgcggtcagcaggagtccagtgctttgggcctacagccgaagccgcacagctggagtcatcaaagcggttcgcgaaagagtttatggatcgccacgggatccctaccgcccagtggaaagcattcacaaagcccgaggaagcctgtagctttatcctcagcgccgatttccctgcgctagtcgtgaaggcctcaggcctggccgcaggaaaaggcgtgatcgtagcgaagagtaaggaggaagcatgcaaagctgttcaagaaattatgcaggagaaggcattcggcgctgcaggagagactattgtaatagaggagctgctagacggggaggaggtctcttgcctgtgtttcacagatgggaagacagtggcacctatgcccccagcacaagaccataagaggctgttagagggagatggtgggccaaacacaggaggcatgggcgcttactgcccagccccacagtag

SEQ ID NO: 251553 - DNA, 417 bp, Artificial Sequence
  derived and/or modified sequence
atggcagccagggtattgataattggttctggtgggagagagcatactttggcgtggaagctggctcaaagtcaccatgtcaaacaggtcctggtagccccaggtaatgctggcaccgcttgttctgaaaagatatctaataccgctatatcaatcagtgatcacactgccctcgcgcagttctgtaaagagaagaaaatcgaatttgtggtcgttggcccagaagcaccactcgcggctggcatagtcgggaatctccgcagtgctggggtccaatgcttcggaccaaccgctgaagcggcacaattggaatcaagcaaacgattcgcgaaggagttcatggaccgtcatgggatccctaccgcccagtggaaagcatttacaaagccagaggaagcgtgttccttcatcttatag

SEQ ID NO: 251554 - DNA, 411 bp, Artificial Sequence
  derived and/or modified sequence
atggcagcccgagttctgattataggcagcggcggaagggagcacacacttgcttggaagctcgcgcagtcccatcacgtaaaacaggttctcgtggccccaggaaacgccggtacggcctgtagcgaaaagataagcaacactgctatctctatcagtgaccacactgcactggcccagttctgtaaggaaaagaagatcgaatttgtggtggtcggaccagaggcgcctctagctgctggaatcgtcgggaatctgcgctcagctggtgttcagtgctttgggcctactgctgaagctgcacaactagaatcctccaaaaggtttgctaaggaattcatggatagacacggtatccccactgcccagtggaaagcatttaccaaacctgaggaggcatgttctttttag

SEQ ID NO: 251555 - DNA, 1302 bp, Artificial Sequence
  derived and/or modified sequence
atggccgccagagtgctgatcatcggcagcggcggcagagagcacaccctggcctggaagctggcccagagccaccacgtgaagcaggtgctggtggcccccggcaacgccggcaccgcctgcagcgagaagatcagcaacaccgccatcagcatcagcgaccacaccgccctggcccagttctgcaaggagaagaagatcgagttcgtggtggtgggccccgaggcccccctggccgccggcatcgtgggcaacctgagaagcgccggcgtgcagtgcttcggccccaccgccgaggccgcccagctggagagcagcaagagattcgccaaggagttcatggacagacacggcatccccaccgcccagtggaaggccttcaccaagcccgaggaggcctgcagcttcatcctgagcgccgacttccccgccctggtggtgaaggccagcggcctggccgccggcaagggcgtgatcgtggccaagagcaaggaggaggcctgcaaggccgtgcaggagatcatgcaggagaaggccttcggcgccgccggcgagaccatcgtgatcgaggagctgctggacggcgaggaggtgagctgcctgtgcttcaccgacggcaagaccgtggcccccatgccccccgcccaggaccacaagagactgctggagggcgacggcggccccaacaccggcggcatgggcgcctactgccccgccccccaggtgagcaacgacctgctgctgaagatcaaggacaccgtgctgcagagaaccgtggacggcatgcagcaggagggcaccccctacaccggcatcctgtacgccggcatcatgctgaccaagaacggccccaaggtgctggagttcaactgcagattcggcgaccccgagtgccaggtgatcctgcccctgctgaagagcgacctgtacgaggtgatccagagcaccctggacggcctgctgtgcaccagcctgcccgtgtggctggagaaccacaccgccctgaccgtggtgatggccagcaagggctaccccggcgactacaccaagggcgtggagatcaccggcttccccgaggcccaggccctgggcctggaggtgttccacgccggcaccgccctgaagaacggcaaggtggtgacccacggcggcagagtgctggccgtgaccgccatcagagagaacctgatcagcgccctggaggaggccaagaagggcctggccgccatcaagttcgagggcgccatctacagaaaggacgtgggcttcagagccatcgccttcctgcagcagcccagatag

SEQ ID NO: 251556 - DNA, 699 bp, Artificial Sequence
  derived and/or modified sequence
atggccgccagagtgctgatcatcggcagcggcggcagagagcacaccctggcctggaagctggcccagagccaccacgtgaagcaggtgctggtggcccccggcaacgccggcaccgcctgcagcgagaagatcagcaacaccgccatcagcatcagcgaccacaccgccctggcccagttctgcaaggagaagaagatcgagttcgtggtggtgggccccgaggcccccctggccgccggcatcgtgggcaacctgagaagcgccggcgtgcagtgcttcggccccaccgccgaggccgcccagctggagagcagcaagagattcgccaaggagttcatggacagacacggcatccccaccgcccagtggaaggccttcaccaagcccgaggaggcctgcagcttcatcctgagcgccgacttccccgccctggtggtgaaggccagcggcctggccgccggcaagggcgtgatcgtggccaagagcaaggaggaggcctgcaaggccgtgcaggagatcatgcaggagaaggccttcggcgccgccggcgagaccatcgtgatcgaggagctgctggacggcgaggaggtgagctgcctgtgcttcaccgacggcaagaccgtggcccccatgccccccgcccaggaccacaagagactgctggagggcgacggcggccccaacaccggcggctag

SEQ ID NO: 251557 - DNA, 726 bp, Artificial Sequence
  derived and/or modified sequence
atggccgccagagtgctgatcatcggcagcggcggcagagagcacaccctggcctggaagctggcccagagccaccacgtgaagcaggtgctggtggcccccggcaacgccggcaccgcctgcagcgagaagatcagcaacaccgccatcagcatcagcgaccacaccgccctggcccagttctgcaaggagaagaagatcgagttcgtggtggtgggccccgaggcccccctggccgccggcatcgtgggcaacctgagaagcgccggcgtgcagtgcttcggccccaccgccgaggccgcccagctggagagcagcaagagattcgccaaggagttcatggacagacacggcatccccaccgcccagtggaaggccttcaccaagcccgaggaggcctgcagcttcatcctgagcgccgacttccccgccctggtggtgaaggccagcggcctggccgccggcaagggcgtgatcgtggccaagagcaaggaggaggcctgcaaggccgtgcaggagatcatgcaggagaaggccttcggcgccgccggcgagaccatcgtgatcgaggagctgctggacggcgaggaggtgagctgcctgtgcttcaccgacggcaagaccgtggcccccatgccccccgcccaggaccacaagagactgctggagggcgacggcggccccaacaccggcggcatgggcgcctactgccccgccccccagtag

SEQ ID NO: 251558 - DNA, 417 bp, Artificial Sequence
  derived and/or modified sequence
atggccgccagagtgctgatcatcggcagcggcggcagagagcacaccctggcctggaagctggcccagagccaccacgtgaagcaggtgctggtggcccccggcaacgccggcaccgcctgcagcgagaagatcagcaacaccgccatcagcatcagcgaccacaccgccctggcccagttctgcaaggagaagaagatcgagttcgtggtggtgggccccgaggcccccctggccgccggcatcgtgggcaacctgagaagcgccggcgtgcagtgcttcggccccaccgccgaggccgcccagctggagagcagcaagagattcgccaaggagttcatggacagacacggcatccccaccgcccagtggaaggccttcaccaagcccgaggaggcctgcagcttcatcctgtag

SEQ ID NO: 251559 - DNA, 411 bp, Artificial Sequence
  derived and/or modified sequence
atggccgccagagtgctgatcatcggcagcggcggcagagagcacaccctggcctggaagctggcccagagccaccacgtgaagcaggtgctggtggcccccggcaacgccggcaccgcctgcagcgagaagatcagcaacaccgccatcagcatcagcgaccacaccgccctggcccagttctgcaaggagaagaagatcgagttcgtggtggtgggccccgaggcccccctggccgccggcatcgtgggcaacctgagaagcgccggcgtgcagtgcttcggccccaccgccgaggccgcccagctggagagcagcaagagattcgccaaggagttcatggacagacacggcatccccaccgcccagtggaaggccttcaccaagcccgaggaggcctgcagcttctag

SEQ ID NO: 251560 - protein, 180 aa, Artificial Sequence
  derived and/or modified sequence
MESWWGLPCLAFLCFLMHARGQRDFDLADALDDPEPTKKPNSDIYPKPKPPYYPQPENPDSGGNIYPRPKPRPQPQPGNSGNSGGYFNDVDRDDGRYPPRPRPRPPAGGGGGGYSSYGNSDNTHGGDHHSTYGNPEGNMVAKIVSPIVSVVVVTLLGAAASYFKLNNRRNCFRTHEPENV

SEQ ID NO: 251561 - DNA, 543 bp, Artificial Sequence
  derived and/or modified sequence
atggagagctggtggggcctgccctgcctggccttcctgtgcttcctgatgcacgccagaggccagagagacttcgacctggccgacgccctggacgaccccgagcccaccaagaagcccaacagcgacatctaccccaagcccaagcccccctactacccccagcccgagaaccccgacagcggcggcaacatctaccccagacccaagcccagaccccagccccagcccggcaacagcggcaacagcggcggctacttcaacgacgtggacagagacgacggcagatacccccccagacccagacccagaccccccgccggcggcggcggcggcggctacagcagctacggcaacagcgacaacacccacggcggcgaccaccacagcacctacggcaaccccgagggcaacatggtggccaagatcgtgagccccatcgtgagcgtggtggtggtgaccctgctgggcgccgccgccagctacttcaagctgaacaacagaagaaactgcttcagaacccacgagcccgagaacgtgtag

SEQ ID NO: 251562 - DNA, 129 bp, Artificial Sequence
  derived and/or modified sequence
atggtggccaagatcgtgagccccatcgtgagcgtggtggtggtgaccctgctgggcgccgccgccagctacttcaagctgaacaacagaagaaactgcttcagaacccacgagcccgagaacgtgtag

SEQ ID NO: 251563 - DNA, 543 bp, Artificial Sequence
  derived and/or modified sequence
atggagagctggtgggggttaccttgtctggctttcctgtgttttctcatgcacgctaggggacagcgcgatttcgacttggccgacgcgttggatgaccccgagccaactaagaaacctaactccgacatctatcctaaacccaaacccccctattacccccaacccgagaatcctgattccggaggtaatatttatcccaggcccaaacccagaccgcagccacaacccgggaacagcggtaattccgggggatattttaatgacgtcgacagggacgacggccggtacccaccccgtcctaggcctaggccaccggccggcggcggtggcggtggctatagttcttacggtaatagtgacaacacacacgggggcgaccaccactcgacgtacggtaatccggaaggaaatatggtagcaaagattgtgtcacccatcgtgagtgtcgtcgtcgtaaccctcctcggcgctgccgctagttactttaagctcaataaccggcggaactgcttccggacccacgaaccggagaacgtatag

SEQ ID NO: 251564 - DNA, 129 bp, Artificial Sequence
  derived and/or modified sequence
atggtggctaagattgtgtctcctatagtcagcgtggtggtcgtcaccctgttaggagccgccgctagctatttcaagctcaataatcgccgcaattgcttccgaacacacgagcctgagaatgtctag

SEQ ID NO: 251565 - DNA, 543 bp, Artificial Sequence
  derived and/or modified sequence
atggagagctggtggggcctgccctgcctggccttcctgtgcttcctgatgcacgcccggggccagagggactttgacctggctgatgccctggatgatcctgagcccaccaagaagcccaacagcgacatctaccccaagcccaagccaccctactacccccagccagaaaatccagattctgggggcaacatctacccccggcccaagccccggccccagccccagcccggcaacagcggcaacagcggcggctacttcaatgatgtggacagagatgatggccgctacccaccccggccccggcccaggcctcctgctgggggcggcggcggcggctacagcagctatggcaacagcgacaacacccacggcggggaccaccacagcacctacggcaaccctgagggcaacatggtggccaagatcgtgagccccatcgtgtctgtggtggtggtgaccctgctgggcgctgctgccagctacttcaagctgaacaacagaagaaactgcttccgcacccatgagccagaaaatgtgtag

SEQ ID NO: 251566 - DNA, 129 bp, Artificial Sequence
  derived and/or modified sequence
atggtggccaagatcgtgagccccatcgtgtctgtggtggtggtgaccctgctgggcgctgctgccagctacttcaagctgaacaacagaagaaactgcttccgcacccatgagccagaaaatgtgtag

SEQ ID NO: 251567 - DNA, 543 bp, Artificial Sequence
  derived and/or modified sequence
atggagagctggtggggcctgccctgcctggccttcctgtgcttcctaatgcatgccagggggcagagagattttgatttagcggacgcgctcgatgatcccgagcctacgaaaaagcccaattctgacatataccctaagcctaaacctccatattatcctcagcctgagaatcccgatagcggggggaatatataccctagaccaaaaccccggccccagcctcaacctggaaacagcggaaacagcggcggatattttaatgatgttgacagagacgacggacggtacccgcccagaccgcgcccaagaccccccgcaggggggggaggcggcggctattcttcctacggaaactccgacaacactcatggtggcgaccatcacagcacctacggtaatccggagggtaatatggtcgccaaaatcgtgtccccaatcgtgtcggttgtggtggtcaccctgctgggtgcagcagcaagctatttcaagctgaacaatcgccgtaattgtttccggacccatgaacccgagaacgtgtag

SEQ ID NO: 251568 - DNA, 129 bp, Artificial Sequence
  derived and/or modified sequence
atggtggccaagatcgtgagccccatcgtgagcgtggtggtggtgacactgttaggagccgcagcatcctactttaaactgaataatagaagaaattgtttccgcacacacgaacccgaaaatgtgtag

SEQ ID NO: 251569 - DNA, 543 bp, Artificial Sequence
  derived and/or modified sequence
atggagtcctggtgggggttgccatgtctcgcctttttgtgttttctgatgcacgccaggggccaaagagatttcgacttagctgacgccctggatgaccccgagcctactaagaaaccaaatagcgatatttatcctaagcctaagccaccctactacccgcagccagaaaacccggactcaggcggtaatatctacccaaggcccaagcccagaccccagccccagcctgggaatagcggaaactcgggaggatactttaacgatgtcgatcgggatgacggcagataccctcctcgaccaagaccgaggccacctgctggcggagggggaggaggctattcctcatatgggaatagtgacaacacgcacggcggagaccaccacagtacttacgggaacccggagggcaatatggttgcaaagattgtgagccccattgtgtccgtcgtagtcgttacactgcttggcgcagccgcttcttacttcaagctgaataatcggaggaattgctttcgcactcatgaaccagaaaatgtgtag

SEQ ID NO: 251570 - DNA, 129 bp, Artificial Sequence
  derived and/or modified sequence
atggttgctaagatcgtttctcccattgtctccgtcgttgttgtgaccctccttggggcagccgcatcttattttaagctgaataacaggaggaactgcttcagaactcacgagccagaaaacgtttag

SEQ ID NO: 251571 - DNA, 2315 bp, Artificial Sequence
  derived and/or modified sequence
gtgtgcctacactggtcccacaggttttcagctgtggagtttgggatctgagcttggagcccatttgtttctggcagttccgctcatattttccacttgaagacatcgcctcccttccttccaagctgggagaccagaagtcaacaacaggagggtggagaggccgggtctcacaatccgcttggctggggagtccactgaggttcttgcatcctgaagcaaaccatggagagctggtggggacttccctgtcttgcgttcctgtgttttctaatgcacgcccgaggtcaaagagactttgatttggcagatgcccttgatgaccctgaacccaccaagaagccaaactcagatatctacccaaagccaaaaccaccttactacccacagcccgagaatcccgacagcggtggaaatatctacccaaggccaaagccacgccctcaaccccagcctggcaattccggcaacagtggaggttacttcaatgatgtggaccgtgatgacggacgctacccgcccaggcccaggccacggccgcctgcaggaggtggcggcggtggctactccagttatggcaactccgacaacacgcacggtggagatcaccattcaacgtatggcaatccagaaggcaatatggtagcaaaaatcgtgtctcccatcgtatccgtggtggtggtgacactgctgggagcagcagccagttatttcaaactaaacaataggagaaattgtttcaggacccatgaaccagaaaatgtctgaagatgttaagatcccctgattactttgagaaaaacaactaaaacaagaaccgtgtttatcactgttgtggagatttccttttattcttgacacaatttgatgacctaaagtgtgttttcttctgtgtaaagtacatgagctgcctcactaagcattcccaactcattgaatgtgatgtggttataaagataagttaggcagctagaccctgcgttctaaaaaaggattgcttgcaatgttggtttggctattcatttgcacaaagagactgtggctctctgttgtgagatcttcagctacctcatggtgcaataacacacacacgcttaaccatgttgatggcacaaagcggtgagcagtagggaggtagaatatcttggtggggaggggatgttatcagcttctgggagatgaagaatattgttgaggttccaaagatgctggacctgtgctaaattcttcagtgatatgaaaaaatcattgagcattcattattgcgaatgaagtggggatgcattatttctgacacccacaagcagggtttgatcatcctttcagctttgagatatctgcacataaaattattattacctgaagaaaataaggctgcattttgaaatgttaagtgcaaaatgactgatgttaaaaccatctgggggaaatcttgggatgctttttcctaggaaatcatatggttgtgatatgttttggcgcataggagacagaaatagtgattatcaggcgttgagcctttttgtagtatttttagtctttgatactctgtaagtgctagttcctaaggcaccaacattgcattccttggtttatactttttctattcatcagggtaggaagtcttaaatccttaggcatccaagaagtatactagctttttgcttctcttttagaaatacttgtggggagagaaaaaaggatggtttgggcatattggtatagtttgagtaaactaaggttaatgttcatataacatttagactttgccataaatatcagaaccaaagatcaagacattcatgtacagtctggaatgtatatatggggcccataaaaattcccagtatgcatgttttatgctcaccattatgaattggggtcttcaaagagagaaggttgaaagtggaaagcacttgaaagggctccccggtttgtaaaatatctttaatcattcacattaggtacctcggagttgcgggtctcaaatgtggattcatgcatcatttgtgcagtttgaagatagtccatatttcctatttcagtattaggtcctgcaacacttttcaattcttgtagaaggtttttttcaggagtggtgatgtctgatgctcaattactattttccctataagagtttcagcatgagcttaattaaattcttgtgaaaaaacctgtgtttttagttacacacacacacacacacacacctacttaaatggaatctaaacatttttagcctttaatccattccattttctaaaactgtcataaactatttttaatcattttaaataaatgtaaaagaaaaataa

SEQ ID NO: 251572 - protein, 414 aa, Artificial Sequence
  derived and/or modified sequence
MASPRTRKVLKEVRVQDENNVCFECGAFNPQWVSVTYGIWICLECSGRHRGLGVHLSFVRSVTMDKWKDIELEKMKAGGNAKFREFLESQEDYDPCWSLQEKYNSRAAALFRDKVVALAEGREWSLESSPAQNWTPPQPRTLPSMVHRVSGQPQSVTASSDKAFEDWLNDDLGSYQGAQGNRYVGFGNTPPPQKKEDDFLNNAMSSLYSGWSSFTTGASRFASAAKEGATKFGSQASQKFWGHKQQPEPASELGHSLNENVLKPAQEKVKEGKIFDDVSSGVSQLASKGVGSKGWRDVTTFFSGKAEGPLDSPSEGHSYQNSGLDHFQNSNIDQSFWETFGSAEPTKTRKSPSSDSWTCADTSTERRSSDSWEVWGSASTNRNSNSDGGEGGEGTKKAVPPAVPTDDGWDNQNW

SEQ ID NO: 251573 - DNA, 1245 bp, Artificial Sequence
  derived and/or modified sequence
atggcgtctccccgcacgaggaaagtcctgaaggaggtgagagttcaagacgagaataatgtctgcttcgaatgtggcgcctttaacccccaatgggtctctgtgacatacgggatctggatttgtctcgagtgctccggtcgacatcgcggcctcggcgtccacctatcttttgttcgatcagtcacaatggataaatggaaggacattgagttggagaaaatgaaggcaggcggcaacgcaaaatttcgtgagttcctagaatcccaggaagactatgacccgtgctggtccttgcaggagaagtacaactcccgagccgcagcgctgttccgggacaaagttgtggcgctggccgagggccgtgaatggtctcttgagagttcacccgctcagaattggaccccaccacagccccggactcttccttccatggttcatcgcgtgagcggccaaccacagagtgtcaccgctagttctgacaaggcttttgaagactggctgaatgatgacctcggatcctatcagggcgcccagggcaaccgatacgtgggcttcgggaacaccccaccgccgcagaaaaaagaagatgacttcttaaacaatgccatgagctctctgtattccggttggtcatcttttacaactggagcatccaggttcgcatcggccgccaaggaaggagctactaagttcggaagccaagcttcacagaagttctggggccacaaacaacagcccgaaccagctagtgagcttgggcactcactgaatgagaacgtgctaaagcctgcccaggaaaaggtgaaggaaggtaaaattttcgatgacgtcagctcaggggtgagtcagttggcgtccaaaggagtggggagcaaggggtggagagacgtgaccacattcttcagcgggaaggccgaaggaccgcttgactcacctagcgaggggcacagctaccagaattccgggctggaccacttccaaaattcaaacatcgatcagagcttttgggaaacctttgggtccgccgaacccacaaagacacggaaatccccttcatctgattcatggacttgtgctgacacaagcacagagcgcaggtcctccgatagctgggaggtgtggggctccgctagtaccaataggaacagcaactccgatgggggcgaggggggtgagggtacaaaaaaggcagttcctcccgccgtgcccacagatgatggttgggacaatcagaactggtag

SEQ ID NO: 251574 - DNA, 2776 bp, Artificial Sequence
  derived and/or modified sequence
cggccctacctcggccctggcctgaccccggcggccctgcccgcccctccctccagcatcatggccagcccaagaaccaggaaggttcttaaagaagtcagggtgcaggatgagaacaacgtttgttttgagtgtggcgcgttcaatcctcagtgggtcagtgtgacctacggcatctggatctgcctggagtgctcggggagacaccgcgggcttggggttcacctcagctttgtgcgctctgttactatggacaagtggaaggacattgagcttgagaagatgaaagctggtgggaatgctaagttccgagagttcctggagtctcaggaggattacgatccttgctggtccttgcaggagaagtacaacagcagagccgcggccctctttagggataaggtggtcgctctggccgaaggcagagagtggtctctggagtcatcacctgcccagaactggaccccacctcagcccaggacgctgccgtccatggtgcaccgagtctctggccagccgcagagtgtgaccgcctcctcggacaaggcttttgaagactggctgaatgatgacctcggctcctatcaaggggcccaggggaatcgctacgtggggtttgggaacacgccaccgcctcagaagaaagaagatgacttcctcaacaacgccatgtcctccctgtactcgggctggagcagcttcaccactggagccagccggtttgcctcggcagccaaggagggcgctacaaagtttggatcccaagcgagtcagaagttttggggtcacaagcagcagccggagccggcgtccgagctgggccacagcctgaacgagaacgtcctcaagcctgcgcaggagaaggtgaaggagggaaagatttttgatgatgtctccagtggggtctctcagttggcgtccaagggagtcggtagtaagggatggcgggacgtcaccacctttttttcggggaaagcagagggccccttggacagcccctcggagggccacagttatcagaacagcggtctggaccacttccaaaacagcaacatagaccagagcttctgggagacctttggaagtgctgagcccaccaagacccgcaagtccccgagcagcgacagctggacgtgcgcggacacctccaccgagaggaggagctcggacagctgggaggtgtggggctcggcctccaccaacaggaacagcaacagcgacggcggggagggcggggagggcaccaagaaggcagtgccgccggccgtgcccactgatgatggctgggacaaccagaactggtagggcccactgcgcccccgtccccagcgcccccgggcgacttcgtgtttgcactctgccctcgtcgttcctcctccttccatttgacccaagaatcagcaactgcagtgtgaggacagcgtctcgggaggcaggaccctagggagacccgggtgtgcgccgcctgcgcgtggggagtcttcggtgcgtgggggcggcttgctgtccagcctgtgtgggggccgtcccgtcccacactcccctgggcattcttggactcaaggccggggctctgcgtggcttgctgggaggtgggctgcagcacagaggcctgtgactgcgttccagcggccagttcactacgcagtatctctggggcctgggaccagccacgtgccgagctgtcagcgacgtgaggtgtcccttctcgttgagatatttaactttggttttgctctagttctttctttttgaagagagtgactggagtggtaaagatggaaatgctggaaatgatactggcgctcacgctgccatccgaccaccctcggctcccgagtccacgcctgcctgggcctgtgctgtcagacccgcgtcggtcgtaaccctctgtggctcccctgcatcagcaccgtcccaccaccaagttcaccaggttcaccagacacggcctccacaatagccacacccacacctgagctgttctcagtgctggaacttgaccatcctggaacaccctggaagaaaaaggagcgcagggtgggccctcggccctgatgcaggagggtgcgatagcggacgtggccaggcaggaggggccgggttcaggagctgagcaggggatgcctgtgcgtggtgcctgggtctagggaagctccagccccaggatggggctgccctgcacaccggtgcccgccacatgccaaccctcacctccccgaggactggatgatgtgctgccacgtgtgactcgtctcccttgtctgccctgtgtgaccctcagtcttggccagccatgcatgcgcccgaagctcgtgcagtttgtacgtgaggtgctctcctccctgccaccatgctcatcactctggccttggccatgctccctggtcaccccacttcccggtcgccgtctgcagcactcctggagcagcctgggcccttcagcccctgtgctcgtcccaccctagggactcagccacttgcagaacaggatgggaccgagatttcagcgagccctcctggcgcccggtcctccctgtgggcaccagccctcttggtagctggtgtggagggccggtgtccttggctgccacggagggatttgatcaccgaagcagccacctgctgtagttggacctgaggtcagaggcggggcatcagaggctcaaggtgctgagaagccaccgggaaagcagccagcacaaagggcccaggaagccagcccccgagagctgagcgtgggggtctttgagtgtctttctccaagctgagacgt

SEQ ID NO: 251575 - DNA, 1245 bp, Artificial Sequence
  derived and/or modified sequence
atggccagccccaggaccaggaaggtgctgaaggaggtgcgggtgcaggatgagaacaacgtgtgctttgaatgtggggccttcaacccccagtgggtgtctgtgacctacggcatctggatctgcctggagtgcagcggccgccaccggggcctgggcgtgcacctgagctttgtgcgctctgtgaccatggacaagtggaaggacatcgagctggagaagatgaaggccggcggcaatgccaagttccgggagttcctggagagccaggaggactatgacccctgctggagcctgcaggagaagtacaacagcagagctgctgccctcttccgggacaaggtggtggccctggccgagggccgggagtggagcctggagagcagccctgcccagaactggaccccaccccagcccaggaccctgcccagcatggtgcaccgggtgtctggccagccccagagcgtgacagccagcagtgacaaggcctttgaggactggctgaatgatgacctgggcagctaccagggcgcccagggcaacagatatgtgggcttcggcaacaccccaccaccccagaagaaggaggatgacttcctgaacaatgccatgagcagcctgtacagcggctggagcagcttcaccaccggggccagcagatttgccagcgctgccaaggagggcgccaccaagtttggcagccaggccagccagaagttctggggccacaagcagcagcctgagcccgccagcgagctgggccacagcctgaatgaaaatgtgctgaagccagcccaggagaaggtgaaggagggcaagatctttgatgatgtgagcagcggcgtgtcccagctggccagcaagggcgtgggcagcaagggctggagagatgtgaccaccttcttcagcggcaaggccgagggccccctggacagccccagcgagggccacagctaccagaacagcggcctggaccacttccagaacagcaacatcgaccagagcttctgggagaccttcggcagcgctgagcccaccaagaccaggaagagccccagcagtgacagctggacctgtgccgacaccagcacagagcggcgcagcagtgacagctgggaggtgtggggcagcgccagcaccaacagaaacagcaacagtgatggaggagagggcggggagggcaccaagaaggctgtgcccccagctgtgcccacagatgatggctgggacaaccagaactggtag

SEQ ID NO: 251576 - DNA, 1245 bp, Artificial Sequence
  derived and/or modified sequence
atggccagcccccggacccggaaggtgctgaaggaggtgcgggtgcaggacgaaaataacgtgtgtttcgagtgtggagcgtttaatccacagtgggtatccgttacgtacgggatttggatctgcctggagtgcagtggtagacaccgaggcctgggagtacacctgtccttcgtgaggtccgtaactatggacaaatggaaagacattgaactggaaaagatgaaggctgggggcaatgccaagttccgcgagttcctagagtctcaggaagactacgacccttgttggtccctccaggaaaagtacaattcaagagccgccgctttgttccgggataaagtggtggcgctcgcagagggacgagagtggagcttagaaagtagccctgcccagaactggacccccccccagcccaggacccttccctccatggtccatcgcgtgtcaggccagccccagagtgtgacagcctccagtgacaaggcgttcgaggattggcttaacgacgacctcggctcctatcagggtgctcaaggcaatcgatatgtgggttttgggaacactcctcccccccaaaagaaagaggacgactttcttaacaatgctatgtcttcgctgtactccggctggagcagctttaccacaggggcctcaaggtttgcaagcgccgctaaggagggagctacaaaattcggcagccaggcttcccagaaattttggggtcacaagcagcagccagagccagcctccgagctcgggcactctctgaacgagaatgtgcttaagcccgcccaggagaaggtcaaagagggcaagatcttcgacgacgtgagcagcggagtaagccagctggcctccaagggggtgggcagcaaaggttggagagacgtcactacgtttttttctggtaaggctgaggggcctctggatagcccctctgaagggcatagctatcaaaactccggacttgatcatttccagaatagcaatattgatcagtccttctgggagacattcgggagtgccgagccaacaaaaacacgcaagtctccaagctctgattcatggacctgcgccgacacctctacagagagaagatcatctgactcatgggaagtgtgggggtccgccagcacaaatcggaactccaactcagatggaggggagggaggagaaggcacaaagaaagcggtgccccctgcagtccccacagatgatggatgggacaatcagaactggtag

SEQ ID NO: 251577 - DNA, 1245 bp, Artificial Sequence
  derived and/or modified sequence
atggcaagcccacgtactcggaaggtactgaaggaagtacgcgtacaggacgagaacaacgtgtgtttcgagtgcggggctttcaacccgcagtgggtgtccgtgacgtacggaatctggatatgtctggagtgtagcggccgacaccggggactgggagtacacttgagcttcgttagatctgtgacaatggacaaatggaaggatattgaactcgagaaaatgaaggcaggaggaaatgccaagtttagggaattcctagaaagtcaggaggactacgacccctgctggagtctgcaggaaaagtacaacagcagagccgctgccctgtttcgcgacaaggtggtggcacttgccgaaggcagggagtggagcctggagagctctcccgcacagaactggactccccctcaaccgaggaccctgcccagcatggtgcatcgcgttagcggccagccacaaagcgtgactgctagcagcgataaggcgttcgaggattggctaaatgatgacctgggatcctaccagggcgctcaggggaatagatacgttggcttcggcaatactcccccaccacaaaaaaaagaagacgactttcttaataacgcaatgagtagtctgtatagcggatggtcctcctttactacaggagcatcccgcttcgcctccgcagctaaggagggcgctaccaagttcggttcccaggcatctcaaaaattttggggccataagcagcagcctgagccagcatcagagctgggacactcccttaatgagaatgtactcaagcccgctcaggagaaggtaaaagaggggaaaatcttcgacgacgtaagttctggggtctctcaactcgctagcaagggggtcgggtccaaaggttggcgtgacgttacgacattcttttctggtaaggctgaagggcctcttgacagtccctctgagggacacagctaccagaacagtggactggatcacttccagaattcgaatattgaccagtccttttgggagaccttcggatccgcagagcctactaagacacgcaaatccccttctagtgattcttggacgtgcgccgacacatccaccgagcgtcggtcgagcgacagctgggaggtctggggcagcgctagcaccaaccgcaactccaatagcgacgggggagagggtggggagggtactaagaaagcagtgccacccgctgtgccaacggatgacggctgggacaatcagaattggtag

SEQ ID NO: 251578 - DNA, 1245 bp, Artificial Sequence
  derived and/or modified sequence
atggccagccccagaaccagaaaggtgctgaaggaggtgagagtgcaggacgagaacaacgtgtgcttcgagtgcggcgccttcaacccccagtgggtgagcgtgacctacggcatctggatctgcctggagtgcagcggcagacacagaggcctgggcgtgcacctgagcttcgtgagaagcgtgaccatggacaagtggaaggacatcgagctggagaagatgaaggccggcggcaacgccaagttcagagagttcctggagagccaggaggactacgacccctgctggagcctgcaggagaagtacaacagcagagccgccgccctgttcagagacaaggtggtggccctggccgagggcagagagtggagcctggagagcagccccgcccagaactggacccccccccagcccagaaccctgcccagcatggtgcacagagtgagcggccagccccagagcgtgaccgccagcagcgacaaggccttcgaggactggctgaacgacgacctgggcagctaccagggcgcccagggcaacagatacgtgggcttcggcaacaccccccccccccagaagaaggaggacgacttcctgaacaacgccatgagcagcctgtacagcggctggagcagcttcaccaccggcgccagcagattcgccagcgccgccaaggagggcgccaccaagttcggcagccaggccagccagaagttctggggccacaagcagcagcccgagcccgccagcgagctgggccacagcctgaacgagaacgtgctgaagcccgcccaggagaaggtgaaggagggcaagatcttcgacgacgtgagcagcggcgtgagccagctggccagcaagggcgtgggcagcaagggctggagagacgtgaccaccttcttcagcggcaaggccgagggccccctggacagccccagcgagggccacagctaccagaacagcggcctggaccacttccagaacagcaacatcgaccagagcttctgggagaccttcggcagcgccgagcccaccaagaccagaaagagccccagcagcgacagctggacctgcgccgacaccagcaccgagagaagaagcagcgacagctgggaggtgtggggcagcgccagcaccaacagaaacagcaacagcgacggcggcgagggcggcgagggcaccaagaaggccgtgccccccgccgtgcccaccgacgacggctgggacaaccagaactggtag

SEQ ID NO: 251579 - protein, 1668 aa, Artificial Sequence
  derived and/or modified sequence
MSARAAAAKSTAMEETAIWEQHTVTLHRAPGFGFGIAISGGRDNPHFQSGETSIVISDVLKGGPAEGQLQENDRVAMVNGVSMDNVEHAFAVQQLRKSGKNAKITIRRKKKVQIPVSRPDPEPVSDNEEDSYDEEIHDPRSGRSGVVNRRSEKIWPRDRSASRERSLSPRSDRRSVASSQPAKPTKVTLVKSRKNEEYGLRLASHIFVKEISQDSLAARDGNIQEGDVVLKINGTVTENMSLTDAKTLIERSKGKLKMVVQRDERATLLNVPDLSDSIHSANASERDDISEIQSLASDHSGRSHDRPPRRSRSRSPDQRSEPSDHSRHSPQQPSNGSLRSRDEERISKPGAVSTPVKHADDHTPKTVEEVTVERNEKQTPSLPEPKPVYAQVGQPDVDLPVSPSDGVLPNSTHEDGILRPSMKLVKFRKGDSVGLRLAGGNDVGIFVAGVLEDSPAAKEGLEEGDQILRVNNVDFTNIIREEAVLFLLDLPKGEEVTILAQKKKDVYRRIVESDVGDSFYIRTHFEYEKESPYGLSFNKGEVFRVVDTLYNGKLGSWLAIRIGKNHKEVERGIIPNKNRAEQLASVQYTLPKTAGGDRADFWRFRGLRSSKRNLRKSREDLSAQPVQTKFPAYERVVLREAGFLRPVTIFGPIADVAREKLAREEPDIYQIAKSEPRDAGTDQRSSGIIRLHTIKQIIDQDKHALLDVTPNAVDRLNYAQWYPIVVFLNPDSKQGVKTMRMRLCPESRKSARKLYERSHKLRKNNHHLFTTTINLNSMNDGWYGALKEAIQQQQNQLVWVSEGKADGATSDDLDLHDDRLSYLSAPGSEYSMYSTDSRHTSDYEDTDTEGGAYTDQELDETLNDEVGTPPESAITRSSEPVREDSSGMHHENQTYPPYSPQAQPQPIHRIDSPGFKPASQQVYRKDPYPEEMMRQNHVLKQPAVSHPGHRPDKEPNLTYEPQLPYVEKQASRDLEQPTYRYESSSYTDQFSRNYEHRLRYEDRVPMYEEQWSYYDDKQPYPSRPPFDNQHSQDLDSRQHPEESSERGYFPRFEEPAPLSYDSRPRYEQAPRASALRHEEQPAPGYDTHGRLRPEAQPHPSAGPKPAESKQYFEQYSRSYEQVPPQGFTSRAGHFEPLHGAAAVPPLIPSSQHKPEALPSNTKPLPPPPTQTEEEEDPAMKPQSVLTRVKMFENKRSASLETKKDVNDTGSFKPPEVASKPSGAPIIGPKPTSQNQFSEHDKTLYRIPEPQKPQLKPPEDIVRSNHYDPEEDEEYYRKQLSYFDRRSFENKPPAHIAASHLSEPAKPAHSQNQSNFSSYSSKGKPPEADGVDRSFGEKRYEPIQATPPPPPLPSQYAQPSQPVTSASLHIHSKGAHGEGNSVSLDFQNSLVSKPDPPPSQNKPATFRPPNREDTAQAAFYPQKSFPDKAPVNGTEQTQKTVTPAYNRFTPKPYTSSARPFERKFESPKFNHNLLPSETAHKPDLSSKTPTSPKTLVKSHSLAQPPEFDSGVETFSIHAEKPKYQINNISTVPKAIPVSPSAVEEDEDEDGHTVVATARGIFNSNGGVLSSIETGVSIIIPQGAIPEGVEQEIYFKVCRDNSILPPLDKEKGETLLSPLVMCGPHGLKFLKPVELRLPHCDPKTWQNKCLPGDPNYLVGANCVSVLIDHF

SEQ ID NO: 251580 - protein, 905 aa, Artificial Sequence
  derived and/or modified sequence
MEHGTLLAQPGLWTRDTSWALLYFLCYILPQTAPQVLRIGGIFETVENEPVNVEELAFKFAVTSINRNRTLMPNTTLTYDIQRINLFDSFEASRRACDQLALGVAALFGPSHSSSVSAVQSICNALEVPHIQTRWKHPSVDNKDLFYINLYPDYAAISRAILDLVLYYNWKTVTVVYEDSTGLIRLQELIKAPSRYNIKIKIRQLPSGNKDAKPLLKEMKKGKEFYVIFDCSHETAAEILKQILFMGMMTEYYHYFFTTLDLFALDLELYRYSGVNMTGFRLLNIDNPHVSSIIEKWSMERLQAPPRPETGLLDGMMTTEAALMYDAVYMVAIASHRASQLTVSSLQCHRHKPWRLGPRFMNLIKEARWDGLTGHITFNKTNGLRKDFDLDIISLKEEGTEKIGIWNSNSGLNMTDSNKDKSSNITDSLANRTLIVTTILEEPYVMYRKSDKPLYGNDRFEGYCLDLLKELSNILGFIYDVKLVPDGKYGAQNDKGEWNGMVKELIDHRADLAVAPLTITYVREKVIDFSKPFMTLGISILYRKPNGTNPGVFSFLNPLSPDIWMYVLLACLGVSCVLFVIARFTPYEWYNPHPCNPDSDVVENNFTLLNSFWFGVGALMQQGSELMPKALSTRIVGGIWWFFTLIIISSYTANLAAFLTVERMESPIDSADDLAKQTKIEYGAVRDGSTMTFFKKSKISTYEKMWAFMSSRQQTALVRNSDEGIQRVLTTDYALLMESTSIEYVTQRNCNLTQIGGLIDSKGYGVGTPIGSPYRDKITIAILQLQEEGKLHMMKEKWWRGNGCPEEDNKEASALGVENIGGIFIVLAAGLVLSVFVAIGEFIYKSRKNNDIEQCLSFNAIMEELGISLKNQKKIKKKSRTKGKSSFTSILTCHQRRTQRKETVA

SEQ ID NO: 251581 - DNA, 2718 bp, Artificial Sequence
  derived and/or modified sequence
atggaacacggcactcttctggcacagcccggtctgtggacacgggacacaagctgggccctgctctattttctgtgttatatactaccccagaccgctcctcaggtgctacgaattggtggaattttcgagactgtggagaatgaaccagtcaacgtagaagagttggccttcaaattcgccgtgactagcatcaacaggaatcgcactctcatgccaaacacaacactgacctatgacattcaacgaattaatttatttgattcgttcgaagccagccgacgagcctgtgatcagcttgcattgggcgtggccgctctctttggaccaagtcatagctcgtcagtttcagcagtgcagtcgatttgtaacgctctcgaggtcccccatatccagactcgatggaaacacccaagtgtggacaacaaggacctgttctacattaacttgtacccagactacgccgcgatatcacgtgctattcttgacctggtgctctactataattggaaaaccgtcaccgttgtgtatgaggacagcaccggactcataagacttcaagagctcatcaaagctcccagtcgctacaacatcaaaatcaaaatccgacagctgccttccggtaacaaggatgccaaaccactcctgaaggagatgaagaaaggcaaagagttctatgtgattttcgattgttcccacgaaactgctgcagaaattctcaagcagatcctgtttatggggatgatgactgagtactatcattactttttcacaactttggatctttttgccctggatctggagctgtataggtatagcggcgtaaacatgacaggctttcgcctgctgaatatcgataaccctcatgtcagttcaataatcgagaaatggtccatggagcgactacaggcccccccaaggcccgaaaccggactgctggacggaatgatgaccactgaggctgcactaatgtatgacgccgtgtatatggtcgctattgcgtcccaccgcgcctctcagcttacagtgagttcattgcagtgtcaccgtcataagccttggagactcgggccacggttcatgaatctgataaaagaagcgaggtgggacggccttacgggccatatcacctttaacaaaacgaatggcctgcggaaagactttgacctggatattataagcctaaaagaagaaggaactgaaaagattggcatttggaattccaactcaggcctcaacatgactgatagcaacaaggacaagagctcgaacatcaccgactctctggctaataggacactcatcgtcacaacaattctagaggagccgtacgtgatgtaccggaagagcgacaagcctctgtacggcaacgaccgttttgagggatattgcttagacctgctgaaggaattgtccaacatcctggggttcatctacgatgttaaactcgtgccagacgggaaatacggcgcacagaatgacaagggcgaatggaatgggatggtgaaggaacttatcgatcaccgcgctgatttagccgtggctcctctgactatcacttacgtgagggagaaggtcatagacttttccaagcccttcatgacactgggcatttccatcctgtatcgtaagcctaacgggacgaaccctggcgttttcagctttctcaatccactttcaccagacatctggatgtacgtcctcctggcctgcctgggagtcagttgtgtgctgttcgtcatcgcacgatttaccccctacgaatggtacaatcctcatccatgtaatcccgatagcgatgtggtggaaaacaactttaccctgttgaacagtttctggtttggggtgggagcactgatgcagcaagggtctgagctcatgccaaaggccttgagcacacgcatcgtgggtgggatctggtggttctttacgttaattatcataagcagctacactgccaatcttgcagcgttcctcaccgtggagcggatggaatctcccatcgactctgcagatgatttggctaagcagactaagatagagtacggtgccgtgcgcgacggttctacgatgacttttttcaaaaagagtaagatttccacttatgagaagatgtgggcgtttatgtcttcccgccaacagactgccctggtgcgaaactcagacgaaggtattcagcgagtactgactaccgattatgcccttcttatggaatcgacctcgatagagtacgtcacgcagagaaactgcaatctcacccagattggcggactcatcgacagcaagggatacggggtcggaacccctattggctcgccgtaccgtgacaagattactatcgcaatcctgcaactgcaggaggagggtaagcttcacatgatgaaggagaagtggtggcgggggaatggatgccctgaagaggataataaagaagccagtgccctcggcgtggagaacattgggggaatctttatagtgctggccgccgggcttgtcttgtctgtgtttgtggccatcggcgagttcatctacaaatcaagaaaaaataacgatattgaacaatgcttatcttttaatgcaattatggaggaactgggaatctctctaaaaaatcaaaagaagatcaagaagaaatcgcgcaccaaaggcaaatcatcctttacttctattctcacatgtcaccagaggcggacacagaggaaggaaacagttgcctag

SEQ ID NO: 251582 - DNA, 2247 bp, Artificial Sequence
  derived and/or modified sequence
atggaacatggaacgttgctggcgcagccagggctgtggacgcgcgacacttcctgggccctgctgtacttcctgtgttatattctcccacagacggccccacaggttctccggatcgcctgcgaccaactggctctaggagtggcggccctgttcggcccatcgcacagcagctctgtcagcgccgtgcagtctatttgtaacgccttggaagtgcctcacatacagacccgctggaagcaccccagtgtggacaataaagacttgttttacatcaatctgtaccccgactatgccgcaatatcaagagctatcctggacctggtactttactataactggaagacggtgactgtggtttatgaagactctactggcctgatcaggctccaggagctcataaaggctcctagccgctacaatatcaaaattaagattagacagctgccctcaggtaacaaagacgcaaagccacttttgaaagaaatgaaaaaaggaaaagagttctacgtcatcttcgactgctcacatgaaacagccgccgagattctaaaacagatcctgtttatgggcatgatgaccgaatattatcactacttcttcactaccctggatctgttcgcactggacctagaactctatagatattctggcgtcaatatgactgggtttagattgctaaacatcgacaacccccatgtcagcagcatcatcgagaaatggagcatggaaagacttcaggcccccccacgcccagagactggactgctcgacggaatgatgacaaccgaggccgctctgatgtacgatgctgtctacatggtggccatcgcgtcacatcgagcctcacagttgacagtgtcctctctacagtgtcatcggcacaagccttggcgacttggcccacggttcatgaacctcataaaggaggcgcggtgggacgggctgaccggccacatcacattcaataagaccaatggcctgcggaaagattttgatctggatattattagcttgaaggaagagggcacagagaagattggcatatggaatagcaactctggcctgaatatgacagactcaaacaaggacaaatcatctaacattaccgactcgctggccaaccgcacgctgattgtgacaactatcctgcgggccgatctcgcggtcgcgccacttaccattacctacgtcagagagaaagtgatagacttctctaagcctttcatgaccctggggataagtattctgtatcgcaaacctaatggaaccaacccaggggtcttttctttcttaaatcccctgagtccggatatttggatgtacgtgctactggcatgtctaggcgtctcctgtgtgttgttcgtgatagcccggttcaccccatacgagtggtacaacccccatccctgtaaccctgattctgatgtcgtcgagaacaattttacactcctcaactccttttggtttggcgtgggagccctcatgcagcagggttcagagctcatgccaaaagcactgtcaacccggatagttggggggatctggtggttttttacactcatcatcatttcctcttacacagctaacctggcagctttcttgaccgtcgagcgaatggagtctcctatcgacagtgctgatgacctcgctaaacaaaccaagattgagtatggcgcagtgcgggacggttctacgatgaccttcttcaagaagtccaaaatcagcacatacgagaagatgtgggcttttatgtcaagccgccagcagaccgctctggtgaggaacagtgacgaaggcattcaacgcgttctgaccaccgactacgccttgttgatggaaagcacctccattgaatacgtgacacagcgaaattgcaatctcacacagataggcggcctgatagactcaaaggggtacggagtggggactccaatcggtagtccctaccgagacaaaattaccatcgcaatcttgcagttacaagaggaaggaaagctccacatgatgaaggaaaaatggtggagaggcaatggatgtcccgaggaagacaacaaggaagcttcagcattaggcgtggaaaacatcgggggcatctttatagtgttagccgctggattagtattgtccgttttcgtcgctatcggggaattcatctataagagcagaaagaataacgatattgagcagtgtctcagtttcaacgctatcatggaagaactcgggatatccctgaagaaccaatag

SEQ ID NO: 251583 - DNA, 3140 bp, Artificial Sequence
  derived and/or modified sequence
agcgcgcagcgtgcttggaaccggagcatccagagaggatgaggcggggacccggcccaagttgggtgcatctctcgggcgtccggcagcggctgtatctcggcatgaattaagaagctaggaagatggagcacggcacactcctcgcccagcccgggctctggaccagggacaccagctgggcactcctctatttcctctgctatatcctccctcagaccgccccgcaagtactcaggatcggagggatttttgaaacagtggaaaatgagcctgttaatgttgaagaattagctttcaagtttgcagtcaccagcattaacagaaaccgaaccctgatgcctaacaccacattaacctatgacatccagagaattaacctttttgatagttttgaagcctcgcggagagcatgtgaccagctggctcttggtgtggctgctctctttggcccttcccatagctcctccgtcagtgctgtgcagtctatttgcaatgctctcgaagttccacacatacagacccgctggaaacacccctcggtggacaacaaagatttgttttacatcaacctttacccagattatgcagctatcagcagggcgatcctggatctggtcctctattacaactggaaaacagtgacagtggtgtatgaagacagcacaggtctaattcgtctacaagagctcatcaaagctccctccagatataatattaaaatcaaaatccgccagctgccctctgggaataaagatgccaagcctttactcaaggagatgaagaaaggcaaggagttctatgtgatatttgattgttcacatgaaacagccgctgaaatccttaagcagattctgttcatgggcatgatgaccgagtactatcactactttttcacaaccctggacttatttgctttggatctggaactctataggtacagtggcgtaaacatgaccgggtttcggctgcttaacattgacaaccctcacgtgtcatccatcattgagaagtggtccatggagagactgcaggccccacccaggcccgagactggccttttggatggcatgatgacaactgaagcggctctgatgtacgatgctgtgtacatggtggccattgcctcgcaccgggcatcccagctgaccgtcagctccctgcagtgccatagacataagccatggcgcctcggacccagatttatgaacctgatcaaagaggcccggtgggatggcttgactgggcatatcacctttaataaaaccaatggcttgaggaaggattttgatctggacattattagtctcaaagaggaaggaactgaaaagattgggatttggaattccaacagtgggcttaacatgacggacagcaacaaagacaagtccagcaatatcactgattcattggccaacagaacactcattgtcaccaccattctggaagaaccctatgttatgtacaggaaatctgataagcctctatatggaaatgacagatttgaaggatattgcctagacctgttgaaagaattgtcaaacatcctgggtttcatttatgatgttaaactagttcccgatggcaaatatggggcccagaatgacaaaggggagtggaacgggatggttaaagaactcatagatcacagggctgacctggcagtggctcctcttaccatcacctacgtgcgggagaaagtcattgacttctccaaacccttcatgaccctaggcatcagcattctctaccggaagcccaatggtaccaatccaggcgttttctccttcctcaaccccctgtctccagatatttggatgtatgtgctcttagcctgcttgggagtcagctgtgtactctttgtgattgcaaggtttacaccctacgagtggtataacccccacccatgcaaccctgactcagacgtggtggaaaacaattttactttactaaatagtttctggtttggagttggagctctcatgcagcaaggatcagagctgatgcccaaagctctatcgaccagaatagttggagggatatggtggtttttcaccctaatcatcatttcatcctacacggccaatctggctgccttcttgacagtagagagaatggaatcccccatagattcggcagatgatctggcaaagcaaaccaagatagaatatggggcggttagagatggatcaacaatgaccttcttcaagaaatcaaaaatctccacctatgagaagatgtgggctttcatgagcagcaggcagcagaccgccctggtaagaaacagtgatgaggggatccagagagtgctcaccacagactacgcgctgctgatggagtccaccagcattgagtatgtgacgcagagaaactgcaacctcactcagatcgggggcctcattgactccaaaggttacggagtgggaacacctattggttctccttaccgggataaaattactattgctattcttcaactccaagaagaagggaagctgcatatgatgaaagagaagtggtggcgtgggaatggctgccccgaggaagacaacaaagaagccagtgccctgggagtggaaaatattggaggcatcttcattgttctggctgccggactggtcctttctgtatttgtagctattggagaattcatatacaaatcacggaagaataatgatattgaacagtgtctctctttcaacgctatcatggaagaactgggaatctcactgaagaatcagaaaaaaataaagaaaaagtcaagaactaaggggaaatcttccttcacaagtatccttacttgtcatcagagacgaactcagagaaaagagactgtggcgtgatccaaggaaacgcctgtaggaagaaaaaggatgcattccctacagatttttggagaaaggatttctgaggagtgtgtgatgtgtttccatatatctatatccataactctgattatgaatacagatataagaaatacaaaagtttaaaaagctcacatagatatgacttgggaagtgacaccagttcttttaaaataaatttgtatgctcaattattttgcattttttctttttccccaataaattgttgtgtgtgctttctaaataataataaaacaacagggtttttttccagaa

SEQ ID NO: 251584 - DNA, 2244 bp, Artificial Sequence
  derived and/or modified sequence
atggagcacggcacactcctcgcccagcccgggctctggaccagggacaccagctgggcactcctctatttcctctgctatatcctccctcagaccgccccgcaagtactcaggatcgcatgtgaccagctggctcttggtgtggctgctctctttggcccttcccatagctcctccgtcagtgctgtgcagtctatttgcaatgctctcgaagttccacacatacagacccgctggaaacacccctcggtggacaacaaagatttgttttacatcaacctttacccagattatgcagctatcagcagggcgatcctggatctggtcctctattacaactggaaaacagtgacagtggtgtatgaagacagcacaggtctaattcgtctacaagagctcatcaaagctccctccagatataatattaaaatcaaaatccgccagctgccctctgggaataaagatgccaagcctttactcaaggagatgaagaaaggcaaggagttctatgtgatatttgattgttcacatgaaacagccgctgaaatccttaagcagattctgttcatgggcatgatgaccgagtactatcactactttttcacaaccctggacttatttgctttggatctggaactctataggtacagtggcgtaaacatgaccgggtttcggctgcttaacattgacaaccctcacgtgtcatccatcattgagaagtggtccatggagagactgcaggccccacccaggcccgagactggccttttggatggcatgatgacaactgaagcggctctgatgtacgatgctgtgtacatggtggccattgcctcgcaccgggcatcccagctgaccgtcagctccctgcagtgccatagacataagccatggcgcctcggacccagatttatgaacctgatcaaagaggcccggtgggatggcttgactgggcatatcacctttaataaaaccaatggcttgaggaaggattttgatctggacattattagtctcaaagaggaaggaactgaaaagattgggatttggaattccaacagtgggcttaacatgacggacagcaacaaagacaagtccagcaatatcactgattcattggccaacagaacactcattgtcaccaccattctgagggctgacctggcagtggctcctcttaccatcacctacgtgcgggagaaagtcattgacttctccaaacccttcatgaccctaggcatcagcattctctaccggaagcccaatggtaccaatccaggcgttttctccttcctcaaccccctgtctccagatatttggatgtatgtgctcttagcctgcttgggagtcagctgtgtactctttgtgattgcaaggtttacaccctacgagtggtataacccccacccatgcaaccctgactcagacgtggtggaaaacaattttactttactaaatagtttctggtttggagttggagctctcatgcagcaaggatcagagctgatgcccaaagctctatcgaccagaatagttggagggatatggtggtttttcaccctaatcatcatttcatcctacacggccaatctggctgccttcttgacagtagagagaatggaatcccccatagattcggcagatgatctggcaaagcaaaccaagatagaatatggggcggttagagatggatcaacaatgaccttcttcaagaaatcaaaaatctccacctatgagaagatgtgggctttcatgagcagcaggcagcagaccgccctggtaagaaacagtgatgaggggatccagagagtgctcaccacagactacgcgctgctgatggagtccaccagcattgagtatgtgacgcagagaaactgcaacctcactcagatcgggggcctcattgactccaaaggttacggagtgggaacacctattggttctccttaccgggataaaattactattgctattcttcaactccaagaagaagggaagctgcatatgatgaaagagaagtggtggcgtgggaatggctgccccgaggaagacaacaaagaagccagtgccctgggagtggaaaatattggaggcatcttcattgttctggctgccggactggtcctttctgtatttgtagctattggagaattcatatacaaatcacggaagaataatgatattgaacagtgtctctctttcaacgctatcatggaagaactgggaatctcactgaagaatcag

SEQ ID NO: 251585 - DNA, 2718 bp, Artificial Sequence
  derived and/or modified sequence
atggagcacggcaccctgctggcccagcccggcctgtggacccgggacacctcctgggccctgctgtacttcctgtgctacatcctgccccagacagccccccaggtgctgagaattggaggcatctttgaaacagtggagaatgaacctgtgaatgtggaggagctggccttcaagtttgctgtgaccagcatcaacagaaacagaaccctgatgcccaacaccaccctgacctatgacatccagaggatcaacctgtttgacagctttgaggccagccggcgggcctgtgaccagctggccctgggcgtggccgccctgtttggccccagccacagcagctctgtgtctgctgtgcagagcatctgcaatgccctggaggtgccccacatccagacccgctggaagcaccccagcgtggacaacaaggacctcttctacatcaacctgtacccagactatgctgccatcagccgggccatcctggacctggtgctgtactacaactggaagacagtgacagtggtgtatgaggacagcacaggcctcatccggctgcaggagctgatcaaggcccccagccgctacaacatcaagatcaagatccggcagctgcccagcggcaacaaggatgccaagcccctgctgaaggagatgaagaagggcaaggagttctacgtgatctttgactgcagccatgaaacagctgctgagatcctgaagcagatcctcttcatgggcatgatgacagagtactaccactacttcttcaccaccctggacctgtttgccctggacctggagctgtaccgctacagcggcgtgaacatgacaggcttccggctgctgaacatcgacaacccccacgtgagcagcatcatcgagaagtggagcatggagcggctgcaggccccacccaggcctgagaccggcctgctggatggcatgatgaccacagaagctgccctgatgtatgatgctgtgtacatggtggccatcgccagccaccgggccagccagctgactgtgagcagcctgcagtgccaccgccacaagccctggaggctgggcccccgcttcatgaacctgatcaaggaggcccgctgggatggcctgaccggccacatcaccttcaacaagaccaacggcctgaggaaggactttgacctggacatcatcagcctgaaggaggagggcacagagaagattggcatctggaacagcaacagcggcctgaacatgacagacagcaacaaggacaagagcagcaacatcacagacagcctggccaacagaaccctgattgtgaccaccatcctggaggagccctacgtgatgtacaggaagagtgacaagcccctgtatggaaatgacagatttgagggctactgcctggacctgctgaaggagctgagcaacatcctgggcttcatctatgatgtgaagctggtgcctgatggcaagtatggagcccagaatgacaagggggagtggaatggcatggtgaaggagctgattgaccacagagctgacctggccgtggcccccctgaccatcacctacgtgcgggagaaggtgattgacttcagcaagcccttcatgaccctgggcatcagcatcctgtacaggaagcccaacggcaccaaccctggggtcttctccttcctgaaccccctgagcccagacatctggatgtatgtgctgctggcctgcctgggcgtgtcctgtgtgctgtttgtgattgcccgcttcaccccctatgagtggtacaacccccacccctgcaacccagacagtgatgtggtggagaacaacttcaccctgctgaacagcttctggtttggagtgggcgccctgatgcagcagggcagcgagctgatgcccaaggccctgagcaccagaattgtgggcggcatctggtggttcttcaccctcatcatcatcagcagctacacagccaacctggccgccttcctgactgtggagaggatggagagccccatcgacagcgcagatgacctggccaagcagaccaagattgaatatggagctgtgagagatggcagcaccatgaccttcttcaagaagagcaagatcagcacctatgagaagatgtgggccttcatgagcagccggcagcagacagccctggtgaggaacagtgatgagggcatccagagggtgctgaccacagattatgccctgctgatggagagcaccagcattgaatatgtgacccagaggaactgcaacctgacccagattggaggcctgattgacagcaagggctacggcgtgggcacccccatcggcagcccctacagagacaagatcaccatcgccatcctgcagctgcaggaggagggcaagctgcacatgatgaaggagaagtggtggagaggaaatggctgcccagaggaggacaacaaggaggccagcgccctgggcgtggagaacatcggcggcatcttcatcgtgctggccgccggcctggtgctgtctgtgtttgtggccatcggggagttcatctacaagagcaggaagaacaatgacatcgagcagtgcctgtccttcaatgccatcatggaggagctgggcatcagcctgaagaaccagaagaagatcaagaagaagagcaggaccaagggcaagagcagcttcaccagcatcctgacctgccaccagaggaggacccagaggaaggagaccgtggcctag

SEQ ID NO: 251586 - DNA, 2247 bp, Artificial Sequence
  derived and/or modified sequence
atggagcacggcaccctgctggcccagcccggcctgtggacccgggacacctcctgggccctgctgtacttcctgtgctacatcctgccccagacagccccccaggtgctgagaattgcctgtgaccagctggccctgggcgtggccgccctgtttggccccagccacagcagctctgtgtctgctgtgcagagcatctgcaatgccctggaggtgccccacatccagacccgctggaagcaccccagcgtggacaacaaggacctcttctacatcaacctgtacccagactatgctgccatcagccgggccatcctggacctggtgctgtactacaactggaagacagtgacagtggtgtatgaggacagcacaggcctcatccggctgcaggagctgatcaaggcccccagccgctacaacatcaagatcaagatccggcagctgcccagcggcaacaaggatgccaagcccctgctgaaggagatgaagaagggcaaggagttctacgtgatctttgactgcagccatgaaacagctgctgagatcctgaagcagatcctcttcatgggcatgatgacagagtactaccactacttcttcaccaccctggacctgtttgccctggacctggagctgtaccgctacagcggcgtgaacatgacaggcttccggctgctgaacatcgacaacccccacgtgagcagcatcatcgagaagtggagcatggagcggctgcaggccccacccaggcctgagaccggcctgctggatggcatgatgaccacagaagctgccctgatgtatgatgctgtgtacatggtggccatcgccagccaccgggccagccagctgactgtgagcagcctgcagtgccaccgccacaagccctggaggctgggcccccgcttcatgaacctgatcaaggaggcccgctgggatggcctgaccggccacatcaccttcaacaagaccaacggcctgaggaaggactttgacctggacatcatcagcctgaaggaggagggcacagagaagattggcatctggaacagcaacagcggcctgaacatgacagacagcaacaaggacaagagcagcaacatcacagacagcctggccaacagaaccctgattgtgaccaccatcctgcgggctgacctggccgtggcccccctgaccatcacctacgtgcgggagaaggtgattgacttcagcaagcccttcatgaccctgggcatcagcatcctgtacaggaagcccaacggcaccaaccctggggtcttctccttcctgaaccccctgagcccagacatctggatgtatgtgctgctggcctgcctgggcgtgtcctgtgtgctgtttgtgattgcccgcttcaccccctatgagtggtacaacccccacccctgcaacccagacagtgatgtggtggagaacaacttcaccctgctgaacagcttctggtttggagtgggcgccctgatgcagcagggcagcgagctgatgcccaaggccctgagcaccagaattgtgggcggcatctggtggttcttcaccctcatcatcatcagcagctacacagccaacctggccgccttcctgactgtggagaggatggagagccccatcgacagcgcagatgacctggccaagcagaccaagattgaatatggagctgtgagagatggcagcaccatgaccttcttcaagaagagcaagatcagcacctatgagaagatgtgggccttcatgagcagccggcagcagacagccctggtgaggaacagtgatgagggcatccagagggtgctgaccacagattatgccctgctgatggagagcaccagcattgaatatgtgacccagaggaactgcaacctgacccagattggaggcctgattgacagcaagggctacggcgtgggcacccccatcggcagcccctacagagacaagatcaccatcgccatcctgcagctgcaggaggagggcaagctgcacatgatgaaggagaagtggtggagaggaaatggctgcccagaggaggacaacaaggaggccagcgccctgggcgtggagaacatcggcggcatcttcatcgtgctggccgccggcctggtgctgtctgtgtttgtggccatcggggagttcatctacaagagcaggaagaacaatgacatcgagcagtgcctgtccttcaatgccatcatggaggagctgggcatcagcctgaagaaccagtag

SEQ ID NO: 251587 - DNA, 2718 bp, Artificial Sequence
  derived and/or modified sequence
atggagcacggcaccctgctggcccagcccggcctgtggacccgggatacatcctgggccctcctgtattttctgtgttatatcctgccgcaaacggctccacaggtgctgcgcatcgggggtattttcgaaacagtggagaatgagcctgtgaatgtagaagagttggctttcaagtttgctgtcacctccataaatcgcaaccgcactctgatgcccaacactacactcacctatgacattcagagaataaatctgtttgactcgttcgaagcctctaggcgcgcttgtgaccagctggctcttggagtggccgccctgtttgggccctctcactcttcatcagtctccgctgtgcagtccatatgtaacgccctggaagtgccacacatccagacacggtggaaacacccatctgtggacaacaaagacttattctacatcaacctttatcctgactatgcagccatcagccgtgccattctggacctcgtgctgtactacaactggaagacagttaccgtggtatatgaggatagcaccggcctcataagactgcaggaattgattaaggccccaagccggtataacataaagataaagattcggcagttaccatcaggcaacaaggatgctaagccattattaaaggagatgaagaaaggcaaggagttctacgtgatcttcgactgctctcacgagaccgcagcggagatcctgaagcagattctctttatgggcatgatgacagagtactatcactatttttttacaaccctggatctcttcgccctggatttggagctgtaccgatacagtggcgttaatatgacgggcttccggctacttaacattgataatccgcatgtgtctagcattattgaaaaatggagtatggagcgattgcaggccccccctcgccccgaaacaggcttattggacggcatgatgacaacggaggcggccttaatgtatgatgctgtctatatggtagccatcgcctcgcaccgcgctagccagcttaccgtgagcagcttgcagtgccatagacataagccatggcgtttaggtccaaggtttatgaatttaatcaaagaggcccgctgggacggcctgactgggcacattacattcaataagaccaacggccttagaaaagactttgacttggatattatttccttgaaagaagagggcactgagaaaatcggcatatggaacagcaactccgggttgaacatgactgattcaaacaaggataaaagcagcaatatcactgattccctagcaaatcgtactctgattgttaccaccattctagaggagccctacgtcatgtatcggaagtccgacaagcctttgtatggcaatgaccggtttgaggggtactgtctggacctcctcaaagagctctccaatatactgggctttatttatgacgtgaagctcgtccccgatggcaaatacggcgcgcaaaatgataaaggcgaatggaatggtatggtcaaagaacttattgaccatagggcagacctggctgtagcgccattgacaattacatatgtccgcgagaaagtaatcgatttctcgaaaccctttatgacgctgggcatatccattctgtataggaaacccaacggcacaaatccgggcgtgttcagtttcctcaaccctctgtcgccagatatatggatgtacgtattgctcgcctgcctcggagtctcctgtgtgctgttcgtgatagccaggtttacgccttacgagtggtataatcctcatccatgtaaccctgactctgacgtggtggaaaataactttactctattgaatagcttctggttcggggttggcgccctgatgcagcaggggagtgagctgatgccaaaagccctgtctaccagaatcgtcggaggcatttggtggttctttactctgatcattatttcaagttacaccgccaatctggccgcatttctgactgtggaacgtatggagagtccaatcgacagcgccgatgacctggcaaagcaaacaaagatcgagtatggtgcagtgcgcgatggctctaccatgactttctttaaaaaaagtaagatcagtacatatgaaaagatgtgggcattcatgtcttcacgtcaacagaccgcactggtacgaaatagtgatgaaggtattcagagggtgcttacaaccgactacgctttgctcatggaatcgacctccatcgaatatgtaactcaaaggaactgcaacttgacgcagatcgggggcctcatcgactcaaagggatatggcgtcggcactcctatcggatccccctatcgcgacaagattacaatagcaatcctacagttgcaggaagaagggaaattgcatatgatgaaggaaaagtggtggagagggaacggctgccctgaggaagacaacaaggaggcgtctgccctgggagtggagaacatcgggggcatcttcattgtgctggccgctggcctggtgctgtccgtgttcgtagcaattggggaatttatttacaaaagcaggaagaacaacgatatcgaacagtgtctgtcttttaacgccatcatggaggagctggggatttctttaaagaaccagaaaaagattaagaaaaagagccgtacgaaaggcaaatctagctttacatcaatcttaacctgtcaccagcgccgaacccagcgcaaggaaaccgtagcctag

SEQ ID NO: 251588 - DNA, 2247 bp, Artificial Sequence
  derived and/or modified sequence
atggagcacggcaccctgctggcccagcccggcctgtggacccgggacacctcctgggctctgctgtatttcctgtgttacatcctgccccagactgccccgcaggtgctaaggatcgcttgtgaccaactggcgctgggggtggctgcactctttggtccttcgcacagttcatctgtctcagccgtgcaatctatctgcaacgctttagaggttccgcatatccagacaagatggaagcatccgtcagtggataacaaggatctcttctacattaatctgtatccagattacgcagccatctccagagcaatcttagatctggtcttgtactacaattggaagacagtcaccgttgtttatgaggacagtaccggactgatcaggcttcaggagctgataaaagctccaagccgctacaacatcaagataaaaataaggcaattgccctctggcaacaaggacgcaaagcccctcctgaaagaaatgaaaaagggcaaagaattctatgtaatcttcgactgttctcacgagactgccgccgaaatcctcaagcagatactttttatggggatgatgaccgagtattaccattacttcttcactacactggatctgtttgccctggatctcgagctgtataggtactccggagtgaacatgacaggattccgacttcttaacatcgataacccccacgtgagtagtattattgagaagtggagcatggagaggctccaggctcccccacggccagaaactggactccttgatggaatgatgacaactgaggctgccctgatgtatgacgctgtttacatggttgcgatcgcatctcatcgagccagtcagttgacggtttcatccctccaatgccaccgacataaaccttggagactcggacctaggtttatgaatttaattaaagaagctaggtgggacggtcttactggccatataactttcaataagactaacggcctccgcaaagacttcgatttggacatcatcagcctgaaggaagaaggaactgaaaaaatcggtatctggaatagcaattcaggcctgaacatgaccgattccaataaggacaagtcaagcaacatcaccgattctctcgctaatcgcaccctgatcgtaacaacgattctgagagcagatctagctgtagcaccgttaaccattacctatgtgcgcgagaaagttattgatttctccaaaccatttatgaccctgggtattagtattctgtatcggaaacccaacggaactaatcccggtgttttctcgttcttgaatcctctcagccctgacatttggatgtacgtgctcctggcttgcctgggcgtttcatgtgttctttttgtaatcgcacgttttaccccttatgagtggtacaacccacacccttgtaatcctgattccgatgtggttgagaataatttcacactgctgaattccttctggttcggtgtaggtgctttaatgcagcagggttctgaactaatgcctaaggccctgagcactcgcattgtgggcggtatctggtggttcttcacactgattatcatctcaagttacactgctaacctcgccgcatttttgacggtggagcgcatggagtcacccattgactcggctgacgaccttgctaagcagaccaagattgagtacggcgctgtcagggatgggtccaccatgacatttttcaaaaagagtaaaatcagtacctacgaaaaaatgtgggccttcatgtcctcaaggcagcagactgccctcgtaaggaattcagatgaaggaattcagcgggtgttaaccacagattacgcccttttgatggagtcaacttcaattgagtacgtcactcaacgcaactgtaatctcactcagattggtggactgatcgacagtaaaggatacggcgtcgggacacctattggatctccctacagggacaagattactatcgcaatcctgcagctgcaagaggaaggaaaactgcacatgatgaaggagaagtggtggagagggaacggttgcccagaggaggataataaggaagcttcggctctaggggttgaaaacatcggcgggatctttatcgtcttggctgccgggctagtcctaagtgtgttcgtcgcaataggcgaatttatctacaaaagccgaaagaacaacgacatagaacagtgtctttccttcaatgccataatggaggaactcggcattagcttaaaaaaccagtag

SEQ ID NO: 251589 - DNA, 2718 bp, Artificial Sequence
  derived and/or modified sequence
atggagcacggaactctgttggcccagcccggtttgtggacccgagacacgtcctgggctttgctctacttcctttgctacatcttgcctcagaccgctccccaggtgcttcggattgggggtatttttgagaccgtcgaaaatgagcctgtgaacgtcgaggagttagcctttaagtttgcggttacgtccatcaatcggaacagaaccctcatgcctaacacaacacttacgtatgatattcagaggatcaaccttttcgattcgttcgaggcctctagacgagcttgcgaccaactggctctgggtgtagcagcgcttttcggaccttcccattcctcctcagtcagcgccgtgcagtccatctgtaatgccctggaagtgccacatatacagaccaggtggaagcatccaagcgtagataacaaggatctgttctatataaacctctacccggactacgctgccatcagtcgcgcaatattggacctggtgttgtattacaactggaagacagttaccgtggtctatgaagactctacgggcttgatccgtctgcaggaattaattaaggcccctagcagatacaatattaaaattaagatcaggcaactccccagtggtaacaaggatgcgaaaccacttctgaaggagatgaagaaaggtaaagagttttatgttatttttgactgtagtcatgaaactgctgccgaaatactgaaacagattctgttcatggggatgatgacagagtattatcattatttttttaccacactggatctgttcgccctggatctcgaactgtacaggtactctggcgtgaatatgacaggctttagactcctgaacatagataatccccacgtttcgagcataatagaaaagtggagcatggaacgcctgcaggctcccccacgtccagaaactggtctcctcgatggaatgatgaccacagaagccgcactcatgtatgacgcagtctacatggtggctatcgcctcacatcgagccagccagttaacggtatctagcctgcaatgtcataggcataaaccctggagactcgggccacggttcatgaacctgataaaagaggccaggtgggatgggctgaccgggcatatcacctttaacaagactaatggtctccgaaaggactttgatcttgatattatcagtttgaaagaagagggaacggagaaaatcggaatttggaattctaattcaggacttaacatgactgacagtaacaaagacaaatccagtaatattaccgattctcttgctaatcggaccctgatagtcacaacgattctggaggaaccttatgttatgtataggaagtccgacaaacccctatacgggaatgacaggttcgaaggatattgcctagatttactgaaggaactctcgaatattttgggctttatctacgatgtcaagctcgtgccagacggtaagtacggagcccagaacgataaaggggagtggaatggcatggtcaaggaactgatcgatcaccgagccgatctggctgtggcaccgttaaccattacttacgtgcgagaaaaagtcatcgatttctctaagcccttcatgacactgggcattagtatcctgtaccggaagcccaatggaacaaatccaggggtattctctttcctcaatcctttaagcccagatatctggatgtacgttctgctcgcttgtctgggcgtttcctgtgtactatttgtcatcgctaggttcaccccctacgaatggtacaacccacatccttgcaacccggatagtgatgtagtcgagaacaactttaccctcctcaacagtttttggttcggggtaggcgctttgatgcaacaaggaagcgaattaatgcccaaggcactatcaactcgaatagttgggggaatttggtggttttttacgttgatcattataagctcctataccgcaaacctggccgcttttttgaccgttgagcgtatggaaagtccaatagatagcgctgacgatctggctaagcagaccaaaatcgaatacggtgcggtgcgtgacggctcaacaatgacgtttttcaaaaagtccaagatttctacttatgagaaaatgtgggctttcatgtctagccgccagcagacggccctggtgaggaattccgacgaggggattcagagggtgctcacaaccgactacgcattgttgatggagagtacttcaatagagtatgtcactcaacgcaactgcaatctgacacagatcggcggtctgatcgattccaaaggctatggtgttggcacaccaatcggttccccctacagggacaaaataaccattgctatactacagttgcaggaggagggaaagctgcacatgatgaaagagaagtggtggcggggaaacggctgtccagaagaggataataaagaggccagcgctttaggcgtggaaaatataggaggtattttcatcgtcctagcggcaggcctggtgctctcggtgtttgtggccatcggtgagttcatctataagagcaggaaaaacaacgatatcgagcagtgtctctcttttaacgccataatggaggagcttgggatcagcctcaagaaccagaagaaaattaaaaaaaagtctcgtactaaaggcaagagctcatttaccagtatactgacgtgccaccagagaagaactcagcggaaagagactgtcgcatag

SEQ ID NO: 251590 - DNA, 2247 bp, Artificial Sequence
  derived and/or modified sequence
atggagcacggtactctgctggctcaacccggtctgtggacgcgtgacaccagctgggccctgctctacttcttgtgttacatactgccccaaactgcgccacaggtgctgcgcatcgcttgtgaccagctggctctgggagtagcagcacttttcggcccttctcacagcagctctgtgtctgcggttcagagtatttgcaatgccctcgaggtgccacacattcagaccaggtggaagcatccttctgttgacaacaaggacttgttctatataaacctgtatcctgattacgcagccatctctagggctatcctggacctggtattgtattacaattggaagacagtgaccgttgtgtacgaggactccacaggtctgatcaggttgcaggaacttattaaggcgccatctagatacaacattaaaataaaaatacgccagctcccttctgggaataaagacgcgaagccactactgaaggaaatgaaaaaaggcaaagaattctacgtcatcttcgactgctctcacgagacagccgctgagatcctcaaacagattctattcatgggtatgatgacggagtactaccattacttctttacaactctggatttattcgcccttgatctagagctgtaccggtattccggcgtaaacatgacggggttccgactgctgaatatcgacaatccccacgtgagttctatcatcgaaaagtggagtatggaaagactgcaggcacctccgagaccggaaaccggattactggacggtatgatgactaccgaggccgctctgatgtacgatgcggtgtacatggtagcaattgcctcccacagggcaagccagcttaccgtttcatctcttcagtgtcaccgacataaaccatggcggctgggcccacggtttatgaaccttatcaaggaggccagatgggacggactgacagggcacattacctttaataagaccaacgggcttcgaaaagactttgatctagatataattagccttaaagaagaaggaactgaaaagattggaatctggaactcgaactccgggctcaacatgacagacagcaataaagataagagctctaatattactgatagcctcgctaatcgcacccttattgtgaccacaatcctgcgggcagatcttgcagttgctcccctgaccattacctatgttagagagaaggtaattgacttctcaaagcccttcatgaccctcgggatcagcattctgtatagaaagccgaatgggactaatcctggcgtcttctcatttctgaacccactatcacctgacatctggatgtatgttctgttggcctgtctgggcgtgtcttgcgtgctgttcgtcatcgccaggttcaccccatatgaatggtataacccacacccctgcaacccagacagtgatgtggtggaaaacaacttcactttgctgaacagtttttggttcggagtcggagcactgatgcagcaggggtccgaactcatgccaaaggctctgagcacgagaatagtggggggaatatggtggttttttaccctgataattatctcgtcatacacggcaaaccttgctgccttcctcaccgtcgaaaggatggaaagcccaattgatagcgcagatgacctggccaagcagaccaagatcgaatatggcgctgtgcgcgatggaagtactatgacgttctttaagaaatctaaaatctccacatatgagaaaatgtgggccttcatgagttctcgccagcaaacagccttggtccgcaattcggacgagggtattcagcgcgtactcacaactgactacgccctgctcatggagagtactagcattgagtacgtgacacagagaaactgtaacctgacccagattgggggactgattgatagtaaaggctatggcgtggggactccgatagggtccccctatagggacaagatcactattgcaattcttcaactacaggaagagggcaaattgcacatgatgaaggagaagtggtggcggggtaatgggtgccccgaagaggacaacaaggaagcatccgccctcggcgtggagaacatcggcggaatattcatagtactggcagcaggtctcgtgctgtctgtattcgttgctatcggggagtttatctacaaaagtaggaagaacaacgacatagaacagtgtctgagctttaacgcaatcatggaagaactcggaatttcgctgaagaatcaatag

SEQ ID NO: 251591 - DNA, 2718 bp, Artificial Sequence
  derived and/or modified sequence
atggagcacggcaccctgctggcccagcccggcctgtggaccagagacaccagctgggccctgctgtacttcctgtgctacatcctgccccagaccgccccccaggtgctgagaatcggcggcatcttcgagaccgtggagaacgagcccgtgaacgtggaggagctggccttcaagttcgccgtgaccagcatcaacagaaacagaaccctgatgcccaacaccaccctgacctacgacatccagagaatcaacctgttcgacagcttcgaggccagcagaagagcctgcgaccagctggccctgggcgtggccgccctgttcggccccagccacagcagcagcgtgagcgccgtgcagagcatctgcaacgccctggaggtgccccacatccagaccagatggaagcaccccagcgtggacaacaaggacctgttctacatcaacctgtaccccgactacgccgccatcagcagagccatcctggacctggtgctgtactacaactggaagaccgtgaccgtggtgtacgaggacagcaccggcctgatcagactgcaggagctgatcaaggcccccagcagatacaacatcaagatcaagatcagacagctgcccagcggcaacaaggacgccaagcccctgctgaaggagatgaagaagggcaaggagttctacgtgatcttcgactgcagccacgagaccgccgccgagatcctgaagcagatcctgttcatgggcatgatgaccgagtactaccactacttcttcaccaccctggacctgttcgccctggacctggagctgtacagatacagcggcgtgaacatgaccggcttcagactgctgaacatcgacaacccccacgtgagcagcatcatcgagaagtggagcatggagagactgcaggccccccccagacccgagaccggcctgctggacggcatgatgaccaccgaggccgccctgatgtacgacgccgtgtacatggtggccatcgccagccacagagccagccagctgaccgtgagcagcctgcagtgccacagacacaagccctggagactgggccccagattcatgaacctgatcaaggaggccagatgggacggcctgaccggccacatcaccttcaacaagaccaacggcctgagaaaggacttcgacctggacatcatcagcctgaaggaggagggcaccgagaagatcggcatctggaacagcaacagcggcctgaacatgaccgacagcaacaaggacaagagcagcaacatcaccgacagcctggccaacagaaccctgatcgtgaccaccatcctggaggagccctacgtgatgtacagaaagagcgacaagcccctgtacggcaacgacagattcgagggctactgcctggacctgctgaaggagctgagcaacatcctgggcttcatctacgacgtgaagctggtgcccgacggcaagtacggcgcccagaacgacaagggcgagtggaacggcatggtgaaggagctgatcgaccacagagccgacctggccgtggcccccctgaccatcacctacgtgagagagaaggtgatcgacttcagcaagcccttcatgaccctgggcatcagcatcctgtacagaaagcccaacggcaccaaccccggcgtgttcagcttcctgaaccccctgagccccgacatctggatgtacgtgctgctggcctgcctgggcgtgagctgcgtgctgttcgtgatcgccagattcaccccctacgagtggtacaacccccacccctgcaaccccgacagcgacgtggtggagaacaacttcaccctgctgaacagcttctggttcggcgtgggcgccctgatgcagcagggcagcgagctgatgcccaaggccctgagcaccagaatcgtgggcggcatctggtggttcttcaccctgatcatcatcagcagctacaccgccaacctggccgccttcctgaccgtggagagaatggagagccccatcgacagcgccgacgacctggccaagcagaccaagatcgagtacggcgccgtgagagacggcagcaccatgaccttcttcaagaagagcaagatcagcacctacgagaagatgtgggccttcatgagcagcagacagcagaccgccctggtgagaaacagcgacgagggcatccagagagtgctgaccaccgactacgccctgctgatggagagcaccagcatcgagtacgtgacccagagaaactgcaacctgacccagatcggcggcctgatcgacagcaagggctacggcgtgggcacccccatcggcagcccctacagagacaagatcaccatcgccatcctgcagctgcaggaggagggcaagctgcacatgatgaaggagaagtggtggagaggcaacggctgccccgaggaggacaacaaggaggccagcgccctgggcgtggagaacatcggcggcatcttcatcgtgctggccgccggcctggtgctgagcgtgttcgtggccatcggcgagttcatctacaagagcagaaagaacaacgacatcgagcagtgcctgagcttcaacgccatcatggaggagctgggcatcagcctgaagaaccagaagaagatcaagaagaagagcagaaccaagggcaagagcagcttcaccagcatcctgacctgccaccagagaagaacccagagaaaggagaccgtggcctag

SEQ ID NO: 251592 - DNA, 2247 bp, Artificial Sequence
  derived and/or modified sequence
atggagcacggcaccctgctggcccagcccggcctgtggaccagagacaccagctgggccctgctgtacttcctgtgctacatcctgccccagaccgccccccaggtgctgagaatcgcctgcgaccagctggccctgggcgtggccgccctgttcggccccagccacagcagcagcgtgagcgccgtgcagagcatctgcaacgccctggaggtgccccacatccagaccagatggaagcaccccagcgtggacaacaaggacctgttctacatcaacctgtaccccgactacgccgccatcagcagagccatcctggacctggtgctgtactacaactggaagaccgtgaccgtggtgtacgaggacagcaccggcctgatcagactgcaggagctgatcaaggcccccagcagatacaacatcaagatcaagatcagacagctgcccagcggcaacaaggacgccaagcccctgctgaaggagatgaagaagggcaaggagttctacgtgatcttcgactgcagccacgagaccgccgccgagatcctgaagcagatcctgttcatgggcatgatgaccgagtactaccactacttcttcaccaccctggacctgttcgccctggacctggagctgtacagatacagcggcgtgaacatgaccggcttcagactgctgaacatcgacaacccccacgtgagcagcatcatcgagaagtggagcatggagagactgcaggccccccccagacccgagaccggcctgctggacggcatgatgaccaccgaggccgccctgatgtacgacgccgtgtacatggtggccatcgccagccacagagccagccagctgaccgtgagcagcctgcagtgccacagacacaagccctggagactgggccccagattcatgaacctgatcaaggaggccagatgggacggcctgaccggccacatcaccttcaacaagaccaacggcctgagaaaggacttcgacctggacatcatcagcctgaaggaggagggcaccgagaagatcggcatctggaacagcaacagcggcctgaacatgaccgacagcaacaaggacaagagcagcaacatcaccgacagcctggccaacagaaccctgatcgtgaccaccatcctgagagccgacctggccgtggcccccctgaccatcacctacgtgagagagaaggtgatcgacttcagcaagcccttcatgaccctgggcatcagcatcctgtacagaaagcccaacggcaccaaccccggcgtgttcagcttcctgaaccccctgagccccgacatctggatgtacgtgctgctggcctgcctgggcgtgagctgcgtgctgttcgtgatcgccagattcaccccctacgagtggtacaacccccacccctgcaaccccgacagcgacgtggtggagaacaacttcaccctgctgaacagcttctggttcggcgtgggcgccctgatgcagcagggcagcgagctgatgcccaaggccctgagcaccagaatcgtgggcggcatctggtggttcttcaccctgatcatcatcagcagctacaccgccaacctggccgccttcctgaccgtggagagaatggagagccccatcgacagcgccgacgacctggccaagcagaccaagatcgagtacggcgccgtgagagacggcagcaccatgaccttcttcaagaagagcaagatcagcacctacgagaagatgtgggccttcatgagcagcagacagcagaccgccctggtgagaaacagcgacgagggcatccagagagtgctgaccaccgactacgccctgctgatggagagcaccagcatcgagtacgtgacccagagaaactgcaacctgacccagatcggcggcctgatcgacagcaagggctacggcgtgggcacccccatcggcagcccctacagagacaagatcaccatcgccatcctgcagctgcaggaggagggcaagctgcacatgatgaaggagaagtggtggagaggcaacggctgccccgaggaggacaacaaggaggccagcgccctgggcgtggagaacatcggcggcatcttcatcgtgctggccgccggcctggtgctgagcgtgttcgtggccatcggcgagttcatctacaagagcagaaagaacaacgacatcgagcagtgcctgagcttcaacgccatcatggaggagctgggcatcagcctgaagaaccagtag

SEQ ID NO: 251593 - protein, 698 aa, Artificial Sequence
  derived and/or modified sequence
MEENVFWECKANGRPKPTYKWLKNGEPLLTRDRIQIEQGTLNITIVNLSDAGMYQCLAENKHGVIFSNAELSVIAVGPDFSRTLLKRVTLVKVGGEVVIECKPKASPKPVYTWKKGRDILKENERITISEDGNLRIINVTKSDAGSYTCIATNHFGTASSTGNLVVKDPTRVMVPPSSMDVTVGESIVLPCQVTHDHSLDIVFTWSFNGHLIDFDRDGDHFERVGGQDSAGDLMIRNIQLKHAGKYVCMVQTSVDRLSAAADLIVRGPPGPPEAVTIDEITDTTAQLSWRPGPDNHSPITMYVIQARTPFSVGWQAVSTVPELIDGKTFTATVVGLNPWVEYEFRTVAANVIGIGEPSRPSEKRRTEEALPEVTPANVSGGGGSKSELVITWETVPEELQNGRGFGYVVAFRPYGKMIWMLTVLASADASRYVFRNESVHPFSPFEVKVGVFNNKGEGPFSPTTVVYSAEEEPTKPPASIFARSLSATDIEVFWASPLEKNRGRIQGYEVKYWRHEDKEENARKIRTVGNQTSTKITNLKGSVLYHLAVKAYNSAGTGPSSATVNVTTRKPPPSQPPGNIIWNSSDSKIILNWDQVKALDNESEVKGYKVLYRWNRQSSTSVIETNKTSVELSLPFDEDYIIEIKPFSDGGDGSSSEQIRIPKISNAYARGSGASTSNACTLSAISTIMISLTARSSL

SEQ ID NO: 251594 - DNA, 2097 bp, Artificial Sequence
  derived and/or modified sequence
atggaggagaacgtattctgggaatgcaaagccaacggaagaccaaaacctacatataagtggctgaagaatggtgaacctctcctgacccgggacagaatccagatagaacagggcacccttaatattacgattgtgaatctctccgacgccgggatgtatcagtgtctcgccgaaaacaagcatggggtaatcttcagcaacgctgaactctccgttatcgcggtggggccagacttttcacggacgctcctgaaacgggtgacccttgtgaaggtggggggcgaggtcgtaatcgagtgcaagcccaaagcttccccaaaacctgtgtatacctggaagaaaggtcgtgacatcctaaaggaaaatgagagaatcactatttccgaagacggtaaccttcgtatcatcaacgtgaccaagtccgatgctggctcatacacgtgtattgcaacgaaccacttcggcactgcctcttcaactggcaaccttgtagtgaaagaccctacaagggtgatggtgccaccaagctccatggacgtgacagtcggagagtctattgtgttgccctgtcaggtaacccatgatcatagtctcgatatcgtgttcacatggtctttcaatggacacctgatcgactttgatcgggatggcgatcacttcgagagggtcggggggcaggattccgcaggagacctgatgatccgtaatatccagttgaagcacgcaggcaaatacgtgtgtatggtgcagacaagcgtggaccgcctgtccgccgccgccgatcttatagtcagaggcccacccggaccgccggaagccgttaccattgacgagattacagacacaactgcgcagctgtcctggcggccgggccctgacaatcatagtcctatcacaatgtacgtcatacaggcccgtactcctttctccgtgggttggcaggccgtttcgacagtgcccgagttgatcgatggaaagacattcactgcaacagtggtcggcctgaatccttgggtcgaatatgagtttaggaccgtagcagctaatgtaatcggcatcggtgaaccaagcaggccatcggagaagcggcgaactgaggaggctcttcctgaggtcacgccagctaacgttagtggcggcggcgggagcaagtccgaacttgtcatcacatgggagacagtgcccgaagagctacagaatggacggggcttcggttacgtcgtcgcctttagaccctatggaaaaatgatctggatgcttacggtgctggcgtcagccgacgcatcacgatatgtattcagaaatgagtcagtccaccctttttcccccttcgaggttaaagtgggggttttcaacaataaaggtgaaggaccatttagccctactacggtggtctacagcgctgaggaagaaccgacaaaaccaccagcctccatatttgcccggagcctgtcggctaccgacatcgaggtcttctgggcttctccacttgagaagaacagaggacgaatccaggggtatgaagtgaagtactggcgacacgaggacaaggaggagaatgctcggaaaattagaactgtagggaatcagacctcaacgaagattaccaaccttaagggatctgttttgtaccacttggccgtgaaagcctataacagcgccggtaccgggccctcgtctgccaccgtcaacgtgacaaccaggaaacccccgccctcgcagcctcctgggaatattatttggaactcttctgattctaaaatcatcttaaattgggaccaggtgaaggccctcgataacgaaagcgaagtcaaagggtacaaagttctgtatagatggaatagacagagctccaccagcgttatcgaaactaacaagacatcggtcgagctctcgcttcccttcgatgaggattacatcattgaaattaaacctttcagcgatggtggggacggttcgtccagcgagcaaattagaatccctaaaatcagtaacgcctacgcccgcggctcaggtgctagcacctccaacgcctgcaccttgtctgccattagcacaatcatgatatctctgactgcccgttcttccttgtag

SEQ ID NO: 251595 - DNA, 2097 bp, Artificial Sequence
  derived and/or modified sequence
atggaggagaatgtcttctgggaatgcaaagcgaatggccgccctaagccgacttataaatggctcaagaatggagagccattacttactagggaccgtattcaaatagagcagggcaccctcaatatcacaatcgtgaacttatcagacgccgggatgtaccagtgtcttgcagagaacaaacacggagtcatcttctctaacgccgaactgtccgtgatcgctgtggggcctgatttttcaagaacattgctcaaacgggtgacactagtcaaagttggcggtgaggtggttatcgaatgcaagccaaaggcctcccccaagccagtgtatacgtggaagaagggaagggacattttaaaggaaaatgagagaataacaatcagtgaggatgggaacttacgtattattaatgtgactaagtcagacgctggctcatatacttgtatagctacgaatcatttcggcacggcgagttctaccggaaacctggtggttaaggatccaacccgtgtaatggtgccgccttcatcaatggatgtgaccgtgggggaatcgattgtgcttccatgccaggtgacacacgatcactccctggatattgtgttcacatggagcttcaacggacatctgattgacttcgatagagatggagatcattttgaaagagtcgggggtcaagactccgcaggagacctaatgataagaaacatccagctaaagcatgcgggcaaatacgtttgtatggtgcagaccagtgtcgaccgtcttagtgccgcagctgacctcattgtgcgcggccccccaggcccgcctgaggccgtcacaatcgatgagataactgataccactgcacagctttcctggcgaccaggccccgacaatcactctcctatcactatgtacgtcatccaggcccgcacaccatttagtgtcggctggcaggctgtatccacagtcccagaactgattgatggtaaaacatttacagcaaccgttgtgggactgaacccatgggtcgagtatgagtttcgcacagtcgctgctaatgtgattgggataggcgaaccctcccggccatctgagaaacgccggacggaagaggcactgcccgaggtcactccggccaacgtatccgggggcggcggttctaaaagcgagctagtcatcacctgggagactgtaccagaagaactgcagaacgggagaggcttcggatatgtggttgcctttaggccctacggtaagatgatttggatgctgactgtccttgccagcgccgatgccagccggtatgtgttcagaaacgagtcagtacacccattctcacccttcgaggtcaaggtgggggtgtttaacaacaaaggggaaggccccttttctccaactaccgtggtctactccgcggaagaggagcctactaagccaccggccagcatatttgcacggtccctgtcggctactgatatcgaagtattttgggcaagcccactcgagaagaatagaggaagaatacaaggctatgaggtgaaatattggcgacatgaggacaaggaagaaaacgctcgcaaaatccgaacagtgggaaatcagacttcaactaagattactaatctgaaagggtcagtactctaccatttggccgtgaaggcgtacaattcggccgggacaggccctagcagcgcaaccgttaacgtgactactcgaaaaccaccccctagtcagcctccaggaaacatcatatggaactcctctgatagcaaaatcattttgaattgggaccaagttaaagcacttgacaatgaatccgaggtcaaaggctacaaggtgctgtatcgttggaacagacaatccagcactagcgtcatcgaaactaataagacaagtgtggaactgtccttacctttcgacgaggactacatcatcgaaatcaaacctttctcagacgggggcgatggtagcagttcagaacagatccgcatccctaagatcagcaacgcctatgcccggggtagcggtgctagcacttcgaacgcatgcacactctcggctatctcaaccattatgatcagtctcaccgctcgctccagcctgtag

SEQ ID NO: 251596 - DNA, 2097 bp, Artificial Sequence
  derived and/or modified sequence
atggaggagaatgtgttctgggagtgcaaggccaacggccggcccaagcccacctacaagtggctgaagaatggagagcccctgctgacccgggaccgcatccagatcgagcagggcaccctgaacatcaccatcgtgaacctgagtgatgctggcatgtaccagtgcctggccgagaacaagcacggcgtcatcttcagcaatgctgagctgtctgtgattgctgtgggccctgacttcagcaggaccctgctgaagagggtgaccctggtgaaggtgggcggggaggtggtgattgagtgcaagcccaaggccagccccaagcctgtgtacacctggaagaagggccgggacatcctgaaggaaaatgaaagaatcaccatcagtgaagatggcaacctgcgcatcatcaacgtgaccaagagtgatgctggcagctacacctgcatcgccaccaaccactttggaacagccagcagcactggaaacctggtggtgaaggaccccaccagggtgatggtgccccccagctccatggatgtgacagtgggggagagcatcgtgctgccctgccaggtgacccatgaccacagcctggacatcgtgttcacctggagcttcaacggccacctgattgactttgacagagatggagaccactttgagcgggtgggcggccaggacagcgctggggacctgatgatccggaacatccagctgaagcatgctgggaagtatgtgtgcatggtgcagacctctgtggaccggctgtctgctgctgctgacctgattgtgcggggccccccaggccccccagaggccgtgaccattgatgagatcacagacaccacagcccagctgtcctggaggcctggccctgacaaccacagccccatcaccatgtatgtgatccaggcccggacccccttctctgtgggctggcaggccgtgtccacagtgcctgagctgattgatggcaagaccttcaccgccaccgtggtgggcctgaacccctgggtggagtatgagttcagaacagtggccgccaacgtcatcggcatcggggagcccagccggcccagcgagaagagaagaacagaggaggccctgcctgaggtgaccccagccaacgtgtctgggggcggcggcagcaagtctgagctggtgatcacctgggagaccgtgcctgaggagctgcagaatggccggggcttcggctacgtggtggccttccggccctacggcaagatgatctggatgctgactgtgctggccagcgcagatgccagccgctacgtgttcagaaatgaatctgtgcaccccttcagcccctttgaggtgaaggtgggcgtcttcaacaacaagggggagggccccttcagccccaccaccgtggtgtacagcgctgaggaggagcccaccaagcccccagccagcatctttgcccggagcctgagcgccacagacatcgaggtgttctgggccagccccctggagaagaacagaggccgcatccagggctatgaggtgaagtactggaggcatgaggacaaggaggagaatgccaggaagatcagaacagtgggcaaccagaccagcaccaagatcaccaacctgaagggctctgtgctgtaccacctggccgtgaaggcctacaacagcgctggcaccggccccagcagcgccaccgtgaatgtgaccaccaggaagcccccacccagccagcccccaggcaacatcatctggaacagcagtgacagcaagatcatcctgaactgggaccaggtgaaggccctggacaatgaaagtgaggtgaagggctacaaggtgctgtaccgctggaaccggcagagcagcacctctgtgattgagaccaacaagacctctgtggagctgagcctgccctttgatgaggactacatcatcgagatcaagcccttcagtgatggaggagatggcagcagcagcgagcagatccgcatccccaagatcagcaatgcctatgcccggggcagcggggccagcaccagcaatgcctgcaccctgagcgccatcagcaccatcatgatcagcctgacagcccggagcagcctgtag

SEQ ID NO: 251597 - DNA, 2097 bp, Artificial Sequence
  derived and/or modified sequence
atggaggagaacgtgttctgggagtgcaaggccaacggccggcccaaacctacgtataagtggctgaagaatggcgagcccttattaacaagggaccgcatccaaatcgagcaaggaacactgaatatcaccattgttaacctgagcgacgccggcatgtaccaatgcctggcagaaaacaagcacggcgttattttcagtaacgccgagctctccgtcattgccgtgggaccagacttttctagaactcttctgaaaagagtgacattagttaaagtgggaggtgaagttgtgatcgagtgcaagccaaaggccagccctaagccagtatatacatggaagaaagggagagacatcctgaaagagaacgagagaatcactatcagtgaggatggaaacctgagaatcattaacgttacgaaaagcgacgcgggatcatatacatgtattgctaccaaccactttggtactgctagttctaccggtaatctcgtggttaaggatcccacccgggtcatggtccctccttcgtctatggacgtcaccgttggcgaaagcatagtgctgccatgccaggtcactcatgatcacagtttagacatcgtgttcacctggagtttcaatggccacctaattgacttcgatagggatggagaccacttcgagcgcgtgggcggacaggattcagcgggggaccttatgattaggaatatccaactgaagcacgctgggaagtatgtatgcatggttcagacatcggtcgaccggctgtccgcggctgctgacctgatagtaaggggacctcccggcccaccggaggccgtgactattgatgaaatcaccgacacaactgcacaactgtcctggcggcctgggccggataaccatagccccatcactatgtatgttatccaagctcgcacccccttttctgtcggctggcaagcggtttctacagtacctgagctgatcgacggcaaaaccttcaccgccactgtagtggggctcaacccatgggtggagtatgagttccgtacagtcgccgctaatgtaatagggatcggagagccatcacgcccatctgaaaagcggaggacagaagaagcactgccggaggtcacccccgctaatgtcagcggaggggggggtagcaaaagtgagctagtgatcacatgggaaactgtgcccgaggaactgcagaacggtcgcggcttcgggtatgtcgtcgcattccggccttatggcaagatgatctggatgctgaccgtgcttgccagcgctgatgcttcacgttacgtgttccggaatgagtccgtccatccctttagtccctttgaagtgaaagtgggagtatttaataacaagggtgaggggccattcagtccgacgaccgtggtgtacagcgctgaagaggagccaacgaagcctcccgcttccatattcgccaggtctctctccgctactgacatcgaggttttctgggcatcccccttggaaaagaatcgcggtcgcatacaaggctacgaggtgaagtactggaggcatgaggataaagaggagaatgcccggaaaataagaactgtggggaaccaaactagcaccaagataacaaaccttaagggctccgtcctgtaccatctggccgttaaagcctataacagcgccggtacgggaccttccagtgcgactgtgaatgtgaccacgcggaaaccccctccatcccaaccccccggaaacatcatctggaatagttccgacagcaaaattatattgaattgggaccaggttaaggcactggacaacgagagcgaggtcaaaggatataaggtgctttaccggtggaatcggcagagtagtacttctgtgatcgaaaccaataaaacgagcgtggaattaagtcttccattcgacgaggactacattatcgagatcaagcccttctcggatggcggcgacggatcatcctcagagcagatccgcatccctaagattagcaacgcgtatgctcgcggatctggcgcaagcacaagtaacgcatgcaccctgagcgcgatatcaacaattatgatctccctgaccgctagatcatccttatag

SEQ ID NO: 251598 - DNA, 2097 bp, Artificial Sequence
  derived and/or modified sequence
atggaggagaacgtgttctgggagtgcaaggccaacggccggcccaaacctacctataagtggttaaagaatggcgaacccctactaaccagagacaggatacagatcgaacagggaactttgaatattaccattgtcaacctatccgatgcaggtatgtaccagtgtctcgccgagaataagcatggagtcatcttttccaacgctgagttgagcgttattgcggtgggtcctgacttttctagaaccctgctgaagagggtgacactcgtcaaggtcggcggcgaggtcgtgattgaatgtaagcccaaggcaagtcctaaacccgtctacacatggaagaaggggcgagatattctgaaagagaatgagcggatcacaatttctgaggacggcaatctgcgtatcataaatgtcactaagtccgatgccggctcctacacttgtatagcaacaaaccactttggaacagcaagtagcaccggtaatctcgtcgtcaaggacccgactagggttatggtccctcccagctctatggacgtgaccgtgggggagtcaatcgtgctgccctgtcaggtgacccacgatcactctctggatattgtctttacctggtcgttcaatggccatttaatcgattttgaccgcgatggtgatcattttgagagagtgggaggccaggatagtgctggcgacctcatgattcgcaatatccagctgaaacacgccggcaagtacgtctgcatggtccagacttcggtggatcgcctgagcgccgctgccgacctgatagtacgaggtccacctggaccccctgaggccgtgacaatcgacgagataaccgacactaccgcacagctgagctggaggccgggtcctgacaaccatagtcccattacgatgtatgtcatacaagcccgcacccccttttccgtagggtggcaagcggtgagcacggtccctgagctgattgatggcaagacatttactgccactgttgtcggactcaatccttgggttgaatacgaattccggacagtggcagcaaatgtgattgggataggtgagcccagtcggccctctgagaagaggcgcacggaggaagcgttacccgaggtaacaccggctaacgtgtctggtggtggcgggtcaaagtctgagctcgtgatcacatgggagaccgtgcctgaggaactacaaaatggcagaggttttggttacgtagtagccttccggccgtatgggaagatgatctggatgctcaccgtgttggcatcagccgatgcatctcggtatgtatttagaaacgaatccgtccatccattctccccatttgaggttaaagtgggcgtgttcaacaacaagggtgaagggccattcagccccaccacagtagtctattctgccgaagaagaaccaaccaaacctcccgcgtctatctttgctaggtctctgagtgctaccgacatcgaggtgttctgggcttccccactggagaaaaataggggacgtatacaaggttacgaagttaaatactggaggcatgaggataaggaagagaacgcccggaaaattcgcactgtcggtaatcagacttcgaccaaaatcacaaatttgaaaggaagtgtcctgtaccacctggccgtgaaagcctataactcagctggcaccggaccctcatccgctacagtgaatgttacaacaagaaagccccctccatctcagcctccaggcaatattatatggaacagttccgactctaaaatcatccttaattgggatcaggtcaaagctcttgataatgaatctgaagttaagggctataaggtactttacaggtggaatcgccagtcaagtacctccgtcattgagactaacaagacatccgttgaactctcccttccatttgatgaggattatataatcgagatcaaacccttcagcgacggaggggatggaagcagttcagagcagatcaggatccctaaaattagcaacgcctacgcacggggatccggagcatccacctctaacgcatgcaccttaagtgccattagcactattatgatctcattgaccgcccgcagtagcctctag

SEQ ID NO: 251599 - DNA, 2097 bp, Artificial Sequence
  derived and/or modified sequence
atggaggaaaacgtcttttgggaatgcaaggccaatggcagacccaaacctacatataaatggctgaagaatggagaaccactcctgacaagggatcggatacagatcgagcagggcaccttgaacataacgattgttaacctgagtgacgcgggtatgtaccaatgtctggctgaaaacaaacacggagttatcttttccaacgccgaactctcggtgattgctgtcgggccagatttctcgagaacactgctcaagagggtgacgctggtcaaggtgggcggagaggtcgttatagaatgcaagccgaaggcctctcctaaaccagtgtatacatggaagaagggccgagacatcctgaaggagaacgaacggataaccatttccgaggatggaaatttgaggatcatcaatgtgacgaaatctgatgcgggatcctacacttgcattgccactaatcacttcggaaccgcctctagcactggcaacctggttgtgaaggaccccacacgcgttatggtccctcctagcagtatggacgtcaccgtcggagaaagtattgtccttccatgtcaggtgactcacgatcatagtctggacattgtttttacatggagtttcaatgggcacctcattgactttgatagggacggagaccatttcgagcgagttggaggacaggactccgccggtgacctgatgatcagaaatattcagttgaagcacgcaggtaagtatgtgtgtatggttcagacttcagtggaccgactctcagccgctgccgatctgatcgtgaggggtccacccggacctcccgaggcggtcacaatcgacgagattacagatactacagcgcagctgagctggagaccaggccctgacaatcacagtcccattacaatgtacgtgattcaggctaggaccccattttccgttggttggcaggctgtgtcaacagtaccagaactgatcgatggtaaaacattcacagctacagttgtgggcctcaacccctgggtggagtacgagtttcgcacagtcgctgcaaacgtcataggcattggagagcctagtagacccagcgaaaagaggcgaactgaggaggcactaccagaggtgacaccagctaatgtgtcaggtggcggtggcagcaagtccgagttggtcatcacatgggagaccgtgccggaggagttgcagaacggcagaggcttcgggtacgtcgtcgctttccgcccatacggaaagatgatttggatgctgaccgtcctcgcaagtgcagacgcttctcgttatgttttccggaacgagtcagtgcatccattttccccttttgaggtcaaagttggtgtgtttaacaataagggagagggacccttctcccctaccacggtggtatactctgctgaggaagaacccacaaagcccccagcttccatttttgcccgatcactgtccgctaccgatatcgaggtgttctgggcgtctccgcttgaaaaaaatcgtggcagaattcagggttatgaggtgaagtactggaggcacgaagataaggaggagaatgcaagaaagatccgcactgtcgggaaccagaccagcaccaagattacgaatctaaaaggtagtgttctgtaccatctggcagtgaaggcatataattctgcaggtactggtccatcttccgcaactgtgaatgtgaccacacgtaaacctcctccatcacagcccccaggcaatattatttggaactcttccgattccaagataatcttgaactgggaccaggtgaaagctctggataacgagagcgaagtaaaaggatataaagtgctttaccgttggaatcgtcaatctagcactagcgtgatcgaaactaataaaacctccgttgagctgagcctgcctttcgatgaggattacattatcgagatcaagcccttcagcgatgggggtgatggctctagctcggaacaaattcggatccccaagatttccaacgcctacgccagagggagcggagcttcaacgtctaacgcttgcactctctccgctatcagcaccatcatgatctccctcacagcgaggtctagtctatag

SEQ ID NO: 251600 - DNA, 2097 bp, Artificial Sequence
  derived and/or modified sequence
atggaggagaacgtcttctgggagtgcaaggcaaatggcaggcccaagccaacctataagtggcttaagaatggcgagccccttttgacaagagatcggatacaaatcgagcagggaactcttaacatcactattgttaacctatctgacgctggaatgtatcagtgcttggccgaaaacaagcatggagttatcttttctaacgccgagctgtctgtaatcgcagtggggccagatttctcaagaacactactgaaacgcgtgaccctggtgaaagttggcggtgaggtcgttatcgagtgtaaacccaaagcctctccgaaaccagtttatacctggaagaagggaagagacattctaaaagaaaatgagcgaattaccatcagcgaggacggaaatctgcggatcatcaatgtgacaaaatccgacgcgggttcctacacttgcatcgcgaccaatcatttcgggacagcttctagcactggcaatctggtggttaaggacccaacaagagtgatggtgcctccttcatccatggatgtgaccgtaggagagtctattgtgctgccgtgtcaggtgacacatgatcacagcctggatatcgtattcacctggtccttcaatggacatctcattgactttgaccgagacggtgaccacttcgaacgcgtgggcggtcaggacagtgctggcgatctgatgatcaggaacatccagttaaagcacgcaggcaagtatgtctgcatggtccagacatcagtagaccgcctctctgctgcggctgacttaatagttcggggtcctccagggccacccgaagccgtcacaatcgacgagataaccgacacgactgctcaactctcatggcgaccaggcccagacaatcattcccccattacaatgtatgttatccaggcgcgtacgcctttctccgttggatggcaggccgtgagtacagttccggaacttattgatggtaagacctttactgccacagtagtcggactgaacccatgggtcgaatatgagtttcgaaccgttgcggctaatgtgatcgggatcggagagccttcacgcccttctgaaaagcggcgtaccgaggaggccctccctgaagtaacacctgctaacgtgagcgggggaggaggttccaaatctgagttggtgattacatgggagaccgtgcctgaagaactgcagaacggtagaggatttggttacgttgtggccttccggccttacggaaagatgatctggatgttaacagtgctggcttccgccgacgcctcccgctatgtgttcaggaatgagagcgtccatccttttagtccatttgaggtgaaagtgggagtgttcaacaacaagggggagggacctttttctcctacaaccgttgtttattctgcagaggaggaaccaaccaaacctcctgccagcatattcgctcgctcattatcggctacagatatcgaggtgttctgggcctctcccctggagaagaatcgcggacgaatccaggggtacgaggttaagtattggcgacatgaggataaggaggagaacgccagaaagatacggacagttgggaaccaaacatcaaccaaaataactaacttaaaaggtagtgttttgtaccacctggcagtgaaggcttacaatagtgccggaacagggcctagttccgcaaccgtgaacgtaacaacacgaaagccacctccctcacagccccctggtaacattatctggaacagttctgatagcaaaataatcctgaactgggatcaagtgaaggccctggacaatgaatcagaggtgaagggttataaagttctgtatcggtggaaccgtcagagctctacatcagtcatagagacaaataagacatccgtcgagctctcactacccttcgacgaggattatatcattgaaatcaaacccttcagcgatggaggggacggtagcagctctgaacaaattaggatccctaagatttcaaatgcctatgcgagaggcagcggcgcaagcacatccaatgcttgcacattgtcagctatcagcacaatcatgatatcactcaccgccagaagttccctgtag

SEQ ID NO: 251601 - DNA, 2097 bp, Artificial Sequence
  derived and/or modified sequence
atggaggagaacgtgttctgggagtgcaaggccaacggcagacccaagcccacctacaagtggctgaagaacggcgagcccctgctgaccagagacagaatccagatcgagcagggcaccctgaacatcaccatcgtgaacctgagcgacgccggcatgtaccagtgcctggccgagaacaagcacggcgtgatcttcagcaacgccgagctgagcgtgatcgccgtgggccccgacttcagcagaaccctgctgaagagagtgaccctggtgaaggtgggcggcgaggtggtgatcgagtgcaagcccaaggccagccccaagcccgtgtacacctggaagaagggcagagacatcctgaaggagaacgagagaatcaccatcagcgaggacggcaacctgagaatcatcaacgtgaccaagagcgacgccggcagctacacctgcatcgccaccaaccacttcggcaccgccagcagcaccggcaacctggtggtgaaggaccccaccagagtgatggtgccccccagcagcatggacgtgaccgtgggcgagagcatcgtgctgccctgccaggtgacccacgaccacagcctggacatcgtgttcacctggagcttcaacggccacctgatcgacttcgacagagacggcgaccacttcgagagagtgggcggccaggacagcgccggcgacctgatgatcagaaacatccagctgaagcacgccggcaagtacgtgtgcatggtgcagaccagcgtggacagactgagcgccgccgccgacctgatcgtgagaggcccccccggcccccccgaggccgtgaccatcgacgagatcaccgacaccaccgcccagctgagctggagacccggccccgacaaccacagccccatcaccatgtacgtgatccaggccagaacccccttcagcgtgggctggcaggccgtgagcaccgtgcccgagctgatcgacggcaagaccttcaccgccaccgtggtgggcctgaacccctgggtggagtacgagttcagaaccgtggccgccaacgtgatcggcatcggcgagcccagcagacccagcgagaagagaagaaccgaggaggccctgcccgaggtgacccccgccaacgtgagcggcggcggcggcagcaagagcgagctggtgatcacctgggagaccgtgcccgaggagctgcagaacggcagaggcttcggctacgtggtggccttcagaccctacggcaagatgatctggatgctgaccgtgctggccagcgccgacgccagcagatacgtgttcagaaacgagagcgtgcaccccttcagccccttcgaggtgaaggtgggcgtgttcaacaacaagggcgagggccccttcagccccaccaccgtggtgtacagcgccgaggaggagcccaccaagccccccgccagcatcttcgccagaagcctgagcgccaccgacatcgaggtgttctgggccagccccctggagaagaacagaggcagaatccagggctacgaggtgaagtactggagacacgaggacaaggaggagaacgccagaaagatcagaaccgtgggcaaccagaccagcaccaagatcaccaacctgaagggcagcgtgctgtaccacctggccgtgaaggcctacaacagcgccggcaccggccccagcagcgccaccgtgaacgtgaccaccagaaagcccccccccagccagccccccggcaacatcatctggaacagcagcgacagcaagatcatcctgaactgggaccaggtgaaggccctggacaacgagagcgaggtgaagggctacaaggtgctgtacagatggaacagacagagcagcaccagcgtgatcgagaccaacaagaccagcgtggagctgagcctgcccttcgacgaggactacatcatcgagatcaagcccttcagcgacggcggcgacggcagcagcagcgagcagatcagaatccccaagatcagcaacgcctacgccagaggcagcggcgccagcaccagcaacgcctgcaccctgagcgccatcagcaccatcatgatcagcctgaccgccagaagcagcctgtag

SEQ ID NO: 251602 - protein, 141 aa, Artificial Sequence
  derived and/or modified sequence
MAPKVFRQYWDIPDGTDCHRKAYSTTSIASVAGLTAAAYRVTLNPPGTFLEGVAKVGQYTFTAAAVGAVFGLTTCISAHVREKPDDPLNYFLGGCAGGLTLGARTHNYGIGAAACVYFGIAASLVKMGRLEGWEVFAKPKV

SEQ ID NO: 251603 - DNA, 426 bp, Artificial Sequence
  derived and/or modified sequence
atggctcctaaggtgttccgacagtattgggacattcctgacgggaccgattgccatcgtaaggcttacagtaccacctcaattgcctcagtcgctggcctgacagccgctgcttacagagtcactcttaaccccccgggaacttttctggagggtgttgccaaagtggggcagtacactttcaccgcagcggccgtcggtgctgtgttcggactaaccacatgtatttccgcgcacgtccgggagaagcccgatgaccccttgaactacttcttgggagggtgtgccggcggcctgacgctgggggcaaggacccacaattacggtataggcgctgctgcctgtgtgtacttcggcattgctgcttctctggtgaagatgggccggttggaaggctgggaagtctttgcaaagccaaaggtttag

SEQ ID NO: 251604 - DNA, 426 bp, Artificial Sequence
  derived and/or modified sequence
atggcccccaaggtgttccggcagtactgggacatcccagatggaacagactgccacaggaaggcctacagcaccaccagcatcgcctctgtggccggcctgacagctgctgcctacagagtgaccctgaaccccccaggcaccttcctggagggcgtggccaaggtgggccagtacaccttcaccgctgctgctgtgggcgctgtgtttggcctgaccacctgcatcagcgcccacgtgcgggagaagccagatgaccccctgaactacttcctgggcggctgtgccggcggcctgaccctgggcgcccggacccacaactacggcatcggggctgctgcctgtgtgtacttcggcattgctgccagcctggtgaagatgggccgcctggagggctgggaggtgtttgccaagcccaaggtgtag

SEQ ID NO: 251605 - DNA, 799 bp, Artificial Sequence
  derived and/or modified sequence
acctaggactccctgagctgggactagcgaaatctgtctgcactgatcgcagtcgtcctcagtttcaccctctaggaatcggcctggggatgcacgtgctactctcttcctccaggccggtccccggcgcgtgcgcgcgatccatgtccatgtccgcgcctatcaataaagttgctcacttgttgccggcccgctagcccgaaaggttgcgcgcgcagcccgagaagtctcgcgatagccagccgcggctgcccttgcgcttcccgagctggcggggtccgtggtgcgggatcgagattgcgggctatggcgccgaaggtttttcgtcagtactgggatatccccgatggcaccgattgccaccgcaaagcctacagcaccaccagtattgccagcgtcgctggcctgaccgccgctgcctacagagtcacactcaatcctccgggcaccttccttgaaggagtggctaaggttggacaatacacgttcactgcagctgctgtcggggccgtgtttggcctcaccacctgcatcagcgcccatgtccgcgagaagcccgacgaccccctgaactacttcctcggtggctgcgccggaggcctgactctgggagcacgcacgcacaactacgggattggcgccgccgcctgcgtgtactttggcatagcggcctccctggtcaagatgggccggctggagggctgggaggtgtttgcaaaacccaaggtgtgagccctgtgcctgccgggacctccagcctgcagaatgcgtccagaaataaattctgtgtctgtgtgtg

SEQ ID NO: 251606 - DNA, 426 bp, Artificial Sequence
  derived and/or modified sequence
atggcccccaaggtgttccggcagtactgggacatccccgacggcactgattgccaccggaaggcctattctactactagcatcgctagcgtcgccggactcactgcggctgcttaccgggttactttgaatccgccagggacatttctggagggcgtcgcgaaagtgggacagtataccttcaccgcagctgcggtgggcgccgttttcggacttactacctgtatcagtgctcatgtacgggaaaagcccgatgacccccttaattactttctgggtggctgcgccgggggtctgaccttgggcgcccgcacgcacaactacggcattggtgctgcggcgtgtgtctactttgggatagcagcttccctggtgaaaatgggacggctagagggatgggaagtatttgcgaagcctaaggtgtag

SEQ ID NO: 251607 - DNA, 426 bp, Artificial Sequence
  derived and/or modified sequence
atggcccctaaagtgtttaggcagtactgggatatccccgatggaaccgactgccatcgcaaggcttatagcacaacttcaatcgccagtgtggcagggcttaccgccgcagcttacagggtgaccctgaaccctcccggtacctttctagaaggcgtagccaaggtgggccagtacacttttaccgccgctgctgtcggggctgtgtttggcttgaccacctgtatttcagcacacgtgcgcgagaagcccgatgatccactgaattacttcctcggaggttgtgctggcggactgacactgggtgcccgtacccataattatggcattggagcagctgcatgtgtttacttcggcattgcggcatccctggtcaagatgggaaggctagaaggctgggaggtgttcgcaaagccaaaagtctag

SEQ ID NO: 251608 - DNA, 426 bp, Artificial Sequence
  derived and/or modified sequence
atggcccccaaggtgttcagacagtactgggacatccccgacggcaccgactgccacagaaaggcctacagcaccaccagcatcgccagcgtggccggcctgaccgccgccgcctacagagtgaccctgaacccccccggcaccttcctggagggcgtggccaaggtgggccagtacaccttcaccgccgccgccgtgggcgccgtgttcggcctgaccacctgcatcagcgcccacgtgagagagaagcccgacgaccccctgaactacttcctgggcggctgcgccggcggcctgaccctgggcgccagaacccacaactacggcatcggcgccgccgcctgcgtgtacttcggcatcgccgccagcctggtgaagatgggcagactggagggctgggaggtgttcgccaagcccaaggtgtag

SEQ ID NO: 251609 - protein, 61 aa, Artificial Sequence
  derived and/or modified sequence
MDPNCSCATGGSCTCAGSCKCKECKCTSCKKSCCSCCPVGCAKCAQGCVCKGASEKCSCCA

SEQ ID NO: 251610 - DNA, 123 bp, Artificial Sequence
  derived and/or modified sequence
atggaccccaactacagctgcaccaccggcggcagctgcacctgcgccggcagctgcaagtgcaaggagtgcaagtgcaccagctgcaagaagagctgctgcttctgctgccccatgggctag

SEQ ID NO: 251611 - DNA, 123 bp, Artificial Sequence
  derived and/or modified sequence
atggacccaaactacagttgcactactggggggagttgcacatgcgccggctcttgcaagtgcaaagaatgtaagtgtacaagttgcaagaagtcttgttgcttctgctgtcccatgggatag

SEQ ID NO: 251612 - DNA, 123 bp, Artificial Sequence
  derived and/or modified sequence
atggaccccaactacagctgcaccactggaggcagctgcacctgtgccggcagctgcaagtgcaaggagtgcaagtgcaccagctgcaagaagagctgctgcttctgctgccccatgggctag

SEQ ID NO: 251613 - DNA, 123 bp, Artificial Sequence
  derived and/or modified sequence
atggaccccaactacagctgcaccaccggcggcagctgcacctgcgcgggaagctgcaagtgcaaggaatgtaagtgcacttcatgcaagaaatcctgttgcttctgttgccccatgggctag

SEQ ID NO: 251614 - DNA, 123 bp, Artificial Sequence
  derived and/or modified sequence
atggaccctaactattcatgcactacaggtggaagttgtacatgtgcaggcagctgcaaatgtaaagaatgcaaatgcacaagctgtaagaaatcctgctgtttctgctgtccaatgggctag

SEQ ID NO: 251615 - DNA, 186 bp, Artificial Sequence
  derived and/or modified sequence
atggatcctaattgcagctgcgccactggtgggtcttgcacatgtgccggaagttgtaagtgtaaagagtgcaagtgtacatcatgtaagaagtcatgttgcagttgctgcccagtggggtgtgcaaaatgcgcacagggctgtgtttgcaagggtgcctccgaaaagtgctcctgctgtgcctag

SEQ ID NO: 251616 - DNA, 186 bp, Artificial Sequence
  derived and/or modified sequence
atggaccccaactgcagctgtgccactggaggcagctgcacctgtgccggcagctgcaagtgcaaggagtgcaagtgcaccagctgcaagaagagctgctgcagctgctgccctgtgggctgtgccaagtgtgcccagggctgtgtgtgcaagggggccagcgagaagtgcagctgctgtgcctag

SEQ ID NO: 251617 - DNA, 704 bp, Artificial Sequence
  derived and/or modified sequence
cggaacacgctgggaggagggtggaaggcaacctcggggaaactgggaaaggcggcctggacttcgggaacaccgcgtacctgcgggggcacagccccacccgagcgaacgggctccaaaggggaggtcccgcggtgcccaccgcgcagagctcagggggtggtgcgcccggcccttctgcggcgcacagcccagcccaggaacgcgggcggtgcggactcagcgggccgggtgcaggcgcggagctgggcctctgcgcccggcccgacctccgtctataaatagagcagccagttgcagggctccattctgctttccaactgcctgactgcttgttcgtctcactggtgtgagctccagcatcccctttgctcgaaatggaccccaactgctcttgcgccactggtggctcctgcacgtgcgccggctcctgcaagtgcaaagagtgcaaatgcacctcctgcaagaagagctgctgttcctgctgccccgtgggctgtgccaagtgtgcccagggctgcgtctgcaaaggggcatcggagaagtgcagctgctgtgcctgatgtgggaacagctcttctcccagatgtaaatagaacaacctgcacaacctggatttttttaaaaatacaacactgagccatttgctgcatttctttttatactaaatatgtgactgacaataaaaacaattttgactttaa

SEQ ID NO: 251618 - DNA, 186 bp, Artificial Sequence
  derived and/or modified sequence
atggaccccaactgcagctgcgccaccggcggcagctgcacctgcgctggctcctgtaagtgtaaggagtgcaagtgcaccagctgtaagaagtcctgttgcagttgttgcccagtaggctgcgcgaagtgtgcgcagggatgtgtgtgtaaaggcgcatccgaaaagtgttcttgttgcgcctag

SEQ ID NO: 251619 - DNA, 186 bp, Artificial Sequence
  derived and/or modified sequence
atggacccaaattgtagctgcgcaacgggagggtcttgtacatgtgcgggttcatgtaagtgcaaggagtgcaagtgcacatcttgcaaaaaaagctgttgttcctgctgtccagtcggttgtgccaagtgcgctcaaggctgtgtttgtaagggtgccagtgagaagtgttcctgttgcgcctag

SEQ ID NO: 251620 - DNA, 186 bp, Artificial Sequence
  derived and/or modified sequence
atggaccccaactgcagctgcgccaccggcggcagctgcacctgcgccggcagctgcaagtgcaaggagtgcaagtgcaccagctgcaagaagagctgctgcagctgctgccccgtgggctgcgccaagtgcgcccagggctgcgtgtgcaagggcgccagcgagaagtgcagctgctgcgcctag

SEQ ID NO: 251621 - protein, 424 aa, Artificial Sequence
  derived and/or modified sequence
MAALGDEVLDGYVFPACPPCSYRYPYPAATKGKGAAGGSWQQRGRGCLPASSPCSAGAASLSFPGCGRLTAAEYFDSYQRERLMALLAQVGPGLGPRARRAGSCDVAVQVSPRIDAAVQCSLGRRTLQRRARDPESPAGPGAEGTTGGGSFSQQPSRRGLEQGSPQNGAPRPMRFPRTVAVYSPLALRRLTAFLEGPGPAAGEQRSGASDGERGPPPARLQGPEEGEVWTKKAPRRPQSDDDGEAQAAVRASWEQPADGPELPPREAQEGEAAPRSALRSPGQPPSAGRARDGGDGREAAVAGEGPSPRSPELGKERLRFQFLEQKYGYYHCKDCNIRWESAYVWCVQGTNKVYFKQFCRTCQKSYNPYRVEDITCQSCKQTRCSCPVKLRHVDPKRPHRQDLCGRCKGKRLSCDSTFSFKYII

SEQ ID NO: 251622 - DNA, 1438 bp, Artificial Sequence
  derived and/or modified sequence
atggcggccctgggggacgaggtgctggacggttacgtgttcccggcgtgccccccctgctcgtaccggtacccataccccgcggccaccaagggcaagggcgcggcgggcggcagctggcagcagcgcggcaggggctgccttcccgcctcctccccctgctcggcgggcgcggcctcgttgtccttcccgggctgcgggcggctgacggccgccgagtacttcgacagctaccagcgggagcggctcatggctctcctggcgcaggtggggccgggtctcgggccgcgcgcccgcagggccggcagctgcgacgtggcggtgcaggtgagcccgcgcatcgacgccgcggtacagtgctcgctggggaggcgcacgctgcagcgccgggcccgcgaccccgagtccccggccggccccggggccgagggcaccacgggtggcggctctttctcccagcagccatcccgtcgaggcctggagcagggcagcccccagaacggcgccccgcggcccatgcgcttcccgcgcaccgtcgccgtgtactcgcccctggccttgcgccgtctcaccgccttcctggaggggcccgggcccgcggcgggcgagcagaggtccggggcgtcggacggagagagggggccgccgcccgcgcggcttcaaggcccagaggagggggaggtgtggacgaagaaggcgccccggcggccgcagtccgacgacgacggcgaggcccaggccgcagtccgagcgagctgggagcagccggccgacggtcccgagctgccgccgcgagaggcccaggagggcgaggcggctccgcggtcggcgctaaggagcccggggcaacctccgtcggcggggagggcccgagacggcggcgacggacgggaggcggccgtcgcgggagaggggccgtcgccacggagcccggagctgggcaaggagcggctgcgcttccagttcttagagcagaaatatggctattaccactgcaaggactgcaacatccgctgggagagtgcttatgtgtggtgtgtacagggaactaacaaggtttacttcaaacagttttgcagaacttgtcagaagtcttataacccttaccgagtggaggatatcacctgtcaaagttgtaaacaaacgagatgttcctgcccagtaaaacttcgccacgtggaccctaaacggccccaccgtcaagatttgtgcggtagatgcaaaggcaaacgcctgtcctgtgacagcactttcagcttcaaatacatcatttaggtgaaagtcagtgttgctgtgcatgcgctgatggagtagacgagtgagcttttccgtgcctctcctccacctctcccttctcaaaatacttcatgaaaggcagtgtattctgaaaaagccttcaaataaaggtattgcaacacgatttatacattgcataaaa

SEQ ID NO: 251623 - DNA, 564 bp, Artificial Sequence
  derived and/or modified sequence
atggggtgctgcggctgctcaggtggctgcggctctggctgcggcggatgcgggagcggctgcggtgggtgtggcagttcatgctgtgtgcctatctgttgctgcaaacccgtctgctgttgcgtgcccgcctgcagctgctcgtcctgtgggtcctgcggagggtcaaagggaggccggggatcatgtggggggtcaaaaggggactgtggcagctgcggcggaagcaagggtggctgtggctcctgcggttgttcacagtgcagctgctataaaccatgctgttgcagctcaggatgcggaagctcttgctgtcagagttcatgctgcaaaccatgctgctctcaatcctcctgttgcaaaccttgcagctgtagctctggctgcggcagttcttgctgtcagtcatcttgttgcaagccgtgttgctcgcagtccagctgctgcaagccatgctgttgttcatccggctgcgggtcctcatgttgccagagtagttgctgtaagccctgctgctcacaaagtagctgttgtgtgcctatctgctgtcaatgtaaaatttag

SEQ ID NO: 251624 - DNA, 1275 bp, Artificial Sequence
  derived and/or modified sequence
atggccgccctgggcgacgaggtgctggacggctacgtgttccccgcctgccccccctgcagctacagatacccctaccccgccgccaccaagggcaagggcgccgccggcggcagctggcagcagagaggcagaggctgcctgcccgccagcagcccctgcagcgccggcgccgccagcctgagcttccccggctgcggcagactgaccgccgccgagtacttcgacagctaccagagagagagactgatggccctgctggcccaggtgggccccggcctgggccccagagccagaagagccggcagctgcgacgtggccgtgcaggtgagccccagaatcgacgccgccgtgcagtgcagcctgggcagaagaaccctgcagagaagagccagagaccccgagagccccgccggccccggcgccgagggcaccaccggcggcggcagcttcagccagcagcccagcagaagaggcctggagcagggcagcccccagaacggcgcccccagacccatgagattccccagaaccgtggccgtgtacagccccctggccctgagaagactgaccgccttcctggagggccccggccccgccgccggcgagcagagaagcggcgccagcgacggcgagagaggccccccccccgccagactgcagggccccgaggagggcgaggtgtggaccaagaaggcccccagaagaccccagagcgacgacgacggcgaggcccaggccgccgtgagagccagctgggagcagcccgccgacggccccgagctgccccccagagaggcccaggagggcgaggccgcccccagaagcgccctgagaagccccggccagccccccagcgccggcagagccagagacggcggcgacggcagagaggccgccgtggccggcgagggccccagccccagaagccccgagctgggcaaggagagactgagattccagttcctggagcagaagtacggctactaccactgcaaggactgcaacatcagatgggagagcgcctacgtgtggtgcgtgcagggcaccaacaaggtgtacttcaagcagttctgcagaacctgccagaagagctacaacccctacagagtggaggacatcacctgccagagctgcaagcagaccagatgcagctgccccgtgaagctgagacacgtggaccccaagagaccccacagacaggacctgtgcggcagatgcaagggcaagagactgagctgcgacagcaccttcagcttcaagtacatcatctag

SEQ ID NO: 251625 - DNA, 1275 bp, Artificial Sequence
  derived and/or modified sequence
atggccgcactgggcgacgaagtacttgacggctacgtgttccctgcatgcccgccatgctcataccggtatccctatcccgccgctaccaaagggaaaggtgctgccgggggctcttggcagcagcgaggacggggctgtctccccgcaagctctccgtgtagcgcaggcgccgccagtctctcatttccaggttgcggacggctaaccgcagctgagtacttcgacagctaccagcgcgaacggctaatggccttactggctcaggtcggccccggacttggccctcgcgcgaggcgggccggaagctgtgacgtggctgtgcaggtttccccaagaattgacgccgccgtgcagtgttcactgggacgcaggacacttcaacgccgtgcacgcgaccccgagtcccccgctggaccaggcgccgaggggacaacaggtggtggaagtttttctcagcagccctctcgcagaggactggaacaaggatcgccacaaaacggagcaccccggcctatgcgatttccaagaacggttgccgtgtactctcctcttgctctgcggagactcactgcttttctggaggggcctggccctgccgcaggagaacagcgtagtggcgcctccgacggcgagcgcgggcctccacccgcccgactacagggcccggaggagggagaggtgtggacgaaaaaggcgcccagacggccacagagcgacgatgatggcgaagcccaggcggccgtgcgtgccagctgggagcaaccggccgacggacccgaactccctcctagggaagctcaggagggggaagcagctccgagaagtgccctgcgctctcccggtcagccccccagcgccggacgagcgagagacggaggcgacggacgggaagccgccgttgcaggagaggggccctcacccagaagcccggagctggggaaggagcggttacggtttcagttcctagaacagaagtacgggtattaccactgcaaagattgcaacattcgctgggagtctgcttacgtctggtgcgttcagggcaccaacaaggtctacttcaagcaattctgcaggacttgccaaaagtcctacaatccctaccgcgtggaggacattacgtgtcagagttgcaaacagacaaggtgttcctgtcctgtgaaactccggcacgtggacccaaagagaccacatcggcaggacctgtgcggtcggtgcaaagggaaacggttgtcctgcgattccacttttagtttcaagtatatcatatag

SEQ ID NO: 251626 - DNA, 1275 bp, Artificial Sequence
  derived and/or modified sequence
atggccgccctgggagatgaggtgctggatggctacgtgtttcctgcctgccccccctgcagctaccgctacccctacccagctgccaccaagggcaaaggagctgctgggggctcctggcagcagaggggccggggctgcctgcctgccagcagcccctgcagcgctggggccgccagcctgtccttccctggctgcggccgcctgacagctgctgagtactttgacagctaccagcgggagcggctgatggccctgctggcccaggtgggccctggcctgggcccccgggccaggagagctggcagctgtgatgtggccgtgcaggtgagccccagaattgatgctgctgtgcagtgcagcctgggccgccgcaccctgcagaggcgggcccgggaccctgagagccctgctggccctggagctgagggcaccaccggcggcggcagcttcagccagcagcccagcagaagaggcctggagcagggcagcccccagaatggagccccccggcccatgaggttccccaggacagtggccgtgtacagccccctggccctgcggcggctgacagccttcctggagggccctggccctgctgctggggagcagaggtctggggccagtgatggagagcggggccccccaccagcccggctgcagggccctgaggagggggaggtgtggaccaagaaggccccccggcggccccagagtgatgatgatggagaggcccaggccgctgtgcgggcctcctgggagcagcctgcagatggccctgagctgcccccccgggaggcccaggagggggaggccgcccccaggtctgccctgcggagccctggccagccccccagcgctggccgggccagagatggaggagatggccgggaggccgctgtggccggggagggccccagccccaggagccctgagctgggcaaggagcggctgcgcttccagttcctggagcagaagtatggctactaccactgcaaggactgcaacatccgctgggagagcgcctacgtgtggtgtgtgcagggcaccaacaaggtgtacttcaagcagttctgcaggacctgccagaagagctacaacccctacagagtggaggacatcacctgccagagctgcaagcagacccgctgcagctgccctgtgaagctgcggcacgtggaccccaagaggccccaccggcaggacctgtgtggccgctgcaagggcaagaggctgagctgtgacagcaccttctccttcaagtacatcatctag

SEQ ID NO: 251627 - DNA, 1275 bp, Artificial Sequence
  derived and/or modified sequence
atggccgccctgggcgacgaggtgctggacggctacgtgttccccgcgtgcccgccttgttcataccgatacccctatcccgcagcaaccaagggcaagggagccgcaggaggttcatggcagcagcggggacgtgggtgtctacctgcttcatccccctgttccgccggggcggccagcctatcatttccagggtgtggtcgattaaccgccgccgaatacttcgacagctaccaaagggaacgcctgatggccctgctggcccaagtgggcccaggactagggcctcgagctcggcgagccggctcctgcgacgttgctgtccaagtatcccctaggattgacgctgccgtgcagtgttccctgggaagaaggaccttacagcgacgagcgagagatccagaatctcctgccggtccaggagccgaaggcacaacgggtggcgggtctttctcacagcagccgtccagacgtgggctcgagcagggttcacctcagaatggtgcccctaggcccatgcgctttccccgcaccgtagcagtttattcacccttagcactccggaggctgaccgcctttctggagggccccggaccagcggctggagagcagcggtccggagctagcgatggtgagcggggcccccctcctgctcgcctccaggggccagaggagggggaagtctggactaagaaagcccctcggaggcctcagagtgacgatgacggggaggcacaggccgctgttagggcttcatgggaacagcctgctgacggaccggaactgcctcctcgggaggcgcaggaaggtgaagccgccccacggagcgctctgcggtctccagggcaacctccctctgcggggcgcgccagagacggtggcgacggtcgggaagctgcagtagccggagagggccccagcccaagaagtccggaactcggaaaggagaggctgcggttccagtttctcgagcaaaaatatggctactaccactgcaaagattgcaatatcagatgggaatccgcctacgtctggtgtgtccaggggacaaacaaggtctacttcaagcagttttgccggacctgtcagaagtcatacaacccttaccgtgtggaggatatcacctgccaaagttgcaaacagactaggtgtagttgccctgtgaagctgagacatgtggacccaaagcgccctcacaggcaggatctgtgtggtaggtgcaaaggtaagcggttatcttgcgattccaccttctcattcaagtacatcatctag

SEQ ID NO: 251628 - DNA, 1275 bp, Artificial Sequence
  derived and/or modified sequence
atggccgcacttggcgacgaagttctagatggctatgttttccccgcttgtcccccttgctcatatcgctatccataccctgccgctactaaaggcaagggggctgcaggcggatcatggcagcaacgcggaagaggctgcctgcctgcaagctccccctgtagtgccggagccgctagtctgtcattccctgggtgcggacggttgaccgccgcagaatactttgattcttaccaaagggagcgcctaatggccctgttggcacaagttggaccgggtctcggcccacgcgctcgcagagcagggtcctgcgacgtagcagtgcaagtgtcccctaggatcgacgccgcagtacagtgctccctcggtcggaggacgctgcagaggagagctagagacccagagtctccggctgggccaggagcggaagggaccacggggggaggatctttctcacagcagccctcaagacgaggcctggagcagggatcaccgcaaaacggcgcaccccgaccgatgcgcttccccaggaccgtggccgtgtattctcccttggctctgaggaggctcaccgcgttcttggagggtccgggaccagctgccggagaacagagaagtggggcaagcgatggtgagagggggccaccccctgctaggttgcagggccctgaggagggagaggtctggaccaagaaggccccacgacgccctcagagcgacgatgatggagaggcccaggccgcagtgagggcttcgtgggagcagcctgccgacgggcctgaattaccccctcgcgaagcccaggaaggcgaagcagcgcctcggagcgccttgcgatctccgggtcaacccccatctgcaggcagagcaagggacggcggtgatggcagagaggccgcagtcgccggagaaggtccttccccacgttcccccgagctgggcaaggagcggctacgattccagtttctggaacagaaatacggctattaccactgtaaggactgtaatatccgctgggagagtgcatacgtttggtgtgtgcaggggaccaacaaagtgtattttaagcaattttgtcgtacatgccagaagtcttataacccataccgggtggaggatatcacatgtcagtcttgcaaacagactagatgtagctgtcctgtaaagctgcggcacgtcgaccctaaacgccctcaccggcaggatctttgcggcagatgcaaaggcaagcgactgagctgcgattctaccttctcttttaaatatatcatttag

SEQ ID NO: 251629 - DNA, 1460 bp, Artificial Sequence
  derived and/or modified sequence
gcctatttagggtgcggcggcgggcgggagcagtgcgcccatggcggccctgggggacgaggtgctggacggttacgtgttcccggcgtgccccccctgctcgtaccggtacccataccccgcggccaccaagggcaagggcgcggcgggcggcagctggcagcagcgcggcaggggctgccttcccgcctcctccccctgctcggcgggcgcggcctcgttgtccttcccgggctgcgggcggctgacggccgccgagtacttcgacagctaccagcgggagcggctcatggctctcctggcgcaggtggggccgggtctcgggccgcgcgcccgcagggccggcagctgcgacgtggcggtgcaggtgagcccgcgcatcgacgccgcggtacagtgctcgctggggaggcgcacgctgcagcgccgggcccgcgaccccgagtccccggccggccccggggccgagggcaccacgggtggcggctctttctcccagcagccatcccgtcgaggcctggagcagggcagcccccagaacggcgccccgcggcccatgcgcttcccgcgcaccgtcgccgtgtactcgcccctggccttgcgccgtctcaccgccttcctggaggggcccgggcccgcggcgggcgagcagaggtccggggcgtcggacggagagagggggccgccgcccgcgcggcttcaaggcccagaggagggggaggtgtggacgaagaaggcgccccggcggccgcagtccgacgacgacggcgaggcccaggccgcagtccgagcgagctgggagcagccggccgacggtcccgagctgccgccgcgagaggcccaggagggcgaggcggctccgcggtcggcgctaaggagcccggggcaacctccgtcggcggggagggcccgagacggcggcgacggacgggaggcggccgtcgcgggagaggggccgtcgccacggagcccggagctgggcaaggagcggctgcgcttccagttcttagagcagaaatatggctattaccactgcaaggactgcaacatccgctgggagagtgcttatgtgtggtgtgtacagggaactaacaaggtttacttcaaacagttttgcagaacttgtcagaagtcttataacccttaccgagtggaggatatcacctgtcaaagttgtaaacaaacgagatgttcctgcccagtaaaacttcgccacgtggaccctaaacggccccaccgtcaagatttgtgcggtagatgcaaaggcaaacgcctgtcctgtgacagcactttcagcttcaaatacatcatttaggtgaaagtcagtgttgctgtgcatgcgctgatggagtagacgagtgagcttttccgtgcctctcctccacctctcccttctcaaaatacttcatgaaaggcagtgtattctgaaaaagccttcaaataaaggtattgcaacacga

SEQ ID NO: 251630 - protein, 460 aa, Artificial Sequence
  derived and/or modified sequence
MANDPLEGFHEVNLASPTSPDLLGVYESGTQEQTTSPSVIYRPHPSALSSVPIQANALDVSELPTQPVYSSPRRLNCAEISSISFHVTDPAPCSTSGVTAGLTKLTTRKDNYNAEREFLQGATITEACDGSDDIFGLSTDSLSRLRSPSVLEVREKGYERLKEELAKAQRELKLKDEECERLSKVRDQLGQELEELTASLFEEAHKMVREANIKQATAEKQLKEAQGKIDVLQAEVAALKTLVLSSSPTSPTQEPLPGGKTPFKKGHTRNKSTSSAMSGSHQDLSVIQPIVKDCKEADLSLYNEFRLWKDEPTMDRTCPFLDKIYQEDIFPCLTFSKSELASAVLEAVENNTLSIEPVGLQPIRFVKASAVECGGPKKCALTGQSKSCKHRIKLGDSSNYYYISPFCRYRITSVCNFFTYIRYIQQGLVKQQDVDQMFWEVMQLRKEMSLAKLGYFKEEL

SEQ ID NO: 251631 - protein, 315 aa, Artificial Sequence
  derived and/or modified sequence
MANDPLEGFHEVNLASPTSPDLLGVYESGTQEQTTSPSVIYRPHPSALSSVPIQANALDVSELPTQPVYSSPRRLNCAEISSISFHVTDPAPCSTSGVTAGLTKLTTRKDNYNAEREFLQGATITEACDGSDDIFGLSTDSLSRLRSPSVLEVREKGYERLKEELAKAQRELKLKDEECERLSKVRDQLGQELEELTASLFEEAHKMVREANIKQATAEKQLKEAQGKIDVLQAEVAALKTLVLSSSPTSPTQEPLPGGKTPFKKGHTRNKSTSSAMSGSHQDLSVIQPIVKDCKEVTHQGLSPLTLLILVSSHH

SEQ ID NO: 251632 - protein, 166 aa, Artificial Sequence
  derived and/or modified sequence
MANDPLEGFHEVNLASPTSPDLLGVYESGTQEQTTSPSVIYRPHPSALSSVPIQANALDVSELPTQPVYSSPRRLNCAEISSISFHVTDPAPCSTSGVTAGLTKLTTRKDNYNAEREFLQGATITEACDGSDDIFGLSTDSLSRLRSPSVLEVREKGYERLKEELA

SEQ ID NO: 251633 - protein, 476 aa, Artificial Sequence
  derived and/or modified sequence
MGLKKMKGLSYDEAFAMANDPLEGFHEVNLASPTSPDLLGVYESGTQEQTTSPSVIYRPHPSALSSVPIQANALDVSELPTQPVYSSPRRLNCAEISSISFHVTDPAPCSTSGVTAGLTKLTTRKDNYNAEREFLQGATITEACDGSDDIFGLSTDSLSRLRSPSVLEVREKGYERLKEELAKAQRELKLKDEECERLSKVRDQLGQELEELTASLFEEAHKMVREANIKQATAEKQLKEAQGKIDVLQAEVAALKTLVLSSSPTSPTQEPLPGGKTPFKKGHTRNKSTSSAMSGSHQDLSVIQPIVKDCKEADLSLYNEFRLWKDEPTMDRTCPFLDKIYQEDIFPCLTFSKSELASAVLEAVENNTLSIEPVGLQPIRFVKASAVECGGPKKCALTGQSKSCKHRIKLGDSSNYYYISPFCRYRITSVCNFFTYIRYIQQGLVKQQDVDQMFWEVMQLRKEMSLAKLGYFKEEL

SEQ ID NO: 251634 - DNA, 1431 bp, Artificial Sequence
  derived and/or modified sequence
atgggcctgaagaagatgaagggcctgagctacgacgaggccttcgccatggccaacgaccccctggagggcttccacgaggtgaacctggccagccccaccagccccgacctgctgggcgtgtacgagagcggcacccaggagcagaccaccagccccagcgtgatctacagaccccaccccagcgccctgagcagcgtgcccatccaggccaacgccctggacgtgagcgagctgcccacccagcccgtgtacagcagccccagaagactgaactgcgccgagatcagcagcatcagcttccacgtgaccgaccccgccccctgcagcaccagcggcgtgaccgccggcctgaccaagctgaccaccagaaaggacaactacaacgccgagagagagttcctgcagggcgccaccatcaccgaggcctgcgacggcagcgacgacatcttcggcctgagcaccgacagcctgagcagactgagaagccccagcgtgctggaggtgagagagaagggctacgagagactgaaggaggagctggccaaggcccagagagagctgaagctgaaggacgaggagtgcgagagactgagcaaggtgagagaccagctgggccaggagctggaggagctgaccgccagcctgttcgaggaggcccacaagatggtgagagaggccaacatcaagcaggccaccgccgagaagcagctgaaggaggcccagggcaagatcgacgtgctgcaggccgaggtggccgccctgaagaccctggtgctgagcagcagccccaccagccccacccaggagcccctgcccggcggcaagacccccttcaagaagggccacaccagaaacaagagcaccagcagcgccatgagcggcagccaccaggacctgagcgtgatccagcccatcgtgaaggactgcaaggaggccgacctgagcctgtacaacgagttcagactgtggaaggacgagcccaccatggacagaacctgccccttcctggacaagatctaccaggaggacatcttcccctgcctgaccttcagcaagagcgagctggccagcgccgtgctggaggccgtggagaacaacaccctgagcatcgagcccgtgggcctgcagcccatcagattcgtgaaggccagcgccgtggagtgcggcggccccaagaagtgcgccctgaccggccagagcaagagctgcaagcacagaatcaagctgggcgacagcagcaactactactacatcagccccttctgcagatacagaatcaccagcgtgtgcaacttcttcacctacatcagatacatccagcagggcctggtgaagcagcaggacgtggaccagatgttctgggaggtgatgcagctgagaaaggagatgagcctggccaagctgggctacttcaaggaggagctgtag

SEQ ID NO: 251635 - DNA, 1431 bp, Artificial Sequence
  derived and/or modified sequence
atgggactcaaaaaaatgaaggggctatcttatgatgaggcattcgccatggctaatgatcctctggaaggatttcatgaggtaaacttagcatctcccacaagtcccgacctacttggagtctatgaaagcggcacccaggaacaaacgacctccccatctgtgatttacaggccacacccatctgctctcagttctgtccctattcaggccaacgcgctggacgtgagcgagctccccacccaacccgtgtattcatctccacgcaggctgaactgtgcggaaatatcatctatctccttccatgtgactgaccccgccccttgcagcacctcgggagtcactgccggactgacaaagctaacaacacgaaaggataactataatgccgagcgggaatttctgcagggcgcaaccatcacagaggcttgcgacgggtctgatgatattttcgggttatcgactgactccctgtctaggctgaggtcaccctcagtgctggaggtgagagagaagggatatgagcggctgaaggaggaactcgcaaaggctcagcgggaattgaagctgaaggacgaggaatgtgagcgcctgagtaaggtgagagaccagctgggtcaggaactggaagaacttactgcatcccttttcgaagaagcccataaaatggtgagggaagctaacattaagcaggcgacagctgagaaacaattgaaggaggcgcagggaaagatcgatgttctgcaagcagaagtggcggcactgaagactctggtgctgagctcttcaccaacgagccccacccaggagcccttgcctggcggaaagacaccgttcaaaaaaggacataccagaaacaaaagtacatccagtgccatgtcaggttcccatcaggacctgtccgtcatccagcctatagtgaaagactgtaaggaggctgacctgagtctgtataatgaatttcgtctctggaaagatgaacccacgatggatcgtacttgcccatttctggacaagatctaccaggaagatattttcccatgtctgacgttttccaagagtgaactggcatcagctgttctcgaggccgtggagaataacaccctcagcatcgaaccagtgggtttgcagcccattcgattcgtcaaggctagcgcagttgagtgcggtggcccgaaaaaatgcgctctgacaggccaaagcaagagctgtaagcatcggattaagctgggtgactcctccaactattactacatctcccctttttgccgctatagaatcaccagtgtctgcaattttttcacatatatcagatatatccagcaggggcttgtaaaacaacaggatgtggatcagatgttttgggaggtcatgcaacttagaaaagagatgtcactcgcaaagttagggtattttaaagaagagctctag

SEQ ID NO: 251636 - DNA, 1431 bp, Artificial Sequence
  derived and/or modified sequence
atgggcctgaagaagatgaagggcctgtcctatgatgaggcctttgccatggccaatgaccccctggagggcttccacgaggtgaacctggccagccccaccagcccagacctgctgggcgtgtatgagagcggcacccaggagcagaccaccagccccagcgtcatctaccggccccaccccagcgccctgagctctgtgcccatccaggccaatgccctggatgtgtctgagctgcccacccagcctgtgtacagcagcccccggcggctgaactgtgccgagatcagcagcatctccttccacgtgacagatcctgccccctgcagcaccagcggcgtgacagctggcctgaccaagctgaccaccaggaaggacaactacaatgctgagcgggagttcctgcagggcgccaccatcacagaggcctgtgatggcagtgatgacatcttcggcctgagcacagacagcctgagccggctgcggagccccagcgtgctggaggtgcgggagaagggctatgaaaggctgaaggaggagctggccaaggcccagcgggagctgaagctgaaggatgaggagtgtgagcggctgagcaaggtgcgggaccagctgggccaggagctggaggagctgacagccagcctgtttgaggaggcccacaagatggtgcgggaggccaacatcaagcaggccacagctgagaagcagctgaaggaggcccagggcaagattgatgtgctgcaggccgaggtggccgccctgaagaccctggtgctgagcagcagccccaccagccccacccaggagcccctgcccggcggcaagacccccttcaagaagggccacaccaggaacaagagcaccagcagcgccatgagcggcagccaccaggacctgagcgtcatccagcccatcgtgaaggactgcaaggaggccgacctgagcctgtacaatgagttccggctgtggaaggatgagcccaccatggacaggacctgccccttcctggacaagatctaccaggaggacatcttcccctgcctgaccttcagcaagtctgagctggccagcgctgtgctggaggccgtggagaacaacaccctgagcattgagcctgtgggcctgcagcccatccgctttgtgaaggccagcgctgtggagtgtggcggccccaagaagtgtgccctgaccggccagagcaagagctgcaagcaccgcatcaagctgggggacagcagcaactactactacatcagccccttctgccgctaccgcatcacctctgtgtgcaacttcttcacctacatccgctacatccagcagggcctggtgaagcagcaggatgtggaccagatgttctgggaggtgatgcagctgaggaaggagatgagcctggccaagctgggctacttcaaggaggagctgtag

SEQ ID NO: 251637 - DNA, 1431 bp, Artificial Sequence
  derived and/or modified sequence
atgggcctgaagaagatgaagggcctgagctacgacgaggccttcgccatggcaaacgatcctctggaggggttccatgaagttaacctggcttcaccgacatccccagacctgcttggcgtgtatgaaagtgggacgcaggagcagacgacttctccaagtgtcatatacaggcctcaccccagtgctctgtcctccgtccccattcaagcgaacgcgctcgacgtgagcgagctgcccactcagcctgtgtatagcagccctagaagactgaactgcgctgagatttcgagtatctcgttccatgtcactgatcccgccccatgctctacatccggagtcaccgctggcctcacgaaactcaccacgcgtaaggataactataacgcagagagggaatttctgcaaggcgctactataacagaggcgtgcgacggtagcgacgacatctttggattgtccactgattctctctctcggttgcggtctccctccgtgttggaggtgcgggagaaagggtatgaaaggctaaaggaagagttggccaaggcccagcgcgagctgaaactgaaagacgaggagtgcgagaggttgtccaaggtcagagatcagttggggcaagagctggaggaactcactgcgagcctgtttgaggaggcacataagatggtgcgcgaagcgaacatcaagcaggctacagctgagaagcagctgaaggaggctcaggggaaaatagacgtgctccaggcagaggtggctgctctcaaaacgcttgttttatctagtagtcctacctcaccaacacaggagcccctacccggcggcaagacacccttcaagaagggacatactcgcaacaaatctaccagctcagccatgagtggctcgcaccaggacttgagcgtaattcaacctatagttaaggactgtaaagaagcagacctgagcctgtacaacgaatttcgtttgtggaaagacgagccaaccatggacaggacctgtccttttctggacaagatttatcaggaggacatatttccatgtctcactttctcgaaatctgagttggctagcgccgtgctcgaagcagtcgaaaacaacacattatctatagagcctgttgggctccagccgatccgattcgtgaaagcgagcgccgtcgaatgcgggggacccaaaaagtgcgcactcacagggcagtcaaagtcctgtaagcatagaataaagctgggcgactctagtaactattactatatttcccccttttgtcgctacaggatcacttccgtgtgcaactttttcacatatatccggtacatacaacaggggctggtgaaacaacaggatgtggatcagatgttctgggaggtgatgcagcttagaaaggaaatgtccttggcaaagttgggttacttcaaggaggaattatag

SEQ ID NO: 251638 - DNA, 3690 bp, Artificial Sequence
  derived and/or modified sequence
gggccagggccgtgacacctgcgacgagccccgcctggcgccagggggcgcggaagcgcgtccgcccccaggccccatgccgggctcgccccgcccctgccggccacacccccctaccccgccctccctccgtgaggaccggccgctcccggctcccggcccccggccccgcttccggcgcaggcgcagtcccgcgttccctcggcggctgccggcgtagtgagcccgccgccgtggagtgtagcggaaagggctcgccgtcctcctccgtttctcgctgcttcgggacgcgctctctgcggctctgtgagcgcccctgagcgccggcagcggccgcggtgggttcttcaggttatcttatgatgaggcttttgctatggctaatgatcccttggaaggcttccatgaagtaaaccttgcttcacctacttctccggaccttcttggtgtgtatgaatcaggaactcaagagcagactacctcaccaagtgtcatctaccggccacacccttcagctttatcctctgtacctatccaggcaaatgcattagatgtttctgaacttcctacacaacccgtgtattcatcccccagacgtttaaattgtgcggaaatatctagtatcagctttcatgttacagacccagccccttgctctacctctggagtcacagctggattaactaaattaactacaagaaaggacaactataatgcagagagagagtttttacagggtgctactataacagaggcttgcgatggcagtgatgatatttttgggttgagtactgatagtctgtctcgtttacgaagcccatctgttttggaagttagagaaaagggctatgaacgattaaaagaagaactcgcaaaagctcagagggaactgaagttaaaagatgaagaatgtgagaggctttcaaaagtgcgagatcaacttggacaggaattggaagaactcacagctagtctatttgaggaagctcataaaatggtgagagaagcaaatatcaagcaggcaacagcagaaaaacagctaaaagaagcacaaggaaaaattgatgtacttcaagctgaagtagctgcattgaagacacttgtattgtccagttctccaacatcacctacgcaggagcctttgccaggtggaaagacaccttttaaaaaggggcatacaagaaataaaagcacaagcagtgctatgagtggcagtcatcaggacctcagtgtgatacagccaattgtaaaagactgcaaagaggctgacttatccttgtataatgaattccgattgtggaaggatgagcccacaatggacaggacgtgtcctttcttagacaaaatctaccaggaagatatctttccatgtttaacattctcaaaaagtgagttggcttcagctgttctggaggctgtggaaaacaatactctaagcattgaaccagtgggattacaacctatccggtttgtgaaagcttctgcagttgaatgcggaggaccaaaaaaatgtgctctcactggccagagtaagtcctgtaaacacagaattaaattaggggactcaagcaactattattatatttctcctttttgcagatacaggatcacttctgtatgtaacttttttacatacattcgatacattcagcagggactcgtgaaacagcaggatgttgatcagatgttttgggaggttatgcagttgagaaaagagatgtcattggcaaagctgggttatttcaaagaggaactctgatgctctgcgtgggaccatgcctgaactccccgaataactgaaaaatggctgaatatttttatggttacttgatatttatttccaaggagtgagcctaagacttttttccccttttgcaaattgctctaagaagtaccatgatttcttttaaactgatctatgctgtgtttgcttattctttagttgaacacactatgaagaattccaggtgtactagtgaatgtaatttatagttgccaaaaaaaaaaaaaacctgaaataaataaatgttagattgaatgtgtgtacattttctcttctagctctgacatggcatttagggttagcagaatgtattaaatagtaattttcaaactacacagtagcttccttccttgtgagaggcaagaaagaagtctgagtggatagtactcactttccaaggcccccacctctagaatggctttatttttatctgttttctatattgggtttcaaaaaagattttatttgaagaaatacttctgctgctacaaagtttgaaagttactattttaattattctgctctctgtaactgaaagaatccctttattttggttattcattaaaatataatagaaggcagtcagattttatcccagagatgtattcctgagtgtcttgatatagtgtattcatgttttatatgtgttgaccactatattgtcattggagggacatagatgtaaatgagtttgacgtgtgtcaaaggggtttaaaggggtgtggattgaatgaatggtacgtgcgaagtatatgctgattatagaaccacttgatctctgcattccaaattgtaaaactgactcaactggagaaattataacaaagaggtttgtggtagacatgtaataagtatagaaaagcaaaaagaaaagagaaactgctttagtttctgtttagagaaagctgctgttaatatttttggatagtagcctttcagctttcagatattttctacttacatatgcatatttttgaaacaaaaagtaggctttttttttgctttttaaacctaaacattaaatatattttcccttgggtaaacctacacatcctaatccctgtttatagaattttaacataatttaattgtgtttggagatgaggtggttttcagtttatttttcatattataatgctgtgacgagtatccttatctgtacacttctgaacattgtggagttctttcatgtggatgcctggagataaaattgtgtcgagatatatatgtatttttaaatgtttgatctgcattgctagattgccatccagaaaagttaatcaatttgtattcacagcagcagtgtacaagagggctggttttctgaagataacatttttttcagtcctgttcagaggtttggtcaatcttacctgtagatgacttcagccaccaggctggatgggagcccacagacaaaaggacattggtgtatgttatggtgaaaaccatcagtaccatgcctagctcaagaatgtgaaattgaacctgaaaaaaactttgaacctacaattttatgttctgaaaatagttattctaatgtgagggcattaataagaatatgtaccatcaaagcttcagaagattttccgtacaaactaaaatcacttttggagaaagtacctaaataaaaagagaaacaaatccaggagatactgtacggtttgaaagaaaggtaatcaaatactcagaaaaagtttgttgatgacttaaaaaggataaataaaaagtaagactaaagaaaatcagtatacccattaataataaatctttagtaatctataaggggaagaatgcttttcaaccttatacactagaagcatgctctttaaaattaatgcaacaggatgacgacttgatgtagaaactatatgtggaattatagattaaaatgtgattgaaacata

SEQ ID NO: 251639 - DNA, 1431 bp, Artificial Sequence
  derived and/or modified sequence
atgggactaaagaagatgaagggcctgagctacgatgaggccttcgctatggcaaacgaccccttggaaggttttcacgaggtgaacctcgcctctcccacctcgcccgatctgttgggagtttacgagtcaggtacacaagagcagaccacaagcccctcagtgatatatagaccgcatccctcagctttatcaagtgtcccaattcaggccaatgctctggatgtgagcgagttacctacccagccggtttactcatctccgagaagactcaattgtgccgagatcagcagtatttcattccacgttaccgaccccgctccctgtagcacttcgggcgtgacggctggactgaccaagctgacaactcgcaaggacaactacaatgccgaaagggagttcctgcaaggggcaaccatcactgaggcttgtgacgggtcagacgatatttttgggctgagcaccgacagtttaagccggctgcgcagccctagcgtcctggaggtccgagagaaaggctacgaaaggctgaaggaggaactcgcaaaggctcagcgcgaactgaagttaaaagatgaggagtgtgaacgcctctctaaggttcgggaccagcttggacaggagttggaggaactaactgcatcactgtttgaggaggctcacaaaatggtgcgcgaagcgaatatcaaacaggcgacggccgagaagcagttgaaagaggcacaggggaagatagacgttctgcaggccgaggtcgcagcattgaagactcttgttcttagctcctcaccaacaagcccaacacaggagcccctccccggaggtaaaacaccattcaagaagggacacactcgaaataaaagtacttcttctgccatgtctggctcacaccaggacttaagtgtgattcagcctatcgtgaaagactgtaaggaagctgacctaagtctctacaacgagtttcgactatggaaggatgaaccaacaatggaccgtacatgtccattcttggacaaaatctaccaggaagacattttcccgtgtctgaccttctccaaatccgagctcgccagcgctgtgcttgaggcagtcgaaaacaacacgctgtccattgaacccgtaggcttgcagcccatccgctttgtgaaagcatccgccgtcgaatgtggcggaccaaagaagtgtgccctgacaggtcaatcaaagtcttgtaaacacaggatcaagctgggggatagctctaactactactacatcagtcctttctgcaggtataggataacctccgtttgtaatttctttacttacattcgttacatccagcagggccttgtgaaacagcaagacgtggatcaaatgttttgggaagtgatgcaactccggaaggagatgagtctggctaaactcggatactttaaagaggaactgtag

SEQ ID NO: 251640 - DNA, 9646 bp, Artificial Sequence
  derived and/or modified sequence
gagtccagcgggttacctggcggcgggcgggcgcggccgggagcggagggccgcggtcgcgaagaggatgaagagagagttcccgaacaagtcggaagcagctcacaacaccggacgccgcgcggcagggctgtggacctggggtggtttcgtgtcccagtcttaggaaactacgcgcgaggcaccgtgctgaggcgtagaggtcaccctcgggaggtttcggtgaaacctggtgggaaattccgggcaggcgcccggagtcgcgcccaagtaggcagctccgtgccgccagacttgtgttcgggggagttgagacgaactgcacgggtgggattgcatggctctgccctcccagcgttgacaactcgccccgaccgcccaggaagcgcgagcttactggctccagaagtgatgatgctgggtggaagtcgcagcatgtgaagagttgccggttgttatgggattaaaaaagatgaaagggttatcttatgatgaggcttttgctatggctaatgatcccttggaaggcttccatgaagtaaaccttgcttcacctacttctccggaccttcttggtgtgtatgaatcaggaactcaagagcagactacctcaccaagtgtcatctaccggccacacccttcagctttatcctctgtacctatccaggcaaatgcattagatgtttctgaacttcctacacaacccgtgtattcatcccccagacgtttaaattgtgcggaaatatctagtatcagctttcatgttacagacccagccccttgctctacctctggagtcacagctggattaactaaattaactacaagaaaggacaactataatgcagagagagagtttttacagggtgctactataacagaggcttgcgatggcagtgatgatatttttgggttgagtactgatagtctgtctcgtttacgaagcccatctgttttggaagttagagaaaagggctatgaacgattaaaagaagaactcgcaaaagctcagagggaactgaagttaaaagatgaagaatgtgagaggctttcaaaagtgcgagatcaacttggacaggaattggaagaactcacagctagtctatttgaggaagctcataaaatggtgagagaagcaaatatcaagcaggcaacagcagaaaaacagctaaaagaagcacaaggaaaaattgatgtacttcaagctgaagtagctgcattgaagacacttgtattgtccagttctccaacatcacctacgcaggagcctttgccaggtggaaagacaccttttaaaaaggggcatacaagaaataaaagcacaagcagtgctatgagtggcagtcatcaggacctcagtgtgatacagccaattgtaaaagactgcaaagaggctgacttatccttgtataatgaattccgattgtggaaggatgagcccacaatggacaggacgtgtcctttcttagacaaaatctaccaggaagatatctttccatgtttaacattctcaaaaagtgagttggcttcagctgttctggaggctgtggaaaacaatactctaagcattgaaccagtgggattacaacctatccggtttgtgaaagcttctgcagttgaatgcggaggaccaaaaaaatgtgctctcactggccagagtaagtcctgtaaacacagaattaaattaggggactcaagcaactattattatatttctcctttttgcagatacaggatcacttctgtatgtaacttttttacatacattcgatacattcagcagggactcgtgaaacagcaggatgttgatcagatgttttgggaggttatgcagttgagaaaagagatgtcattggcaaagctgggttatttcaaagaggaactctgatgctctgcgtgggaccatgcctgaactccccgaataactgaaaaatggctgaatatttttatggttacttgatatttatttccaaggagtgagcctaagacttttttccccttttgcaaattgctctaagaagtaccatgatttcttttaaactgatctatgctgtgtttgcttattctttagttgaacacactatgaagaattccaggtgtactagtgaatgtaatttatagttgccaaaaaaaaaaaaaacctgaaataaataaatgttagattgaatgtgtgtacattttctcttctagctctgacatggcatttagggttagcagaatgtattaaatagtaattttcaaactacacagtagcttccttccttgtgagaggcaagaaagaagtctgagtggatagtactcactttccaaggcccccacctctagaatggctttatttttatctgttttctatattgggtttcaaaaaagattttatttgaagaaatacttctgctgctacaaagtttgaaagttactattttaattattctgctctctgtaactgaaagaatccctttattttggttattcattaaaatataatagaaggcagtcagattttatcccagagatgtattcctgagtgtcttgatatagtgtattcatgttttatatgtgttgaccactatattgtcattggagggacatagatgtaaatgagtttgacgtgtgtcaaaggggtttaaaggggtgtggattgaatgaatggtacgtgcgaagtatatgctgattatagaaccacttgatctctgcattccaaattgtaaaactgactcaactggagaaattataacaaagaggtttgtggtagacatgtaataagtatagaaaagcaaaaagaaaagagaaactgctttagtttctgtttagagaaagctgctgttaatatttttggatagtagcctttcagctttcagatattttctacttacatatgcatatttttgaaacaaaaagtaggctttttttttgctttttaaacctaaacattaaatatattttcccttgggtaaacctacacatcctaatccctgtttatagaattttaacataatttaattgtgtttggagatgaggtggttttcagtttatttttcatattataatgctgtgacgagtatccttatctgtacacttctgaacattgtggagttctttcatgtggatgcctggagataaaattgtgtcgagatatatatgtatttttaaatgtttgatctgcattgctagattgccatccagaaaagttaatcaatttgtattcacagcagcagtgtacaagagggctggttttctgaagataacatttttttcagtcctgttcagaggtttggtcaatcttacctgtagatgacttcagccaccaggctggatgggagcccacagacaaaaggacattggtgtatgttatggtgaaaaccatcagtaccatgcctagctcaagaatgtgaaattgaacctgaaaaaaactttgaacctacaattttatgttctgaaaatagttattctaatgtgagggcattaataagaatatgtaccatcaaagcttcagaagattttccgtacaaactaaaatcacttttggagaaagtacctaaataaaaagagaaacaaatccaggagatactgtacggtttgaaagaaaggtaatcaaatactcagaaaaagtttgttgatgacttaaaaaggataaataaaaagtaagactaaagaaaatcagtatacccattaataataaatctttagtaatctataaggggaagaatgcttttcaaccttatacactagaagcatgctctttaaaattaatgcaacaggatgacgacttgatgtagaaactatatgtggaattatagattaaaatgtgattgaaacatatttagaaaatgtgattatcttcctgatcctactccctttaggaagaacttcttaaactggaagcaggaaaaaaaaaaaccataaaagataaccataaaagaatataagttatggtatattataaattcttaatttagaaatcgtgcatcagtagttaggcattgtggctcatgcctgtaatcccagcactttgggaggcagaggcagaaggattacttgagctgcttgagcccaggagtttgagacgggcctgggaaaaatagggaaactccatttacacacacacacacacacacacacacacacacactgtgtccatgaacttgggaggatgaggtgggaggattgcttgagcccaggggttcaagtccaacttgggcaacatagggagaccttgtctctaaaaaaaaaactaaagctaaactacaaactgtgaggcaatatctgcaacatttataactagtaatagcttagtatcaagaatgtatgcagaaattctacaaaccaacaaaaaaggacagtgtcacagaaaaacaggcaaaagactgaaccaggccttccacacaattagaagtgcatgtgggccaataaacattaagaggttttcatctctcaatcaggaaaacgtaaatcaagatgacaatgacatgttcaaattcattcgattggtgaaaatgaagaaacacaaagtcaagttttggagagggttttagtcattaggatcactcacatattgctgatgggggtatcaattggtatatccactgtgaaaaaccattcactagaaaagttgggccaggcccagtggctcatgcctcttggctttgggaggccaaggtaggaggatcacttgagcccaagagttcaagaccagcttgagcaacatagggagaccacatctgcacaaaaagatttttttgaattagctgggcatggtggtgcatgcctgtggtcccagctacttgggaagctgaggtggaaggattgcttaagcccaggaggttgaggctgcagtgaatcatgattgtgccactgcactcttaccttgggtgacagagtaagatcataccttaaaaaaaaaaaaaaagtatacccatgggtcagcaatttcacttttcagtatatacttgagaaatgcttgcacaggtcccccagatcacacatataagaatgttctggaataaattaaaatgtctatttttaggaaggtgtaatgtgttcacagaatgggtgattattacatggcagcaaaatgaatgaataccagctacttgcagcacaataactcagaatgaaaaagcaattctgagaaaactatatgtgacatgatacttttcttataaaagtcaagaacaactaaaactgaacagctgtttaggcattgacatatgtgacaaaacttttaaaaagtaataaagttcaagatagtggttacctctggagaggtagaggaggagcaaatctatgagtaagtcactggtaatgttttagtccctgggttaggtggtgggttttggggtggttcatttgtcattaaaagtaagtacatgagctgggtgtagtggtgcgtgcttatagtcccagctacttgggagtctgagataggaagatccttgaggccagttcaaggctatagtgtgctatgatttcacctgtgaatagctactatattccaacctgggcaacgtagaccttgcccccctttaaaaaaattcaaaaacaaaataaatgcatggacaaatgaataagagagttatgcatggaacatcggtggtgtattatgaatcaagcattattactagctcagttatatgtgccttcattccaaaacaaaaaataaaaggtaagaaaattgttgaattgcatttgagagagaggaaaggaaagaattcaggtctgaatcttaggcttttggcttgagctattgcagtttattgagatggggaaatacatggtggggaaagtttgggtatgtgcataacagagacagaaattcagtgtttgacagatcaagtgtgaggtgcccactgagcatcaaagtggatatgttaagcaggtattggatgtacaaatctaaattcagtaaggtcagtccaggagaaaatttggggagtagttagccatgggatcagatgggcgctttagggacactttggagatgaagtacagcactgagccctgagttcctgtgacagagaagcagcctgcaaagacgaaaggaggagctgttaggaagagcaaggcaacagaaaaggaagaaccagcatgctgattatgttcaggagagtgtttctacgctgaatttaattgccaagattaccaattctaaagaagaggaggactcttggacaagtttttagaagttggtttggagctggggtgagagcctggcctaatggagacagctctggattgggagtcacttagacctacattctggtctaggtttggctcccaaaaactgggaaggttagttaggtggccactcctctctcttcatggtctctctcagcttgaagacaatttacagtctttgactaagcatccacactggaagaacaagatttggtttctgaacattgggtcttagtccttaaaataacttgcaacctgttacgtcttcacttactcccatcgccaccacaagaatcctgtgtgtttttgttttgtgcatccagtctaaaacgggtctgcttttattcataggcttttgttttcagtggtttttgttgttgcatttttccctagataaaatgttttttctataagacactgcttaaaagagtccaatgcagtatgaatttgtatttgtgtttaacttttgtgcttaacagatctgccatggctgaactctcagttgcttaagcaaaattctggggcttattctaggttcctttatttgtcattgtcactcccattccagttatcagcaaattccatcagctgtctccgagacatcttaaatctgtctacctccctccatgtccactgctaccactctgcccaagctattatcatctttcacctgaactcctgcactaatgtctgctgtccttgcatccactcctgccctcctacaatcactgacggcagccgcagggatctttataaaacgaaaatcagataatgtcacttccctgcttaaagccctttgagtggcttcccattgcacttagaaaaaaaaaaaaaaaaaaaaactggccaggtgcgatggctcatgcctgtaatcccagcactttgggaggccgaggcgggcggatcccctgaggttggtagttcgagacctgcttggccaacatggagaaaccctgtctctactaaaaacacaaaattagtcaggtgtgatggcgcatgcctgtaatcccagctacttgggaggctgagtcaggagaaacgctcgaacccaggaggcagaggttgtggtgagttgacatcacgccattgcactccagcctgggcaacaagagtgaaactccgtctgaaaaaaaaaaaaaaaaacccaaactcaatagaaaatcaagttttcatagtggtagttgttaacagagaaataacaatgaaagctttaaaaaactccatgaaaatttgcaaaacttaaaaaaaaaatgtagaagaggactaaacttgataaaatattaaaagaattgaaacccttcctaaaggcagcttctcaagggagcacaagttcacacacagtttacttttggaggaacgtctgaggtcatgaggactagattctagagctacaggtctcagggacagtctcgagggatacagggcccccatcaccacatccccagatttaaccgcagcagctcagcttttatctgtatctgttggagctctctaggaaatgtcaataccaaagcaaacccaaatcacaactagattagattactattcaagagaatgattctctaccgaaactctgcaaaatggggatatcaagagagttggaaaatgtaagacgtaaagaccataatcaggaaaatacgcatcatatttgttattcactgagagggaggaatttccacttaaatcctatttccagcagctggattgtgctctcagtggagtgctctggattctgattaatagagattttctagtcctcccagcaacttccttctcaattctcttcactttccgcagatctcggcaccagggttgcatcttgtgggctccattgtgttttcacacaatgtgctatttgtccttcacagtgttttggtttatttttctgtttgtccatcttgtttttgaacaattgccagcatttaaaaatgaggaaatctaaaatctgcatttcaagctgctcttttttaaaatgtgccgtttcgacaacactgagcccacagtcttgaatgacaacacttgggtggagctgagtgactccacctgtcgggtggctacacccttgctcagggtatgcactccatggtttgctctatggcccaccatcctggattgtctccctgacaccaaggctaagggacccactttactcacttatctgctgggccttggaagtatttcagttcggaaccccaattctaaccttagcttctcaggccattaaatgaaatctcatttctatgatgcttcctgtcacatcactgtgctgctgagaacatgaagtctgtgggtgaattggtggacgggatccagaatcattacttggcagtggattatagtgtgatgactcatttccggtggtctccaggagacttggctgggagcttctcttggagtctagggttagccagaggctacatgttttaggcatcttaattcatattttatctaaaggcatataaatccttaaaaaaaatcatttgacttcatccttgctccctacatccagccagtaaccattgctttgttttacatcgcgtgcttcaggctttactacagcctacctggattttgcagtagcttcttaaactgcttaaactttggatattgccccagccaacacattctgccacagagatctctctgagttaaatgggattgtatcatgccccacacccaagcagatagaaactgtcaatagatacacttagaatgaatatgcatggaatcaaattacattcagaatctaccactataggtagtgaatacaacaggatagcagaggctgggaagggtaatgggggttggggggtgggaggataaaggggttgggtaatgggtgtaaaaatctatagaaggaatatgatctgttgtttggtagcacaatagggtaaatacagttaataatttattgtatatttcacaataaaggagtggatttggaatgttctcaacacaaatgataaatgtttgaggtgatggataccccaattaccctgatttgatcattatacgttgtatgtttgtatcaaaatatcatatgtaccccataaatatgtacaactattatgtatccataaaaattggaaataaactaccaccatctttcttcagcctattttcctatctcctctcgcaccatactaggcacacaatctctgtacctgtgctgtcttccaagccattgctcatgttttaagaaatatacttattgtttaatatatcctgtaccactgtaggatgactgtagttaacaataatgtgtagtttcaaatagctaatagctggaaggaagttgttgaatgtttccaacataaagaaatgataagtgtttgagatgatggatatgctaattaccctgatctgatcactacacattatatgtatggaaatatcattgtgtaccccatgaatatgggcaattattatttgttaattaaaaaaataaaaaaaagacccacccactgtttaa

SEQ ID NO: 251641 - DNA, 1855 bp, Artificial Sequence
  derived and/or modified sequence
aggcgcagtcccgcgttccctcggcggctgccggcgtagtgagcccgccgccgtggagtgtagcggaaagggctcgccgtcctcctccgtttctcgctgcttcgggacgcgctctctgcggctctgtgagcgcccctgagcgccggcagcggccgcggtgggttcttcaggttatcttatgatgaggcttttgctatggctaatgatcccttggaaggcttccatgaagtaaaccttgcttcacctacttctccggaccttcttggtgtgtatgaatcaggaactcaagagcagactacctcaccaagtgtcatctaccggccacacccttcagctttatcctctgtacctatccaggcaaatgcattagatgtttctgaacttcctacacaacccgtgtattcatcccccagacgtttaaattgtgcggaaatatctagtatcagctttcatgttacagacccagccccttgctctacctctggagtcacagctggattaactaaattaactacaagaaaggacaactataatgcagagagagagtttttacagggtgctactataacagaggcttgcgatggcagtgatgatatttttgggttgagtactgatagtctgtctcgtttacgaagcccatctgttttggaagttagagaaaagggctatgaacgattaaaagaagaactcgcaaaagctcagagggaactgaagttaaaagatgaagaatgtgagaggctttcaaaagtgcgagatcaacttggacaggaattggaagaactcacagctagtctatttgaggaagctcataaaatggtgagagaagcaaatatcaagcaggcaacagcagaaaaacagctaaaagaagcacaaggaaaaattgatgtacttcaagctgaagtagctgcattgaagacacttgtattgtccagttctccaacatcacctacgcaggagcctttgccaggtggaaagacaccttttaaaaaggggcatacaagaaataaaagcacaagcagtgctatgagtggcagtcatcaggacctcagtgtgatacagccaattgtaaaagactgcaaagaggctgacttatccttgtataatgaattccgattgtggaaggatgagcccacaatggacaggacgtgtcctttcttagacaaaatctaccaggaagatatctttccatgtttaacattctcaaaaagtgagttggcttcagctgttctggaggctgtggaaaacaatactctaagcattgaaccagtgggattacaacctatccggtttgtgaaagcttctgcagttgaatgcggaggaccaaaaaaatgtgctctcactggccagagtaagtcctgtaaacacagaattaaattaggggactcaagcaactattattatatttctcctttttgcagatacaggatcacttctgtatgtaacttttttacatacattcgatacattcagcagggactcgtgaaacagcaggatgttgatcagatgttttgggaggttatgcagttgagaaaagagatgtcattggcaaagctgggttatttcaaagaggaactctgatgctctgcgtgggaccatgcctgaactccccgaataactgaaaaatggctgaatatttttatggttacttgatatttatttccaaggagtgagcctaagacttttttccccttttgcaaattgctctaagaagtaccatgatttcttttaaactgatctatgctgtgtttgcttattctttagttgaacacactatgaagaattccaggtgtactagtgaatgtaatttatagttgccaaaaaaaaaaaaaacctgaaataaataaatgttagattg

SEQ ID NO: 251642 - protein, 411 aa, Artificial Sequence
  derived and/or modified sequence
MGLKKMKGLSYDEAFAMANDPLEGFHEVNLASPTSPDLLGVYESGTQEQTTSPSVIYRPHPSALSSVPIQANALDVSELPTQPVYSSPRRLNCAEISSISFHVTDPAPCSTSGVTAGLTKLTTRKDNYNAEREFLQGATITEACDGSDDIFGLSTDSLSRLRSPSVLEVREKGYERLKEELAKAQRELKLKDEECERLSKVRDQLGQELEELTASLFEEAHKMVREANIKQATAEKQLKEAQGKIDVLQAEVAALKTLVLSSSPTSPTQEPLPGGKTPFKKGHTRNKSTSSAMSGSHQDLSVIQPIVKDCKEADLSLYNEFRLWKDEPTMDRTCPFLDKIYQEDIFPCLTFSKSELASAVLEAVENNTLSIEPVGLQPIRFVKASAVECGGPKSLLYVTFLHTFDTFSRDS

SEQ ID NO: 251643 - protein, 395 aa, Artificial Sequence
  derived and/or modified sequence
MANDPLEGFHEVNLASPTSPDLLGVYESGTQEQTTSPSVIYRPHPSALSSVPIQANALDVSELPTQPVYSSPRRLNCAEISSISFHVTDPAPCSTSGVTAGLTKLTTRKDNYNAEREFLQGATITEACDGSDDIFGLSTDSLSRLRSPSVLEVREKGYERLKEELAKAQRELKLKDEECERLSKVRDQLGQELEELTASLFEEAHKMVREANIKQATAEKQLKEAQGKIDVLQAEVAALKTLVLSSSPTSPTQEPLPGGKTPFKKGHTRNKSTSSAMSGSHQDLSVIQPIVKDCKEADLSLYNEFRLWKDEPTMDRTCPFLDKIYQEDIFPCLTFSKSELASAVLEAVENNTLSIEPVGLQPIRFVKASAVECGGPKSLLYVTFLHTFDTFSRDS

SEQ ID NO: 251644 - DNA, 1236 bp, Artificial Sequence
  derived and/or modified sequence
atgggcctgaagaagatgaagggcctgagctacgacgaggccttcgccatggccaacgaccccctggagggcttccacgaggtgaacctggccagccccaccagccccgacctgctgggcgtgtacgagagcggcacccaggagcagaccaccagccccagcgtgatctacagaccccaccccagcgccctgagcagcgtgcccatccaggccaacgccctggacgtgagcgagctgcccacccagcccgtgtacagcagccccagaagactgaactgcgccgagatcagcagcatcagcttccacgtgaccgaccccgccccctgcagcaccagcggcgtgaccgccggcctgaccaagctgaccaccagaaaggacaactacaacgccgagagagagttcctgcagggcgccaccatcaccgaggcctgcgacggcagcgacgacatcttcggcctgagcaccgacagcctgagcagactgagaagccccagcgtgctggaggtgagagagaagggctacgagagactgaaggaggagctggccaaggcccagagagagctgaagctgaaggacgaggagtgcgagagactgagcaaggtgagagaccagctgggccaggagctggaggagctgaccgccagcctgttcgaggaggcccacaagatggtgagagaggccaacatcaagcaggccaccgccgagaagcagctgaaggaggcccagggcaagatcgacgtgctgcaggccgaggtggccgccctgaagaccctggtgctgagcagcagccccaccagccccacccaggagcccctgcccggcggcaagacccccttcaagaagggccacaccagaaacaagagcaccagcagcgccatgagcggcagccaccaggacctgagcgtgatccagcccatcgtgaaggactgcaaggaggccgacctgagcctgtacaacgagttcagactgtggaaggacgagcccaccatggacagaacctgccccttcctggacaagatctaccaggaggacatcttcccctgcctgaccttcagcaagagcgagctggccagcgccgtgctggaggccgtggagaacaacaccctgagcatcgagcccgtgggcctgcagcccatcagattcgtgaaggccagcgccgtggagtgcggcggccccaagagcctgctgtacgtgaccttcctgcacaccttcgacaccttcagcagagacagctag

SEQ ID NO: 251645 - DNA, 1236 bp, Artificial Sequence
  derived and/or modified sequence
atgggcctcaaaaaaatgaaagggctgtcatacgatgaggcattcgccatggcaaatgatccgctcgagggtttccatgaggtcaatcttgcttcccccaccagtcccgacctgctgggagtgtacgagagcggcacccaggagcagaccacttcccccagcgtgatctatcggcctcaccctagcgccctcagcagcgttccaatccaagctaacgctctggacgtgagcgagctgcccactcaaccggtctattccagtcccaggcggctcaactgtgcggagattagctcgatcagttttcatgtgacagaccctgcaccttgctctacatcgggcgtcacagcaggcctgaccaagctcaccacgaggaaggataattacaatgccgaacgggagtttctccagggcgcaaccatcactgaagcttgtgacggatcagacgatattttcgggctgtccacggattctttatcccggttacgttccccatcagtgcttgaagtgcgggagaaaggttacgaaaggctgaaagaagagttagccaaagcacaaagggaactcaagctgaaagatgaggaatgtgaaagattgtctaaggttcgggatcagttaggacaagaacttgaagagttaacagcgtctcttttcgaggaggcacataagatggtcagagaggcaaacatcaagcaggccacagcggaaaaacaactcaaggaggctcagggcaaaatcgatgtgttgcaggctgaggtggccgcccttaagacactcgtgttaagcagctcgcctacttcccccacccaggagccactacctggcggtaagacccccttcaaaaaaggacacacacgcaacaagtccaccagctctgcgatgtccgggtcacatcaggacctgtctgtgattcaaccaatagtgaaagactgcaaagaggcggacctgtctctttacaatgagttccgcctctggaaggacgaacccaccatggatcggacctgcccgtttctcgataagatctatcaggaggatattttcccgtgtcttaccttctcgaaaagcgaactcgcctcggctgtgctggaagctgtggaaaacaatacgctttcaatcgagcccgtgggcctgcaaccgatccggtttgtcaaagcatctgctgtagaatgcggaggccccaaatcccttctgtacgttacatttcttcacaccttcgacacattttcgagagattcttag

SEQ ID NO: 251646 - DNA, 2055 bp, Artificial Sequence
  derived and/or modified sequence
ggttacctggcggcgggcgggcgcggccgggagcggagggccgcggtcgcgaagaggatgaagagagagttcccgaacaagtcggaagcagctcacaacaccggacgccgcgcggcagggctgtggacctggggtggtttcgtgtcccagtcttaggaaactacgcgcgaggcaccgtgctgaggcgtagaggtcaccctcgggaggtttcggtgaaacctggtgggaaattccgggcaggcgcccggagtcgcgcccaagtaggcagctccgtgccgccagacttgtgttcgggggagttgagacgaactgcacgggtgggattgcatggctctgccctcccagcgttgacaactcgccccgaccgcccaggaagcgcgagcttactggctccagaagtgatgatgctgggtggaagtcgcagcatgtgaagagttgccggttgttatgggattaaaaaagatgaaagggttatcttatgatgaggcttttgctatggctaatgatcccttggaaggcttccatgaagtaaaccttgcttcacctacttctccggaccttcttggtgtgtatgaatcaggaactcaagagcagactacctcaccaagtgtcatctaccggccacacccttcagctttatcctctgtacctatccaggcaaatgcattagatgtttctgaacttcctacacaacccgtgtattcatcccccagacgtttaaattgtgcggaaatatctagtatcagctttcatgttacagacccagccccttgctctacctctggagtcacagctggattaactaaattaactacaagaaaggacaactataatgcagagagagagtttttacagggtgctactataacagaggcttgcgatggcagtgatgatatttttgggttgagtactgatagtctgtctcgtttacgaagcccatctgttttggaagttagagaaaagggctatgaacgattaaaagaagaactcgcaaaagctcagagggaactgaagttaaaagatgaagaatgtgagaggctttcaaaagtgcgagatcaacttggacaggaattggaagaactcacagctagtctatttgaggaagctcataaaatggtgagagaagcaaatatcaagcaggcaacagcagaaaaacagctaaaagaagcacaaggaaaaattgatgtacttcaagctgaagtagctgcattgaagacacttgtattgtccagttctccaacatcacctacgcaggagcctttgccaggtggaaagacaccttttaaaaaggggcatacaagaaataaaagcacaagcagtgctatgagtggcagtcatcaggacctcagtgtgatacagccaattgtaaaagactgcaaagaggctgacttatccttgtataatgaattccgattgtggaaggatgagcccacaatggacaggacgtgtcctttcttagacaaaatctaccaggaagatatctttccatgtttaacattctcaaaaagtgagttggcttcagctgttctggaggctgtggaaaacaatactctaagcattgaaccagtgggattacaacctatccggtttgtgaaagcttctgcagttgaatgcggaggaccaaaatcacttctgtatgtaacttttttacatacattcgatacattcagcagggactcgtgaaacagcaggatgttgatcagatgttttgggaggttatgcagttgagaaaagagatgtcattggcaaagctgggttatttcaaagaggaactctgatgctctgcgtgggaccatgcctgaactccccgaataactgaaaaatggctgaatatttttatggttacttgatatttatttccaaggagtgagcctaagacttttttccccttttgcaaattgctctaagaagtaccatgatttcttttaaactgatctatgctgtgtttgcttattctttagttgaacacactatgaagaattccaggtgtactagtgaatgtaatttatagttgccaaaaaaaaaaaaaacctgaaataaataaatgttagattg

SEQ ID NO: 251647 - DNA, 1236 bp, Artificial Sequence
  derived and/or modified sequence
atgggcctgaagaagatgaagggcctgtcctatgatgaggcctttgccatggccaatgaccccctggagggcttccacgaggtgaacctggccagccccaccagcccagacctgctgggcgtgtatgagagcggcacccaggagcagaccaccagccccagcgtcatctaccggccccaccccagcgccctgagctctgtgcccatccaggccaatgccctggatgtgtctgagctgcccacccagcctgtgtacagcagcccccggcggctgaactgtgccgagatcagcagcatctccttccacgtgacagatcctgccccctgcagcaccagcggcgtgacagctggcctgaccaagctgaccaccaggaaggacaactacaatgctgagcgggagttcctgcagggcgccaccatcacagaggcctgtgatggcagtgatgacatcttcggcctgagcacagacagcctgagccggctgcggagccccagcgtgctggaggtgcgggagaagggctatgaaaggctgaaggaggagctggccaaggcccagcgggagctgaagctgaaggatgaggagtgtgagcggctgagcaaggtgcgggaccagctgggccaggagctggaggagctgacagccagcctgtttgaggaggcccacaagatggtgcgggaggccaacatcaagcaggccacagctgagaagcagctgaaggaggcccagggcaagattgatgtgctgcaggccgaggtggccgccctgaagaccctggtgctgagcagcagccccaccagccccacccaggagcccctgcccggcggcaagacccccttcaagaagggccacaccaggaacaagagcaccagcagcgccatgagcggcagccaccaggacctgagcgtcatccagcccatcgtgaaggactgcaaggaggccgacctgagcctgtacaatgagttccggctgtggaaggatgagcccaccatggacaggacctgccccttcctggacaagatctaccaggaggacatcttcccctgcctgaccttcagcaagtctgagctggccagcgctgtgctggaggccgtggagaacaacaccctgagcattgagcctgtgggcctgcagcccatccgctttgtgaaggccagcgctgtggagtgtggcggccccaagagcctgctgtatgtgaccttcctgcacacctttgacaccttcagccgggacagctag

SEQ ID NO: 251648 - DNA, 2386 bp, Artificial Sequence
  derived and/or modified sequence
aggcgcagtcccgcgttccctcggcggctgccggcgtagtgagcccgccgccgtggagtgtagcggaaagggctcgccgtcctcctccgtttctcgctgcttcgggacgcgctctctgcggctctgtgagcgcccctgagcgccggcagcggccgcggtgggttcttcaggttatcttatgatgaggcttttgctatggctaatgatcccttggaaggcttccatgaagtaaaccttgcttcacctacttctccggaccttcttggtgtgtatgaatcaggaactcaagagcagactacctcaccaagtgtcatctaccggccacacccttcagctttatcctctgtacctatccaggcaaatgcattagatgtttctgaacttcctacacaacccgtgtattcatcccccagacgtttaaattgtgcggaaatatctagtatcagctttcatgttacagacccagccccttgctctacctctggagtcacagctggattaactaaattaactacaagaaaggacaactataatgcagagagagagtttttacagggtgctactataacagaggcttgcgatggcagtgatgatatttttgggttgagtactgatagtctgtctcgtttacgaagcccatctgttttggaagttagagaaaagggctatgaacgattaaaagaagaactcgcaaaagctcagagggaactgaagttaaaagatgaagaatgtgagaggctttcaaaagtgcgagatcaacttggacaggaattggaagaactcacagctagtctatttgaggaagctcataaaatggtgagagaagcaaatatcaagcaggcaacagcagaaaaacagctaaaagaagcacaaggaaaaattgatgtacttcaagctgaagtagctgcattgaagacacttgtattgtccagttctccaacatcacctacgcaggagcctttgccaggtggaaagacaccttttaaaaaggggcatacaagaaataaaagcacaagcagtgctatgagtggcagtcatcaggacctcagtgtgatacagccaattgtaaaagactgcaaagaggtaactcatcaaggactgtcccctctgactctgttgatacttgttagttctcatcactgaggtgtcagttatcatttttgccagcaaaatttttagtacaaaataatgcagtattaagatgggggaggctttatctagagctggctgctttcagggattcttcagttccattttctacctggctgaccttggagtacctgctggaaacttggtaagtttcttaatctcagtatttcattaagggaggaaactgtcatgtgttgtctagaggagagtgggtggctttaatgatctggctagtcaaaatttattgctagagtgcgcttacaaagtatggatataagaaatatgtgaaaataagatgattttcttaaagatcaatacattgcttttatttaaattcagagagaattttatgtcagcaagggagtcctagagttaatttagataattaagcaacaaaaaaatagaaataatggtagccttacaatgacataaggctggaagacattttgctaagtgaaatttcaagttatagtagaacaattagtgtcatttttgatcccaaattaggtttcacagttcagccagtctgttattcagacacttacaactatgtaaggccaccattatcatgtatccataacaattaaaaatttaaaaacgaaataatgggccgggcatggtggctcatgcctgtaatctcagcactttgggaggccaaggccggaggatcacctgaggttgggagttcgagaccagcctgaccaacatggagaaaccctatctgtactaaaaatataaaattagctgggcatggtatctcatgcttataatcccagctactcaggaggctgaggcaggagaatcccttgaacctgggaggcggaggttgcggtcagctgagattgcgccatcacactccagcctgggcaacaagagcgaaactctgtctcaaaatcataataataataatagtcttattttaaaagatatgttacaaagataactgaaataatatataaatattttgagctgtttagagtaaaaatttttaatcattgtatactgtgagaatgcatttctaagaggattgatcaataatttatgaagctttcccatttcttcttagaagccatcttttacattgttaaattcaagtccatcattaatcttgaagaaatgtgtgtgcttgttaaatttttgtatggaagccaggagtttattaaatggaataaccaatgttaacctgttttaattgaattgcattttgacgaattatcaataaaaatgatgctggtaa

SEQ ID NO: 251649 - DNA, 1236 bp, Artificial Sequence
  derived and/or modified sequence
atgggcctgaagaagatgaagggcctgagctacgacgaggccttcgccatggccaacgatcccttagaggggttccatgaggtgaacctggcaagtcccacatccccagacctgcttggagtttatgaaagtggcactcaggagcaaactacgtccccttctgtcatctaccgaccacatcctagcgcactgagtagcgtccccattcaggcgaacgctctggacgtaagcgaacttccaacacagcccgtatatagcagccctcggaggttgaattgtgccgagattagctctatatcctttcatgtaactgaccctgccccatgtagcacatctggcgtgactgccgggctgaccaagctgactactaggaaagacaactacaacgccgaacgagaattcctccaaggcgcgacaattactgaggcatgtgacggttccgacgacatctttgggttatctactgacagcctgtctaggctccgatcaccatctgttctggaagtgagggagaagggatatgaaagactcaaggaggagctggcaaaggcacagagagaactgaagctgaaggatgaggaatgcgagcggctcagtaaggttcgagaccagctgggccaggagttggaggagctgaccgcatccctattcgaggaggcccacaagatggttcgagaagctaatattaaacaggccacggccgagaagcagctgaaggaggcgcaggggaagatagacgtgctccaggcagaagtcgcagcccttaaaactctggtgctcagttcaagccctacatcgccaactcaggaaccactccccggtggaaaaactccatttaaaaaggggcacaccagaaacaagagcactagttccgccatgagtgggtcacaccaggatctgagtgtgattcaacctatagtgaaggactgcaaggaagccgatctgtccctgtataacgagttccgcctttggaaggacgagcccaccatggacagaacctgtccattcctggataaaatttaccaagaagacatattcccttgcctcaccttttctaagtcggagctggcaagcgcagttctggaagctgtagagaataacacactctcaatcgagcctgtgggtttgcagcctatcaggtttgtcaaggccagcgctgtggaatgtgggggacccaaatccctcctgtacgtgacattcttacatacctttgacaccttctcaagagattcttag

SEQ ID NO: 251650 - DNA, 1236 bp, Artificial Sequence
  derived and/or modified sequence
atgggactgaagaagatgaaagggctatcttacgatgaagcttttgctatggccaatgatccactggaaggttttcatgaagtgaacctggcttcacccacgtcccctgatctcctgggtgtatatgagtccggcacgcaagagcagaccacctctcctagcgtcatctatcgcccacatccttcagctctgtctagcgtaccaatacaggcaaatgccttagatgtgtcagaactccctacacaacctgtctactcttctccgaggaggcttaattgcgcggagatcagcagcatttccttccacgtgaccgatcctgctccatgcagcacaagcggggttactgcgggactaacaaagctgactacacggaaggacaattacaacgctgaaagagagttccttcaaggggcaacaattactgaagcgtgtgacggatcggatgatatctttggactttcaacagattccctgtcacggttgcggtctccctccgtgctcgaagtcagggagaaggggtatgagcggctgaaagaggaactggccaaggcccagcgcgagttgaagttgaaagacgaagaatgtgagaggctctcaaaagtccgagatcaactcggacaggagctggaagaactcaccgcctcattgttcgaagaagcccacaagatggtgcgcgaagcgaacattaagcaggccacagccgaaaagcagttgaaagaagcccagggaaagattgacgttctgcaggctgaggtggcagccctaaaaactctggtgctgtccagctcccccacttcacctacgcaggagccccttcctggaggcaagactcccttcaaaaaagggcacacacgaaacaaaagtacttctagcgccatgtccggaagtcatcaagaccttagtgtgattcagcctattgtgaaggactgcaaggaggccgacctaagcctttacaacgaattccgcctgtggaaggatgagcccacaatggaccgaacctgcccttttttagacaaaatttatcaagaggacatatttccgtgcctgaccttctcaaagtcagagctggcttctgccgtgcttgaagcagtagaaaataataccctttcaatcgagcccgtcgggctgcagcccatccggtttgtaaaggcttctgccgtggagtgcggaggaccaaaatcgctgctgtacgtaacatttctgcacaccttcgatacctttagtagggattcctag

SEQ ID NO: 251651 - DNA, 1755 bp, Artificial Sequence
  derived and/or modified sequence
aggcgcagtcccgcgttccctcggcggctgccggcgtagtgagcccgccgccgtggagtgtagcggaaagggctcgccgtcctcctccgtttctcgctgcttcgggacgcgctctctgcggctctgtgagcgcccctgagcgccggcagcggccgcggtgggttcttcaggttatcttatgatgaggcttttgctatggctaatgatcccttggaaggcttccatgaagtaaaccttgcttcacctacttctccggaccttcttggtgtgtatgaatcaggaactcaagagcagactacctcaccaagtgtcatctaccggccacacccttcagctttatcctctgtacctatccaggcaaatgcattagatgtttctgaacttcctacacaacccgtgtattcatcccccagacgtttaaattgtgcggaaatatctagtatcagctttcatgttacagacccagccccttgctctacctctggagtcacagctggattaactaaattaactacaagaaaggacaactataatgcagagagagagtttttacagggtgctactataacagaggcttgcgatggcagtgatgatatttttgggttgagtactgatagtctgtctcgtttacgaagcccatctgttttggaagttagagaaaagggctatgaacgattaaaagaagaactcgcaaaagctcagagggaactgaagttaaaagatgaagaatgtgagaggctttcaaaagtgcgagatcaacttggacaggaattggaagaactcacagctagtctatttgaggaagctcataaaatggtgagagaagcaaatatcaagcaggcaacagcagaaaaacagctaaaagaagcacaaggaaaaattgatgtacttcaagctgaagtagctgcattgaagacacttgtattgtccagttctccaacatcacctacgcaggagcctttgccaggtggaaagacaccttttaaaaaggggcatacaagaaataaaagcacaagcagtgctatgagtggcagtcatcaggacctcagtgtgatacagccaattgtaaaagactgcaaagaggctgacttatccttgtataatgaattccgattgtggaaggatgagcccacaatggacaggacgtgtcctttcttagacaaaatctaccaggaagatatctttccatgtttaacattctcaaaaagtgagttggcttcagctgttctggaggctgtggaaaacaatactctaagcattgaaccagtgggattacaacctatccggtttgtgaaagcttctgcagttgaatgcggaggaccaaaatcacttctgtatgtaacttttttacatacattcgatacattcagcagggactcgtgaaacagcaggatgttgatcagatgttttgggaggttatgcagttgagaaaagagatgtcattggcaaagctgggttatttcaaagaggaactctgatgctctgcgtgggaccatgcctgaactccccgaataactgaaaaatggctgaatatttttatggttacttgatatttatttccaaggagtgagcctaagacttttttccccttttgcaaattgctctaagaagtaccatgatttcttttaaactgatctatgctgtgtttgcttattctttagttgaacacactatgaagaattccaggtgtactagtgaatgtaatttatagttgccaaaaaaaaaaaaaacctgaaataaataaatgttagattg

SEQ ID NO: 251652 - DNA, 580 bp, Artificial Sequence
  derived and/or modified sequence
gagtcggccaggaggggcggccgcggcaggtgcaggtgctggcgccgtgcagggcgcggttatcttatgatgaggcttttgctatggctaatgatcccttggaaggcttccatgaagtaaaccttgcttcacctacttctccggaccttcttggtgtgtatgaatcaggaactcaagagcagactacctcaccaagtgtcatctaccggccacacccttcagctttatcctctgtacctatccaggcaaatgcattagatgtttctgaacttcctacacaacccgtgtattcatcccccagacgtttaaattgtgcggaaatatctagtatcagctttcatgttacagacccagccccttgctctacctctggagtcacagctggattaactaaattaactacaagaaaggacaactataatgcagagagagagtttttacagggtgctactataacagaggcttgcgatggcagtgatgatatttttgggttgagtactgatagtctgtctcgtttacgaagcccatctgttttggaagttagagaaaagggctatgaacgattaaaagaagaactcgc

SEQ ID NO: 251653 - protein, 912 aa, Artificial Sequence
  derived and/or modified sequence
MPAMPSSGPGDTSSSAAEREEDRKDGEEQEEPRGKEERQEPSTTARKVGRPGRKRKHPPVESGDTPKDPAVISKSPSMAQDSGASELLPNGDLEKRSEPQPEEGSPAGGQKGGAPAEGEGAAETLPEASRAVENGCCTPKEGRGAPAEAGKEQKETNIESMKMEGSRGRLRGGLGWESSLRQRPMPRLTFQAGDPYYISKRKRDEWLARWKREAEKKAKVIAGMNAVEENQGPGESQKVEEASPPAVQQPTDPASPTVATTPEPVGSDAGDKNATKAGDDEPEYEDGRGFGIGELVWGKLRGFSWWPGRIVSWWMTGRSRAAEGTRWVMWFGDGKFSVVCVEKLMPLSSFCSAFHQATYNKQPMYRKAIYEVLQVASSRAGKLFPVCHDSDESDTAKAVEVQNKPMIEWALGGFQPSGPKGLEPPEEEKNPYKEVYTDMWVEPEAAAYAPPPPAKKPRKSTAEKPKVKEIIDERTRERLVYEVRQKCRNIEDICISCGSLNVTLEHPLFVGGMCQNCKNCFLECAYQYDDDGYQSYCTICCGGREVLMCGNNNCCRCFCVECVDLLVGPGAAQAAIKEDPWNCYMCGHKGTYGLLRRREDWPSRLQMFFANNHDQEFDPPKVYPPVPAEKRKPIRVLSLFDGIATGLLVLKDLGIQVDRYIASEVCEDSITVGMVRHQGKIMYVGDVRSVTQKHIQEWGPFDLVIGGSPCNDLSIVNPARKGLYEGTGRLFFEFYRLLHDARPKEGDDRPFFWLFENVVAMGVSDKRDISRFLESNPVMIDAKEVSAAHRARYFWGNLPGMNRPLASTVNDKLELQECLEHGRIAKFSKVRTITTRSNSIKQGKDQHFPVFMNEKEDILWCTEMERVFGFPVHYTDVSNMSRLARQRLLGRSWSVPVIRHLFAPLKEYFACV

SEQ ID NO: 251654 - protein, 689 aa, Artificial Sequence
  derived and/or modified sequence
MNAVEENQGPGESQKVEEASPPAVQQPTDPASPTVATTPEPVGSDAGDKNATKAGDDEPEYEDGRGFGIGELVWGKLRGFSWWPGRIVSWWMTGRSRAAEGTRWVMWFGDGKFSVVCVEKLMPLSSFCSAFHQATYNKQPMYRKAIYEVLQVASSRAGKLFPVCHDSDESDTAKAVEVQNKPMIEWALGGFQPSGPKGLEPPEEEKNPYKEVYTDMWVEPEAAAYAPPPPAKKPRKSTAEKPKVKEIIDERTRERLVYEVRQKCRNIEDICISCGSLNVTLEHPLFVGGMCQNCKNCFLECAYQYDDDGYQSYCTICCGGREVLMCGNNNCCRCFCVECVDLLVGPGAAQAAIKEDPWNCYMCGHKGTYGLLRRREDWPSRLQMFFANNHDQEFDPPKVYPPVPAEKRKPIRVLSLFDGIATGLLVLKDLGIQVDRYIASEVCEDSITVGMVRHQGKIMYVGDVRSVTQKHIQEWGPFDLVIGGSPCNDLSIVNPARKGLYEGTGRLFFEFYRLLHDARPKEGDDRPFFWLFENVVAMGVSDKRDISRFLESNPVMIDAKEVSAAHRARYFWGNLPGMNRPLASTVNDKLELQECLEHGRIAKFSKVRTITTRSNSIKQGKDQHFPVFMNEKEDILWCTEMERVFGFPVHYTDVSNMSRLARQRLLGRSWSVPVIRHLFAPLKEYFACV

SEQ ID NO: 251655 - DNA, 2739 bp, Artificial Sequence
  derived and/or modified sequence
atgcctgcaatgccttccagcggccccggcgatacctcaagttctgctgctgagcgcgaagaggataggaaagacggtgaggagcaagaagaacctagagggaaagaggagcgccaagagccatccaccacggctaggaaggtaggcaggcctggacgcaaacgaaaacatcctccagttgaatccggggacacaccaaaggatcctgcggtgattagcaaatcacctagcatggcccaggattctggcgcctccgaactgttgcccaatggagatctcgagaagcgcagcgagccacaacccgaagaaggctcacctgccggcggacagaaggggggcgcacctgcagagggagagggggccgccgagactcttccagaggcaagcagagcagtggagaatggctgctgtaccccgaaggagggtcggggagcccccgccgaggccggcaaggaacagaaggagacaaatatcgagagtatgaaaatggagggaagccgggggagactccgcggggggttgggctgggaatcttctctccggcaacgaccaatgccaaggctgacattccaggcaggcgacccgtactacatttctaaaagaaagcgcgacgaatggttggcccgctggaaacgggaagcagaaaaaaaggccaaagtcattgctggaatgaatgccgttgaggaaaatcaaggccccggcgaatcccagaaggtggaagaggccagcccgccggccgtccaacagccgacagaccctgcgtctcccacggtagcaactacccccgagcccgtggggtccgacgccggggacaaaaacgccaccaaggccggcgatgatgaaccagaatatgaggatgggcgggggttcggaatcggcgagctggtttggggtaagctcaggggctttagttggtggccagggcgcattgtcagctggtggatgacaggccgcagtcgggcagccgaggggacacggtgggtgatgtggtttggcgatggcaagttcagcgttgtctgcgtggaaaaactgatgcccctgtccagcttctgttcagcttttcaccaggctacatataacaaacagccgatgtaccgtaaggccatctatgaggtgctccaggtagccagctctagggctggcaagctatttccggtgtgtcacgacagcgatgagtccgacacagctaaggctgtagaggtccagaacaagcccatgattgaatgggcgctaggcgggtttcagccctccggccctaagggcctggaaccacctgaagaggagaagaatccctacaaggaggtgtacacagatatgtgggtggagcctgaggctgccgcatacgccccacctccccccgccaagaagccccgcaagtcaaccgcagagaagccaaaggtgaaggagattatcgatgaaagaacaagagaaagactggtatacgaggtgagacagaagtgtagaaacattgaggatatttgcataagctgtggatctctgaatgttactctagagcaccctctgttcgtaggtggcatgtgccagaattgtaagaactgtttccttgagtgcgcgtatcagtacgacgacgacgggtatcagtcctattgtaccatttgttgtggaggccgagaagtgctgatgtgcgggaacaataattgctgtaggtgtttctgcgttgaatgcgtggatttgttggtgggccctggagctgcccaggcggctataaaggaggatccatggaactgttatatgtgtggccacaaaggcacatacggcctattaaggcgtcgtgaggactggcctagcagactgcagatgttcttcgcgaacaatcatgatcaggaattcgaccctccaaaggtttatcccccagtgcctgctgagaagaggaagcccatcagggtgctgtccttgttcgatggtatcgcgacagggcttctggtgctaaaggatctgggaatccaggttgacaggtatattgcttccgaggtgtgtgaggattcaataaccgttggcatggtccggcaccagggcaaaataatgtatgtgggggatgtccggtcagtgacacagaaacacattcaggagtggggcccatttgatctggtgatcggcggctcgccttgcaacgatctctccattgtcaatcctgctaggaaagggctctacgaaggaacggggaggttattcttcgagttctacagattattgcacgacgcgaggcctaaagagggagacgatagacctttcttctggcttttcgaaaatgtcgtggccatgggcgtgagtgataagcgggacatcagcaggttcctggaatccaacccagtgatgattgacgccaaagaggtttcagcagctcacagagcaagatatttttgggggaatctacccgggatgaatcgccctctggccagcaccgtgaatgacaaattagagctccaggagtgtctcgagcacggacgcatcgcgaaattttcaaaagtgcgaacaatcacaacgcgctccaattctatcaaacagggaaaagatcagcactttcctgtgttcatgaatgaaaaggaggacatcctgtggtgcaccgagatggagcgcgtttttggtttccccgtgcattataccgacgtgtcaaatatgagcagactagcaagacagagactgctaggccgctcctggagcgtgcccgtgatccgccatctgtttgcacctttgaaggagtactttgcctgcgtctag

SEQ ID NO: 251656 - DNA, 2739 bp, Artificial Sequence
  derived and/or modified sequence
atgcccgcaatgccttctagtgggccaggagataccagctcctccgcagccgagcgggaggaggaccgcaaggatggagaggagcaggaggagccccggggaaaagaagagcgccaggaaccaagcacgacagcccgtaaggtggggaggcctgggcgaaaaaggaagcatcctccagtggaaagcggggatacaccaaaagatcccgcagtaatctccaagtctccaagtatggcccaggactctggcgcaagcgagctgctccccaatggtgaccttgagaagcggagcgaaccacagcctgaggagggttcccccgcaggtgggcagaagggcggcgctccggccgaaggggagggagctgctgaaactctacccgaggcctctagagcggtggagaacggttgctgtactcccaaggaaggccgcggtgctcctgcagaagccgggaaggaacagaaagagaccaacatcgagtctatgaagatggaaggctcccgaggaagactccggggaggcctgggctgggagtcgtccctgcgccagaggccgatgccgaggctcaccttccaggcaggggatccctattacatctctaaacgaaaacgggacgaatggctagctcggtggaaacgagaggccgagaaaaaagcaaaagtgattgctggcatgaatgcagttgaggagaaccaggggccaggggaatcccagaaggtcgaagaagcaagcccgcctgccgtgcagcagcctacagatcctgcgtcgcctactgttgccactacacctgaaccagtaggctccgacgccggcgacaaaaatgccaccaaggctggcgatgacgaacccgaatacgaagacggaaggggattcgggatcggagaactggtatggggaaagctgcggggcttctcatggtggccaggacgcattgtgagttggtggatgactggacgctcccgagccgcggagggcacaaggtgggtgatgtggtttggggacggaaaatttagtgtggtgtgcgttgagaagcttatgcctttaagtagcttttgttccgcgttccaccaggcaacatataataaacagccaatgtaccgcaaggctatctatgaggtgctccaggtcgcctcatctagagcgggaaaactattccccgtgtgccatgattcagacgagagcgacacggcaaaagccgttgaagtgcagaacaagccaatgatcgagtgggcccttggtggcttccagccctccggacctaagggactggaaccacccgaggaggagaagaatccatacaaagaggtatacacagatatgtgggtggagccagaagcagccgcttacgctccgccaccgcctgctaaaaaaccccgtaaatcaaccgctgagaagcctaaggttaaagagatcatcgatgaaaggactagggaacgattggtttacgaggtaaggcaaaaatgtcggaatatcgaagacatttgtataagctgcggctcactgaacgttacgcttgaacatcccctctttgtgggtggcatgtgtcagaactgcaagaactgtttcctggagtgtgcttatcagtatgatgacgatggttatcagtcctattgcacaatttgttgcgggggacgcgaagttctgatgtgcggcaataacaattgctgtagatgcttttgtgtagagtgcgtggacctgttggtaggtccaggcgccgcccaggcagccataaaggaggatccttggaattgctatatgtgcggacacaaagggacatacggtctgctaaggaggagggaagactggccttccaggctgcaaatgttttttgccaacaaccatgatcaggaatttgatcccccaaaggtttatccacccgtcccggccgagaagagaaaacctatcagagtgctatcactcttcgacggaattgctaccgggttgttagtgctgaaagacttagggatccaagtggaccgctatattgcatctgaggtttgcgaggattctatcactgtgggaatggtacgtcatcagggaaaaattatgtatgtcggagacgtgcgttccgtgacccagaaacacatacaagagtggggtcctttcgatttggtgatcggcgggagtccatgtaatgacctcagcatcgtcaatcctgccaggaagggcctgtatgaaggtacaggtcgtctcttttttgaattctatcgtcttctccacgatgcacgtccaaaggagggtgacgatcggccgtttttttggttgttcgagaacgtggtggcgatgggtgtgagcgataagagggatatttcccgtttccttgaaagtaacccagtcatgatcgacgctaaggaagtgtcagccgctcacagagcccgctacttttggggcaacctccccgggatgaacaggcccctggcctccacagtcaatgataagctggagctgcaggagtgtcttgaacatggtcgtattgctaagttcagtaaggttcgaacaatcacaacccggtccaactctataaagcaaggcaaggatcagcatttccccgtgttcatgaacgagaaggaggatatcctctggtgcaccgagatggagcgcgtttttggcttccccgtacattacactgacgtgtcaaatatgtccagactggctagacaaagactacttgggcgctcttggtctgttcctgttataagacacctctttgccccattgaaggagtatttcgcctgtgtgtag

SEQ ID NO: 251657 - DNA, 2070 bp, Artificial Sequence
  derived and/or modified sequence
atgaacgcggtcgaggaaaatcagggacccggcgagagccaaaaggtggaggaggcgtcgccaccagctgtccaacaacctacggatccagcttcccccacggtggccaccacccccgagcctgtggggagtgatgctggcgataagaatgctaccaaagcaggggatgatgagcctgaatatgaggatggccggggcttcggcataggtgagctggtatggggaaaactgcgtggcttttcttggtggcccgggcgcatcgttagctggtggatgactggccgttcacgagccgcggagggcactcggtgggtcatgtggtttggcgacggaaaattttccgtcgtgtgcgtggaaaagctcatgcccttatcctccttttgcagtgcattccatcaggcgacgtataataaacaacccatgtaccggaaagccatttatgaggtgctgcaggtcgctagttctcgggccgggaagctattcccagtttgtcacgattccgatgaaagcgacacggcaaaagctgtggaggtgcagaataaacccatgattgaatgggcactcggaggcttccagccctccggtcctaaaggtctggaaccaccagaggaagagaagaatccttacaaagaggtgtacaccgacatgtgggtcgaacccgaagccgccgcttacgcacctcctccccccgcaaagaaaccccggaagagtacagccgagaagccaaaagttaaagagatcatcgatgagcgaacaagggagcgccttgtgtacgaggttagacagaagtgcagaaatatagaagacatttgcatctcttgtgggagcctgaacgtgacacttgaacaccctctatttgtgggtggtatgtgccagaactgcaaaaactgctttctcgaatgtgcctatcaatatgacgatgatggctaccaatcttattgcaccatttgctgcggaggaagagaggttctgatgtgcgggaataataattgctgccggtgtttctgcgtggagtgcgtagacctactcgtgggccctggagcagctcaggctgctatcaaggaggacccctggaactgctacatgtgcggtcataagggaacatatggactgcttaggaggagggaggactggcccagtagactgcagatgttttttgccaacaaccacgaccaggagtttgaccctccaaaagtttatccacctgttccagccgagaagaggaagccaattagggtgctttccttgtttgatgggatagcaacagggctattagttcttaaggacctggggatacaggtcgacaggtatattgccagcgaagtctgcgaggacagtattaccgttggcatggtacggcaccaggggaaaatcatgtatgtcggcgatgtgcggagtgtcactcagaaacacattcaagaatgggggccatttgatctggtaattggaggatcaccatgtaatgacctcagcattgtgaaccccgccaggaagggtttatacgaaggcacgggacgcctgttcttcgaattctatcggctgctgcatgatgcccggccgaaggagggtgacgatagacctttcttttggttatttgaaaatgtggtcgcgatgggggtctctgacaagcgggatatcagcagattcctggaaagcaaccctgtcatgatcgacgcaaaagaagtctcagccgcccatcgggcacgctatttttgggggaacttgcccggcatgaaccggcctttagcctccaccgttaatgataagcttgaactacaagagtgcttggagcatggccgcatagccaagtttagtaaggtccgcacgataaccacccgctctaatagcataaaacagggcaaggaccagcatttccccgtgtttatgaacgagaaagaggacattctgtggtgtactgagatggaaagagttttcggcttccctgtgcactacacagatgtatccaatatgtcaaggctggcgaggcaacgactcttgggacgttcttggtctgtgccagtgatcaggcacctgttcgcacccctcaaagagtattttgcatgcgtgtag

SEQ ID NO: 251658 - DNA, 2739 bp, Artificial Sequence
  derived and/or modified sequence
atgcctgccatgcccagcagcggccctggggacaccagcagcagcgctgctgagcgggaggaggacaggaaggatggagaggagcaggaggagccccggggcaaggaggagcggcaggagcccagcaccacagccaggaaggtgggccggcccggcaggaagaggaagcacccccctgtggagagcggggacacccccaaggaccctgctgtgatcagcaagagccccagcatggcccaggacagcggggccagcgagctgctgcccaacggggacctggagaagaggtctgagccccagcctgaggagggcagccctgctgggggccagaagggcggggccccagctgagggggagggcgctgctgagaccctgcctgaggccagcagagctgtggagaatggctgctgcacccccaaggagggccgcggggccccagctgaggccggcaaggagcagaaggagaccaacatcgagagcatgaagatggagggcagccggggccgcctgcggggcggcctgggctgggagagcagcctgcggcagaggcccatgccccggctgaccttccaggccggggacccctactacatcagcaagaggaagagagatgagtggctggcccgctggaagcgggaggccgagaagaaggccaaggtgattgctggcatgaatgctgtggaggagaaccagggccctggagagagccagaaggtggaggaggccagccccccagctgtgcagcagcccacagatcctgccagccccaccgtggccaccaccccagagcctgtgggcagtgatgctggggacaagaatgccaccaaggctggagatgatgagccagaatatgaagatggccggggcttcggcatcggggagctggtgtggggcaagctgcggggcttctcctggtggccaggccgcatcgtgtcctggtggatgacaggccgcagcagagctgctgagggcacccgctgggtgatgtggtttggagatggcaagttctctgtggtgtgtgtggagaagctgatgcccctgagcagcttctgcagcgccttccaccaggccacctacaacaagcagcccatgtacaggaaggccatctatgaggtgctgcaggtggccagcagccgggccggcaagctgtttcctgtgtgccacgacagtgatgaaagtgacacagccaaggctgtggaggtgcagaacaagcccatgattgagtgggccctgggcggcttccagcccagcggccccaagggcctggagcccccagaggaggagaagaacccctacaaggaggtgtacacagacatgtgggtggagcctgaggccgccgcctatgcccctcctcctccagccaagaagcccaggaagagcacagctgagaagcccaaggtgaaggagatcattgatgagaggacccgggagcggctggtgtatgaggtgcggcagaagtgcaggaacatcgaggacatctgcatcagctgtggcagcctgaatgtgaccctggagcaccccctgtttgtgggcggcatgtgccagaactgcaagaactgcttcctggagtgtgcctaccagtatgatgatgatggctaccagagctactgcaccatctgctgcggcggccgggaggtgctgatgtgtggcaacaacaactgctgccgctgcttctgtgtggagtgtgtggacctgctggtgggccctggagctgcccaggccgccatcaaggaggacccctggaactgctacatgtgtggccacaagggcacctacggcctgctgcggcggcgggaggactggcccagccggctgcagatgttctttgccaacaaccacgaccaggagtttgatcctcccaaggtgtacccacctgtgcctgctgagaagaggaagcccatccgggtgctgagcctgtttgatggcatcgccaccggcctgctggtgctgaaggacctgggcatccaggtggaccgctacatcgccagcgaggtgtgtgaagattccatcaccgtgggcatggtgcgccaccagggcaagatcatgtatgtgggagatgtgcgctctgtgacccagaagcacatccaggagtggggcccctttgacctggtgattggaggcagcccctgcaatgacctgagcatcgtgaacccagccaggaagggcctgtatgagggcaccggccgcctcttctttgagttctaccgcctgctgcatgatgcccggcccaaggagggagatgaccggcccttcttctggctgtttgaaaatgtggtggccatgggcgtgtctgacaagagggacatcagccgcttcctggagagcaaccctgtgatgattgatgccaaggaggtgtctgctgcccaccgggcccgctacttctggggcaacctgcccggcatgaaccggcccctggccagcacagtgaatgacaagctggagctgcaggagtgcctggagcacggccgcatcgccaagttcagcaaggtgaggaccatcaccaccaggagcaacagcatcaagcagggcaaggaccagcacttccctgtgttcatgaatgagaaggaggacatcctgtggtgcacagagatggagcgggtgtttggcttccctgtgcactacacagatgtgagcaacatgagccggctggcccggcagaggctgctgggccgctcctggagcgtgcctgtgatccgccacctgtttgcccccctgaaggagtactttgcctgtgtgtag

SEQ ID NO: 251659 - DNA, 2070 bp, Artificial Sequence
  derived and/or modified sequence
atgaatgctgtggaggagaaccagggccctggagagagccagaaggtggaggaggccagccccccagctgtgcagcagcccacagatcctgccagccccaccgtggccaccaccccagagcctgtgggcagtgatgctggggacaagaatgccaccaaggctggagatgatgagccagaatatgaagatggccggggctttggaattggagagctggtgtggggcaagctgcggggcttctcctggtggccaggaagaattgtgtcctggtggatgacaggccgcagcagagctgctgagggcacccgctgggtgatgtggtttggagatggcaagttctctgtggtgtgtgtggagaagctgatgcccctgagcagcttctgcagcgccttccaccaggccacctacaacaagcagcccatgtacaggaaggccatctatgaggtgctgcaggtggccagcagcagagctgggaagctgtttcctgtgtgccacgacagtgatgaaagtgacacagccaaggctgtggaggtgcagaacaagcccatgattgagtgggccctgggcggcttccagcccagcggccccaagggcctggagcccccagaggaggagaagaacccctacaaggaggtgtacacagacatgtgggtggagcctgaggccgccgcctatgcccctcctcctccagccaagaagcccaggaagagcacagctgagaagcccaaggtgaaggagatcattgatgagaggacccgggagcggctggtgtatgaggtgcggcagaagtgcagaaatattgaggacatctgcatcagctgtggcagcctgaatgtgaccctggagcaccccctgtttgtgggcggcatgtgccagaactgcaagaactgcttcctggagtgtgcctaccagtatgatgatgatggctaccagagctactgcaccatctgctgcggcggccgggaggtgctgatgtgtggcaacaacaactgctgccgctgcttctgtgtggagtgtgtggacctgctggtgggccctggggccgcccaggccgccatcaaggaggacccctggaactgctacatgtgtggccacaagggcacctacggcctgctgcggcggcgggaggactggcccagccggctgcagatgttctttgccaacaaccacgaccaggagtttgacccccccaaggtgtacccacctgtgcctgctgagaagaggaagcccatccgggtgctgagcctgtttgatggcatcgccaccggcctgctggtgctgaaggacctgggcatccaggtggaccgctacatcgccagcgaggtgtgtgaggacagcatcaccgtgggcatggtgcgccaccagggcaagatcatgtatgtgggagatgtgcgctctgtgacccagaagcacatccaggagtggggcccctttgacctggtgattggaggcagcccctgcaatgacctgagcatcgtgaacccagccaggaagggcctgtatgagggcaccggccgcctcttctttgagttctaccgcctgctgcatgatgcccggcccaaggagggagatgaccggcccttcttctggctgtttgaaaatgtggtggccatgggcgtgtctgacaagagggacatcagccgcttcctggagagcaaccctgtgatgattgatgccaaggaggtgtctgctgcccaccgggcccgctacttctggggcaacctgcccggcatgaaccggcccctggccagcacagtgaatgacaagctggagctgcaggagtgcctggagcacggcagaattgccaagttcagcaaggtgaggaccatcaccaccaggagcaacagcatcaagcagggcaaggaccagcacttccctgtgttcatgaatgagaaggaggacatcctgtggtgcacagagatggagcgggtgtttggcttccctgtgcactacacagatgtgagcaacatgagccggctggcccggcagaggctgctgggccgctcctggagcgtgcctgtgatccgccacctgtttgcccccctgaaggagtactttgcctgtgtgtag

SEQ ID NO: 251660 - DNA, 2739 bp, Artificial Sequence
  derived and/or modified sequence
atgcccgccatgcccagcagcggccccggcgacaccagcagcagcgctgcagaacgcgaggaagataggaaggacggcgaggagcaagaggagcctaggggaaaagaggagcgacaggagccaagcacaaccgcccgcaaggtgggccgacccgggagaaaacgtaaacacccacctgtggaatccggcgacacacctaaagacccagcagtaatctccaagtctccttcaatggcccaggactccggtgctagcgaactgcttcccaacggcgacctcgagaagaggtccgaaccccaaccagaagaaggttcacctgccggcggtcagaaaggaggagcacctgccgaaggcgagggtgcagccgaaacgctgcccgaagccagccgggcagtggagaacggctgctgcacacctaaagaggggagaggagcaccagctgaggccggtaaagagcagaaggagactaatattgagtctatgaagatggaaggaagtcgcggacgcctccgaggcggtttgggatgggagtcaagcctcagacaaagaccgatgcccagactgaccttccaagcaggtgacccgtattatatcagtaagaggaaacgcgatgaatggctggccagatggaaaagagaggcagaaaagaaggctaaagtcattgccggcatgaatgccgtggaggaaaaccaagggcccggtgaatcacagaaagtcgaagaggcatctccaccggcggtgcagcagcccactgatccagctagcccaacagttgcaacgactccagaacccgtgggcagcgacgcaggagataaaaacgctaccaaggccggcgacgatgagccggagtatgaagatggccggggcttcggtatcggagagctcgtgtggggcaagctccgcggttttagctggtggccagggcgcattgtgagttggtggatgaccggtaggtccagagccgctgagggcacaaggtgggtgatgtggtttggggatggaaagttcagcgtcgtctgcgtggagaaactcatgccgctctctagtttctgttcagccttccatcaggccacatacaacaaacaacctatgtatcggaaggccatttatgaagtcttacaggtcgcttcgagccgagctggtaagctcttccctgtctgccacgacagcgatgaaagcgataccgccaaggccgttgaggtgcagaataagcccatgatcgagtgggcactcggcggcttccagccaagcggccccaaggggctggaaccacctgaggaggaaaaaaacccctacaaggaagtatataccgacatgtgggtggaaccagaagctgctgcttacgcacccccacctcctgcgaaaaagccccgcaagtccaccgccgaaaaacctaaagtgaaggagattatcgatgaacggacccgcgaacgtctggtctacgaagttaggcaaaaatgccgcaacatagaagacatctgtataagttgtggtagcctaaacgtgactctggagcatccactcttcgtgggcgggatgtgccagaactgcaagaattgtttcttggagtgcgcctaccagtatgatgatgacgggtatcagtcctactgcaccatttgctgtggggggcgggaagtactcatgtgtggaaacaataactgttgccgatgtttttgtgtggaatgtgtggacctcctcgttggccctggagcagctcaagcagctattaaagaggacccttggaattgttatatgtgtggacacaagggtacttatggcctcctgcggcgccgcgaggactggccaagcaggctccaaatgttttttgctaataaccatgaccaggaatttgacccaccaaaagtgtacccaccagtgcctgcggagaagaggaaaccaatcagagtactgagcctcttcgacgggatagccactgggctattagtgctgaaagacttggggatccaagtcgatcggtatattgcatccgaggtctgcgaagatagcattactgtgggaatggttcgtcaccaggggaagattatgtatgtgggagacgtccgatcggtcacacagaagcatattcaggagtggggaccctttgaccttgtgattggtggttcaccctgcaacgatctatcaatcgttaaccctgccaggaagggcctttatgagggcactggacggcttttcttcgagttctacagactgcttcacgatgccagacccaaggagggtgatgaccggccatttttctggctgtttgagaatgttgttgcaatgggagtgtcagataaacgcgatatcagtcggttccttgagtcgaatcctgtgatgatcgacgctaaggaggtttcagcagcacaccgtgcccgttacttctgggggaacctaccaggaatgaatcggcctctagccagcaccgtgaacgacaaactggaactgcaggaatgtctggagcacggcagaatagccaagttcagtaaggtgcgaaccattacaacccggtccaactccattaaacagggaaaggaccagcactttccagtgttcatgaatgagaaagaagatattctgtggtgcaccgagatggagcgcgttttcggattccctgtacattatactgacgtctcaaatatgagcagattagcacgtcagcgtttgctggggagaagttggtcagtgcccgtaattagacacctctttgctcccttaaaagagtactttgcttgtgtctag

SEQ ID NO: 251661 - DNA, 2739 bp, Artificial Sequence
  derived and/or modified sequence
atgcccgccatgcccagcagcggccccggcgacaccagcagcagcgctgccgagcgggaggaggaccgaaaagacggcgaggagcaagaggagcctagaggcaaagaagagcgtcaggaaccttccactaccgcccgtaaagtcggccgcccaggacggaagcgcaagcacccacctgtggagtctggcgacacccctaaagacccggccgtgatatcaaagtccccgagtatggcccaggactctggcgcctctgagctgctgccaaacggcgatctcgaaaaaagatcggaaccacagccagaggaagggagccccgcaggcggccagaaagggggagccccagccgagggggaaggagcggctgagacgctccctgaggcttcccgggccgtagaaaacggatgctgtacacccaaagaggggaggggggcgcccgcagaggccgggaaggaacaaaaggagactaatattgaaagcatgaagatggagggctcacgaggcaggctgcgtgggggactcgggtgggagtcatccctgaggcagaggcccatgccccggctgaccttccaggctggtgatccctactatatttctaagcgcaaaagggacgagtggttagcgagatggaaacgcgaggctgagaagaaggcaaaagtgatcgccggtatgaacgccgtcgaggagaatcaggggccaggagagagccagaaagtggaagaggcctctcctcccgcagtgcaacagccaaccgacccagcctctccaaccgtggctaccacccccgaaccagttggatccgatgctggtgacaaaaatgctaccaaggccggagacgatgagcccgagtatgaggatggccggggattcggaattggggaactggtgtgggggaaattacgcgggttctcctggtggccgggaagaattgtttcctggtggatgaccggccggtcacgcgctgccgagggcacaagatgggtgatgtggtttggtgatgggaagtttagcgtggtttgtgtggagaagctgatgcccctcagtagtttctgcagtgcctttcaccaggcaacctataataagcagcccatgtaccggaaagccatatatgaggtgctccaggtcgcatcttcacgcgccggcaaactgttccctgtgtgtcatgactcagatgagtctgatactgctaaggccgtggaggtgcagaacaagcccatgatcgagtgggctcttggagggtttcaaccgagtggccctaaggggctggagcctcccgaggaggaaaagaacccctataaagaggtgtataccgatatgtgggtggagccagaggctgctgcctatgcccctcctccccctgccaagaagcctcggaaatcaaccgctgagaagcctaaggtgaaggaaataatagatgagaggactagagagagacttgtctacgaggtgaggcaaaaatgtcgcaacatcgaggatatctgtatctcttgcggcagcctaaacgtgacactggagcacccactgttcgtcggcggaatgtgccagaactgtaagaattgttttctcgagtgtgcataccagtacgacgatgacgggtaccaatcttactgcaccatctgctgcgggggccgcgaggttttaatgtgtggaaataacaattgctgccgttgcttttgtgtggaatgcgttgacctgttggttggacctggtgccgctcaggccgcgatcaaagaggatccatggaactgttatatgtgcggccacaagggaacatacggcctgctgcggagacgcgaggactggccctccagattgcagatgtttttcgcgaacaaccacgaccaggaatttgacccaccaaaagtctaccctccagttcctgctgaaaaaagaaaaccgatacgtgtgcttagccttttcgacggtatagctacgggccttctggtactcaaagatctcggaatacaggtcgatcggtacatcgcctctgaagtctgtgaggattccattacagtgggtatggtccgccatcagggtaagatcatgtacgtcggtgatgtcagatctgttacccagaagcacatacaggagtggggacccttcgatctggtcatcggcgggagcccatgtaatgatctgtccatagtaaatccagctagaaaaggcctgtatgaggggacaggaagattgtttttcgagttctacaggttgttacacgatgctcggccaaaggaaggagacgatcgtccattcttctggctgttcgaaaatgtcgtggcgatgggagtgagtgataaacgggatatctcgcgcttcttggaaagcaatccagtgatgattgatgcaaaggaagtgagtgccgctcacagagccaggtacttttggggcaacctgcctggaatgaacaggcctttggcaagtactgtcaacgataagttggagctacaggaatgcctcgaacacgggcgtatcgcaaagtttagcaaggtgagaaccatcaccactagatcgaactcaattaagcagggcaaggatcagcacttccctgtttttatgaacgagaaagaggacattctttggtgcacagaaatggagcgggtgttcggattccccgttcactacacagatgtgtccaacatgagtcgccttgcacgtcagcggctactcggcaggtcatggagcgtccccgtgatccgccacctgttcgcccctctgaaggagtacttcgcttgtgtctag

SEQ ID NO: 251662 - DNA, 2070 bp, Artificial Sequence
  derived and/or modified sequence
atgaacgccgtggaggagaaccagggccccggcgagagccagaaggtagaagaggcaagccctcccgcagtccaacagcccacagatcctgcatctccaacggttgcgaccacacccgaacccgtcggatccgacgcaggtgataaaaacgcaaccaaagccggcgatgatgagcctgagtacgaggacggccgcggtttcggtataggagagctggtttggggaaaactacgaggtttcagctggtggcccgggaggatcgtgtcatggtggatgacaggccgatctagagcagccgaaggcacacgatgggtgatgtggttcggcgatgggaagtttagtgttgtgtgcgtggagaagctcatgcccctgtcctctttttgtagcgcatttcatcaggccacatacaataaacagcccatgtacaggaaggccatttacgaagtgctacaagtagcgtccagccgcgcagggaagcttttccctgtctgtcacgactctgatgagtctgatactgccaaggcggtggaggtgcaaaataaacctatgatagagtgggcattggggggcttccagccgagtgggccaaaaggtctggagcccccagaggaggaaaaaaacccctacaaggaagtgtacacagatatgtgggtggaaccagaggcggcggcatatgctcctcctccccctgctaaaaagccaaggaagtccacggctgagaagcctaaggtgaaagaaattatcgacgagcgtactagggagcgattggtgtacgaggtacgccagaagtgcaggaacattgaggatatctgcatttcctgcgggtcactcaacgtcacgcttgagcatccgctcttcgtaggtggaatgtgccagaattgtaagaactgtttccttgagtgtgcataccagtacgatgacgacggataccagtcctattgtactatctgctgcggcggcagagaggtgttaatgtgcggcaataataactgttgccgatgcttctgcgttgagtgcgtcgaccttctggtgggccccggcgctgcccaggctgctattaaggaggacccctggaactgctatatgtgtggccacaagggaacctacggcttgctcaggcgccgcgaggattggcctagccgtctccaaatgtttttcgccaacaaccatgaccaagagttcgacccccctaaggtataccctcctgtgccagccgagaagcgaaagccgataagggtcttgagtctctttgacggtatcgccacaggtctgctggtgctgaaggacctcgggatccaggtggacagatacatcgcatccgaggtctgtgaagactcaataaccgtgggcatggttaggcatcagggaaagattatgtacgtcggcgatgtcagatctgtcacacagaaacacattcaggagtggggacctttcgatttggtcatcggaggatctccgtgcaacgatttatcaatcgtgaacccagccaggaaggggctttatgaaggcaccggtagactgtttttcgagttctatcgcctcctgcacgatgcaagaccaaaagagggagatgatcgcccattcttctggctattcgagaacgtggtggctatgggcgtgagcgataaaagagacatctccaggttcctcgagtctaatcccgtgatgatcgatgcgaaggaggtctcggctgcccatcgagcccgctacttctgggggaacctccccgggatgaataggcctctggcttccaccgtgaacgacaagctcgaactgcaggagtgtttggagcatgggcggatagctaaattctccaaggttcgcaccattactacccgatccaatagtattaaacaggggaaagaccaacatttccccgtcttcatgaatgaaaaggaagatatattatggtgcacagagatggaacgagtctttgggtttcctgtccactacaccgatgtttccaacatgtcccggctcgcgagacaacgacttctcggacgatcttggtcagttccggtgatccgccacctcttcgccccattaaaggagtacttcgcatgcgtgtag

SEQ ID NO: 251663 - DNA, 2739 bp, Artificial Sequence
  derived and/or modified sequence
atgcccgctatgccaagctcaggccctggagacactagtagctccgctgctgaaagagaggaagatcgcaaggacggagaggagcaagaagaaccgagagggaaagaggaacgccaggagccatcgaccaccgccagaaaggtgggaagacccggacggaaaagaaagcatccccctgtcgaatccggcgacactcccaaagatcctgctgtgattagcaagtcccctagcatggcccaggatagcggggcttccgagttgttgccaaacggcgatttggagaagcggagtgagccccagccagaagagggatccccagccggaggacagaagggcggtgccccagccgagggggaaggagcagctgagactttacctgaagcctctagggctgtggagaatggatgctgcacgccaaaggagggccgaggggcacctgcagaggctgggaaggaacagaaggagacaaacattgagtctatgaagatggaggggtctaggggtaggctgagaggagggctgggctgggagtcctcactgcgacagagaccgatgccgagactgacttttcaagctggtgatccatactacatctcaaagaggaaaagggatgagtggttagctcggtggaaacgagaggccgaaaagaaagctaaagtcattgcgggtatgaacgccgtggaagagaaccagggccctggtgagtcccagaaagttgaagaggcatctccacccgcagtgcaacagccaaccgatcctgcatccccaacagtggcgacaactcccgaaccggtgggaagcgacgccggagataagaacgccactaaggctggggacgacgagcctgaatacgaggatggtcgaggtttcggaataggcgaactggtgtggggcaagctgagaggcttcagctggtggccagggcgtatcgttagttggtggatgaccgggaggtcaagggcggctgaggggactcgctgggtcatgtggttcggtgacggaaagttctccgtggtgtgtgtcgagaaactgatgcccctgtcttccttttgtagcgctttccaccaagcaacctacaacaagcaaccaatgtaccgaaaggccatttatgaagtgctacaggtggccagcagtcgggcaggcaaactgtttcccgtctgtcatgactctgatgagagcgatacagcaaaggctgtggaagtgcaaaacaaacctatgattgaatgggccctggggggatttcagccgtctggtccaaaagggctcgagccacccgaagaagaaaagaatccctacaaggaagtctacacagacatgtgggtcgaacccgaggctgctgcttacgcccctccgccacccgctaaaaagccgagaaaaagcaccgcagaaaagccaaaggtgaaggaaattattgacgagcggacccgcgaaaggttggtgtacgaggtacgtcagaaatgcaggaacattgaggatatatgtatcagttgtgggtccctgaatgtcacattagagcatcccctatttgtcgggggtatgtgtcagaactgcaagaattgctttctggagtgcgcataccagtacgatgatgacgggtaccagtcttactgtacgatatgttgtggcggacgcgaagtgctgatgtgcgggaacaacaattgctgccggtgcttctgcgtagaatgtgtggacctgctcgtcggcccaggagctgcccaggccgcaatcaaagaagatccatggaactgctacatgtgcggacacaaaggcacctatgggctgctgcggaggagggaagactggccttctcgactgcagatgtttttcgccaataaccatgatcaagaatttgacccacccaaggtgtatccgccagttccagccgagaagcgcaaacccattcgagttctgtccttgtttgatggaattgcaacgggcttgcttgtgctcaaggaccttggtatccaggtggaccggtacatcgctagcgaagtgtgtgaggatagcataacggtgggaatggtcagacaccaggggaaaataatgtatgtaggcgatgttaggagtgtgacacagaagcatatacaagagtggggaccgttcgatctggtgattgggggatcaccctgtaacgatttgtccattgtgaatcctgcccgtaaaggcctgtatgaaggcacaggacggcttttttttgagttctatcggctgctccacgatgccagacccaaggagggtgacgaccggcctttcttctggctgtttgagaatgtagtggccatgggtgtaagcgacaaacgcgacattagtagatttttggagagcaatccagtaatgattgacgctaaggaagtgagtgccgctcacagggcccgatacttctggggaaatctgccaggtatgaaccgtcccctcgcgtccaccgtgaatgacaagttagagctgcaagaatgtcttgaacacggtcgcatagcaaagttcagtaaagtcagaacaattacaacaaggagtaactccatcaagcaaggaaaggaccagcacttcccggtctttatgaacgagaaagaagatatactgtggtgcaccgagatggagagggtcttcggtttccccgtccactatacagacgtgagtaatatgtctcggctagccagacagaggttgcttggccgttcttggagcgtgcccgtcatcagacacctattcgccccactcaaagagtattttgcatgcgtttag

SEQ ID NO: 251664 - DNA, 2739 bp, Artificial Sequence
  derived and/or modified sequence
atgccagcgatgccctcttccggccctggggacacatcctcatccgcagccgagcgcgaggaagatagaaaggatggggaagagcaggaggaaccccgagggaaagaggaaaggcaggagccctcgactacggcccgaaaggtgggcagaccaggccgaaagagaaaacacccaccagttgagtccggagatactcccaaagatcctgcagtgatctctaagtcccccagcatggcgcaggactcaggcgctagtgagctactgccaaatggtgatctggagaagagatctgagccacagccggaagagggatctcccgctggaggccaaaagggaggagccccagcagagggtgagggagccgctgaaacattgcccgaggcctcacgggcagtggaaaacgggtgttgcacaccaaaggaggggagaggcgctccggcagaggccggaaaggagcaaaaggaaaccaacatcgaatccatgaagatggagggctcacggggacgcttaaggggcggactgggctgggagtctagtctgagacagcgtcctatgccacgcctgacctttcaagccggagacccctattacatatcaaagcgcaagcgcgacgaatggttggccagatggaaaagggaggctgaaaaaaaagccaaagttatagcaggaatgaatgctgtcgaggagaatcagggcccaggtgaaagtcaaaaggtcgaggaagctagtcctcctgccgttcagcagcccaccgacccggcaagtccaaccgtcgctaccaccccagagcccgtggggtctgacgccggtgataagaacgctacaaaggccggagacgacgagcccgaatacgaggacggcagggggtttggtattggggaactggtatggggtaaattgcggggatttagctggtggcctggccgaatcgtcagttggtggatgactggtagatcgagagcagccgaaggaaccagatgggtgatgtggtttggagacgggaagttttctgttgtctgcgttgagaaacttatgccgctgagctcattctgcagtgcattccatcaagctacctacaacaagcaaccaatgtaccgcaaagctatttacgaagtgctccaggtcgcgtcatctcgcgcaggaaaattatttccagtgtgtcatgacagcgacgagtctgacaccgccaaagcagtggaggtccagaataaacccatgatcgagtgggctctgggcggatttcagccaagtggcccaaaaggtctcgagcctcccgaagaagagaagaatccctacaaagaggtgtataccgatatgtgggtggagcccgaggccgctgcctatgcaccgcctcctcctgctaaaaaacctaggaagtcaacagcggagaaaccaaaggttaaggaaattattgatgagcgcacgagggaaaggcttgtgtacgaagtgcgccaaaagtgtcggaacattgaagacatctgcatctcctgtgggagcctcaatgtgactttagagcaccctctttttgtgggagggatgtgccagaactgcaagaattgcttccttgagtgtgcgtaccagtacgacgacgacgggtatcaaagctactgcaccatctgttgcggtgggagggaagtgctcatgtgcggcaacaacaattgctgtagatgtttttgcgtcgagtgtgtggaccttctagtaggacccggtgccgctcaggccgctattaaagaagacccatggaattgctacatgtgcggccataaggggacttatgggctgctccgaaggcgggaggactggccgagtcgactccagatgtttttcgccaataatcatgaccaggagttcgaccctccaaaagtctaccccccagtcccagctgaaaagcgcaagcctatccgtgttctttcattatttgacggcatcgcaacaggtctgctggttctcaaagatttaggaattcaagtcgacaggtacattgctagcgaggtgtgtgaggatagtattactgtgggtatggtcagacaccagggaaagattatgtatgtgggggatgtaagaagcgtaacacaaaaacacatccaggagtggggcccttttgatctggtcatagggggatcaccttgcaatgacttgtcaatcgttaatcctgcccgaaagggactctacgagggcaccgggaggctgtttttcgaattttaccggctcctgcacgacgcgaggcccaaggaaggcgacgatagacctttcttttggttgtttgagaacgtggttgctatgggcgtcagcgacaagcgcgatatatcaaggttcctggagagtaaccctgtaatgattgatgcaaaggaagtgtctgccgcacaccgagcccgatacttttggggcaacctgccaggaatgaatcgacccctcgcctcaacagtcaacgataaactggaattacaggaatgtctggaacatggccgaattgccaagttttctaaggtgcgaacaattaccacacgcagtaacagtatcaaacagggtaaggaccagcactttcctgtgttcatgaacgagaaggaggacatactgtggtgtacagagatggaacgcgtcttcgggtttcctgtgcattacaccgatgtgagcaatatgagtcggctagcaagacagcggttactcggacgtagctggagcgtaccggtgattcgccacctgtttgcccctctcaaagaatacttcgcttgcgtgtag

SEQ ID NO: 251665 - DNA, 2070 bp, Artificial Sequence
  derived and/or modified sequence
atgaatgcggtggaagagaaccaggggccaggcgaaagccaaaaggtcgaagaggcatccccgcctgctgtgcaacagccaaccgaccctgcatctcctacagtagcaacgactcccgaaccagtgggctctgatgccggagacaaaaacgcgacgaaagccggtgacgacgagcctgaatatgaagacggcaggggctttggtataggcgagctcgtatgggggaaactccggggattttcctggtggccgggacgcattgtcagttggtggatgactggtagatcaagggccgcagaaggtaccaggtgggtcatgtggttcggtgatggtaagttctccgttgtttgcgtcgagaagctgatgccactttcgtcattctgttcagccttccatcaggcaacctataataaacaaccaatgtatcggaaagccatttacgaggtgctgcaggtggcttcttcccgggcaggtaaactcttccccgtctgccacgatagtgacgagagcgatacagcgaaagccgtggaagtccagaacaagccaatgatcgagtgggctcttgggggattccagccttccggacctaagggcctggagcctcccgaggaggagaaaaacccgtacaaagaagtctacactgacatgtgggttgagccagaggctgccgcttatgcccctccacccccagctaagaaaccaagaaagtctaccgccgagaagcccaaggtcaaagagataatagacgaaagaacaagggagcgactcgtgtacgaggtacgccagaaatgccggaacatcgaagacatctgtatttcgtgcgggagcctgaacgtgactctggagcaccccctttttgtggggggaatgtgtcagaattgcaagaactgtttcttggaatgcgcataccagtatgacgatgatgggtatcagtcgtactgcaccatctgctgtgggggtcgagaggttctcatgtgtggcaacaacaattgttgtcgctgcttttgcgtggagtgtgtggatttactggtggggccaggcgcagcccaagcagctataaaggaggacccctggaactgctatatgtgtggccacaagggcacctatggtctcctcaggaggagagaagattggccttccaggctgcaaatgtttttcgcaaataaccacgatcaggaattcgatccacctaaggtgtatccccctgtgcccgcagagaaaaggaaaccaataagagtcctcagtctctttgacggcattgctactggcttgctggtactaaaggatctgggaattcaagtcgaccggtatattgcctctgaagtttgtgaagattccatcacagtcggcatggtgcgccaccagggaaaaataatgtatgtgggggacgttagatctgtgacccaaaaacacattcaggagtggggtcctttcgatctcgtcatcggagggtcaccctgtaacgacctgagcatagtaaaccccgctaggaagggactctatgagggcacgggacgcttattttttgagttctacagactgttgcacgatgcacggccaaaggagggagacgatcgcccattcttttggcttttcgaaaatgtcgttgcgatgggagtgtcagacaaacgcgatatatctcggtttttggaaagcaacccagtaatgattgatgctaaggaggtatcagctgctcatcgagccagatatttctggggaaatctgcctggaatgaaccggccacttgcctccacagtgaatgacaaactcgaactgcaagagtgcttggaacacggacggattgccaaattttcgaaagtacggactattacaactcgttctaactcaatcaaacagggcaaagatcagcatttcccagtgttcatgaatgagaaagaagacatactctggtgtactgagatggagagggtgttcggttttccagtgcactacactgatgtgtccaatatgtccagactagcacgccagcgcttattgggaaggagttggtccgtcccagtgattaggcatctgttcgcacctctgaaggagtatttcgcatgcgtgtag

SEQ ID NO: 251666 - DNA, 2739 bp, Artificial Sequence
  derived and/or modified sequence
atgcccgccatgcccagcagcggccccggcgacaccagcagcagcgccgccgagagagaggaggacagaaaggacggcgaggagcaggaggagcccagaggcaaggaggagagacaggagcccagcaccaccgccagaaaggtgggcagacccggcagaaagagaaagcacccccccgtggagagcggcgacacccccaaggaccccgccgtgatcagcaagagccccagcatggcccaggacagcggcgccagcgagctgctgcccaacggcgacctggagaagagaagcgagccccagcccgaggagggcagccccgccggcggccagaagggcggcgcccccgccgagggcgagggcgccgccgagaccctgcccgaggccagcagagccgtggagaacggctgctgcacccccaaggagggcagaggcgcccccgccgaggccggcaaggagcagaaggagaccaacatcgagagcatgaagatggagggcagcagaggcagactgagaggcggcctgggctgggagagcagcctgagacagagacccatgcccagactgaccttccaggccggcgacccctactacatcagcaagagaaagagagacgagtggctggccagatggaagagagaggccgagaagaaggccaaggtgatcgccggcatgaacgccgtggaggagaaccagggccccggcgagagccagaaggtggaggaggccagcccccccgccgtgcagcagcccaccgaccccgccagccccaccgtggccaccacccccgagcccgtgggcagcgacgccggcgacaagaacgccaccaaggccggcgacgacgagcccgagtacgaggacggcagaggcttcggcatcggcgagctggtgtggggcaagctgagaggcttcagctggtggcccggcagaatcgtgagctggtggatgaccggcagaagcagagccgccgagggcaccagatgggtgatgtggttcggcgacggcaagttcagcgtggtgtgcgtggagaagctgatgcccctgagcagcttctgcagcgccttccaccaggccacctacaacaagcagcccatgtacagaaaggccatctacgaggtgctgcaggtggccagcagcagagccggcaagctgttccccgtgtgccacgacagcgacgagagcgacaccgccaaggccgtggaggtgcagaacaagcccatgatcgagtgggccctgggcggcttccagcccagcggccccaagggcctggagccccccgaggaggagaagaacccctacaaggaggtgtacaccgacatgtgggtggagcccgaggccgccgcctacgccccccccccccccgccaagaagcccagaaagagcaccgccgagaagcccaaggtgaaggagatcatcgacgagagaaccagagagagactggtgtacgaggtgagacagaagtgcagaaacatcgaggacatctgcatcagctgcggcagcctgaacgtgaccctggagcaccccctgttcgtgggcggcatgtgccagaactgcaagaactgcttcctggagtgcgcctaccagtacgacgacgacggctaccagagctactgcaccatctgctgcggcggcagagaggtgctgatgtgcggcaacaacaactgctgcagatgcttctgcgtggagtgcgtggacctgctggtgggccccggcgccgcccaggccgccatcaaggaggacccctggaactgctacatgtgcggccacaagggcacctacggcctgctgagaagaagagaggactggcccagcagactgcagatgttcttcgccaacaaccacgaccaggagttcgacccccccaaggtgtacccccccgtgcccgccgagaagagaaagcccatcagagtgctgagcctgttcgacggcatcgccaccggcctgctggtgctgaaggacctgggcatccaggtggacagatacatcgccagcgaggtgtgcgaggacagcatcaccgtgggcatggtgagacaccagggcaagatcatgtacgtgggcgacgtgagaagcgtgacccagaagcacatccaggagtggggccccttcgacctggtgatcggcggcagcccctgcaacgacctgagcatcgtgaaccccgccagaaagggcctgtacgagggcaccggcagactgttcttcgagttctacagactgctgcacgacgccagacccaaggagggcgacgacagacccttcttctggctgttcgagaacgtggtggccatgggcgtgagcgacaagagagacatcagcagattcctggagagcaaccccgtgatgatcgacgccaaggaggtgagcgccgcccacagagccagatacttctggggcaacctgcccggcatgaacagacccctggccagcaccgtgaacgacaagctggagctgcaggagtgcctggagcacggcagaatcgccaagttcagcaaggtgagaaccatcaccaccagaagcaacagcatcaagcagggcaaggaccagcacttccccgtgttcatgaacgagaaggaggacatcctgtggtgcaccgagatggagagagtgttcggcttccccgtgcactacaccgacgtgagcaacatgagcagactggccagacagagactgctgggcagaagctggagcgtgcccgtgatcagacacctgttcgcccccctgaaggagtacttcgcctgcgtgtag

SEQ ID NO: 251667 - DNA, 2070 bp, Artificial Sequence
  derived and/or modified sequence
atgaacgccgtggaggagaaccagggccccggcgagagccagaaggtggaggaggccagcccccccgccgtgcagcagcccaccgaccccgccagccccaccgtggccaccacccccgagcccgtgggcagcgacgccggcgacaagaacgccaccaaggccggcgacgacgagcccgagtacgaggacggcagaggcttcggcatcggcgagctggtgtggggcaagctgagaggcttcagctggtggcccggcagaatcgtgagctggtggatgaccggcagaagcagagccgccgagggcaccagatgggtgatgtggttcggcgacggcaagttcagcgtggtgtgcgtggagaagctgatgcccctgagcagcttctgcagcgccttccaccaggccacctacaacaagcagcccatgtacagaaaggccatctacgaggtgctgcaggtggccagcagcagagccggcaagctgttccccgtgtgccacgacagcgacgagagcgacaccgccaaggccgtggaggtgcagaacaagcccatgatcgagtgggccctgggcggcttccagcccagcggccccaagggcctggagccccccgaggaggagaagaacccctacaaggaggtgtacaccgacatgtgggtggagcccgaggccgccgcctacgccccccccccccccgccaagaagcccagaaagagcaccgccgagaagcccaaggtgaaggagatcatcgacgagagaaccagagagagactggtgtacgaggtgagacagaagtgcagaaacatcgaggacatctgcatcagctgcggcagcctgaacgtgaccctggagcaccccctgttcgtgggcggcatgtgccagaactgcaagaactgcttcctggagtgcgcctaccagtacgacgacgacggctaccagagctactgcaccatctgctgcggcggcagagaggtgctgatgtgcggcaacaacaactgctgcagatgcttctgcgtggagtgcgtggacctgctggtgggccccggcgccgcccaggccgccatcaaggaggacccctggaactgctacatgtgcggccacaagggcacctacggcctgctgagaagaagagaggactggcccagcagactgcagatgttcttcgccaacaaccacgaccaggagttcgacccccccaaggtgtacccccccgtgcccgccgagaagagaaagcccatcagagtgctgagcctgttcgacggcatcgccaccggcctgctggtgctgaaggacctgggcatccaggtggacagatacatcgccagcgaggtgtgcgaggacagcatcaccgtgggcatggtgagacaccagggcaagatcatgtacgtgggcgacgtgagaagcgtgacccagaagcacatccaggagtggggccccttcgacctggtgatcggcggcagcccctgcaacgacctgagcatcgtgaaccccgccagaaagggcctgtacgagggcaccggcagactgttcttcgagttctacagactgctgcacgacgccagacccaaggagggcgacgacagacccttcttctggctgttcgagaacgtggtggccatgggcgtgagcgacaagagagacatcagcagattcctggagagcaaccccgtgatgatcgacgccaaggaggtgagcgccgcccacagagccagatacttctggggcaacctgcccggcatgaacagacccctggccagcaccgtgaacgacaagctggagctgcaggagtgcctggagcacggcagaatcgccaagttcagcaaggtgagaaccatcaccaccagaagcaacagcatcaagcagggcaaggaccagcacttccccgtgttcatgaacgagaaggaggacatcctgtggtgcaccgagatggagagagtgttcggcttccccgtgcactacaccgacgtgagcaacatgagcagactggccagacagagactgctgggcagaagctggagcgtgcccgtgatcagacacctgttcgcccccctgaaggagtacttcgcctgcgtgtag

SEQ ID NO: 251668 - DNA, 4380 bp, Artificial Sequence
  derived and/or modified sequence
gcagtgggctctggcggaggtcgggagaactgcagggcgaaggccgccgggggctccgcgggctgcggggggaggcacttgacaccggcccggggagaggaggggccgctgtccctgcggccagtgctggatgcggggacccagcgcagaagcagcgccaggtggagccatcgaagcccccacccacaggctgacagaggcaccgttcaccagagggctcaacaccgggatctatgtttaagttttaactctcgcctccaaagaccacgataattccttccccaaagcccagcagccccccagccccgcgcagccccagcctgcctcccggcgcccagatgcccgccatgccctccagcggccccggggacaccagcagctctgctgcggagcgggaggaggaccgaaaggacggagaggagcaggaggagccgcgtggcaaggaggagcgccaagagcccagcaccacggcacggaaggtggggcggcctgggaggaagcgcaagcaccccccggtggaaagcggtgacacgccaaaggaccctgcggtgatctccaagtccccatccatggcccaggactcaggcgcctcagagctattacccaatggggacttggagaagcggagtgagccccagccagaggaggggagccctgctggggggcagaagggcggggccccagcagagggagagggtgcagctgagaccctgcctgaagcctcaagagcagtggaaaatggctgctgcacccccaaggagggccgaggagcccctgcagaagcgggcaaagaacagaaggagaccaacatcgaatccatgaaaatggagggctcccggggccggctgcggggtggcttgggctgggagtccagcctccgtcagcggcccatgccgaggctcaccttccaggcgggggacccctactacatcagcaagcgcaagcgggacgagtggctggcacgctggaaaagggaggctgagaagaaagccaaggtcattgcaggaatgaatgctgtggaagaaaaccaggggcccggggagtctcagaaggtggaggaggccagccctcctgctgtgcagcagcccactgaccccgcatcccccactgtggctaccacgcctgagcccgtggggtccgatgctggggacaagaatgccaccaaagcaggcgatgacgagccagagtacgaggacggccggggctttggcattggggagctggtgtgggggaaactgcggggcttctcctggtggccaggccgcattgtgtcttggtggatgacgggccggagccgagcagctgaaggcacccgctgggtcatgtggttcggagacggcaaattctcagtggtgtgtgttgagaagctgatgccgctgagctcgttttgcagtgcgttccaccaggccacgtacaacaagcagcccatgtaccgcaaagccatctacgaggtcctgcaggtggccagcagccgcgcggggaagctgttcccggtgtgccacgacagcgatgagagtgacactgccaaggccgtggaggtgcagaacaagcccatgattgaatgggccctggggggcttccagccttctggccctaagggcctggagccaccagaagaagagaagaatccctacaaagaagtgtacacggacatgtgggtggaacctgaggcagctgcctacgcaccacctccaccagccaaaaagccccggaagagcacagcggagaagcccaaggtcaaggagattattgatgagcgcacaagagagcggctggtgtacgaggtgcggcagaagtgccggaacattgaggacatctgcatctcctgtgggagcctcaatgttaccctggaacaccccctcttcgttggaggaatgtgccaaaactgcaagaactgctttctggagtgtgcgtaccagtacgacgacgacggctaccagtcctactgcaccatctgctgtgggggccgtgaggtgctcatgtgcggaaacaacaactgctgcaggtgcttttgcgtggagtgtgtggacctcttggtggggccgggggctgcccaggcagccattaaggaagacccctggaactgctacatgtgcgggcacaagggtacctacgggctgctgcggcggcgagaggactggccctcccggctccagatgttcttcgctaataaccacgaccaggaatttgaccctccaaaggtttacccacctgtcccagctgagaagaggaagcccatccgggtgctgtctctctttgatggaatcgctacagggctcctggtgctgaaggacttgggcattcaggtggaccgctacattgcctcggaggtgtgtgaggactccatcacggtgggcatggtgcggcaccaggggaagatcatgtacgtcggggacgtccgcagcgtcacacagaagcatatccaggagtggggcccattcgatctggtgattgggggcagtccctgcaatgacctctccatcgtcaaccctgctcgcaagggcctctacgagggcactggccggctcttctttgagttctaccgcctcctgcatgatgcgcggcccaaggagggagatgatcgccccttcttctggctctttgagaatgtggtggccatgggcgttagtgacaagagggacatctcgcgatttctcgagtccaaccctgtgatgattgatgccaaagaagtgtcagctgcacacagggcccgctacttctggggtaaccttcccggtatgaacaggccgttggcatccactgtgaatgataagctggagctgcaggagtgtctggagcatggcaggatagccaagttcagcaaagtgaggaccattactacgaggtcaaactccataaagcagggcaaagaccagcattttcctgtcttcatgaatgagaaagaggacatcttatggtgcactgaaatggaaagggtatttggtttcccagtccactatactgacgtctccaacatgagccgcttggcgaggcagagactgctgggccggtcatggagcgtgccagtcatccgccacctcttcgctccgctgaaggagtattttgcgtgtgtgtaagggacatgggggcaaactgaggtagcgacacaaagttaaacaaacaaacaaaaaacacaaaacataataaaacaccaagaacatgaggatggagagaagtatcagcacccagaagagaaaaaggaatttaaaacaaaaaccacagaggcggaaataccggagggctttgccttgcgaaaagggttggacatcatctcctgatttttcaatgttattcttcagtcctatttaaaaacaaaaccaagctcccttcccttcctcccccttcccttttttttcggtcagaccttttattttctactcttttcagaggggttttctgtttgtttgggttttgtttcttgctgtgactgaaacaagaaggttattgcagcaaaaatcagtaacaaaaaatagtaacaataccttgcagaggaaaggtgggagagaggaaaaaaggaaattctatagaaatctatatattgggttgtttttttttttgttttttgttttttttttttgggtttttttttttactatatatcttttttttgttgtctctagcctgatcagataggagcacaagcaggggacggaaagagagagacactcaggcggcagcattccctcccagccactgagctgtcgtgccagcaccattcctggtcacgcaaaacagaacccagttagcagcagggagacgagaacaccacacaagacatttttctacagtatttcaggtgcctaccacacaggaaaccttgaagaaaatcagtttctagaagccgctgttacctcttgtttacagtttatatatatatgatagatatgagatatatatataaaaggtactgttaactactgtacaacccgacttcataatggtgctttcaaacagcgagatgagtaaaaacatcagcttccacgttgccttctgcgcaaagggtttcaccaaggatggagaaagggagacagcttgcagatggcgcgttctcacggtgggctcttccccttggtttgtaacgaagtgaaggaggagaacttgggagccaggttctccctgccaaaaagggggctagatgaggtggtcgggcccgtggacagctgagagtgggattcatccagactcatgcaataaccctttgattgttttctaaaaggagactccctcggcaagatggcagagggtacggagtcttcaggcccagtttctcactttagccaattcgagggctccttgtggtgggatcagaactaatccagagtgtgggaaagtgacagtcaaaaccccacctggagcaaataaaaaaacatacaaaacgta

SEQ ID NO: 251669 - DNA, 4279 bp, Artificial Sequence
  derived and/or modified sequence
gacgcggcgccgcggcaccagggcgcgcagccgggccggcccgaccccaccggccatacggtggagccatcgaagcccccacccacaggctgacagaggcaccgttcaccagagggctcaacaccgggatctatgtttaagttttaactctcgcctccaaagaccacgataattccttccccaaagcccagcagccccccagccccgcgcagccccagcctgcctcccggcgcccagatgcccgccatgccctccagcggccccggggacaccagcagctctgctgcggagcgggaggaggaccgaaaggacggagaggagcaggaggagccgcgtggcaaggaggagcgccaagagcccagcaccacggcacggaaggtggggcggcctgggaggaagcgcaagcaccccccggtggaaagcggtgacacgccaaaggaccctgcggtgatctccaagtccccatccatggcccaggactcaggcgcctcagagctattacccaatggggacttggagaagcggagtgagccccagccagaggaggggagccctgctggggggcagaagggcggggccccagcagagggagagggtgcagctgagaccctgcctgaagcctcaagagcagtggaaaatggctgctgcacccccaaggagggccgaggagcccctgcagaagcgggcaaagaacagaaggagaccaacatcgaatccatgaaaatggagggctcccggggccggctgcggggtggcttgggctgggagtccagcctccgtcagcggcccatgccgaggctcaccttccaggcgggggacccctactacatcagcaagcgcaagcgggacgagtggctggcacgctggaaaagggaggctgagaagaaagccaaggtcattgcaggaatgaatgctgtggaagaaaaccaggggcccggggagtctcagaaggtggaggaggccagccctcctgctgtgcagcagcccactgaccccgcatcccccactgtggctaccacgcctgagcccgtggggtccgatgctggggacaagaatgccaccaaagcaggcgatgacgagccagagtacgaggacggccggggctttggcattggggagctggtgtgggggaaactgcggggcttctcctggtggccaggccgcattgtgtcttggtggatgacgggccggagccgagcagctgaaggcacccgctgggtcatgtggttcggagacggcaaattctcagtggtgtgtgttgagaagctgatgccgctgagctcgttttgcagtgcgttccaccaggccacgtacaacaagcagcccatgtaccgcaaagccatctacgaggtcctgcaggtggccagcagccgcgcggggaagctgttcccggtgtgccacgacagcgatgagagtgacactgccaaggccgtggaggtgcagaacaagcccatgattgaatgggccctggggggcttccagccttctggccctaagggcctggagccaccagaagaagagaagaatccctacaaagaagtgtacacggacatgtgggtggaacctgaggcagctgcctacgcaccacctccaccagccaaaaagccccggaagagcacagcggagaagcccaaggtcaaggagattattgatgagcgcacaagagagcggctggtgtacgaggtgcggcagaagtgccggaacattgaggacatctgcatctcctgtgggagcctcaatgttaccctggaacaccccctcttcgttggaggaatgtgccaaaactgcaagaactgctttctggagtgtgcgtaccagtacgacgacgacggctaccagtcctactgcaccatctgctgtgggggccgtgaggtgctcatgtgcggaaacaacaactgctgcaggtgcttttgcgtggagtgtgtggacctcttggtggggccgggggctgcccaggcagccattaaggaagacccctggaactgctacatgtgcgggcacaagggtacctacgggctgctgcggcggcgagaggactggccctcccggctccagatgttcttcgctaataaccacgaccaggaatttgaccctccaaaggtttacccacctgtcccagctgagaagaggaagcccatccgggtgctgtctctctttgatggaatcgctacagggctcctggtgctgaaggacttgggcattcaggtggaccgctacattgcctcggaggtgtgtgaggactccatcacggtgggcatggtgcggcaccaggggaagatcatgtacgtcggggacgtccgcagcgtcacacagaagcatatccaggagtggggcccattcgatctggtgattgggggcagtccctgcaatgacctctccatcgtcaaccctgctcgcaagggcctctacgagggcactggccggctcttctttgagttctaccgcctcctgcatgatgcgcggcccaaggagggagatgatcgccccttcttctggctctttgagaatgtggtggccatgggcgttagtgacaagagggacatctcgcgatttctcgagtccaaccctgtgatgattgatgccaaagaagtgtcagctgcacacagggcccgctacttctggggtaaccttcccggtatgaacaggccgttggcatccactgtgaatgataagctggagctgcaggagtgtctggagcatggcaggatagccaagttcagcaaagtgaggaccattactacgaggtcaaactccataaagcagggcaaagaccagcattttcctgtcttcatgaatgagaaagaggacatcttatggtgcactgaaatggaaagggtatttggtttcccagtccactatactgacgtctccaacatgagccgcttggcgaggcagagactgctgggccggtcatggagcgtgccagtcatccgccacctcttcgctccgctgaaggagtattttgcgtgtgtgtaagggacatgggggcaaactgaggtagcgacacaaagttaaacaaacaaacaaaaaacacaaaacataataaaacaccaagaacatgaggatggagagaagtatcagcacccagaagagaaaaaggaatttaaaacaaaaaccacagaggcggaaataccggagggctttgccttgcgaaaagggttggacatcatctcctgatttttcaatgttattcttcagtcctatttaaaaacaaaaccaagctcccttcccttcctcccccttcccttttttttcggtcagaccttttattttctactcttttcagaggggttttctgtttgtttgggttttgtttcttgctgtgactgaaacaagaaggttattgcagcaaaaatcagtaacaaaaaatagtaacaataccttgcagaggaaaggtgggagagaggaaaaaaggaaattctatagaaatctatatattgggttgtttttttttttgttttttgttttttttttttgggtttttttttttactatatatcttttttttgttgtctctagcctgatcagataggagcacaagcaggggacggaaagagagagacactcaggcggcagcattccctcccagccactgagctgtcgtgccagcaccattcctggtcacgcaaaacagaacccagttagcagcagggagacgagaacaccacacaagacatttttctacagtatttcaggtgcctaccacacaggaaaccttgaagaaaatcagtttctagaagccgctgttacctcttgtttacagtttatatatatatgatagatatgagatatatatataaaaggtactgttaactactgtacaacccgacttcataatggtgctttcaaacagcgagatgagtaaaaacatcagcttccacgttgccttctgcgcaaagggtttcaccaaggatggagaaagggagacagcttgcagatggcgcgttctcacggtgggctcttccccttggtttgtaacgaagtgaaggaggagaacttgggagccaggttctccctgccaaaaagggggctagatgaggtggtcgggcccgtggacagctgagagtgggattcatccagactcatgcaataaccctttgattgttttctaaaaggagactccctcggcaagatggcagagggtacggagtcttcaggcccagtttctcactttagccaattcgagggctccttgtggtgggatcagaactaatccagagtgtgggaaagtgacagtcaaaaccccacctggagcaaataaaaaaacatacaaaacgta

SEQ ID NO: 251670 - DNA, 2300 bp, Artificial Sequence
  derived and/or modified sequence
ccgcccccagccccatcgcccccttcccctcccccaagacgggcagctacttccagagcttcagggccgcggctcacacctgagcgcgactgcagaggggctgcacctggccttatgggctgagaagaaagccaaggtcattgcaggaatgaatgctgtggaagaaaaccaggggcccggggagtctcagaaggtggaggaggccagccctcctgctgtgcagcagcccactgaccccgcatcccccactgtggctaccacgcctgagcccgtggggtccgatgctggggacaagaatgccaccaaagcaggcgatgacgagccagagtacgaggacggccggggctttggcattggggagctggtgtgggggaaactgcggggcttctcctggtggccaggccgcattgtgtcttggtggatgacgggccggagccgagcagctgaaggcacccgctgggtcatgtggttcggagacggcaaattctcagtggtgtgtgttgagaagctgatgccgctgagctcgttttgcagtgcgttccaccaggccacgtacaacaagcagcccatgtaccgcaaagccatctacgaggtcctgcaggtggccagcagccgcgcggggaagctgttcccggtgtgccacgacagcgatgagagtgacactgccaaggccgtggaggtgcagaacaagcccatgattgaatgggccctggggggcttccagccttctggccctaagggcctggagccaccagaagaagagaagaatccctacaaagaagtgtacacggacatgtgggtggaacctgaggcagctgcctacgcaccacctccaccagccaaaaagccccggaagagcacagcggagaagcccaaggtcaaggagattattgatgagcgcacaagagagcggctggtgtacgaggtgcggcagaagtgccggaacattgaggacatctgcatctcctgtgggagcctcaatgttaccctggaacaccccctcttcgttggaggaatgtgccaaaactgcaagaactgctttctggagtgtgcgtaccagtacgacgacgacggctaccagtcctactgcaccatctgctgtgggggccgtgaggtgctcatgtgcggaaacaacaactgctgcaggtgcttttgcgtggagtgtgtggacctcttggtggggccgggggctgcccaggcagccattaaggaagacccctggaactgctacatgtgcgggcacaagggtacctacgggctgctgcggcggcgagaggactggccctcccggctccagatgttcttcgctaataaccacgaccaggaatttgaccctccaaaggtttacccacctgtcccagctgagaagaggaagcccatccgggtgctgtctctctttgatggaatcgctacagggctcctggtgctgaaggacttgggcattcaggtggaccgctacattgcctcggaggtgtgtgaggactccatcacggtgggcatggtgcggcaccaggggaagatcatgtacgtcggggacgtccgcagcgtcacacagaagcatatccaggagtggggcccattcgatctggtgattgggggcagtccctgcaatgacctctccatcgtcaaccctgctcgcaagggcctctacgagggcactggccggctcttctttgagttctaccgcctcctgcatgatgcgcggcccaaggagggagatgatcgccccttcttctggctctttgagaatgtggtggccatgggcgttagtgacaagagggacatctcgcgatttctcgagtccaaccctgtgatgattgatgccaaagaagtgtcagctgcacacagggcccgctacttctggggtaaccttcccggtatgaacaggccgttggcatccactgtgaatgataagctggagctgcaggagtgtctggagcatggcaggatagccaagttcagcaaagtgaggaccattactacgaggtcaaactccataaagcagggcaaagaccagcattttcctgtcttcatgaatgagaaagaggacatcttatggtgcactgaaatggaaagggtatttggtttcccagtccactatactgacgtctccaacatgagccgcttggcgaggcagagactgctgggccggtcatggagcgtgccagtcatccgccacctcttcgctccgctgaaggagtattttgcgtgtgtgtaagggacatgggggcaaactgaggtagcgacacaaagttaaacaaacaaacaaaaaacacaaaacataataaaacaccaagaac

SEQ ID NO: 251671 - protein, 166 aa, Artificial Sequence
  derived and/or modified sequence
MPAMPSSGPGDTSSSAAEREEDRKDGEEQEEPRGKEERQEPSTTARKVGRPGRKRKHPPVESGDTPKDPAVISKSPSMAQDSGASELLPNGDLEKRSEPQPEEGSPAGGQKGGAPAEGEGAAETLPEASRAVENGCCTPKEGRGAPAEAGESSAPGAASSGPTSIP

SEQ ID NO: 251672 - DNA, 501 bp, Artificial Sequence
  derived and/or modified sequence
atgccagccatgccatcttcaggcccaggcgatacaagctccagcgctgctgagagagaggaagatcggaaggacggtgaagagcaggaagaacctcgtgggaaagaggaaaggcaagagcctagtactacagcaagaaaagtgggcaggccagggcgaaaacggaaacatccccccgtcgagtccggtgacacgcctaaagacccagctgtcattagcaaaagcccttctatggcacaggactctggcgcaagcgaactgttaccaaatggagatttggagaagcgatctgagccccagccagaggagggcagccccgcaggcgggcagaaaggcggcgctccggccgagggcgagggggccgctgaaaccctcccagaggccagccgggccgtggagaacggctgttgcactccgaaggaggggcgtggcgcacctgctgaggccggggaatcctcagctcctggcgctgcctccagcggacccactagtatcccctag

SEQ ID NO: 251673 - DNA, 501 bp, Artificial Sequence
  derived and/or modified sequence
atgcctgccatgcccagcagcggccctggggacaccagcagcagcgctgctgagcgggaggaggacaggaaggatggagaggagcaggaggagccccggggcaaggaggagcggcaggagcccagcaccacagccaggaaggtgggccggcccggcaggaagaggaagcacccccctgtggagagcggggacacccccaaggaccctgctgtgatcagcaagagccccagcatggcccaggacagcggggccagcgagctgctgcccaacggggacctggagaagaggtctgagccccagcctgaggagggcagccctgctgggggccagaagggcggggccccagctgagggggagggcgctgctgagaccctgcctgaggccagcagagctgtggagaatggctgctgcacccccaaggagggccgcggggccccagctgaggccggggagagcagcgcccctggagctgccagcagcggccccaccagcatcccctag

SEQ ID NO: 251674 - DNA, 501 bp, Artificial Sequence
  derived and/or modified sequence
atgcccgccatgcccagcagcggccccggcgacaccagcagcagcgccgcggaaagagaagaagatagaaaggatggagaggagcaagaggaaccaagaggcaaagaggagaggcaagaaccctcgactaccgccaggaaggttggaagacccggtcgtaaacgaaaacaccctcccgtggaaagcggcgatacacctaaggacccagccgtgatttcaaagtcacccagtatggcgcaagattcaggagcaagcgaactgttaccaaatggggatctcgaaaaacgatccgagcctcagcctgaggaaggaagtcccgcgggagggcaaaaagggggcgctcctgctgagggggaaggcgccgctgagactttgcctgaggctagcagggcagtcgaaaacggctgttgcacccccaaagaagggagaggggcgcccgccgaggctggggagagttcggccccgggcgcagcgagttctgggccgacaagcatcccttag

SEQ ID NO: 251675 - DNA, 501 bp, Artificial Sequence
  derived and/or modified sequence
atgcctgccatgccttctagtggaccaggggatacaagctcttcggcagccgagcgcgaggaagacagaaaagacggcgaagagcaagaagaaccaagaggcaaggaggaacggcaggagccatccaccaccgccagaaaggttggtagaccaggccgtaaacgtaagcacccacccgtggaatccggcgatacacccaaagatcccgctgtgattagtaagtccccctccatggcacaggactccggagcgagcgagctgttgcccaatggcgacttggaaaagaggtctgagccccaacctgaagaaggatcccctgctggcggacagaagggaggagccccagccgagggggagggagcagccgaaactctgccggaggcctccagggcggtggagaatgggtgctgcacacctaaggagggcaggggcgctcccgctgaagcaggggagtcaagcgctccaggcgcagcttcatcaggccctacatccatcccatag

SEQ ID NO: 251676 - DNA, 501 bp, Artificial Sequence
  derived and/or modified sequence
atgcccgccatgcccagcagcggccccggcgacaccagcagcagcgccgccgagagagaggaggacagaaaggacggcgaggagcaggaggagcccagaggcaaggaggagagacaggagcccagcaccaccgccagaaaggtgggcagacccggcagaaagagaaagcacccccccgtggagagcggcgacacccccaaggaccccgccgtgatcagcaagagccccagcatggcccaggacagcggcgccagcgagctgctgcccaacggcgacctggagaagagaagcgagccccagcccgaggagggcagccccgccggcggccagaagggcggcgcccccgccgagggcgagggcgccgccgagaccctgcccgaggccagcagagccgtggagaacggctgctgcacccccaaggagggcagaggcgcccccgccgaggccggcgagagcagcgcccccggcgccgccagcagcggccccaccagcatcccctag

SEQ ID NO: 251677 - DNA, 1775 bp, Artificial Sequence
  derived and/or modified sequence
gcagtgggctctggcggaggtcgggagaactgcagggcgaaggccgccgggggctccgcgggctgcggggggaggcacttgacaccggcccggggagaggaggggccgctgtccctgcggccagtgctggatgcggggacccagcgcagaagcagcgccaggtggagccatcgaagcccccacccacaggctgacagaggcaccgttcaccagagggctcaacaccgggatctatgtttaagttttaactctcgcctccaaagaccacgataattccttccccaaagcccagcagccccccagccccgcgcagccccagcctgcctcccggcgcccagatgcccgccatgccctccagcggccccggggacaccagcagctctgctgcggagcgggaggaggaccgaaaggacggagaggagcaggaggagccgcgtggcaaggaggagcgccaagagcccagcaccacggcacggaaggtggggcggcctgggaggaagcgcaagcaccccccggtggaaagcggtgacacgccaaaggaccctgcggtgatctccaagtccccatccatggcccaggactcaggcgcctcagagctattacccaatggggacttggagaagcggagtgagccccagccagaggaggggagccctgctggggggcagaagggcggggccccagcagagggagagggtgcagctgagaccctgcctgaagcctcaagagcagtggaaaatggctgctgcacccccaaggagggccgaggagcccctgcagaagcgggtgagtcctcagcaccaggggcagcctcttctgggcccaccagcataccctgagagtcagggacttggctctccagcaggtcccaggaaggatggtctgggtcgtggctaaaggtctgcttgccaaggctatggcctggaggctactggctggatgcagcctgcgcatatgttttatttggcccatagagtgttttaaacatttaaaaaattagttgccagtatttaaaaatcaaaaaatttcacataaaaatctggagttttggcttctcatgaaaaaaaaaaaagctagatctggcaacagcgggctttcataacgccaacgattgctagactgggataatggcggtccctccatcgccttctgtggctggttgtgggccttagttttctgcagctctacctggcctgcttactctcccacgtgccatgcagttcctgggggttgctgtatttgtagcccctggcctgggcactcaagggcagcagataccctgtttgcctccctgagtgcagaggtcctgagcccaccctagttgggctgactcaactggaaatttggttgtgacagtggcgtggggagagggctgggtgattgtattctgtgtactgcccagcccaggcctcttcatctggggactttttggcctaaccctggaagcctggaaagttgcccacttttctctttcaggttaagccagcaatttcagggccaaccgagctgtaaacatgttagtaatgaggacaactagcatttgtacagggcttcacagtttacaaagcgctttctcatacattatcacatttgatcctcccagggccctgccaggttgttttgcatatgtgcattttaatttcaaaaagtcttccttccaagcgtgtatgatgaaatgagtaaattgattaattggcgtaacttattttgcatggatccaacctaatgttcatgcaggatagagaacatttccagaatacaaatttccaaactta

SEQ ID NO: 251678 - DNA, 363 bp, Artificial Sequence
  derived and/or modified sequence
atgccagattctcctgttgacgtcaagacacagtcacgactgacacctcctaccatgccacctccccctactactcaaggggctccgaggactagctctttcacgcctacgacactgactaatggtacatcacactcacctaccgcgttgaatggggcaccctctcctcccaatggcttctcgaatgggccaagtagtagctcttcttcttctctcgcaaaccagcagctgccccctgcatgcggcgccaggcagctttcaaagcttaagagattcctcaccaccttgcagcaatttggtaacgatatcagtcctgaaataggagaacgagtccgcacacttgtgctggggctggttaactag

SEQ ID NO: 251679 - DNA, 276 bp, Artificial Sequence
  derived and/or modified sequence
atgcctgattcccccgttgacgttaaaacccaaagtcggcttactccacctactatgccccctccacccacaacgcagggagccccacgaactagtagcttcactccgaccactctcaccaatggtacctcccattctccaactgcgctgaacggggccccaagcccgccaaacggattctcaaacgggcccagtagctcgtccagctcctcccttgcaaaccagcaattacctcccgcatgcggcgcgcgccaacttagtaaactaaagcgctag

SEQ ID NO: 251680 - DNA, 516 bp, Artificial Sequence
  derived and/or modified sequence
atgccggacagtccagtggatgtgaagactcagagccggctgactccacccactatgccacccccgcctactacccagggggcccctcgcacatcttcatttacccctactacactgaccaatgggacttctcatagccctaccgcactgaacggggcccccagccctccaaacggtttttcaaacgggccaagctcctctagctcttctagcctcgctaaccagcaacttccaccagcctgtggggccagacagctgtccaagctgaagagatttctgactacccttcaacaattcggcaacgatatctcccctgaaatcggggaaagagtgcgcaccctggttttagggttggtcaactctaccctcactattgaagagttccactcaaaactgcaggaggccacaaactttcccctgagacctttcgtgatcccctttctaaaagcaaatctacctctcctgcagcgtgagctcctccattgcgcccgcctcgccaaacagaaccccgcatag

SEQ ID NO: 251681 - DNA, 270 bp, Artificial Sequence
  derived and/or modified sequence
atgcctgactcccccgtggacgttaaaactcaatcgcggttgacccctcctacgatgccaccgccacccactacccaaggtgctccccggacttcatcctttactccgacgacactgaccaatggcacctcgcattcccccacagctcttaatggggcccccagtcctcctaacggctttagcaatggcccatcgtctagctcatcttcatccttggcgaatcagcaactcccaccggcttgcggggctaggcagctgagcaaactgtag

SEQ ID NO: 251682 - DNA, 363 bp, Artificial Sequence
  derived and/or modified sequence
atgccagacagccctgtggatgtgaagacccagagccggctgaccccacccaccatgcctcctccacccaccacccagggcgcccccaggaccagcagcttcacccccaccaccctgaccaacggcaccagccacagccccacagccctgaatggagcccccagcccccccaacggcttcagcaatggccccagcagcagcagcagcagcagcctggccaaccagcagctgcccccagcctgtggggcccggcagctgagcaagctgaagcgcttcctgaccaccctgcagcagtttggaaatgacatcagccctgagattggagagcgggtgaggaccctggtgctgggcctggtgaactag

SEQ ID NO: 251683 - DNA, 276 bp, Artificial Sequence
  derived and/or modified sequence
atgccagacagccctgtggatgtgaagacccagagccggctgaccccacccaccatgcctcctccacccaccacccagggcgcccccaggaccagcagcttcacccccaccaccctgaccaacggcaccagccacagccccacagccctgaatggagcccccagcccccccaacggcttcagcaatggccccagcagcagcagcagcagcagcctggccaaccagcagctgcccccagcctgtggggcccggcagctgagcaagctgaagaggtag

SEQ ID NO: 251684 - DNA, 516 bp, Artificial Sequence
  derived and/or modified sequence
atgccagacagccctgtggatgtgaagacccagagccggctgaccccacccaccatgcctcctccacccaccacccagggcgcccccaggaccagcagcttcacccccaccaccctgaccaacggcaccagccacagccccacagccctgaatggagcccccagcccccccaacggcttcagcaatggccccagcagcagcagcagcagcagcctggccaaccagcagctgcccccagcctgtggggcccggcagctgagcaagctgaagcgcttcctgaccaccctgcagcagtttggaaatgacatcagccctgagattggagagcgggtgaggaccctggtgctgggcctggtgaacagcaccctgaccatcgaggagttccacagcaagctgcaggaggccaccaacttccccctgcggccctttgtgatccccttcctgaaggccaacctgcccctgctgcagcgggagctgctgcactgtgcccggctggccaagcagaacccagcctag

SEQ ID NO: 251685 - DNA, 270 bp, Artificial Sequence
  derived and/or modified sequence
atgccagacagccctgtggatgtgaagacccagagccggctgaccccacccaccatgcctcctccacccaccacccagggcgcccccaggaccagcagcttcacccccaccaccctgaccaacggcaccagccacagccccacagccctgaatggagcccccagcccccccaacggcttcagcaatggccccagcagcagcagcagcagcagcctggccaaccagcagctgcccccagcctgtggggcccggcagctgagcaagctgtag

SEQ ID NO: 251686 - DNA, 363 bp, Artificial Sequence
  derived and/or modified sequence
atgcccgacagccccgtggacgtgaagacccagagccggctgaccccacctaccatgccaccacctccaacgactcaaggcgccccgaggacaagctcgttcacacccactaccctgactaatggtacaagccattcccctacggcactgaacggcgcaccaagtccccctaacggcttctcaaacggtcctagcagttccagctcttcctccctggccaatcaacagctgcctcctgcatgcggagcgaggcagctcagcaaacttaagaggttcctgacaaccctccaacaattcggaaatgacattagccccgaaattggtgaacgcgttcgcactctggtcttggggcttgtcaattag

SEQ ID NO: 251687 - DNA, 276 bp, Artificial Sequence
  derived and/or modified sequence
atgcccgacagccccgtggacgtgaagacccagagccggctgacccccccaactatgccaccaccccctacgactcagggagcgccccggacgtccagctttacaccaaccaccctcaccaacggaactagccactcaccaaccgccctgaacggtgccccttccccaccgaatgggttttccaatgggccatcttcctcaagctcctctagtctcgcaaaccaacagcttcccccggcttgcggggcccgccaactcagtaaactgaagcgatag

SEQ ID NO: 251688 - DNA, 516 bp, Artificial Sequence
  derived and/or modified sequence
atgcccgacagccccgtggacgtgaagacccagagccggctgaccccccccaccatgccaccgcctcccacgacccagggcgccccccgtaccagctccttcacacccaccaccctgaccaatggcacatctcactcacccacagccctgaatggggccccctctcccccgaacgggttcagcaatggacctagttcctcatcctcaagtagtcttgcaaaccagcagcttccacctgcatgcggggcccgccagctgtcaaagctcaaacgattccttaccactttgcaacaattcgggaatgacatctctcccgaaatcggggaaagagtgagaactctggtcctaggactcgtgaacagtacgctgacaatcgaggaattccactcgaagctccaagaggctaccaattttcctctccgacctttcgtgatcccatttctgaaagcaaaccttcctctgctgcaacgggaattgctacactgtgctagactggcaaaacagaatccagcctag

SEQ ID NO: 251689 - DNA, 270 bp, Artificial Sequence
  derived and/or modified sequence
atgcccgacagccccgtggacgtgaagacccagagccggctgacccctcctacaatgcctccgcctcccaccacacagggtgcaccacgcacctcttccttcacacccaccacattgacaaacggaactagccacagccctaccgccctcaacggcgcacctagtccaccaaacggtttttcaaacggcccctcttctagtagctcgtctagcctggcaaatcagcagctcccgcctgcctgcggagcaagacagctgagcaaactgtag

SEQ ID NO: 251690 - DNA, 363 bp, Artificial Sequence
  derived and/or modified sequence
atgccagatagccctgtggatgtgaaaacacagtcccgactgactccgcctaccatgcccccacccccaacaacccaaggggcaccacggaccagctcttttacccccactaccctgacaaacggtactagccattcaccgacggctctgaacggggcaccaagtccacccaacgggttctccaatggccctagcagttccagctcctcctcactggcaaaccagcagctccctcccgcatgtggagcacggcagctcagcaagctgaagagattcctcaccactttgcagcagtttggcaacgacatctctcccgagattggggaacgggtgaggaccttggtgttgggtcttgtgaattag

SEQ ID NO: 251691 - DNA, 276 bp, Artificial Sequence
  derived and/or modified sequence
atgcccgactccccggtggacgtgaagacacagtccaggctaacgccgcctactatgccaccacccccaaccacccaaggcgcacctaggacttcaagcttcacacccaccacgcttacaaacggtacctctcattcaccgactgctctgaacggtgcacccagccctccaaacgggttctccaacggaccgtcaagttccagctcaagttcgctcgccaatcaacagctccctccagcctgtggagcacgacagttaagtaaattgaagaggtag

SEQ ID NO: 251692 - DNA, 516 bp, Artificial Sequence
  derived and/or modified sequence
atgcccgactcccccgtggatgtgaaaacccaatcacgcctaacaccccctaccatgccacctcctcccacaactcagggagctccccgtaccagcagctttactcctactactctcactaatggcacgtcccattctccaacagccctaaacggagctccttcacctcctaatgggttttccaatggcccaagcagtagctctagctcaagcctagccaatcagcaactaccgccagcctgtggagctagacagctgtccaagcttaagaggttcttgaccacattgcagcagtttggcaatgacatttcccctgaaataggggagagagtgcgcaccctagtcctggggctggtgaatagtacccttactatcgaggagttccatagtaagctgcaggaggctacgaacttccccttaagacctttcgtgataccatttctgaaggctaacctccctctgcttcagagggagctgctgcattgcgctagactggcaaagcaaaaccccgcatag

SEQ ID NO: 251693 - DNA, 270 bp, Artificial Sequence
  derived and/or modified sequence
atgcccgatagcccagtggacgttaagacccaatcccgcctcaccccacccaccatgcccccaccacctacgacacagggcgctcctcgcacctcttccttcacaccaaccaccctgaccaatggaaccagtcactcccctactgccctgaatggggcacctagccctcccaacggattctcaaacgggcctagttcttcatcaagtagttcactggccaaccagcagctgcccccagcatgtggcgcaaggcagctgtccaagctgtag

SEQ ID NO: 251694 - DNA, 363 bp, Artificial Sequence
  derived and/or modified sequence
atgcccgacagccccgtggacgtgaagacccagagcagactgaccccccccaccatgccccccccccccaccacccagggcgcccccagaaccagcagcttcacccccaccaccctgaccaacggcaccagccacagccccaccgccctgaacggcgcccccagcccccccaacggcttcagcaacggccccagcagcagcagcagcagcagcctggccaaccagcagctgccccccgcctgcggcgccagacagctgagcaagctgaagagattcctgaccaccctgcagcagttcggcaacgacatcagccccgagatcggcgagagagtgagaaccctggtgctgggcctggtgaactag

SEQ ID NO: 251695 - DNA, 276 bp, Artificial Sequence
  derived and/or modified sequence
atgcccgacagccccgtggacgtgaagacccagagcagactgaccccccccaccatgccccccccccccaccacccagggcgcccccagaaccagcagcttcacccccaccaccctgaccaacggcaccagccacagccccaccgccctgaacggcgcccccagcccccccaacggcttcagcaacggccccagcagcagcagcagcagcagcctggccaaccagcagctgccccccgcctgcggcgccagacagctgagcaagctgaagagatag

SEQ ID NO: 251696 - DNA, 516 bp, Artificial Sequence
  derived and/or modified sequence
atgcccgacagccccgtggacgtgaagacccagagcagactgaccccccccaccatgccccccccccccaccacccagggcgcccccagaaccagcagcttcacccccaccaccctgaccaacggcaccagccacagccccaccgccctgaacggcgcccccagcccccccaacggcttcagcaacggccccagcagcagcagcagcagcagcctggccaaccagcagctgccccccgcctgcggcgccagacagctgagcaagctgaagagattcctgaccaccctgcagcagttcggcaacgacatcagccccgagatcggcgagagagtgagaaccctggtgctgggcctggtgaacagcaccctgaccatcgaggagttccacagcaagctgcaggaggccaccaacttccccctgagacccttcgtgatccccttcctgaaggccaacctgcccctgctgcagagagagctgctgcactgcgccagactggccaagcagaaccccgcctag

SEQ ID NO: 251697 - DNA, 270 bp, Artificial Sequence
  derived and/or modified sequence
atgcccgacagccccgtggacgtgaagacccagagcagactgaccccccccaccatgccccccccccccaccacccagggcgcccccagaaccagcagcttcacccccaccaccctgaccaacggcaccagccacagccccaccgccctgaacggcgcccccagcccccccaacggcttcagcaacggccccagcagcagcagcagcagcagcctggccaaccagcagctgccccccgcctgcggcgccagacagctgagcaagctgtag

SEQ ID NO: 251698 - protein, 251 aa, Artificial Sequence
  derived and/or modified sequence
MELSAIGEQVFAVESIRKKRVRKGKVEYLVKWKGWPPKYSTWEPEEHILDPRLVMAYEEKEERDRASGYRKRGPKPKRLLLQRLYSMDLRSSHKAKGKEKLCFSLTCPLGSGSPEGVVKAGAPELVDKGPLVPTLPFPLRKPRKAHKYLRLSRKKFPPRGPNLESHSHRRELFLQEPPAPDVLQAAGEWEPAAQPPEEEADADLAEGPPPWTPALPSSEVTVTDITANSITVTFREAQAAEGFFRDRSGKF

SEQ ID NO: 251699 - protein, 121 aa, Artificial Sequence
  derived and/or modified sequence
MELSAIGEQVFAVESIRKKRVRKGKVEYLVKWKGWPPKEERDRASGYRKRGPKPKRLLLQRLYSMDLRSSHKAKGKEKLCFSLTCPLGSGSPEGVVKAGAPELVDKGPLVPTLPFPLRKPR

SEQ ID NO: 251700 - DNA, 3964 bp, Artificial Sequence
  derived and/or modified sequence
ccagccccagcatcgcgcgccgcagccgcggccccgcagctccgcccccggcccggcccggccccgggcccgctcgcccgccgccccgcatggagctgtcagccatcggcgagcaggtgttcgccgtggagagcatccggaagaagcgcgtgcggaagggtaaagtcgagtatctggtgaagtggaaaggatggcccccaaagtacagcacgtgggagccagaagagcacatcttggacccccgcctcgtcatggcctacgaggagaaggaggagagagaccgagcatcggggtataggaagagaggtccgaaacccaagcggcttctgctgcagcggctgtacagcatggacctgcggagctcccacaaggccaagggcaaggagaagctctgcttctccctgacgtgcccactcggcagcgggagccctgagggggtggtcaaggcgggggcacctgagctggtggacaagggccccttggtgcccaccctgcccttcccgctccgcaagccccgaaaggcccacaagtacctgcggctctcgcgcaagaagttcccgccccgcgggcccaacctggagagccacagccatcgacgggagctcttcctgcaggagccaccggccccagacgtcctgcaggcggctggcgagtgggagcctgctgcgcagccccctgaagaggaggcagatgccgacctggccgaggggccccctccctggacacctgcgctcccctcaagtgaggtgaccgtgaccgacatcaccgccaactccatcaccgtcaccttccgcgaggcccaggcagctgagggcttcttccgagaccgcagtgggaagttctgaatcaccgtttttactcttcttaaactgttttcttttgggcttggggtgggacttccagagatagggatgggttgggggcggggtaattattttatttaaaaaaataccgagcagcaaaaggggagaagatcccactactctcccaccacctgccctttctctgagggacgtttaccacgaggcctcaggctggggatggagagagttgctctgggagttggggtaccacccccagggcaggatggggacaggatcacctgcccgggacaccaccattatcattctcctctagtgacgcagcagctggttctgggagttaaaggagcattggaaggcccaaaccctctcccttgagtggccaccccagcctggttggctggttttccccttttctcttgtttcaattgggtctttaccttgaactctcctctctggctttgcggtgggctgtggaggctggttttgaccaaaagtgagtggggcgggaggaaggggcaggaggaagggttgaggttacttggggcgagtcccttccccttcagagaggcttctatccttcccagggaggaggcgccgctgagacccttctgctgagagctctgccctcccctcatcacctggcctgtgcagaaacgctcatgcacacctggctgcacaggtgtgcacgcattacccttcgcgtgtacgttcccatgtgccccgtgaaagcatgtgtggctgcagacgtgtccacatgggccttgcgaacctgggttagaaaccctggccaggcgaacgtggggtgattcacagcacaaaagacctcaccaccacacctgcactcaccccaccttgcatgcaccttgctacctgcttgcggctttcagtggagggcaggggtctggcacaggtgcgatggcaccccatgctccaggcatacagatgtggtttctcggctgcaccgggccaggctgcgggtgtgcaggcgtctgctaagttgtgtgatgtatcagcacaggctttgagacgtctggaccctgtccttcctcccgtgaggggttcttgttctttctgactcaggtgacttttcagcccttccaattcccctctttttctgccctcccctccaactcagccaacccaggtgtgggcagtcagggagggagggagtgtcccaccacgttctcagggcagcccttgactcctaagccccttcctccttccattctgcatcccctccccatccaacctaaatgccacagctggggctgagctgtattcctgtggagggacctctgccgtgcctctctgaggtcaggctgtgctgtgtgatgggcaggctttgccccagcccacccctggcaaggtgcacttgttttctggtttgtacaaggtgtcctgggggcccgtggcttccctgccagtgaggagtgacttctccctctcttccagtcctgtaggggagacaaaaccagattggggggcccaaggggagcatggaaaaggccggctcccctgtctttccttggctgtcagagtcagggtaacacacaccaagagtggagtgcggccagcaagtttgagacctgcccgccctcctcgcagctctgctctgtgtcctcaggaagtcacagagtctactgaggcaaggagagggtgattctttccccaaatcccttcttccctggttcccaaaccaaagacagcctgcagccctttctgcatggggtgctctgttgacaggcttcccagatccctgagtctctctttccttcctcctcgatctttagttgtccacggtcaattcagtgcttccattgggggacagtcccctccgggatgacctgattcacctccagcccagggaatggaatctagaggaatacgtggggtgggtctggacaaggagcggcaggaatcaccacccatctccagctgtggagccctgtggaggggaaggggaagcttggggttcagaggggactcttccaggagaggggtgcccagcggaggtaaagatgatagagggttgtggggggtctctagttgaatgttttggcccatgactttggaacatggctggcagcttccagcagaagtcacgctccccatcccccaggggacataggacctttttcctgcttcctggtcactttcaaagaactatttgcgcaatctgtgggtctgtggattcacggggctttctgtgtgggtgctgcagttgcttttgtctgcagcagcaggacacatctttcctcttactcagccctttatggcccatggggaactccgtggctcagggagagctgaactccaggggtgtgacctgggacgggtgggcctgaggtgcccagctcagggcagccaggtggctcatgggctgtagtgagccagctccctgggggaaaaggctgtgggccgttaggaccatcctccaggacaggtgacctctatgaggtcacctacggctgtggccgtgcaggcctccttccagcccagagtggcccagtagagcaaggcagacagtgacctccacccccgcagccctcttaaaaggccagtactcttgggggtggggggagggtttagaaagcatttgcccatctgcctttctttcccccagcccccacccgctttgaatgtagagacccgtgggcacttttccttttgtggtggggggtgcggaggaggtacccccacccctggcacagccgcctggaatgcaggactgtcactgctgttcgggtgatgacctcgttgccaagctcctcctgtccccttgttctgggggcaggcgctgtgcttctgtgaggtggtttagcttttgctttcgaagtggccagctgcggccaccaggtctcagcacaagagcgcttcctttgcacagaatgagcttcgagctttgttcagactaaatgaatgtatctgggaggggtcgggggcacgagttgattccaagcacatgcctttgctgagtgtgtgtgtgctgggagagtcagagtggatgtagagcgcggttttatttttgtactgacattggtaagagactgtatagcatctatttatttagatgatttatctggtaaatgaggcaaaaaaattattaaaaatacattaaagatgatttaaaaaaaagaaaa

SEQ ID NO: 251701 - DNA, 756 bp, Artificial Sequence
  derived and/or modified sequence
atggagttaagcgccataggagaacaggtgtttgccgtcgagtctatcaggaaaaagcgtgtcagaaaaggtaaagtggagtatcttgtcaagtggaagggctggcctccaaagtactcaacatgggagccggaggagcacatattagatccccgcctcgtgatggcctacgaagaaaaagaagaaagggacagggcctccggctacaggaagcgaggacctaaacctaaaagactcctcctccagcgcctgtacagtatggacctgaggagcagtcacaaggctaaggggaaagagaaattatgttttagcctgacgtgcccccttggttccggatccccagagggggtggtcaaagcaggggcacccgagcttgtggataaaggccctctggtccccacactgccgttcccgctgcggaagcctcgaaaggctcataaatatttgagactgtctagaaagaaattccccccacggggccctaatctggagtcccattctcacagaagagaacttttcctgcaggagccacccgcacctgacgttttacaagcagctggtgaatgggagcccgctgctcagccacccgaagaagaggccgatgcagatctcgcagagggccctccgccttggactcctgccctgcctagctccgaagtaactgtaacggacattactgccaactccataacagtaactttccgagaggcccaggcagcagaaggcttcttccgggacaggtcagggaagttctag

SEQ ID NO: 251702 - DNA, 366 bp, Artificial Sequence
  derived and/or modified sequence
atggagctgtcagcaatcggagaacaggtcttcgccgtcgaaagcatacgaaagaaacgggtgaggaagggcaaagtggagtatctggttaagtggaaaggttggccccccaaagaggaacgggacagagcctcgggataccggaagagaggcccaaaacccaaacggctgctcctccagagactttactctatggatctgaggagctctcataaggcaaagggcaaggagaaactctgctttagtctcacatgccctcttggctccggctccccagagggggtggtgaaagcaggtgctccagagctggtggacaagggaccattggtccccaccctgccttttcctcttcgcaagccgcgatag

SEQ ID NO: 251703 - DNA, 756 bp, Artificial Sequence
  derived and/or modified sequence
atggagctgagcgccatcggggagcaggtgtttgctgtggagagcatcaggaagaagagggtgaggaagggcaaggtggagtacctggtgaagtggaagggctggccacccaagtacagcacctgggagcctgaggagcacatcctggacccccggctggtgatggcctatgaggagaaggaggagcgggaccgggccagcggctacaggaagaggggccccaagcccaagaggctgctgctgcagaggctgtacagcatggacctgcggagcagccacaaggccaagggcaaggagaagctgtgcttcagcctgacctgccccctgggcagcggcagccctgagggcgtggtgaaggccggggcccctgagctggtggacaagggccccctggtgcccaccctgcccttccccctgaggaagcccaggaaggcccacaagtacctgcggctgagcaggaagaagtttcctccccggggccccaacctggagagccacagccacagaagagagctgttcctgcaggagcccccagccccagatgtgctgcaggccgccggggagtgggagcctgctgcccagcccccagaggaggaggctgatgctgacctggccgagggccccccaccctggaccccagccctgcccagcagcgaggtgacagtgacagacatcacagccaacagcatcaccgtgaccttccgggaggcccaggccgctgagggcttcttccgggacagaagtggcaagttctag

SEQ ID NO: 251704 - DNA, 366 bp, Artificial Sequence
  derived and/or modified sequence
atggagctgagcgccatcggggagcaggtgtttgctgtggagagcatcaggaagaagagggtgaggaagggcaaggtggagtacctggtgaagtggaagggctggccacccaaggaggagcgggaccgggccagcggctacaggaagaggggccccaagcccaagaggctgctgctgcagaggctgtacagcatggacctgcggagcagccacaaggccaagggcaaggagaagctgtgcttcagcctgacctgccccctgggcagcggcagccctgagggcgtggtgaaggccggggcccctgagctggtggacaagggccccctggtgcccaccctgcccttccccctgaggaagcccaggtag

SEQ ID NO: 251705 - DNA, 756 bp, Artificial Sequence
  derived and/or modified sequence
atggagctgagcgccatcggcgagcaggtgttcgccgtggagagcataagaaagaagcgggttagaaagggcaaggttgaatacctggtaaagtggaagggctggcccccaaagtatagcacctgggagcccgaggaacatatcctggacccacgccttgtaatggcgtacgaagaaaaagaggagcgtgatcgggcgtccggttacaggaagcggggacccaaaccaaagcgacttttgctgcaaaggctgtacagcatggatctgcgctcctctcacaaagctaaagggaaagaaaagctgtgcttctccttgacttgcccactcggatctggctccccagaaggggtcgtgaaggccggcgctccggagcttgtagacaaaggacctctggtacctactctgccatttcccctcagaaaaccaagaaaagctcataagtatttaagattgtccagaaaaaaattcccccccaggggccccaacctagagtcccatagccatcggagggagttattccttcaagagccgccagcccccgacgtcctccaggcagccggcgaatgggagcccgccgcacagcctcctgaagaggaggccgatgccgacctggcagaagggccaccaccatggactcccgcccttccgagcagtgaagtcactgttacggacatcactgccaattcaataacagttacttttagggaagcccaggcagccgagggtttctttagggataggagtggaaagttttag

SEQ ID NO: 251706 - DNA, 366 bp, Artificial Sequence
  derived and/or modified sequence
atggagctgagcgccatcggcgagcaggtgttcgccgtggagagcatccggaagaagagggtcagaaaaggaaaggtggagtacctagttaagtggaagggctggccccctaaggaagagcgagatcgcgcatcgggctaccggaaacgcggtcccaaaccgaaacgactgcttttgcagaggctgtactcaatggatctgcggagctcccacaaagctaagggcaaggagaagctctgtttttccctgacatgcccactgggctccggatcaccagagggcgtcgtcaaggccggggcaccagagcttgtggataaaggcccactcgtgcctacacttcctttcccactgaggaagccgcggtag

SEQ ID NO: 251707 - DNA, 756 bp, Artificial Sequence
  derived and/or modified sequence
atggaacttagcgcaattggcgaacaggtgtttgctgtagagtcaatcagaaaaaagcgggtgagaaagggaaaagtggaatatctcgtgaaatggaagggctggcccccaaaatattctacatgggaacccgaagagcacattctggacccgaggttggtgatggcctatgaagagaaagaggagcgagatcgggcaagcggatacagaaaaagaggacccaaacccaagcgactgctgctgcagcggctgtactcaatggacttacgctcttctcacaaagcaaaaggcaaggaaaaactgtgttttagcctcacctgtccactcggttcaggatcccccgaaggggtggtcaaagcgggagcccctgaactggtggataagggtcccctggtgccaactcttcccttccctctgcgcaagccacgaaaagcccataagtatctcagactctcacggaagaagtttccacccagggggcctaacctcgaatctcacagccataggagagaactctttcttcaggaaccacctgcccctgacgtgctgcaggctgccggagaatgggagcctgcagcccagccccctgaggaggaagcagacgcagatctggccgaaggaccgccaccttggactcccgcactcccgtcctccgaggtcaccgttactgacatcaccgccaactctattacggtcacctttcgggaagctcaggccgctgagggctttttccgagatcgtagcggcaaattctag

SEQ ID NO: 251708 - DNA, 366 bp, Artificial Sequence
  derived and/or modified sequence
atggaattgagtgctattggtgagcaggtgttcgcggtggagagtatcaggaagaagcgtgttaggaagggcaaggttgagtatctggtgaagtggaagggttggcctcctaaggaggagagggatcgggcatcgggctaccgaaagagaggccctaagcctaaaaggctcttactgcaacgattgtatagcatggatctgcgcagcagtcacaaggccaaaggaaaggagaagttgtgctttagcttaacatgccccttgggtagcggctcgccagagggcgtggtgaaggctggcgctccagagctcgtagataaaggccctctggtaccaacattgcctttcccgctgaggaagcccagatag

SEQ ID NO: 251709 - DNA, 4081 bp, Artificial Sequence
  derived and/or modified sequence
ccgaggaaaacgttgcgcaggttcaaaaatggaacgtcggcggcgtgagggagcgcgagggggtgtgcgcgcgtgcgcgtgcgcgtgcgcgcccggacgagggtgacggggaccccgccagccccagcatcgcgcgccgcagccgcggccccgcagctccgcccccggcccggcccggccccgggcccgctcgcccgccgccccgcatggagctgtcagccatcggcgagcaggtgttcgccgtggagagcatccggaagaagcgcgtgcggaagggtaaagtcgagtatctggtgaagtggaaaggatggcccccaaagtacagcacgtgggagccagaagagcacatcttggacccccgcctcgtcatggcctacgaggagaaggaggagagagaccgagcatcggggtataggaagagaggtccgaaacccaagcggcttctgctgcagcggctgtacagcatggacctgcggagctcccacaaggccaagggcaaggagaagctctgcttctccctgacgtgcccactcggcagcgggagccctgagggggtggtcaaggcgggggcacctgagctggtggacaagggccccttggtgcccaccctgcccttcccgctccgcaagccccgaaaggcccacaagtacctgcggctctcgcgcaagaagttcccgccccgcgggcccaacctggagagccacagccatcgacgggagctcttcctgcaggagccaccggccccagacgtcctgcaggcggctggcgagtgggagcctgctgcgcagccccctgaagaggaggcagatgccgacctggccgaggggccccctccctggacacctgcgctcccctcaagtgaggtgaccgtgaccgacatcaccgccaactccatcaccgtcaccttccgcgaggcccaggcagctgagggcttcttccgagaccgcagtgggaagttctgaatcaccgtttttactcttcttaaactgttttcttttgggcttggggtgggacttccagagatagggatgggttgggggcggggtaattattttatttaaaaaaataccgagcagcaaaaggggagaagatcccactactctcccaccacctgccctttctctgagggacgtttaccacgaggcctcaggctggggatggagagagttgctctgggagttggggtaccacccccagggcaggatggggacaggatcacctgcccgggacaccaccattatcattctcctctagtgacgcagcagctggttctgggagttaaaggagcattggaaggcccaaaccctctcccttgagtggccaccccagcctggttggctggttttccccttttctcttgtttcaattgggtctttaccttgaactctcctctctggctttgcggtgggctgtggaggctggttttgaccaaaagtgagtggggcgggaggaaggggcaggaggaagggttgaggttacttggggcgagtcccttccccttcagagaggcttctatccttcccagggaggaggcgccgctgagacccttctgctgagagctctgccctcccctcatcacctggcctgtgcagaaacgctcatgcacacctggctgcacaggtgtgcacgcattacccttcgcgtgtacgttcccatgtgccccgtgaaagcatgtgtggctgcagacgtgtccacatgggccttgcgaacctgggttagaaaccctggccaggcgaacgtggggtgattcacagcacaaaagacctcaccaccacacctgcactcaccccaccttgcatgcaccttgctacctgcttgcggctttcagtggagggcaggggtctggcacaggtgcgatggcaccccatgctccaggcatacagatgtggtttctcggctgcaccgggccaggctgcgggtgtgcaggcgtctgctaagttgtgtgatgtatcagcacaggctttgagacgtctggaccctgtccttcctcccgtgaggggttcttgttctttctgactcaggtgacttttcagcccttccaattcccctctttttctgccctcccctccaactcagccaacccaggtgtgggcagtcagggagggagggagtgtcccaccacgttctcagggcagcccttgactcctaagccccttcctccttccattctgcatcccctccccatccaacctaaatgccacagctggggctgagctgtattcctgtggagggacctctgccgtgcctctctgaggtcaggctgtgctgtgtgatgggcaggctttgccccagcccacccctggcaaggtgcacttgttttctggtttgtacaaggtgtcctgggggcccgtggcttccctgccagtgaggagtgacttctccctctcttccagtcctgtaggggagacaaaaccagattggggggcccaaggggagcatggaaaaggccggctcccctgtctttccttggctgtcagagtcagggtaacacacaccaagagtggagtgcggccagcaagtttgagacctgcccgccctcctcgcagctctgctctgtgtcctcaggaagtcacagagtctactgaggcaaggagagggtgattctttccccaaatcccttcttccctggttcccaaaccaaagacagcctgcagccctttctgcatggggtgctctgttgacaggcttcccagatccctgagtctctctttccttcctcctcgatctttagttgtccacggtcaattcagtgcttccattgggggacagtcccctccgggatgacctgattcacctccagcccagggaatggaatctagaggaatacgtggggtgggtctggacaaggagcggcaggaatcaccacccatctccagctgtggagccctgtggaggggaaggggaagcttggggttcagaggggactcttccaggagaggggtgcccagcggaggtaaagatgatagagggttgtggggggtctctagttgaatgttttggcccatgactttggaacatggctggcagcttccagcagaagtcacgctccccatcccccaggggacataggacctttttcctgcttcctggtcactttcaaagaactatttgcgcaatctgtgggtctgtggattcacggggctttctgtgtgggtgctgcagttgcttttgtctgcagcagcaggacacatctttcctcttactcagccctttatggcccatggggaactccgtggctcagggagagctgaactccaggggtgtgacctgggacgggtgggcctgaggtgcccagctcagggcagccaggtggctcatgggctgtagtgagccagctccctgggggaaaaggctgtgggccgttaggaccatcctccaggacaggtgacctctatgaggtcacctacggctgtggccgtgcaggcctccttccagcccagagtggcccagtagagcaaggcagacagtgacctccacccccgcagccctcttaaaaggccagtactcttgggggtggggggagggtttagaaagcatttgcccatctgcctttctttcccccagcccccacccgctttgaatgtagagacccgtgggcacttttccttttgtggtggggggtgcggaggaggtacccccacccctggcacagccgcctggaatgcaggactgtcactgctgttcgggtgatgacctcgttgccaagctcctcctgtccccttgttctgggggcaggcgctgtgcttctgtgaggtggtttagcttttgctttcgaagtggccagctgcggccaccaggtctcagcacaagagcgcttcctttgcacagaatgagcttcgagctttgttcagactaaatgaatgtatctgggaggggtcgggggcacgagttgattccaagcacatgcctttgctgagtgtgtgtgtgctgggagagtcagagtggatgtagagcgcggttttatttttgtactgacattggtaagagactgtatagcatctatttatttagatgatttatctggtaaatgaggcaaaaaaattattaaaaatacattaaagatgatttaaaaaaaagaaaa

SEQ ID NO: 251710 - DNA, 472 bp, Artificial Sequence
  derived and/or modified sequence
gagggtgacggggaccccgccagccccagcatcgcgcgccgcagccgcggccccgcagctccgcccccggcccggcccggccccgggcccgctcgcccgccgccccgcatggagctgtcagccatcggcgagcaggtgttcgccgtggagagcatccggaagaagcgcgtgcggaagggtaaagtcgagtatctggtgaagtggaaaggatggcccccaaaggaggagagagaccgagcatcggggtataggaagagaggtccgaaacccaagcggcttctgctgcagcggctgtacagcatggacctgcggagctcccacaaggccaagggcaaggagaagctctgcttctccctgacgtgcccactcggcagcgggagccctgagggggtggtcaaggcgggggcacctgagctggtggacaagggccccttggtgcccaccctgcccttcccgctccgcaagccccgaa

SEQ ID NO: 251711 - DNA, 756 bp, Artificial Sequence
  derived and/or modified sequence
atggagctgagcgccatcggcgagcaggtgttcgccgtggagagcatcagaaagaagagagtgagaaagggcaaggtggagtacctggtgaagtggaagggctggccccccaagtacagcacctgggagcccgaggagcacatcctggaccccagactggtgatggcctacgaggagaaggaggagagagacagagccagcggctacagaaagagaggccccaagcccaagagactgctgctgcagagactgtacagcatggacctgagaagcagccacaaggccaagggcaaggagaagctgtgcttcagcctgacctgccccctgggcagcggcagccccgagggcgtggtgaaggccggcgcccccgagctggtggacaagggccccctggtgcccaccctgcccttccccctgagaaagcccagaaaggcccacaagtacctgagactgagcagaaagaagttcccccccagaggccccaacctggagagccacagccacagaagagagctgttcctgcaggagccccccgcccccgacgtgctgcaggccgccggcgagtgggagcccgccgcccagccccccgaggaggaggccgacgccgacctggccgagggcccccccccctggacccccgccctgcccagcagcgaggtgaccgtgaccgacatcaccgccaacagcatcaccgtgaccttcagagaggcccaggccgccgagggcttcttcagagacagaagcggcaagttctag

SEQ ID NO: 251712 - DNA, 366 bp, Artificial Sequence
  derived and/or modified sequence
atggagctgagcgccatcggcgagcaggtgttcgccgtggagagcatcagaaagaagagagtgagaaagggcaaggtggagtacctggtgaagtggaagggctggccccccaaggaggagagagacagagccagcggctacagaaagagaggccccaagcccaagagactgctgctgcagagactgtacagcatggacctgagaagcagccacaaggccaagggcaaggagaagctgtgcttcagcctgacctgccccctgggcagcggcagccccgagggcgtggtgaaggccggcgcccccgagctggtggacaagggccccctggtgcccaccctgcccttccccctgagaaagcccagatag

SEQ ID NO: 251713 - protein, 889 aa, Artificial Sequence
  derived and/or modified sequence
MRALAVLSVTLVMACTEAFFPFISRGKELLWGKPEESRVSSVLEESKRLVDTAMYATMQRNLKKRGILSPAQLLSFSKLPEPTSGVIARAAEIMETSIQAMKRKVNLKTQQSQHPTDALSEDLLSIIANMSGCLPYMLPPKCPNTCLANKYRPITGACNNRDHPRWGASNTALARWLPPVYEDGFSQPRGWNPGFLYNGFPLPPVREVTRHVIQVSNEVVTDDDRYSDLLMAWGQYIDHDIAFTPQSTSKAAFGGGADCQMTCENQNPCFPIQLPEEARPAAGTACLPFYRSSAACGTGDQGALFGNLSTANPRQQMNGLTSFLDASTVYGSSPALERQLRNWTSAEGLLRVHARLRDSGRAYLPFVPPRAPAACAPEPGIPGETRGPCFLAGDGRASEVPSLTALHTLWLREHNRLAAALKALNAHWSADAVYQEARKVVGALHQIITLRDYIPRILGPEAFQQYVGPYEGYDSTANPTVSNVFSTAAFRFGHATIHPLVRRLDASFQEHPDLPGLWLHQAFFSPWTLLRGGGLDPLIRGLLARPAKLQVQDQLMNEELTERLFVLSNSSTLDLASINLQRGRDHGLPGYNEWREFCGLPRLETPADLSTAIASRSVADKILDLYKHPDNIDVWLGGLAENFLPRARTGPLFACLIGKQMKALRDGDWFWWENSHVFTDAQRRELEKHSLSRVICDNTGLTRVPMDAFQVGKFPEDFESCDSITGMNLEAWRETFPQDDKCGFPESVENGDFVHCEESGRRVLVYSCRHGYELQGREQLTCTQEGWDFQPPLCKDSGRLPRVTWISMSLAALLIGGFAGLTSTVICRWTRTGTKSTLPISETGGGTPELRCGKHQAVGTSPQRAAAQDSEQESAGMEGRDTHRLPRAL

SEQ ID NO: 251714 - DNA, 2670 bp, Artificial Sequence
  derived and/or modified sequence
atgagagccctggccgtgctgagcgtgaccctggtgatggcctgcaccgaggccttcttccccttcatcagcagaggcaaggagctgctgtggggcaagcccgaggagagcagagtgagcagcgtgctggaggagagcaagagactggtggacaccgccatgtacgccaccatgcagagaaacctgaagaagagaggcatcctgagccccgcccagctgctgagcttcagcaagctgcccgagcccaccagcggcgtgatcgccagagccgccgagatcatggagaccagcatccaggccatgaagagaaaggtgaacctgaagacccagcagagccagcaccccaccgacgccctgagcgaggacctgctgagcatcatcgccaacatgagcggctgcctgccctacatgctgccccccaagtgccccaacacctgcctggccaacaagtacagacccatcaccggcgcctgcaacaacagagaccaccccagatggggcgccagcaacaccgccctggccagatggctgccccccgtgtacgaggacggcttcagccagcccagaggctggaaccccggcttcctgtacaacggcttccccctgccccccgtgagagaggtgaccagacacgtgatccaggtgagcaacgaggtggtgaccgacgacgacagatacagcgacctgctgatggcctggggccagtacatcgaccacgacatcgccttcaccccccagagcaccagcaaggccgccttcggcggcggcgccgactgccagatgacctgcgagaaccagaacccctgcttccccatccagctgcccgaggaggccagacccgccgccggcaccgcctgcctgcccttctacagaagcagcgccgcctgcggcaccggcgaccagggcgccctgttcggcaacctgagcaccgccaaccccagacagcagatgaacggcctgaccagcttcctggacgccagcaccgtgtacggcagcagccccgccctggagagacagctgagaaactggaccagcgccgagggcctgctgagagtgcacgccagactgagagacagcggcagagcctacctgcccttcgtgccccccagagcccccgccgcctgcgcccccgagcccggcatccccggcgagaccagaggcccctgcttcctggccggcgacggcagagccagcgaggtgcccagcctgaccgccctgcacaccctgtggctgagagagcacaacagactggccgccgccctgaaggccctgaacgcccactggagcgccgacgccgtgtaccaggaggccagaaaggtggtgggcgccctgcaccagatcatcaccctgagagactacatccccagaatcctgggccccgaggccttccagcagtacgtgggcccctacgagggctacgacagcaccgccaaccccaccgtgagcaacgtgttcagcaccgccgccttcagattcggccacgccaccatccaccccctggtgagaagactggacgccagcttccaggagcaccccgacctgcccggcctgtggctgcaccaggccttcttcagcccctggaccctgctgagaggcggcggcctggaccccctgatcagaggcctgctggccagacccgccaagctgcaggtgcaggaccagctgatgaacgaggagctgaccgagagactgttcgtgctgagcaacagcagcaccctggacctggccagcatcaacctgcagagaggcagagaccacggcctgcccggctacaacgagtggagagagttctgcggcctgcccagactggagacccccgccgacctgagcaccgccatcgccagcagaagcgtggccgacaagatcctggacctgtacaagcaccccgacaacatcgacgtgtggctgggcggcctggccgagaacttcctgcccagagccagaaccggccccctgttcgcctgcctgatcggcaagcagatgaaggccctgagagacggcgactggttctggtgggagaacagccacgtgttcaccgacgcccagagaagagagctggagaagcacagcctgagcagagtgatctgcgacaacaccggcctgaccagagtgcccatggacgccttccaggtgggcaagttccccgaggacttcgagagctgcgacagcatcaccggcatgaacctggaggcctggagagagaccttcccccaggacgacaagtgcggcttccccgagagcgtggagaacggcgacttcgtgcactgcgaggagagcggcagaagagtgctggtgtacagctgcagacacggctacgagctgcagggcagagagcagctgacctgcacccaggagggctgggacttccagccccccctgtgcaaggacagcggcagactgcccagagtgacctggatcagcatgagcctggccgccctgctgatcggcggcttcgccggcctgaccagcaccgtgatctgcagatggaccagaaccggcaccaagagcaccctgcccatcagcgagaccggcggcggcacccccgagctgagatgcggcaagcaccaggccgtgggcaccagcccccagagagccgccgcccaggacagcgagcaggagagcgccggcatggagggcagagacacccacagactgcccagagccctgtag

SEQ ID NO: 251715 - DNA, 2670 bp, Artificial Sequence
  derived and/or modified sequence
atgcgggcacttgccgttttgagcgttacgttggtcatggcctgtactgaagcttttttccctttcatctccaggggaaaagagcttctgtggggaaaacctgaggagagcagagtctcgtccgttttggaggagagcaaaagacttgtagataccgccatgtacgccaccatgcagcgcaacctcaagaagcggggtatcctcagtccagcccagttactcagctttagcaagctccccgagccgacgagcggcgtaattgcaagagccgccgagataatggaaacctccatccaggctatgaagagaaaagtgaacctaaaaacccaacagtctcaacatccaaccgacgccctgtccgaggacctcttgtccataattgccaatatgagcggttgtcttccttatatgttaccccctaagtgccctaatacatgcctggccaataaatatcggcccatcacaggcgcgtgcaacaatcgcgatcatccacggtggggggccagcaacactgcattagcccgatggctgccaccagtgtatgaggacggtttttcacagccacgggggtggaacccagggttcctgtacaatggattcccactgccccccgtgagggaagtgaccaggcatgtgatccaagtttcaaacgaagtcgtgaccgatgacgacagatactccgacttgttgatggcttggggacagtatatagaccacgacattgcttttacgccacaaagcacgagcaaggccgccttcgggggaggcgcggattgccagatgacatgcgaaaaccagaatccatgcttcccgattcagttaccagaggaggcacgccccgctgcaggtaccgcttgcttgcctttttatcgcagctccgccgcttgtgggactggagaccagggagcattgttcggcaacctcagtaccgctaatccacggcagcagatgaatggactaaccagcttcctcgatgcctcaaccgtttatgggagcagtcccgctctggaaaggcaactccggaactggacttcggccgaaggcctgctacgcgtacacgccagactccgggactcaggccgcgcttacctaccattcgtgccccctcgagcccctgcagcttgtgcccctgaacccggcatccccggagagacaagaggtccttgtttcctggccggggatggcagggcttcagaggtgccatccctgaccgccctccatactctctggctgagggagcataatagactggccgcagccctcaaggcacttaacgctcattggagcgcggacgccgtgtatcaggaagccaggaaagtggtaggtgccctccatcagattatcaccctccgggattatataccacggatccttggtcccgaagcgtttcagcagtatgtgggcccgtacgagggctacgactccacagccaatcccacagtcagcaacgtctttagtactgctgcctttaggtttggacatgcaactatccatccacttgtgaggagactggatgcctcatttcaggaacatcccgacttgccggggctgtggctgcatcaagccttcttctcaccatggaccctgctgcgcggcggaggccttgacccactgataaggggccttttagccagacccgcgaaattacaggtgcaagatcaactaatgaacgaagagctgaccgagcgactgtttgtcctttcaaacagctcaacccttgacctggccagcatcaacctgcagcgggggagggatcatggcctgccgggctacaatgagtggagagaattttgtggcctgccccgcctggaaacaccggctgacctttcaaccgccatcgcatcccgcagcgtagctgacaagatcctggatctttacaagcacccagacaacatcgatgtctggctcggagggctagctgagaattttctgccccgggcaaggaccggacctctgtttgcatgcctgatcggcaagcaaatgaaggccctgagagatggggattggttttggtgggagaattcacatgtttttactgacgcccagaggcgggagctcgagaaacattcactgagtcgagttatttgcgataacactggtctgacacgcgtgcccatggacgccttccaggtcgggaaatttcctgaggacttcgagtcctgtgacagtattacaggaatgaacttggaggcttggagggagacattccctcaggacgataagtgcgggttcccagagtccgtggagaatggggacttcgtgcactgcgaggaaagtgggcgtcgtgtactggtgtattcatgcaggcatgggtacgaactccagggacgggagcagctgacatgcacacaggaggggtgggatttccagcctcctctgtgcaaagattctggaagactgcctagggtgacatggatttcaatgtcactcgctgcattgctgataggggggtttgcaggtctaacatctacggtgatatgcagatggacaaggactgggaccaaaagcacattgcccatcagcgagaccggaggtggcacgccagagcttcggtgtgggaagcatcaggcggtcggcacttcccctcagagagcggctgcacaggattcagaacaggaatcagctggcatggaggggcgggacacgcacaggctgccacgcgccttgtag

SEQ ID NO: 251716 - DNA, 2670 bp, Artificial Sequence
  derived and/or modified sequence
atgagggccctggccgtgctgtctgtgaccctggtgatggcctgcacagaggccttcttccccttcatcagccggggcaaggagctgctgtggggcaagccagaggagagccgggtgtcctctgtgctggaggagagcaagaggctggtggacacagccatgtatgccaccatgcagaggaacctgaagaagaggggcatcctgagccctgcccagctgctgtccttcagcaagctgcctgagcccaccagcggcgtgattgcccgggctgctgagatcatggagaccagcatccaggccatgaagaggaaggtgaacctgaagacccagcagagccagcaccccacagatgccctgtctgaggacctgctgagcatcatcgccaacatgagcggctgcctgccctacatgctgccccccaagtgccccaacacctgcctggccaacaagtaccggcccatcactggagcctgcaacaacagagaccacccccgctggggcgccagcaacacagccctggcccgctggctgccccctgtgtatgaagatggcttcagccagccccggggctggaaccctggcttcctgtacaacggcttccccctgccccctgtgcgggaggtgaccaggcatgtgatccaggtgtccaatgaggtggtgacagatgatgaccgctacagcgacctgctgatggcctggggccagtacatcgaccatgacatcgccttcaccccccagagcaccagcaaggccgcctttggaggcggcgctgactgccagatgacctgtgagaaccagaacccctgcttccccatccagctgcctgaggaggcccggcctgctgctggaacagcctgcctgcccttctaccgcagcagcgctgcctgtggcaccggggaccagggcgccctgtttggaaacctgagcacagccaacccccggcagcagatgaatggcctgaccagcttcctggatgccagcacagtgtatggcagcagccctgccctggagcggcagctgaggaactggaccagcgctgagggcctgctgcgggtgcacgcccggctgcgggacagcggccgggcctacctgccctttgtgcccccccgggccccagctgcctgtgcccctgagcccggcatccctggagagacccggggcccctgcttcctggccggagatggccgggccagcgaggtgcccagcctgacagccctgcacaccctgtggctgcgggagcacaaccggctggccgccgccctgaaggccctgaatgcccactggagcgcagatgctgtgtaccaggaggccaggaaggtggtgggcgccctgcaccagatcatcaccctgcgggactacatcccccgcatcctgggccctgaggccttccagcagtatgtgggcccctatgagggctatgacagcacagccaaccccaccgtgtccaatgtgttcagcacagctgccttccgcttcggccacgccaccatccaccccctggtgcggcggctggatgccagcttccaggagcacccagacctgcccggcctgtggctgcaccaggccttcttcagcccctggaccctgctgcggggcggcggcctggaccccctcatccggggcctgctggcccggcctgccaagctgcaggtgcaggaccagctgatgaatgaggagctgacagagcggctgtttgtgctgagcaacagcagcaccctggacctggccagcatcaacctgcagaggggccgggaccacggcctgcccggctacaatgagtggagggagttctgtggcctgccccggctggagaccccagctgacctgagcacagccatcgccagccgctctgtggccgacaagatcctggacctgtacaagcacccagacaacattgatgtgtggctgggcggcctggccgagaacttcctgccccgggccaggacaggccccctgtttgcctgcctgattggcaagcagatgaaggccctgagagatggagactggttctggtgggagaacagccacgtgttcacagatgcccagaggcgggagctggagaagcacagcctgagcagggtcatctgtgacaacacaggcctgaccagggtgcccatggatgccttccaggtgggcaagtttcctgaggactttgagagctgtgacagcatcaccggcatgaacctggaggcctggagggagaccttcccccaggatgacaagtgtggcttccctgagagcgtggagaatggagactttgtgcactgtgaggagagcggcagaagagtgctggtgtacagctgccgccacggctatgagctgcagggccgggagcagctgacctgcacccaggagggctgggacttccagccccccctgtgcaaggacagcggccgcctgccccgggtgacctggatctccatgagcctggccgccctgctgattggaggctttgctggcctgaccagcaccgtcatctgccgctggaccaggacaggcaccaagagcaccctgcccatcagcgagactggaggcggcaccccagagctgcgctgtgggaagcaccaggccgtgggcaccagcccccagagagctgctgcccaggacagcgagcaggagagcgctggcatggagggccgggacacccaccggctgccccgggccctgtag

SEQ ID NO: 251717 - DNA, 2670 bp, Artificial Sequence
  derived and/or modified sequence
atgcgggccctggccgtgctgagcgtgaccctggtgatggcctgcacagaagctttttttccttttatctctcgagggaaagagctgctatgggggaagcctgaagagtctagagttagtagcgtgttggaggagtctaagcggctcgtggataccgcaatgtatgccaccatgcagagaaacctgaagaagagaggaattctaagccctgcacaactgttgtctttctcgaaactccccgagcctacaagcggcgtgatcgctcgcgcagctgaaattatggagactagtattcaggcaatgaagcgcaaggtgaatctcaaaacccagcagtcgcagcaccctacagatgccctgtcagaggatctgctttccatcattgcgaacatgagcggttgtcttccatacatgctccctccaaagtgccccaatacatgtctcgcgaacaagtatcgcccaataactggcgcatgcaacaatagagaccaccccagatggggcgcatccaataccgctctcgctagatggctgcctccagtatacgaggacggtttttcacagcctcgaggatggaacccaggcttcctgtacaacggattccctctcccgcctgtaagagaagtaacgcgacacgtgattcaggttagtaacgaagtggttaccgatgacgaccggtactctgatctactgatggcttgggggcagtatatagatcatgatatcgcatttacgccccagtctacctccaaggccgctttcgggggaggagctgattgtcagatgacatgcgaaaaccagaatccctgctttccgatccagttacctgaggaagctaggccagccgccggcacagcctgtttgccgttttataggtcctccgctgcatgtggaactggcgatcagggggctctgttcggtaacctgtccacggccaatcctagacagcagatgaacgggctaactagcttcctggacgcatcaactgtttacgggagcagtcctgcactcgagcgccagctgcgcaattggaccagcgctgaaggtctgcttagggtgcacgcaagactaagggattctgggcgggcctacctgccctttgtcccgcccagggcgcccgcagcatgcgccccagagcctggaatcccaggggaaacacgggggccttgcttccttgctggtgacggccgggctagcgaagtcccgtcactcaccgccctgcacactctttggttacgggaacacaacaggctggctgcagcactcaaggcattgaatgctcactggtctgccgatgccgtttaccaggaggcacgtaaggtggtcggcgccctacaccagatcataacgctcagagactatattccacggatattaggacctgaagcctttcagcagtacgtgggcccatatgaaggatacgatagcacagccaacccgaccgtgtcaaatgtgttttctacagcagcgtttcggtttgggcacgccacgatccatcctttagtgaggcggcttgacgcgagcttccaggagcaccctgatcttccggggctttggcttcaccaggcctttttttccccatggaccttgttgcgcgggggcgggttagatccacttataaggggattgctggctcgccccgcaaagctgcaggtacaggaccagctgatgaacgaggaacttaccgagagactgtttgtcctgtctaactcctccactctggatcttgcaagtatcaacctacagcgcgggcgggaccacggactcccaggctacaacgagtggcgggagttctgcggacttccacgcctggaaacaccggccgatctgtctaccgctatagcctcacggagtgtggcagataaaatcctggacctttacaaacaccctgacaatatcgatgtgtggcttgggggtctggcggagaatttcctgcctcgggcccgaactgggcctctctttgcctgcctcattggcaaacagatgaaagctctcagggatggagactggttctggtgggagaacagccacgtttttacggacgcacagagaagagaattagagaagcactctctgtccagagtgatttgtgataacactggacttactcgtgtccctatggatgcatttcaggtcggcaaattccctgaggacttcgaaagctgtgatagcattactggtatgaaccttgaagcgtggcgggagaccttccctcaggacgataagtgcgggttccctgagagcgtggaaaacggggatttcgtgcactgtgaagaatctggccggagagtgctggtgtattcctgccggcacggatatgagctgcagggcagggaacaactcacctgtactcaggagggctgggacttccagcctcccctgtgcaaggactccggaaggttgccccgggtaacctggatctcaatgtccctagccgcgctactgattggtggatttgcaggactcacaagtaccgtgatttgccgatggaccagaactggtaccaagagtacactgcccatcagcgaaaccggcggagggactccagagctgaggtgtggaaagcatcaggctgttgggacctcaccccagcgcgcggctgctcaggattcggagcaggaatcagctggaatggaaggtcgagacacacacaggctgcccagagcgctgtag

SEQ ID NO: 251718 - DNA, 2670 bp, Artificial Sequence
  derived and/or modified sequence
atgcgggcactcgcggttttgtctgtgacactcgtgatggcgtgtacggaggccttcttccctttcataagtaggggaaaagaactgttgtggggcaagccagaggagtcccgggtctcatcagtgctggaggaatccaagagacttgttgacacagcaatgtacgctaccatgcaaagaaatctgaagaagaggggaatcttgtctcctgcccaacttttgtcttttagtaaactccccgaaccaacatctggagtgatagccagggctgcggagataatggagaccagtatccaggccatgaaacggaaagtgaatctgaaaacgcagcagagccagcatccaactgatgccctctctgaagatctcctgtcaatcatagcaaatatgtcagggtgccttccgtatatgctcccacctaaatgtccgaacacttgcctagccaataaataccgccctatcaccggggcatgcaacaatagagaccaccctaggtggggggcttctaacactgcgctcgctagatggctgccacctgtttacgaggatgggttttcccagcccagaggatggaatcctggatttctgtataatggtttccccttaccgccagtccgtgaggttacccgccacgtgatccaggtgtccaacgaggtggtgacggacgatgacaggtactccgaccttcttatggcttggggacagtatattgaccacgatatcgcatttaccccacagtcgacgtctaaagcggcttttggtggtggggcagactgccagatgacctgcgagaaccagaatccatgttttccaattcagctgccagaggaggcccgacctgctgccggaaccgcctgtctcccgttctaccgcagttccgctgcctgtggtaccggcgatcaaggggctctgttcggcaacctatccactgcgaatccgaggcagcaaatgaacggcctgacaagttttctggacgctagcacagtgtatggcagctcgcctgctttggaacgccaactgagaaactggacatccgctgaaggcctgttgcgggtgcacgctcgtctacgagactccggccgagcttacctgccattcgtgcccccacgagcacctgctgcatgtgcccctgaaccagggatcccaggagagacgcgcggaccgtgttttctggctggcgatggaagggcttcagaagtgccatctttgacagctttacatacactctggcttcgggaacacaatagacttgcagcagccctgaaagccctgaatgcacattggtcagccgatgccgtgtatcaagaggctagaaaggtggttggggcattgcatcagataataaccctgcgggactacattccacgcatcctcggccctgaggccttccagcagtacgtgggtccttatgagggatatgactcgacagccaacccaacggtgtccaacgtgttttcaaccgccgctttccggtttggccacgcaacaattcatcctctggtgcgtcgtctcgacgcttcattccaggagcaccctgacctacctgggctttggctgcatcaggcattcttttccccatggacccttctacggggagggggtctggacccactcatacggggtttactcgcacggcctgcaaaactccaggtccaggaccagctcatgaacgaggagcttaccgaacgactgttcgtgctcagcaacagtagcactctggatcttgcttctattaatctgcagaggggcagagaccacggtttaccgggatacaatgagtggagagagttctgtggcctgccgaggctggaaacgccagccgacctgtcaacagcgatcgctagtaggagcgtggcagacaagattctcgatctgtacaagcaccctgataatattgatgtgtggctaggcggattggctgagaatttcctgcctcgcgcaaggaccggcccactattcgcctgtctcattggtaagcaaatgaaggcgcttcgggatggggactggttctggtgggagaatagccatgtgttcacggatgctcagcggagagagctggagaaacactccctctctagagtcatctgcgataatactggcctaaccagagtcccgatggatgcgttccaagttggcaaatttcctgaggactttgagtcatgcgattccatcaccggtatgaacctagaggcatggcgggagacatttccccaggatgataaatgtggatttcccgagagcgtggagaacggggacttcgtacactgcgaggaatctgggaggcgtgtactagtgtatagctgccgccacggctacgaattacaaggccgtgagcagctcacgtgcactcaagaagggtgggatttccaaccccctctgtgtaaggactctggcaggcttcccagggtcacctggatttccatgtccctcgcagcattattgattggcggtttcgcgggactgacatccaccgtcatatgtaggtggaccaggaccggcaccaagtctactttgcctatctctgaaactggagggggtaccccagagctgcgatgtggtaagcaccaggcagtggggacgagcccacaacgcgcagccgcacaggactccgagcaggaatcggcaggcatggagggtcgggacacccatcgcctccctagggccctatag

SEQ ID NO: 251719 - DNA, 3013 bp, Artificial Sequence
  derived and/or modified sequence
ggaaggcaattaaggcgcccatttcagaagagttacagccgtgaaaattactcagcagtgcagttggctgagaagaggaaaaaaggtcagaatgagagcgctcgctgtgctgtctgtcacgctggttatggcctgcacagaagccttcttccccttcatctcgagagggaaagaactcctttggggaaagcctgaggagtctcgtgtctctagcgtcttggaggaaagcaagcgcctggtggacaccgccatgtacgccacgatgcagagaaacctcaagaaaagaggaatcctttctccagctcagcttctgtctttttccaaacttcctgagccaacaagcggagtgattgcccgagcagcagagataatggaaacatcaatacaagcgatgaaaagaaaagtcaacctgaaaactcaacaatcacagcatccaacggatgctttatcagaagatctgctgagcatcattgcaaacatgtctggatgtctcccttacatgctgcccccaaaatgcccaaacacttgcctggcgaacaaatacaggcccatcacaggagcttgcaacaacagagaccaccccagatggggcgcctccaacacggccctggcacgatggctccctccagtctatgaggacggcttcagtcagccccgaggctggaaccccggcttcttgtacaacgggttcccactgcccccggtccgggaggtgacaagacatgtcattcaagtttcaaatgaggttgtcacagatgatgaccgctattctgacctcctgatggcatggggacaatacatcgaccacgacatcgcgttcacaccacagagcaccagcaaagctgccttcgggggaggggctgactgccagatgacttgtgagaaccaaaacccatgttttcccatacaactcccggaggaggcccggccggccgcgggcaccgcctgtctgcccttctaccgctcttcggccgcctgcggcaccggggaccaaggcgcgctctttgggaacctgtccacggccaacccgcggcagcagatgaacgggttgacctcgttcctggacgcgtccaccgtgtatggcagctccccggccctagagaggcagctgcggaactggaccagtgccgaagggctgctccgcgtccacgcgcgcctccgggactccggccgcgcctacctgcccttcgtgccgccacgcgcgcctgcggcctgtgcgcccgagcccggcatccccggagagacccgcgggccctgcttcctggccggagacggccgcgccagcgaggtcccctccctgacggcactgcacacgctgtggctgcgcgagcacaaccgcctggccgcggcgctcaaggccctcaatgcgcactggagcgcggacgccgtgtaccaggaggcgcgcaaggtcgtgggcgctctgcaccagatcatcaccctgagggattacatccccaggatcctgggacccgaggccttccagcagtacgtgggtccctatgaaggctatgactccaccgccaaccccactgtgtccaacgtgttctccacagccgccttccgcttcggccatgccacgatccacccgctggtgaggaggctggacgccagcttccaggagcaccccgacctgcccgggctgtggctgcaccaggctttcttcagcccatggacattactccgtggaggtggtttggacccactaatacgaggccttcttgcaagaccagccaaactgcaggtgcaggatcagctgatgaacgaggagctgacggaaaggctctttgtgctgtccaattccagcaccttggatctggcgtccatcaacctgcagaggggccgggaccacgggctgccaggttacaatgagtggagggagttctgcggcctgcctcgcctggagacccccgctgacctgagcacagccatcgccagcaggagcgtggccgacaagatcctggacttgtacaagcatcctgacaacatcgatgtctggctgggaggcttagctgaaaacttcctccccagggctcggacagggcccctgtttgcctgtctcattgggaagcagatgaaggctctgcgggacggtgactggttttggtgggagaacagccacgtcttcacggatgcacagaggcgtgagctggagaagcactccctgtctcgggtcatctgtgacaacactggcctcaccagggtgcccatggatgccttccaagtcggcaaattccccgaagactttgagtcttgtgacagcatcactggcatgaacctggaggcctggagggaaacctttcctcaagacgacaagtgtggcttcccagagagcgtggagaatggggactttgtgcactgtgaggagtctgggaggcgcgtgctggtgtattcctgccggcacgggtatgagctccaaggccgggagcagctcacttgcacccaggaaggatgggatttccagcctcccctctgcaaagactccgggaggctccctcgggtgacttggatctccatgtcgctggctgctctgctgatcggaggcttcgcaggtctcacctcgacggtgatttgcaggtggacacgcactggcactaaatccacactgcccatctcggagacaggcggaggaactcccgagctgagatgcggaaagcaccaggccgtagggacctcaccgcagcgggccgcagctcaggactcggagcaggagagtgctgggatggaaggccgggatactcacaggctgccgagagccctctgagggcaaagtggcaggacactgcagaacagcttcatgttcccaaaatcaccgtacgactcttttccaaacacaggcaaatccgaaatcagcaggacgactgttttcccaacacgggtaaatctagtaccatgtcgtagttactctcaggcatggatgaataaatgttatagctgcatttgtctggccttttcttgtaaacattgcctgatttgttccttctggggctttgccattaaaatgtatttacagatt

SEQ ID NO: 251720 - protein, 760 aa, Artificial Sequence
  derived and/or modified sequence
MRALAVLSVTLVMACTEAFFPFISRGKELLWGKPEESRVSSVLEESKRLVDTAMYATMQRNLKKRGILSPAQLLSFSKLPEPTSGVIARAAEIMETSIQAMKRKVNLKTQQSQHPTDALSEDLLSIIANMSGCLPYMLPPKCPNTCLANKYRPITGACNNRDHPRWGASNTALARWLPPVYEDGFSQPRGWNPGFLYNGFPLPPVREVTRHVIQVSNEVVTDDDRYSDLLMAWGQYIDHDIAFTPQSTSKAAFGGGADCQMTCENQNPCFPIQIITLRDYIPRILGPEAFQQYVGPYEGYDSTANPTVSNVFSTAAFRFGHATIHPLVRRLDASFQEHPDLPGLWLHQAFFSPWTLLRGGGLDPLIRGLLARPAKLQVQDQLMNEELTERLFVLSNSSTLDLASINLQRGRDHGLPGYNEWREFCGLPRLETPADLSTAIASRSVADKILDLYKHPDNIDVWLGGLAENFLPRARTGPLFACLIGKQMKALRDGDWFWWENSHVFTDAQRRELEKHSLSRVICDNTGLTRVPMDAFQVGKFPEDFESCDSITGMNLEAWRETFPQDDKCGFPESVENGDFVHCEESGRRVLVYSCRHGYELQGREQLTCTQEGWDFQPPLCKDVNECADGAHPPCHASARCRNTKGGFQCLCADPYELGDDGRTCVDSGRLPRVTWISMSLAALLIGGFAGLTSTVICRWTRTGTKSTLPISETGGGTPELRCGKHQAVGTSPQRAAAQDSEQESAGMEGRDTHRLPRAL

SEQ ID NO: 251721 - DNA, 2283 bp, Artificial Sequence
  derived and/or modified sequence
atgagagccctggccgtgctgagcgtgaccctggtgatggcctgcaccgaggccttcttccccttcatcagcagaggcaaggagctgctgtggggcaagcccgaggagagcagagtgagcagcgtgctggaggagagcaagagactggtggacaccgccatgtacgccaccatgcagagaaacctgaagaagagaggcatcctgagccccgcccagctgctgagcttcagcaagctgcccgagcccaccagcggcgtgatcgccagagccgccgagatcatggagaccagcatccaggccatgaagagaaaggtgaacctgaagacccagcagagccagcaccccaccgacgccctgagcgaggacctgctgagcatcatcgccaacatgagcggctgcctgccctacatgctgccccccaagtgccccaacacctgcctggccaacaagtacagacccatcaccggcgcctgcaacaacagagaccaccccagatggggcgccagcaacaccgccctggccagatggctgccccccgtgtacgaggacggcttcagccagcccagaggctggaaccccggcttcctgtacaacggcttccccctgccccccgtgagagaggtgaccagacacgtgatccaggtgagcaacgaggtggtgaccgacgacgacagatacagcgacctgctgatggcctggggccagtacatcgaccacgacatcgccttcaccccccagagcaccagcaaggccgccttcggcggcggcgccgactgccagatgacctgcgagaaccagaacccctgcttccccatccagatcatcaccctgagagactacatccccagaatcctgggccccgaggccttccagcagtacgtgggcccctacgagggctacgacagcaccgccaaccccaccgtgagcaacgtgttcagcaccgccgccttcagattcggccacgccaccatccaccccctggtgagaagactggacgccagcttccaggagcaccccgacctgcccggcctgtggctgcaccaggccttcttcagcccctggaccctgctgagaggcggcggcctggaccccctgatcagaggcctgctggccagacccgccaagctgcaggtgcaggaccagctgatgaacgaggagctgaccgagagactgttcgtgctgagcaacagcagcaccctggacctggccagcatcaacctgcagagaggcagagaccacggcctgcccggctacaacgagtggagagagttctgcggcctgcccagactggagacccccgccgacctgagcaccgccatcgccagcagaagcgtggccgacaagatcctggacctgtacaagcaccccgacaacatcgacgtgtggctgggcggcctggccgagaacttcctgcccagagccagaaccggccccctgttcgcctgcctgatcggcaagcagatgaaggccctgagagacggcgactggttctggtgggagaacagccacgtgttcaccgacgcccagagaagagagctggagaagcacagcctgagcagagtgatctgcgacaacaccggcctgaccagagtgcccatggacgccttccaggtgggcaagttccccgaggacttcgagagctgcgacagcatcaccggcatgaacctggaggcctggagagagaccttcccccaggacgacaagtgcggcttccccgagagcgtggagaacggcgacttcgtgcactgcgaggagagcggcagaagagtgctggtgtacagctgcagacacggctacgagctgcagggcagagagcagctgacctgcacccaggagggctgggacttccagccccccctgtgcaaggacgtgaacgagtgcgccgacggcgcccaccccccctgccacgccagcgccagatgcagaaacaccaagggcggcttccagtgcctgtgcgccgacccctacgagctgggcgacgacggcagaacctgcgtggacagcggcagactgcccagagtgacctggatcagcatgagcctggccgccctgctgatcggcggcttcgccggcctgaccagcaccgtgatctgcagatggaccagaaccggcaccaagagcaccctgcccatcagcgagaccggcggcggcacccccgagctgagatgcggcaagcaccaggccgtgggcaccagcccccagagagccgccgcccaggacagcgagcaggagagcgccggcatggagggcagagacacccacagactgcccagagccctgtag

SEQ ID NO: 251722 - DNA, 2283 bp, Artificial Sequence
  derived and/or modified sequence
atgcgcgcattagccgtactcagcgtaacactggtgatggcatgtactgaagctttcttccctttcatcagtcgcggcaaagagctgttgtgggggaaaccagaagaatcacgcgtttcatcggttttggaagaatccaaacgtttggttgacaccgctatgtacgctactatgcagagaaatctgaagaaaagaggcatactgtcccctgcccagctgttgtcgttttccaagctgccagagcccaccagcggtgtgatcgcgcgggctgctgagataatggaaacatcaatccaggcaatgaaaaggaaggtgaacctcaaaactcagcaatctcagcatccaacagacgcattaagcgaagacctgttgagcattatcgcaaatatgtctggctgcctcccgtacatgctgccacctaagtgccccaatacttgcctggctaataagtacagaccaataacgggagcttgcaataatcgcgaccaccctcgctggggggcttcgaataccgctctcgctaggtggcttcctccagtgtatgaggatggattcagtcaaccacgcggctggaaccccggattcctgtataatgggttcccactccctcccgttcgggaggtcaccagacacgtgatccaggtcagcaacgaagttgttactgacgacgatcggtattctgacctgttaatggcgtggggacagtacattgaccatgatatcgcattcacccctcagagcacttctaaggctgctttcggtggcggcgccgactgtcaaatgacatgtgagaaccaaaacccctgttttcccattcagattattactctgagagattacattcccaggatcctagggcccgaagccttccagcagtatgttgggccgtatgaaggctacgattccactgctaatccaacagtgtccaatgtattttcaacagccgcattcagatttggacacgccacgatccatcctttggtgcggaggctcgatgcctcctttcaggaacacccagacctgcctggactgtggcttcaccaagcatttttctctccctggacattgcttcgcggcggcggactcgacccattgattagagggctgttagcccgccccgctaaattgcaggtccaggatcagctgatgaatgaagagctgacggaaaggttgttcgtcctgtccaattcaagtaccctggacctcgcctccatcaacttacaacgtggccgtgatcatggtctgccaggctataatgaatggcgcgagttttgcgggttacctcggctggaaacccccgcagatctcagcacagcgattgcgtctagatctgtggctgacaagattctggacctgtataagcaccccgacaatatcgacgtgtggcttggtggtttggccgaaaattttcttcccagggccagaaccggacccctttttgcctgcctaatcggtaaacagatgaaagccttgagggacggggactggttctggtgggagaattcccacgtattcacagatgcccaaaggcgagagctcgagaaacactcgctctctagagtgatttgcgataacactggcctcacaagggttcctatggacgcatttcaagtgggaaaattccccgaggactttgaatcctgtgacagtatcactggaatgaacctcgaggcctggagggaaactttccctcaggacgataaatgtggcttccccgaatcagtggaaaacggcgacttcgtgcattgtgaggaaagcggtaggcgagttctggtgtactcctgcaggcacggttatgagctccagggtagagaacagttgacatgcactcaggagggatgggacttccagccccccctgtgcaaggatgttaatgagtgcgccgatggtgctcaccccccctgtcatgctagcgccagatgccgaaatacgaagggcgggtttcagtgcctctgcgccgatccctacgaactgggcgatgatggccgaacttgcgtggatagtggacgtctgccgcgggtgacttggattagtatgtccctggccgctttactgataggggggtttgccggactgacctctactgtaatttgtaggtggacacgtaccgggacaaagagcactctgcctatctcggagacggggggcggtactcccgagttgcgttgtggaaagcatcaggccgtcggtacgtccccccagcgcgccgcagcccaggactccgaacaggagtcagcgggaatggaaggcagggatactcaccgcctgccgagggctttgtag

SEQ ID NO: 251723 - DNA, 2283 bp, Artificial Sequence
  derived and/or modified sequence
atgcgggcgttagccgtgctgtccgtcactcttgttatggcttgtactgaggctttctttcccttcatttcaagagggaaagagctactttggggtaagcctgaggagtcccgagtctcatcggtgctcgaggagagcaaaaggcttgtggatactgctatgtacgcaacaatgcaaagaaaccttaaaaaaaggggaattctgtctccagcacagctattaagcttctcaaagcttccggaacccacgtctggtgtcattgcacgcgccgccgaaattatggagacctccatccaagcaatgaaacgcaaagtgaatctcaagactcagcaatcccagcacccaactgatgctctgagcgaggacctgttatcaatcatcgctaatatgtcgggctgcctgccttatatgctgcctcctaagtgcccgaatacgtgcctagccaataagtaccggcccataacaggagcgtgcaacaatagagatcatcccagatggggcgccagtaacaccgcactagccagatggctccctcctgtctatgaggatgggttttcccaaccacgaggctggaatcccggatttctgtacaacggcttcccattaccgccggtgcgggaggtcacaagacatgtgatccaggtgtcaaatgaggttgtgacagacgatgatagatactctgatctgctgatggcatggggccagtacatcgaccacgatatcgctttcacaccgcaaagcacttccaaagcggccttcggcggcggtgctgattgccaaatgacctgcgagaatcagaacccatgctttcccattcagataatcactttgagggattatatacccaggatcctgggtccggaggcatttcagcagtacgtcgggccttacgaaggctatgattctactgctaacccaactgtctcaaacgtgttttccacagccgcgttccgcttcggccacgccacgatccatccactcgtccggagacttgacgctagtttccaggagcatccggaccttcccgggctgtggctgcaccaagcgttcttcagtccgtggaccttgctgaggggtgggggtctcgaccccctgatcagggggctgctcgcccgtcccgcaaaattacaagtgcaggaccaactgatgaatgaagagttaacagagaggctgtttgtgctctcaaactcttcaacactggatctcgcctccataaacctgcaacgtgggcgcgatcacggcctgcctggttataacgagtggagggaattttgcggcctcccaagattggagacacctgccgacttatctacagcaattgcctcaaggtcggtggctgacaaaattctcgatctctacaagcaccccgataacatagacgtgtggctaggtggcctggctgagaatttcctccccagggccaggaccggccctctgtttgcctgcctgatcggcaaacagatgaaggctctgcgggatggcgactggttctggtgggagaacagtcatgtgttcacagatgcacagagacgcgagttggaaaagcactcactgtctagagtcatctgcgacaacactggtctcaccagggtacccatggacgccttccaggttggcaagttccctgaagacttcgagtcgtgcgatagtataactggtatgaacttggaggcatggcgcgagacatttccacaggatgataaatgtggatttcctgagagtgtcgagaacggggatttcgtccattgtgaggagtcaggccgtagggtgctcgtctatagctgcaggcacgggtacgaactgcagggtcgagagcagctgacatgcactcaggagggctgggactttcaacccccattgtgcaaggatgtgaatgaatgtgccgatggagcacaccctccttgtcacgcctccgccagatgtcgcaatacaaagggtggatttcagtgtctgtgtgccgacccgtatgaactgggagatgatggcaggacatgcgtagattccggtcgccttccacgggtgacctggatcagcatgagccttgccgcgcttcttatcggagggttcgccggtctcacgtccacagtgatttgtcgctggacaaggacagggaccaaatccactctgcctatcagcgaaacaggaggggggacccccgagttacgatgtggaaagcaccaggcagtgggcacttcacctcagcgcgccgctgctcaggactctgagcaggaatccgccggaatggagggacgtgacacccatcgattaccgagggcactttag

SEQ ID NO: 251724 - DNA, 2283 bp, Artificial Sequence
  derived and/or modified sequence
atgagggccctggccgtgctgtctgtgaccctggtgatggcctgcacagaggccttcttccccttcatcagccggggcaaggagctgctgtggggcaagccagaggagagccgggtgtcctctgtgctggaggagagcaagaggctggtggacacagccatgtatgccaccatgcagaggaacctgaagaagaggggcatcctgagccctgcccagctgctgtccttcagcaagctgcctgagcccaccagcggcgtgattgcccgggctgctgagatcatggagaccagcatccaggccatgaagaggaaggtgaacctgaagacccagcagagccagcaccccacagatgccctgtctgaggacctgctgagcatcatcgccaacatgagcggctgcctgccctacatgctgccccccaagtgccccaacacctgcctggccaacaagtaccggcccatcactggagcctgcaacaacagagaccacccccgctggggcgccagcaacacagccctggcccgctggctgccccctgtgtatgaagatggcttcagccagccccggggctggaaccctggcttcctgtacaacggcttccccctgccccctgtgcgggaggtgaccaggcatgtgatccaggtgtccaatgaggtggtgacagatgatgaccgctacagcgacctgctgatggcctggggccagtacatcgaccatgacatcgccttcaccccccagagcaccagcaaggccgcctttggaggcggcgctgactgccagatgacctgtgagaaccagaacccctgcttccccatccagatcatcaccctgcgggactacatcccccgcatcctgggccctgaggccttccagcagtatgtgggcccctatgagggctatgacagcacagccaaccccaccgtgtccaatgtgttcagcacagctgccttccgctttggacatgccaccatccaccccctggtgcggcggctggatgccagcttccaggagcacccagacctgcccggcctgtggctgcaccaggccttcttcagcccctggaccctgctgcggggcggcggcctggaccccctcatccggggcctgctggcccggcctgccaagctgcaggtgcaggaccagctgatgaatgaggagctgacagagcggctgtttgtgctgagcaacagcagcaccctggacctggccagcatcaacctgcagaggggccgggaccacggcctgcccggctacaatgagtggagggagttctgtggcctgccccggctggagaccccagctgacctgagcacagccatcgccagccgctctgtggccgacaagatcctggacctgtacaagcacccagacaacattgatgtgtggctgggcggcctggccgagaacttcctgccccgggccaggacaggccccctgtttgcctgcctgattggcaagcagatgaaggccctgagagatggagactggttctggtgggagaacagccacgtgttcacagatgcccagaggcgggagctggagaagcacagcctgagcagggtcatctgtgacaacacaggcctgaccagggtgcccatggatgccttccaggtgggcaagttcccagaagattttgagagctgtgacagcatcaccggcatgaacctggaggcctggagggagaccttcccccaggatgacaagtgtggcttccctgagagcgtggagaatggagactttgtgcactgtgaggagagcggccggcgggtgctggtgtacagctgcagacatggctatgagctgcagggccgggagcagctgacctgcacccaggagggctgggacttccagccccccctgtgcaaggatgtgaatgaatgtgctgatggagcccaccccccctgccacgccagcgcccgctgcaggaacaccaagggcggcttccagtgcctgtgtgccgacccctatgagctgggagatgatggccgcacctgtgtggacagcggccgcctgccccgggtgacctggatctccatgagcctggccgccctgctgattggaggctttgctggcctgaccagcaccgtcatctgccgctggaccaggacaggcaccaagagcaccctgcccatcagcgagaccggcggcggcaccccagagctgcgctgtgggaagcaccaggccgtgggcaccagcccccagagagctgctgcccaggacagcgagcaggagagcgctggcatggagggccgggacacccaccggctgccccgggccctgtag

SEQ ID NO: 251725 - DNA, 2283 bp, Artificial Sequence
  derived and/or modified sequence
atgcgggccctggccgtgctgagcgtgaccctggtgatggcctgcacggaggccttcttcccttttatcagtagaggtaaggagctcctttggggcaaacccgaggaatctcgcgtgtccagcgttctcgaagaaagtaagcggttagtcgacacagcaatgtacgctaccatgcagagaaaccttaaaaaacgcgggatcctgtcccctgcacagttactgtcattcagcaagctccccgagcctacttcaggcgttatcgccagggccgctgagataatggagacctccatccaagccatgaaacgaaaggttaatctgaagacccagcagtcgcaacatccaacagacgctctgtctgaggacctcctgtctattatcgcgaacatgtctggatgtttaccgtacatgcttcccccaaagtgtcctaatacatgccttgcaaataagtatcggcctattaccggagcctgcaataatcgcgaccacccacgttggggcgcgtctaatactgcccttgctcgctggttgccgcccgtgtacgaggacgggttttctcagcccaggggctggaaccctggattcctgtacaacggattccccctgcctccagttagagaggtgacacggcatgttatccaggtatctaacgaggtggtgaccgatgatgatcggtactctgaccttctaatggcgtgggggcagtacatcgatcacgatatcgcgttcaccccccagagcacctccaaggcggctttcggaggaggtgcagattgccagatgacttgcgaaaatcaaaacccctgtttcccgatacagataattactctaagggactatattccccggatcctgggaccggaagcattccagcagtacgtggggccctacgaggggtacgatagtacggccaatcctaccgtgagcaatgtgttcagcacagcggccttccggtttggacatgccaccatacaccccctggttcgacgcctggatgctagttttcaggagcatcccgaccttcctggcctttggctccatcaggcgttcttctctccctggacattgttacgtgggggcggcctggaccccttgattcggggactcctcgcccgtcctgcgaagctgcaggtccaggaccagcttatgaatgaagaattgacggagcgcctcttcgtgctgagcaacagcagtaccttggatctcgcctccatcaacctgcaacgtggcagagaccacggcctgccaggatacaatgagtggagggaattttgcggtctccctcgacttgagacacctgctgatctgagtaccgctatcgcctccaggtcagtcgccgataaaattctggacctgtacaaacacccagataatattgacgtttggcttgggggccttgcggaaaacttcctgccacgcgcacggacaggacccctgtttgcctgcctgatcggaaagcagatgaaggccctgcgtgacggcgactggttttggtgggaaaactcccacgtgtttacagacgcccagcggcgtgaactggagaagcacagcctgtctcgggtgatatgcgacaatacggggctaaccagagtaccaatggacgcattccaggtgggcaaattcccagaggacttcgagagctgcgatagtatcacaggtatgaaccttgaagcctggagggaaacctttccacaggacgacaaatgcgggttcccagagtccgttgagaacggggactttgtccactgtgaagagagtgggcggagggtcctggtttacagttgccgccacggatatgagttacaggggcgtgagcaattaacctgtactcaggagggctgggatttccagccccctctgtgcaaggatgtaaacgagtgtgctgatggagctcacccaccatgccacgcttctgccaggtgccgcaacactaaggggggtttccaatgcctgtgtgccgacccttacgagctcggtgatgatgggcgtacctgcgtggattccggccgcctgcctagggttacatggatcagtatgtctctcgccgctcttcttattggcggtttcgctggcctaactagcaccgttatatgtagatggacaagaactgggactaaatcaacgctgcctatctcagagaccggagggggcactccagagctgagatgcgggaaacaccaggccgtcggtaccagccctcagagagccgccgctcaggatagcgagcaggaatctgccggtatggagggaagagacactcatcggttaccccgggctctatag

SEQ ID NO: 251726 - DNA, 2283 bp, Artificial Sequence
  derived and/or modified sequence
atgcgggccctggccgtgctgagcgtgaccctggtgatggcctgcactgaggccttctttccctttatctctcggggtaaagaattgctgtggggcaagcctgaggaaagtcgggtttcttctgtcctggaggagtcaaaacgccttgtagataccgctatgtacgctaccatgcagcggaatctgaagaaaaggggcattctttctccagcccagctcttgagcttctccaaattaccagagcccacatccggagtcattgctagagctgccgagattatggagacctctatccaggcaatgaaaaggaaagtgaacctgaagactcagcagtctcagcatcccacagatgcactttcagaggacctactgtctatcatcgctaacatgtctgggtgcctgccctatatgctgccgcccaagtgcccaaatacctgtcttgccaacaagtacaggcccataacgggggcatgtaataaccgagaccatcctaggtggggcgcttcgaacactgccctcgccaggtggctgccacccgtgtatgaagacggattcagtcagcctcggggttggaatcctggatttctgtacaacggctttccactgccccccgtgagagaggttacgagacacgtgatccaagtgtccaatgaagtagtcactgacgacgatcgatatagcgacctgctgatggcttgggggcaatatattgaccacgatatcgccttcactcctcagtcaacctcaaaggccgctttcgggggcggcgctgattgccagatgacatgtgagaaccagaacccctgttttcccatacagattattaccctgcgcgattacattcctcgaatccttgggccagaggctttccagcaatacgtcggcccttacgagggctatgattcaaccgccaaccccaccgtgagcaatgtcttctcaaccgctgcgttccgctttggtcacgcgacaattcatccgctcgtgcggagactcgacgcgtccttccaagagcacccagatcttccaggcctgtggctgcatcaggccttcttcagcccatggacactattaagaggcgggggactggacccactgatcagaggcctcctcgctcgacccgctaagctgcaggtgcaagaccaactgatgaatgaggagctgaccgagaggttattcgtgctcagcaactcatctactttagacttggccagcatcaatcttcaacgagggcgcgaccacggattgccaggctacaacgaatggagagaattctgcggcctgcctcggctggagactccagctgatctgagcacagctatcgcaagcaggtccgttgctgataagattttggacctctataaacatcctgacaatattgatgtgtggttaggtggactggccgaaaatttcctcccacgagcccgaaccggaccactgttcgcctgtctaattgggaaacagatgaaggcactccgcgatggcgactggttttggtgggagaattcacatgtcttcacagatgcccagcggcgcgaactggagaaacattccttgtcgcgcgtgatatgtgataatacaggcctgactagagtgcccatggacgcatttcaggtgggcaaatttcccgaggatttcgagtcatgtgactccattacaggaatgaatctggaggcttggagagaaactttcccacaagacgacaagtgtggattcccggagtctgtggagaatggggactttgtccactgcgaagaatcaggacggcgggtccttgtgtatagttgtagacacgggtacgagttgcagggacgcgaacagctgacctgtactcaagagggttgggattttcagccccccctttgtaaagacgtgaacgagtgcgccgatggagctcatccgccctgccacgctagcgctcgatgtagaaacactaaaggcggcttccaatgtctttgcgctgatccgtacgagcttggggacgatggacgaacttgtgtggattcaggtcggctgccccgtgttacctggatttccatgtcactggccgcacttctaatcggtggcttcgctggattgacctcgaccgtaatatgtcgatggaccaggactgggactaaatctactctgcccatttcggaaaccggcggtgggaccccagagcttagatgcgggaaacaccaagctgtgggaacatccccgcagagagcagctgcacaggacagtgagcaggagagcgccggaatggaaggtcgcgacactcaccggctgcctcgcgccctttag

SEQ ID NO: 251727 - DNA, 2283 bp, Artificial Sequence
  derived and/or modified sequence
atgcgggctctggctgtgctgtcagtgacacttgtcatggcatgcaccgaggccttttttccctttatctctcgtggcaaggaactgttgtggggtaaacctgaagagtctagggtgtcttctgtgctggaggaatccaaaagactggtggacactgcaatgtacgcaacgatgcaacgcaatctcaagaagaggggcattttgtctccggctcaattgctgagcttttcaaagctgcccgagccaacaagcggagtcattgctcgcgctgccgagatcatggaaacatcaatccaagcaatgaagcggaaagtgaatctcaagacccagcagtcccagcaccccactgacgcactgtccgaggacttactgtcgatcattgctaacatgtccggctgcctcccatatatgctcccaccaaagtgtcccaacacctgcctcgccaataagtaccgccctatcacgggcgcttgtaataacagagatcaccctcggtggggagcatcaaacaccgctctggcaagatggctgccacccgtttatgaggacggattttctcagccccgagggtggaatcctggattcctttataacgggttcccattgccgccagttagggaggtgacccgccatgttattcaggtgtcaaatgaggtggtgacagacgacgacaggtacagtgacttactcatggcgtgggggcagtacatcgatcatgatatcgcattcaccccgcagtccacctcgaaagccgcattcggagggggagctgattgccagatgacttgcgaaaatcagaacccctgcttccctatccagatcattaccctccgcgattacatcccccgaatactggggcctgaggccttccaacagtacgtgggcccttacgagggctatgactctaccgcaaatccgaccgtctccaatgtgttctcaaccgccgcatttcgttttggccacgcaactatccatcctctggtgcgtagactcgacgccagcttccaagagcaccctgatcttcccggactgtggctccaccaggctttcttctcaccttggaccttgctgaggggtggcggactggatccactgatccgaggactgctggctcggcctgcaaagctgcaagtgcaggatcaacttatgaacgaggaattaactgaaaggctgttcgtgctctcaaactcgagcaccctggacctcgcctccattaacctacagcggggaagagaccacggcctaccaggatataacgaatggcgggaattctgtgggttacctcggctcgagactccggctgatctctctacagctatagccagtcgttcagttgctgacaaaatattggatctgtacaaacaccccgacaatattgacgtttggttaggcggtttggcagagaattttctccctagagccagaacaggtcctcttttcgcctgtctcataggcaaacaaatgaaggcgttgcgcgatggggactggttttggtgggagaactcacacgtctttactgacgctcagcgacgcgagctggaaaaacacagcctatcgcgagtgatctgtgataacactgggctgacccgcgtgccaatggacgcctttcaagtgggcaaattccctgaagatttcgaatcctgtgacagtatcacagggatgaacctagaggcttggcgtgagaccttcccacaggacgacaaatgtggctttccagaatcagtcgagaacggcgattttgttcactgcgaggagtctgggagaagagtcttggtatatagttgtcgccacgggtacgagctgcagggacgtgagcagctgacttgcacccaggagggatgggattttcaacctccactgtgcaaggacgtgaatgagtgcgcagacggtgctcaccccccttgccacgcgtccgcaagatgtcggaacacaaaggggggtttccagtgcctgtgtgccgacccctatgagctgggcgatgatggccgaacttgcgtggattcagggagattaccaagagttacatggatctcaatgtcgctggccgctctgttaatcggaggcttcgctggccttacaagcaccgtcatctgccgctggaccagaacagggacaaagagtactctgcctatatcagaaacagggggaggaacacccgagctacgttgcgggaagcatcaggctgtcggcacctcacctcagcgggcagccgcacaggattcagaacaggagtcagccggaatggagggccgtgacacacaccgacttccccgtgccctttag

SEQ ID NO: 251728 - DNA, 2283 bp, Artificial Sequence
  derived and/or modified sequence
atgagggcgctcgccgtcctgagtgtgaccttagtgatggcctgcacagaagccttttttcctttcatttcgagaggcaaggaacttctttggggcaaaccggaagagtcccgagtctcctctgtacttgaagagtccaaacggcttgtggataccgccatgtacgccaccatgcagaggaatctcaaaaaacgtggcattttgtcccccgcacagttgcttagcttctctaagctccctgaaccaacctccggagtgatcgcgagggcagccgaaatcatggaaacatccatacaggccatgaagagaaaggtcaacctaaagacccagcagagccagcacccaactgacgcactgagcgaagacctgctgtcaattatcgccaacatgagcgggtgcctgccttacatgctgccacctaaatgtccaaacacttgcctggctaacaaatacagaccaattacaggcgcttgcaataaccgcgaccacccgcgatggggagcctctaacaccgcgctggcccgttggctgccacctgtctatgaggatggtttctcccagccccgtggctggaatcctggcttcctgtataacgggtttcctctaccaccagtcagagaagtgactcggcacgtcatccaggtatctaatgaggtcgtgactgatgatgatcgttactctgatctgctaatggcatggggccagtatatcgaccacgacattgcctttactccacagtcaacctccaaggcagcttttggagggggagcagattgccagatgacatgcgagaatcagaatccatgtttccctatccagattatcaccctgcgcgactacattcccagaattctggggccagaggcctttcaacagtatgttggcccatacgagggttatgattcgacagccaaccccacagtcagcaatgttttttcaaccgcagcattccgtttcggccatgctacgattcatccccttgtacggcgactcgatgcctcttttcaagagcatcctgacctaccaggtctgtggctccatcaggcgttcttcagcccctggaccttgctgagaggaggtggacttgaccctttgattaggggcctgctggcacgccctgcaaaacttcaggtgcaagaccagttgatgaatgaggaactgaccgaacgcctgtttgtcctgtcaaactccagtactctcgacctggccagtatcaatctgcagagggggagggaccatggcctgcctggttacaatgagtggcgagagttttgtggcctcccaagactggaaacacctgcggatctgagcactgcaatcgcgtctagaagcgtggcagacaagattttggacttgtacaaacaccccgacaacatcgatgtctggttggggggtctggccgagaattttctgcctagagccaggactggacctcttttcgcctgtcttatcgggaaacagatgaaggccttgcgggacggtgactggttctggtgggaaaactctcacgtctttaccgatgctcaaaggcgagaacttgagaaacactccctctcccgcgttatatgcgataataccggcctgacccgagtgcccatggacgcattccaagtggggaagtttcctgaagatttcgagagctgtgactccatcactggtatgaatcttgaggcctggagagagacctttccacaggatgataaatgtggtttccccgaatctgtcgaaaatggagacttcgtgcattgcgaggagtccggccgtagggtcttggtttattcttgcagacatgggtatgagctacagggcagggagcagctgacttgcacacaggagggctgggacttccagcctcctctgtgcaaggatgttaacgaatgcgctgacggcgctcatcctccctgccacgcctcggccagatgtagaaatactaagggtggttttcaatgtctgtgcgcagacccttacgagctgggcgacgatgggcgtacctgcgtcgattctggtcgactgcccagagtgacatggatctcaatgtccttggccgcacttctaataggtggcttcgctggactcaccagcaccgtgatttgccggtggaccaggactggaaccaagtcaacccttccaatatctgaaaccggaggtgggacgcctgagttgaggtgtggtaaacaccaggctgttggcacctctccccaaagagccgcagctcaggacagcgaacaggagagcgctggaatggaagggcgagatactcaccggctcccaagggctctttag

SEQ ID NO: 251729 - DNA, 2626 bp, Artificial Sequence
  derived and/or modified sequence
ggaaggcaattaaggcgcccatttcagaagagttacagccgtgaaaattactcagcagtgcagttggctgagaagaggaaaaaaggtcagaatgagagcgctcgctgtgctgtctgtcacgctggttatggcctgcacagaagccttcttccccttcatctcgagagggaaagaactcctttggggaaagcctgaggagtctcgtgtctctagcgtcttggaggaaagcaagcgcctggtggacaccgccatgtacgccacgatgcagagaaacctcaagaaaagaggaatcctttctccagctcagcttctgtctttttccaaacttcctgagccaacaagcggagtgattgcccgagcagcagagataatggaaacatcaatacaagcgatgaaaagaaaagtcaacctgaaaactcaacaatcacagcatccaacggatgctttatcagaagatctgctgagcatcattgcaaacatgtctggatgtctcccttacatgctgcccccaaaatgcccaaacacttgcctggcgaacaaatacaggcccatcacaggagcttgcaacaacagagaccaccccagatggggcgcctccaacacggccctggcacgatggctccctccagtctatgaggacggcttcagtcagccccgaggctggaaccccggcttcttgtacaacgggttcccactgcccccggtccgggaggtgacaagacatgtcattcaagtttcaaatgaggttgtcacagatgatgaccgctattctgacctcctgatggcatggggacaatacatcgaccacgacatcgcgttcacaccacagagcaccagcaaagctgccttcgggggaggggctgactgccagatgacttgtgagaaccaaaacccatgttttcccatacaaatcatcaccctgagggattacatccccaggatcctgggacccgaggccttccagcagtacgtgggtccctatgaaggctatgactccaccgccaaccccactgtgtccaacgtgttctccacagccgccttccgcttcggccatgccacgatccacccgctggtgaggaggctggacgccagcttccaggagcaccccgacctgcccgggctgtggctgcaccaggctttcttcagcccatggacattactccgtggaggtggtttggacccactaatacgaggccttcttgcaagaccagccaaactgcaggtgcaggatcagctgatgaacgaggagctgacggaaaggctctttgtgctgtccaattccagcaccttggatctggcgtccatcaacctgcagaggggccgggaccacgggctgccaggttacaatgagtggagggagttctgcggcctgcctcgcctggagacccccgctgacctgagcacagccatcgccagcaggagcgtggccgacaagatcctggacttgtacaagcatcctgacaacatcgatgtctggctgggaggcttagctgaaaacttcctccccagggctcggacagggcccctgtttgcctgtctcattgggaagcagatgaaggctctgcgggacggtgactggttttggtgggagaacagccacgtcttcacggatgcacagaggcgtgagctggagaagcactccctgtctcgggtcatctgtgacaacactggcctcaccagggtgcccatggatgccttccaagtcggcaaattccccgaagactttgagtcttgtgacagcatcactggcatgaacctggaggcctggagggaaacctttcctcaagacgacaagtgtggcttcccagagagcgtggagaatggggactttgtgcactgtgaggagtctgggaggcgcgtgctggtgtattcctgccggcacgggtatgagctccaaggccgggagcagctcacttgcacccaggaaggatgggatttccagcctcccctctgcaaagatgtgaacgagtgtgcagacggtgcccaccccccctgccacgcctctgcgaggtgcagaaacaccaaaggcggcttccagtgtctctgcgcggacccctacgagttaggagacgatgggagaacctgcgtagactccgggaggctccctcgggtgacttggatctccatgtcgctggctgctctgctgatcggaggcttcgcaggtctcacctcgacggtgatttgcaggtggacacgcactggcactaaatccacactgcccatctcggagacaggcggaggaactcccgagctgagatgcggaaagcaccaggccgtagggacctcaccgcagcgggccgcagctcaggactcggagcaggagagtgctgggatggaaggccgggatactcacaggctgccgagagccctctgagggcaaagtggcaggacactgcagaacagcttcatgttcccaaaatcaccgtacgactcttttccaaacacaggcaaatccgaaatcagcaggacgactgttttcccaacacgggtaaatctagtaccatgtcgtagttactctcaggcatggatgaataaatgttatagctgcatttgtctggccttttcttgtaaacattgcctgatttgttccttctggggctttgccattaaaatgtatttacagatt

SEQ ID NO: 251730 - DNA, 2283 bp, Artificial Sequence
  derived and/or modified sequence
atgagagcgctcgctgtgctgtctgtcacgctggttatggcctgcacagaagccttcttccccttcatctcgagagggaaagaactcctttggggaaagcctgaggagtctcgtgtctctagcgtcttggaggaaagcaagcgcctggtggacaccgccatgtacgccacgatgcagagaaacctcaagaaaagaggaatcctttctccagctcagcttctgtctttttccaaacttcctgagccaacaagcggagtgattgcccgagcagcagagataatggaaacatcaatacaagcgatgaaaagaaaagtcaacctgaaaactcaacaatcacagcatccaacggatgctttatcagaagatctgctgagcatcattgcaaacatgtctggatgtctcccttacatgctgcccccaaaatgcccaaacacttgcctggcgaacaaatacaggcccatcacaggagcttgcaacaacagagaccaccccagatggggcgcctccaacacggccctggcacgatggctccctccagtctatgaggacggcttcagtcagccccgaggctggaaccccggcttcttgtacaacgggttcccactgcccccggtccgggaggtgacaagacatgtcattcaagtttcaaatgaggttgtcacagatgatgaccgctattctgacctcctgatggcatggggacaatacatcgaccacgacatcgcgttcacaccacagagcaccagcaaagctgccttcgggggaggggctgactgccagatgacttgtgagaaccaaaacccatgttttcccatacaaatcatcaccctgagggattacatccccaggatcctgggacccgaggccttccagcagtacgtgggtccctatgaaggctatgactccaccgccaaccccactgtgtccaacgtgttctccacagccgccttccgcttcggccatgccacgatccacccgctggtgaggaggctggacgccagcttccaggagcaccccgacctgcccgggctgtggctgcaccaggctttcttcagcccatggacattactccgtggaggtggtttggacccactaatacgaggccttcttgcaagaccagccaaactgcaggtgcaggatcagctgatgaacgaggagctgacggaaaggctctttgtgctgtccaattccagcaccttggatctggcgtccatcaacctgcagaggggccgggaccacgggctgccaggttacaatgagtggagggagttctgcggcctgcctcgcctggagacccccgctgacctgagcacagccatcgccagcaggagcgtggccgacaagatcctggacttgtacaagcatcctgacaacatcgatgtctggctgggaggcttagctgaaaacttcctccccagggctcggacagggcccctgtttgcctgtctcattgggaagcagatgaaggctctgcgggacggtgactggttttggtgggagaacagccacgtcttcacggatgcacagaggcgtgagctggagaagcactccctgtctcgggtcatctgtgacaacactggcctcaccagggtgcccatggatgccttccaagtcggcaaattccccgaagactttgagtcttgtgacagcatcactggcatgaacctggaggcctggagggaaacctttcctcaagacgacaagtgtggcttcccagagagcgtggagaatggggactttgtgcactgtgaggagtctgggaggcgcgtgctggtgtattcctgccggcacgggtatgagctccaaggccgggagcagctcacttgcacccaggaaggatgggatttccagcctcccctctgcaaagatgtgaacgagtgtgcagacggtgcccaccccccctgccacgcctctgcgaggtgcagaaacaccaaaggcggcttccagtgtctctgcgcggacccctacgagttaggagacgatgggagaacctgcgtagactccgggaggctccctcgggtgacttggatctccatgtcgctggctgctctgctgatcggaggcttcgcaggtctcacctcgacggtgatttgcaggtggacacgcactggcactaaatccacactgcccatctcggagacaggcggaggaactcccgagctgagatgcggaaagcaccaggccgtagggacctcaccgcagcgggccgcagctcaggactcggagcaggagagtgctgggatggaaggccgggatactcacaggctgccgagagccctctga

SEQ ID NO: 251731 - protein, 325 aa, Artificial Sequence
  derived and/or modified sequence
MIIVAHVLLILLGATEILQADLLPDEKISLLPPVNFTIKVTGLAQVLLQWKPNPDQEQRNVNLEYQVKINAPKEDDYETRITESKCVTILHKGFSASVRTILQNDHSLLASSWASAELHAPPGSPGTSIVNLTCTTNTTEDNYSRLRSYQVSLHCTWLVGTDAPEDTQYFLYYRYGSWTEECQEYSKDTLGRNIACWFPRTFILSKGRDWLAVLVNGSSKHSAIRPFDQLFALHAIGNDEHKPLREWFVIVIMATICFILLILSLICKICHLWIKLFPPIPAPKSNIKDLFVTTNYEKAGSSETEIEVICYIEKPGVETLEDSVF

SEQ ID NO: 251732 - protein, 333 aa, Artificial Sequence
  derived and/or modified sequence
MIIVAHVLLILLGATEILQADLLPDEKISLLPPVNFTIKVTGLAQVLLQWKPNPDQEQRNVNLEYQVKINAPKEDDYETRITESKCVTILHKGFSASVRTILQNDHSLLASSWASAELHAPPGSPGTSIVNLTCTTNTTEDNYSRLRSYQVSLHCTWLVGTDAPEDTQYFLYYRYGSWTEECQEYSKDTLGRNIACWFPRTFILSKGRDWLAVLVNGSSKHSAIRPFDQLFALHAIDQINPPLNVTAEIEGTRLSIQWEKPVSAFPIHCFDYEVKIHNTRNGYLQIEKLMTNAFISIIDDLSKYDVQVRAAVSSMCREAGLWSEWSQPIYVGK

SEQ ID NO: 251733 - protein, 196 aa, Artificial Sequence
  derived and/or modified sequence
MIIVAHVLLILLGATEILQADLLPDEKISLLPPVNFTIKVTGLAQVLLQWKPNPDQEQRNVNLEYQVKINAPKEDDYETRITESKCVTILHKGFSASVRTILQNDHSLLASSWASAELHAPPGSPGTSIVNLTCTTNTTEDNYSRLRSYQVSLHCTWLVGTDAPEDTQYFLYYRYGSWTEECQEYSKDTLGRNIAC

SEQ ID NO: 251734 - DNA, 1002 bp, Artificial Sequence
  derived and/or modified sequence
atgatcatcgtcgcacacgtgctgctcatcctgttgggcgctactgagattctgcaagcagacctcctcccagatgaaaagatttctctgctcccaccagtaaacttcaccatcaaggttacgggcctggctcaggtgctgctgcagtggaagcctaatccggaccaagagcagcgcaatgtcaacctggagtaccaggtgaagatcaatgctcccaaggaagacgattatgaaacgcggataactgaatccaagtgcgtgacgattctccataagggtttcagtgcaagcgtcagaactatactgcagaacgaccacagtctgttggcttccagctgggcttcggcagaactgcatgctccacccggcagtccaggcacctctatcgtgaatctgacttgtacaacaaacactacagaggacaactatagtcggctgcgatcataccaggtgagcctccattgtacctggttagtcgggacagacgctcccgaagatacccagtattttctctattatcgatacggctcatggaccgaagaatgtcaggaatactcaaaagatacgctgggacggaatattgcatgctggttccccaggacatttatcttgtcaaaaggaagagactggctagctgtgttggtgaatggtagctccaaacatagcgccatccgcccctttgatcaactctttgctctgcatgccattgaccagatcaacccccccctcaatgttaccgccgaaattgaaggcactcgcctgtcaattcagtgggaaaagcccgtgtctgcttttccaattcactgcttcgactacgaagtgaagattcacaatacgcgaaacgggtacttgcaaattgagaagcttatgactaatgctttcatcagcattatcgatgatttatcaaaatatgatgttcaggttagagcagcagtgtcgagtatgtgtagggaagcgggcttatggagtgaatggagccaaccgatctacgtgggcaagtag

SEQ ID NO: 251735 - DNA, 1002 bp, Artificial Sequence
  derived and/or modified sequence
atgattatcgttgcccacgttctgctgatacttttgggggccaccgaaatcctgcaggctgatttactcccggatgaaaagatttcccttcttcctcccgtgaatttcactatcaaggttaccggtcttgcgcaagtgctcctacagtggaagcccaatcctgaccaggaacagaggaacgtaaacctcgagtatcaggtaaaaattaatgcaccaaaggaagacgactacgaaacgcgtatcacagaaagcaaatgtgtcacaattctccacaaaggattttccgcgtccgttaggacaatcctccagaacgatcactcacttctggcttctagctgggcttcagcagagctccacgccccaccaggctcccctggtacttccatcgtcaaccttacatgcactacaaacacaacggaggataattattctagactacggagctaccaggtgtccttacattgtacatggttagtgggcaccgacgcacccgaagacacacagtacttcctatactatcggtatggatcttggactgaggaatgtcaagaatactcaaaagatacgcttgggaggaatatcgcttgttggtttcccagaacgttcattctttccaagggtcgagattggcttgccgtcctggttaacggctcatccaagcacagcgcaatcagaccgttcgaccaactgtttgctctccatgcaatagaccagataaaccctcctctcaatgtgaccgccgaaattgagggaaccagactttccatccagtgggaaaagcccgtgagtgcatttcccatacattgtttcgattacgaagtcaagatccacaacacccggaatggatatctgcagattgagaaactgatgaccaatgcattcatttccattatagatgatctgagtaaatacgatgtccaggtaagagccgcagtatcctctatgtgtcgtgaagcaggtctatggagtgagtggagccagcccatatacgtgggtaagtag

SEQ ID NO: 251736 - DNA, 1664 bp, Artificial Sequence
  derived and/or modified sequence
ccgctgcttctcatcgcatggccaccgcatttctcaggccaggcacattgagcattggtcctgtgcctgacgctatgctagatgctggggttgcagccacgagcatagacacgacagacacggtcctcgccatcttctgttgagtactggtcggaacaagaggatcgtctgtagacaggctacagattgttttagattgaagtttcctgtcatgttcactcatctttaaatcctcatagtgaaaaaggatatgatcatcgtggcgcatgtattactcatccttttgggggccactgagatactgcaagctgacttacttcctgatgaaaagatttcacttctcccacctgtcaatttcaccattaaagttactggtttggctcaagttcttttacaatggaaaccaaatcctgatcaagagcaaaggaatgttaatctagaatatcaagtgaaaataaacgctccaaaagaagatgactatgaaaccagaatcactgaaagcaaatgtgtaaccatcctccacaaaggcttttcagcaagtgtgcggaccatcctgcagaacgaccactcactactggccagcagctgggcttctgctgaacttcatgccccaccagggtctcctggaacctcaattgtgaatttaacttgcaccacaaacactacagaagacaattattcacgtttaaggtcataccaagtttcccttcactgcacctggcttgttggcacagatgcccctgaggacacgcagtattttctctactataggtatggctcttggactgaagaatgccaagaatacagcaaagacacactggggagaaatatcgcatgctggtttcccaggacttttatcctcagcaaagggcgtgactggcttgcggtgcttgttaacggctccagcaagcactctgctatcaggccctttgatcagctgtttgcccttcacgccattgatcaaataaatcctccactgaatgtcacagcagagattgaaggaactcgtctctctatccaatgggagaaaccagtgtctgcttttccaatccattgctttgattatgaagtaaaaatacacaatacaaggaatggatatttgcagatagaaaaattgatgaccaatgcattcatctcaataattgatgatctttctaagtacgatgttcaagtgagagcagcagtgagctccatgtgcagagaggcagggctctggagtgagtggagccaacctatttatgtgggtaagtagcttatgtttattttacattggcagccttccttgtgatcaaaaaaggtaatcccagaaacgtacccgttcactcgtgggtcttaaaatggtttcatatctctattgtgactaattttctctcggtctactgccttttcaatcaggaatagatttgccatgaagccagtgaagtttttaagtgtctaggcttctcattagcgccaactctcctagacctggtgcctgttttttttccaagttttgtttctacttctatccattttttaaattaaactttttattttgaaataattatcacactcacaagctgtgggaagaaataatagagatcctgtgtctctttcatccagttttcctcaagggtaacatcttacaaaactatagtacaatagtggaatagaatattggtgtt

SEQ ID NO: 251737 - DNA, 1389 bp, Artificial Sequence
  derived and/or modified sequence
ctgccgctgcttctcatcgcatggccaccgcatttctcaggccaggcacattgagcattggtcctgtgcctgacgctatgctagatgctggggttgcagccacgagcatagacacgacagacacggtcctcgccatcttctgttgagtactggtcggaacaagaggatcgtctgtagacaggatatgatcatcgtggcgcatgtattactcatccttttgggggccactgagatactgcaagctgacttacttcctgatgaaaagatttcacttctcccacctgtcaatttcaccattaaagttactggtttggctcaagttcttttacaatggaaaccaaatcctgatcaagagcaaaggaatgttaatctagaatatcaagtgaaaataaacgctccaaaagaagatgactatgaaaccagaatcactgaaagcaaatgtgtaaccatcctccacaaaggcttttcagcaagtgtgcggaccatcctgcagaacgaccactcactactggccagcagctgggcttctgctgaacttcatgccccaccagggtctcctggaacctcaattgtgaatttaacttgcaccacaaacactacagaagacaattattcacgtttaaggtcataccaagtttcccttcactgcacctggcttgttggcacagatgcccctgaggacacgcagtattttctctactataggtatggctcttggactgaagaatgccaagaatacagcaaagacacactggggagaaatatcgcatgctggtttcccaggacttttatcctcagcaaagggcgtgactggcttgcggtgcttgttaacggctccagcaagcactctgctatcaggccctttgatcagctgtttgcccttcacgccattgatcaaataaatcctccactgaatgtcacagcagagattgaaggaactcgtctctctatccaatgggagaaaccagtgtctgcttttccaatccattgctttgattatgaagtaaaaatacacaatacaaggaatggatatttgcagatagaaaaattgatgaccaatgcattcatctcaataattgatgatctttctaagtacgatgttcaagtgagagcagcagtgagctccatgtgcagagaggcagggctctggagtgagtggagccaacctatttatgtgggtaagtagcttatgtttattttacattggcagccttccttgtgatcaaaaaaggtaatcccagaaacgtacccgttcactcgtgggtcttaaaatggtttcatatctctattgtgactaattttctctcggtctactgccttttcaatcaggaatagatttgccatgaagccagtgaagtttttaagtgtctaggcttctcattagcgcca

SEQ ID NO: 251738 - DNA, 1002 bp, Artificial Sequence
  derived and/or modified sequence
atgatcatcgtggcccacgtgctgctgatcctgctgggcgccacagagatcctgcaggccgacctgctgcctgatgagaagatcagcctgctgccccctgtgaacttcaccatcaaggtgacaggcctggcccaggtgctgctgcagtggaagcccaacccagaccaggagcagagaaatgtgaacctggagtaccaggtgaagatcaatgcccccaaggaggatgattatgagacccgcatcacagagagcaaatgtgtgaccatcctgcacaagggcttcagcgcctctgtgaggaccatcctgcagaatgaccacagcctgctggccagctcctgggccagcgctgagctgcacgcccctcctggcagccctggcaccagcatcgtgaacctgacctgcaccaccaacaccacagaggacaactacagccggctgcggagctaccaggtgtccctgcactgcacctggctggtgggcacagatgcccctgaggacacccagtacttcctgtactaccgctatggctcctggacagaggagtgccaggagtacagcaaggacaccctgggcaggaacatcgcctgctggttccccaggaccttcatcctgagcaagggccgggactggctggccgtgctggtgaatggcagcagcaagcacagcgccatccggccctttgaccagctgtttgccctgcacgccatcgaccagatcaacccccccctgaatgtgacagctgagattgagggcacccggctgagcatccagtgggagaagcctgtgtctgccttccccatccactgctttgattatgaggtgaagatccacaacaccagaaatggctacctgcagatcgagaagctgatgaccaatgccttcatcagcatcattgatgacctgagcaaatatgatgtgcaggtgcgggctgctgtgtcctccatgtgccgggaggccggcctgtggagcgagtggagccagcccatctacgtgggcaagtag

SEQ ID NO: 251739 - DNA, 1002 bp, Artificial Sequence
  derived and/or modified sequence
atgatcatcgtggcccacgtgctgctgatcctgctgggcgccaccgagattctccaggccgatctcctgcccgatgaaaaaatctcgctgctgcccccggtcaacttcactattaaagttaccggcctcgcccaggtcttactgcagtggaagcctaaccccgaccaggagcagagaaatgttaacttagaatatcaagtgaaaatcaatgcccctaaagaagacgattatgagacccggatcaccgagtcgaaatgcgtgacaattttgcataagggattcagcgcatcagtgagaactattttgcagaacgatcacagcctacttgcttcgagctgggcctccgcagaattgcacgccccccccgggagcccaggcacaagcatagttaacctgacatgcaccaccaatactactgaggacaactacagccgactgcgcagttaccaagtgtccctgcactgcacctggctggtaggcacagacgcacccgaggatacccagtacttcttatactatcgttatggcagctggacagaggaatgccaggagtattcaaaagacaccttgggacgcaatatcgcctgctggttccctaggacattcattctatccaagggtagagactggttggcagttctggtcaacggttcctctaagcatagcgcaattcggccttttgaccagctttttgccctgcacgccatcgatcagatcaatcccccgctgaatgtgacagccgaaatcgagggcaccaggctcagcatacagtgggagaagccagtgtcagcctttcccatccattgctttgattatgaagtcaaaatccataatacaagaaacgggtacctgcagattgagaaactgatgacaaatgccttcatatccattatcgatgatctgtccaagtacgatgttcaggttcgcgccgcagtcagttcaatgtgcagagaagccggcctgtggtccgagtggagtcaaccaatttatgtcggtaagtag

SEQ ID NO: 251740 - DNA, 1002 bp, Artificial Sequence
  derived and/or modified sequence
atgatcatcgtggcccacgtgctgctgatcctgctgggcgccaccgagattttgcaggcagacctgctacctgatgagaaaatttcactcttacctccagttaacttcacaattaaagtgaccggcctggcacaagtgttgttgcagtggaaacccaaccccgaccaggagcaacgcaatgtgaacctagaatatcaagtgaaaattaatgcgcctaaagaagacgattacgagacacggatcacggagagtaagtgtgtaaccattctacacaaaggattctctgcaagcgtccgtaccatcctccagaatgaccattccttgctggctagcagctgggccagcgccgaactccatgccccccccggcagccccggaaccagcatcgtgaacctgacgtgcactaccaacacgaccgaggataattactcccgcctccgtagctatcaggtgtccctgcactgcacctggcttgttggcactgacgcaccggaggatacacagtacttcctttattaccgttacggctcatggacagaggagtgccaagagtattccaaagatacattgggacgaaacatagcctgttggttccctaggacatttattttgagtaagggtagggattggcttgcagtgttagtaaacggctccagcaagcatagtgctattcgcccatttgatcagttgttcgcattacatgctattgaccagattaacccaccacttaatgtgaccgctgagattgagggcacaagactcagtatacaatgggaaaaacctgtgtccgctttcccaattcactgcttcgattatgaggttaaaattcataacacacggaatggatacctgcagattgaaaagctgatgaccaacgcatttatctcgatcatcgacgacttgtcgaaatatgatgtgcaggtacgagctgcagtgtccagcatgtgcagggaggcaggactctggtcggagtggtcgcaacccatctacgtgggaaagtag

SEQ ID NO: 251741 - DNA, 1002 bp, Artificial Sequence
  derived and/or modified sequence
atgattatcgtggcccacgtgctacttatattgcttggcgctaccgagatacttcaggccgacttgctgccagacgagaaaatcagtttgctgcctcccgtgaactttacgataaaggttaccgggctggcccaggttctactgcagtggaaacctaaccctgatcaggaacagagaaacgtcaacttggaataccaggtgaaaatcaacgccccaaaagaggacgactacgagactagaatcactgaatctaaatgcgtgacaatcctgcacaaaggcttttcagcgtccgtgcgcaccatcctgcaaaacgaccattccctcctggcgtcaagctgggcgtctgctgagctgcacgctcccccaggttctcccggaacctccatagtcaacttaacctgtacaacaaacaccactgaagacaactattcccgcttgagaagttatcaggtaagcctgcactgcacttggctggtggggactgatgctcctgaggacacacagtactttctctattaccggtatggatcctggactgaggaatgccaagaatactctaaagatacgttggggagaaacatcgcctgttggttcccacgcacattcatattgtctaaaggacgggattggttagcagtcctggtgaacggcagtagcaagcatagcgcaattaggcccttcgaccagctgttcgcactccacgcaatcgaccaaatcaacccacctttgaacgttacagctgagatcgaagggactaggctgagtatccagtgggaaaagccagtgagcgcttttcctatacattgtttcgattacgaggtcaagattcacaacaccaggaacgggtatctccagatcgaaaagcttatgacgaacgccttcatatcgattatcgacgacctgtcaaagtacgacgtgcaggtcagagcagccgtgagcagcatgtgccgagaggcaggcctttggtctgagtggagccagcccatctacgtgggtaaatag

SEQ ID NO: 251742 - DNA, 1002 bp, Artificial Sequence
  derived and/or modified sequence
atgataattgtggcccacgtactcttaatcttgctaggagccacggaaatccttcaggccgacctccttcctgacgaaaaaatttccctgttaccgcctgtcaattttacaatcaaagtgaccggcttagcacaagtgttgttgcaatggaaaccaaatcctgaccaggagcaacgcaatgtaaatttagagtaccaggtcaagattaacgctcccaaggaggacgactatgaaacccgcatcactgagtccaaatgcgtgactattctgcacaaggggttcagtgctagtgtgaggacaatcctccagaatgaccatagcctcctggccagcagctgggcatccgctgagctgcacgctccccctgggagccccggaacaagcattgtaaacctgacatgtaccacaaacactactgaggacaattactcgagattgcggtcttatcaggtctctctccattgcacatggctagttggcacggatgctcccgaagatacacagtattttctctactataggtacggatcatggaccgaggagtgccaggaatactcgaaggacacactgggtcggaacattgcgtgttggtttcccaggacatttatcctgagtaagggcagagattggcttgccgtgctcgtgaatgggagttctaaacatagcgctatccgcccttttgatcagcttttcgccctccacgctattgaccagattaacccacctctcaatgtgacagccgagatcgagggaacgagactctctatacagtgggagaaacctgtcagtgctttccccattcattgttttgactacgaagtgaagatacacaacacccgcaatggctatctgcaaatagaaaagctcatgacaaatgcgttcattagcataatcgatgacttgagtaaatacgatgtgcaagttagagctgccgtatccagtatgtgcagggaggcgggactatggtctgaatggtcacaaccaatttatgtcggtaaatag

SEQ ID NO: 251743 - DNA, 1002 bp, Artificial Sequence
  derived and/or modified sequence
atgatcatcgtggcccacgtgctgctgatcctgctgggcgccaccgagatcctgcaggccgacctgctgcccgacgagaagatcagcctgctgccccccgtgaacttcaccatcaaggtgaccggcctggcccaggtgctgctgcagtggaagcccaaccccgaccaggagcagagaaacgtgaacctggagtaccaggtgaagatcaacgcccccaaggaggacgactacgagaccagaatcaccgagagcaagtgcgtgaccatcctgcacaagggcttcagcgccagcgtgagaaccatcctgcagaacgaccacagcctgctggccagcagctgggccagcgccgagctgcacgccccccccggcagccccggcaccagcatcgtgaacctgacctgcaccaccaacaccaccgaggacaactacagcagactgagaagctaccaggtgagcctgcactgcacctggctggtgggcaccgacgcccccgaggacacccagtacttcctgtactacagatacggcagctggaccgaggagtgccaggagtacagcaaggacaccctgggcagaaacatcgcctgctggttccccagaaccttcatcctgagcaagggcagagactggctggccgtgctggtgaacggcagcagcaagcacagcgccatcagacccttcgaccagctgttcgccctgcacgccatcgaccagatcaacccccccctgaacgtgaccgccgagatcgagggcaccagactgagcatccagtgggagaagcccgtgagcgccttccccatccactgcttcgactacgaggtgaagatccacaacaccagaaacggctacctgcagatcgagaagctgatgaccaacgccttcatcagcatcatcgacgacctgagcaagtacgacgtgcaggtgagagccgccgtgagcagcatgtgcagagaggccggcctgtggagcgagtggagccagcccatctacgtgggcaagtag

SEQ ID NO: 251744 - protein, 335 aa, Artificial Sequence
  derived and/or modified sequence
MIIVAHVLLILLGATEILQADLLPDEKISLLPPVNFTIKVTGLAQVLLQWKPNPDQEQRNVNLEYQVKINAPKEDDYETRITESKCVTILHKGFSASVRTILQNDHSLLASSWASAELHAPPGSPGTSIVNLTCTTNTTEDNYSRLRSYQVSLHCTWLVGTDAPEDTQYFLYYRYGSWTEECQEYSKDTLGRNIACWFPRTFILSKGRDWLAVLVNGSSKHSAIRPFDQLFALHAIDQINPPLNVTAEIEGTRLSIQWEKPVSAFPIHCFDYEVKIHNTRNGYLQIEKLMTNAFISIIDDLSKYDVQVRAAVSSMCREAGLWSEWSQPIYVGFSR

SEQ ID NO: 251745 - protein, 109 aa, Artificial Sequence
  derived and/or modified sequence
MIIVAHVLLILLGATEILQADLLPDEKISLLPPVNFTIKVTGLAQVLLQWKPNPDQEQRNVNLEYQVKINAPKEDDYETRITESKCVTILHKGFSASVRTILQNDHSLL

SEQ ID NO: 251746 - protein, 211 aa, Artificial Sequence
  derived and/or modified sequence
MIIVAHVLLILLGATEILQADLLPDEKISLLPPVNFTIKVTGLAQVLLQWKPNPDQEQRNVNLEYQVKINAPKEDDYETRITESKCVTILHKGFSASVRTILQNDHSLLASSWASAELHAPPGNDEHKPLREWFVIVIMATICFILLILSLICKICHLWIKLFPPIPAPKSNIKDLFVTTNYEKAGSSETEIEVICYIEKPGVETLEDSVF

SEQ ID NO: 251747 - DNA, 1008 bp, Artificial Sequence
  derived and/or modified sequence
atgattatcgttgcccacgtcctcctgatcctcctgggagccacagaaatcttacaggccgacttgttgccagatgagaaaatttcactgctgccgcccgtcaactttactattaaggtcacgggcctggctcaggtcctgctgcaatggaagccgaacccagatcaagagcagagaaacgtcaatttggaatatcaagtaaagatcaatgcccccaaagaggatgattacgagacaaggattaccgagtcgaaatgcgttacaattctccataaagggttttctgcaagtgtgcgcaccattctacagaacgatcactctcttctggccagttcatgggcctcagccgaattacatgctcctccgggatctccagggacttcgattgtgaacctgacttgtacaaccaatacaacagaggacaactactcccgcttgagatcataccaggttagtctgcactgcacctggctcgtgggcaccgacgctcccgaggacactcagtacttcctgtactacagatacggctcctggaccgaggaatgtcaagaatatagcaaggatacactgggtcgcaacatcgcttgttggtttcctcggacttttatactgagcaaggggcgtgattggctcgcagtgttggtaaacggctcatctaagcattctgctatccggccttttgaccagctgttcgcacttcacgccattgaccagattaaccccccactgaatgttaccgccgaaatcgagggcactcgtcttagcatccaatgggaaaagcctgtctcagctttcccaatacattgtttcgactacgaagtcaaaatacataatactagaaatgggtatctgcagatcgaaaagctgatgaccaatgccttcatctctatcatcgatgacctaagcaaatacgatgttcaagtgcgggctgccgtgtcgagcatgtgccgcgaagccggcctctggagcgagtggagccagcctatctacgtgggcttctcacggtag

SEQ ID NO: 251748 - DNA, 1008 bp, Artificial Sequence
  derived and/or modified sequence
atgatcattgtcgcccacgtgctactcattctactcggggctactgagatcctgcaagccgacctcctgccagacgaaaaaatctcactcctccctccggtgaattttactatcaaagtcacgggcctcgcccaggtgctgttgcagtggaagcctaaccctgatcaggagcagcggaacgttaacctggaataccaggtcaagattaacgccccaaaggaagatgattatgagacacggattacagaatccaagtgtgtcacgattctgcacaagggattctctgcatccgtcagaactatcttgcagaatgatcatagcctcctggcctcgtcctgggccagcgccgaactgcacgcgcctccagggtcccctggaacctctattgtcaatctgacctgcaccaccaatacaaccgaggacaattattctcgccttcgatcatatcaggtgagcctccattgtacatggttagtagggacagacgcgcctgaggacacccagtacttcttgtattaccgctacggaagctggactgaagaatgtcaggagtatagtaaggatacactcggacggaatatcgcctgctggttccccagaaccttcattctgtccaagggccgcgattggctggcagtgcttgtcaatggcagcagcaaacactcagctatcaggccatttgaccagctgtttgctcttcacgcaatagaccaaattaaccccccgctaaacgtgacagccgaaatcgaaggaacacgcttaagcatccagtgggagaagcccgtatccgcctttcctattcactgctttgactatgaggtgaagatccacaacacccggaatgggtacctccagatcgagaaactgatgaccaacgcatttattagtatcattgacgacctgtcgaagtatgatgtgcaggtgcgtgcagctgtgtcatccatgtgcagagaggccggcctgtggagcgagtggtcccagcctatttacgtgggattcagtcgctag

SEQ ID NO: 251749 - DNA, 1328 bp, Artificial Sequence
  derived and/or modified sequence
ccgctgcttctcatcgcatggccaccgcatttctcaggccaggcacattgagcattggtcctgtgcctgacgctatgctagatgctggggttgcagccacgagcatagacacgacagacacggtcctcgccatcttctgttgagtactggtcggaacaagaggatcgtctgtagacaggctacagattgttttagattgaagtttcctgtcatgttcactcatctttaaatcctcatagtgaaaaaggatatgatcatcgtggcgcatgtattactcatccttttgggggccactgagatactgcaagctgacttacttcctgatgaaaagatttcacttctcccacctgtcaatttcaccattaaagttactggtttggctcaagttcttttacaatggaaaccaaatcctgatcaagagcaaaggaatgttaatctagaatatcaagtgaaaataaacgctccaaaagaagatgactatgaaaccagaatcactgaaagcaaatgtgtaaccatcctccacaaaggcttttcagcaagtgtgcggaccatcctgcagaacgaccactcactactggccagcagctgggcttctgctgaacttcatgccccaccagggtctcctggaacctcaattgtgaatttaacttgcaccacaaacactacagaagacaattattcacgtttaaggtcataccaagtttcccttcactgcacctggcttgttggcacagatgcccctgaggacacgcagtattttctctactataggtatggctcttggactgaagaatgccaagaatacagcaaagacacactggggagaaatatcgcatgctggtttcccaggacttttatcctcagcaaagggcgtgactggcttgcggtgcttgttaacggctccagcaagcactctgctatcaggccctttgatcagctgtttgcccttcacgccattgatcaaataaatcctccactgaatgtcacagcagagattgaaggaactcgtctctctatccaatgggagaaaccagtgtctgcttttccaatccattgctttgattatgaagtaaaaatacacaatacaaggaatggatatttgcagatagaaaaattgatgaccaatgcattcatctcaataattgatgatctttctaagtacgatgttcaagtgagagcagcagtgagctccatgtgcagagaggcagggctctggagtgagtggagccaacctatttatgtggggttctcaagataaaggagataacatccagctttcctgccccacaccgtatctgaaataaaaacaacagcagggatagcagatt

SEQ ID NO: 251750 - DNA, 1828 bp, Artificial Sequence
  derived and/or modified sequence
agtacccacggaaaacttgtttaccttgtcaccatgagtaaaagttaattcccactcctgaagagagcaaaccaactctgaaagagagtgaaaatgcagacaagacagttatcagataatggctatctggacgagagattctttcgtttgacagcagtttggttgttgggagttccagttcagctcctgcacagttgctctgtacaaatcctcctccatatttgcttagagaaaacgtgttgccatcccatcatgaaggaagctgcctgagagtttttaaccattacagccgtgatgatgaaagagtgaagaaccgcctctaagttaaaaagtgcacccagagataaggttcgttctcaatgccctgccgctgcttctcatcgcatggccaccgcatttctcaggccaggcacattgagcattggtcctgtgcctgacgctatgctagatgctggggttgcagccacgagcatagacacgacagacacggtcctcgccatcttctgttgagtactggtcggaacaagaggatcgtctgtagacaggatatgatcatcgtggcgcatgtattactcatccttttgggggccactgagatactgcaagctgacttacttcctgatgaaaagatttcacttctcccacctgtcaatttcaccattaaagttactggtttggctcaagttcttttacaatggaaaccaaatcctgatcaagagcaaaggaatgttaatctagaatatcaagtgaaaataaacgctccaaaagaagatgactatgaaaccagaatcactgaaagcaaatgtgtaaccatcctccacaaaggcttttcagcaagtgtgcggaccatcctgcagaacgaccactcactactggccagcagctgggcttctgctgaacttcatgccccaccagggtctcctggaacctcaattgtgaatttaacttgcaccacaaacactacagaagacaattattcacgtttaaggtcataccaagtttcccttcactgcacctggcttgttggcacagatgcccctgaggacacgcagtattttctctactataggtatggctcttggactgaagaatgccaagaatacagcaaagacacactggggagaaatatcgcatgctggtttcccaggacttttatcctcagcaaagggcgtgactggcttgcggtgcttgttaacggctccagcaagcactctgctatcaggccctttgatcagctgtttgcccttcacgccattgatcaaataaatcctccactgaatgtcacagcagagattgaaggaactcgtctctctatccaatgggagaaaccagtgtctgcttttccaatccattgctttgattatgaagtaaaaatacacaatacaaggaatggatatttgcagatagaaaaattgatgaccaatgcattcatctcaataattgatgatctttctaagtacgatgttcaagtgagagcagcagtgagctccatgtgcagagaggcagggctctggagtgagtggagccaacctatttatgtggggttctcaagataaaggagataacatccagctttcctgccccacaccgtatctgaaataaaaacaacagcagggatagcagattacatgtgttttttaatttttatttattttgccaagcactatgctaaatacataatcttagtcctatcaaaaaacttgtttggaaagtttaggtaattggcttaactctgttctgcatggccaacaagtggcagggatggggctctaaccccagattaactgactctagcacttgatctctggacactctggcatggtgggac

SEQ ID NO: 251751 - DNA, 1008 bp, Artificial Sequence
  derived and/or modified sequence
atgatcatcgtggcccacgtgctgctgatcctgctgggcgccacagagatcctgcaggccgacctgctgcctgatgagaagatcagcctgctgccccctgtgaacttcaccatcaaggtgacaggcctggcccaggtgctgctgcagtggaagcccaacccagaccaggagcagagaaatgtgaacctggagtaccaggtgaagatcaatgcccccaaggaggatgattatgagacccgcatcacagagagcaaatgtgtgaccatcctgcacaagggcttcagcgcctctgtgaggaccatcctgcagaatgaccacagcctgctggccagctcctgggccagcgctgagctgcacgcccctcctggcagccctggcaccagcatcgtgaacctgacctgcaccaccaacaccacagaggacaactacagccggctgcggagctaccaggtgtccctgcactgcacctggctggtgggcacagatgcccctgaggacacccagtacttcctgtactaccgctatggctcctggacagaggagtgccaggagtacagcaaggacaccctgggcaggaacatcgcctgctggttccccaggaccttcatcctgagcaagggccgggactggctggccgtgctggtgaatggcagcagcaagcacagcgccatccggccctttgaccagctgtttgccctgcacgccatcgaccagatcaacccccccctgaatgtgacagctgagattgagggcacccggctgagcatccagtgggagaagcctgtgtctgccttccccatccactgctttgattatgaggtgaagatccacaacaccagaaatggctacctgcagatcgagaagctgatgaccaatgccttcatcagcatcattgatgacctgagcaaatatgatgtgcaggtgcgggctgctgtgtcctccatgtgccgggaggccggcctgtggagcgagtggagccagcccatctacgtgggcttcagcaggtag

SEQ ID NO: 251752 - DNA, 1008 bp, Artificial Sequence
  derived and/or modified sequence
atgatcatcgtggcccacgtgctgctgatcctgctgggcgccaccgaaattctgcaggctgacctgttaccagacgagaagatctcccttctgccaccagtgaatttcaccattaaggtgactgggctggcccaagtactgctccagtggaaaccaaacccggatcaggagcagcggaacgtcaatttagagtatcaagtgaaaatcaatgctccaaaggaagatgactacgagaccaggatcaccgaatccaaatgtgtaacaatcctgcacaaaggcttcagtgctagtgtcagaactattctccaaaatgatcattctctgctcgcctcctcttgggcctctgccgaactgcatgcacctccgggttcaccaggcacgtctatcgtcaatcttacctgtaccactaataccactgaggacaattatagtcgactgcgaagctatcaagtcagcctgcattgtacctggctggttggcactgacgcaccggaggacacgcagtacttcctgtactaccggtacggttcttggaccgaggaatgccaagagtattccaaggacacactcgggagaaacattgcctgctggtttcctaggacattcatactatctaaagggagagattggttagccgtactcgtgaatggctcctcaaagcacagcgccattagaccattcgaccaactgttcgctttacatgccatcgaccagattaacccacctctgaacgtcaccgccgagattgaaggtactagactctcgatccagtgggagaagcctgtttcagcttttccaattcattgtttcgactatgaagtaaagatccacaacacacgcaatggctacctacaaatcgagaaactcatgacaaatgccttcatctcgatcattgacgacctgtcaaaatacgacgtccaagtgagggcagcagtgtcctctatgtgtagagaggccggcctgtggtcagagtggagccagccaatttacgtgggattctccaggtag

SEQ ID NO: 251753 - DNA, 1008 bp, Artificial Sequence
  derived and/or modified sequence
atgatcatcgtggcccacgtgctgctgatcctgctgggcgccaccgaaatcctgcaggctgatttactgccggacgagaaaatctccctgttgccacctgtgaacttcaccatcaaggttactggtctggcacaagtgttgctccagtggaagcccaatcctgatcaggaacagaggaacgtaaatctggaatatcaggttaagattaacgcgcccaaggaggatgactacgagacacgaatcacagaatccaaatgcgtgactatacttcacaaaggcttttccgcctcagtgagaaccattctgcagaatgaccactccctcttggcctccagttgggcctctgcagagttgcacgcccctcctggtagcccagggacaagtatcgtcaaccttacatgcacaaccaacaccaccgaggacaactactcccggctgaggagctatcaggtctccctgcattgcacttggctagtcggtacagatgcccccgaagacacccagtacttcctgtactacaggtacggcagctggaccgaagagtgccaggaatatagcaaagacaccctaggcagaaatatcgcatgctggttcccaagaactttcattctgtctaagggcagagactggctggcagtcctggtcaacggctcctctaagcattccgcaatcagaccgtttgaccaactgtttgctcttcacgccatagaccaaattaacccgcccttgaatgtcaccgccgaaatagagggtaccaggctctccatccaatgggagaagccagtttcggcattccccatacactgcttcgactatgaagttaaaatacataatacaagaaacggctatcttcagatagagaaacttatgacgaatgccttcatcagcatcattgatgatctgagcaaatacgacgtccaggtgcgcgccgccgtttcctctatgtgcagagaagccgggctgtggtctgaatggtcccagccgatctacgtgggcttttccaggtag

SEQ ID NO: 251754 - DNA, 1008 bp, Artificial Sequence
  derived and/or modified sequence
atgataattgtcgctcacgttctgcttatacttctgggggctaccgagatcctccaggccgacctgttaccggatgagaaaatttccctgctcccacctgtcaactttacaatcaaagtcacaggtctggcccaggttctcttgcagtggaaacctaaccccgaccaggaacagcgcaacgttaaccttgagtatcaggtcaagatcaacgcccctaaggaggacgattatgagacacgaattacagagagcaagtgcgtgaccatactgcataaggggttctcagccagcgtgaggaccatcctgcagaatgatcatagcctgttggcctcttcatgggctagcgctgagctccacgcccctccaggttcgccgggtacaagcatcgtgaatctgacctgtacaactaataccactgaggataattactctcgtcttagaagctaccaggtgtctctccactgtacatggcttgttggcacggatgctccggaggacacccagtattttctttactatcgctatgggagttggacagaagaatgccaagagtactctaaggatacactggggagaaatattgcctgctggttccctcggacattcattctctcgaaaggacgcgactggctggccgtgctggtgaacggaagctctaagcatagcgccatccggccttttgaccagctcttcgctctgcacgcaatcgaccagatcaatcccccattgaacgtcacggcagagatcgagggcacaaggctgagcatccagtgggaaaaacctgtgagtgccttcccgatacactgttttgattacgaagttaagattcataacaccaggaacggctatcttcagatcgagaaactaatgacaaacgctttcatatctatcatcgacgatttgagtaaatatgatgtgcaggttcgcgctgcagtttccagcatgtgcagagaggccggactctggtccgagtggagccagcccatctatgtgggttttagtcgctag

SEQ ID NO: 251755 - DNA, 1008 bp, Artificial Sequence
  derived and/or modified sequence
atgatcatcgtggcacatgttctgctcatcctcctcggcgctacagagattcttcaggcggacctacttcccgacgagaaaatcagtcttttgccccctgttaattttaccattaaggttaccggactcgcccaggtgcttttacagtggaaacccaaccctgatcaagagcagcggaatgtgaatttggaataccaagtgaagatcaatgcaccaaaagaagatgactatgagaccaggatcactgagagtaaatgtgtcaccatccttcataaggggttctccgccagcgtgagaaccatcttgcagaacgaccactcactccttgccagtagttgggcaagcgcggagttacacgctcccccaggctcacccggtacatctattgtgaacttgacatgcactactaatactactgaagacaattattcaagactaaggagttatcaggtttccctgcactgcacctggctggtgggtacagatgcccctgaggatacccagtacttcctctactacagatatggaagctggactgaagaatgccaggaatactcaaaagacactctgggcaggaatatcgcttgctggtttcctagaacattcatcctaagcaaaggtcgggattggctggcagtgcttgtgaacggatcctctaagcactctgctataagaccttttgatcagttgtttgcgctccacgcaatcgaccagataaacccacccctgaatgtgactgccgagattgagggaacgcgactgtctattcaatgggagaagcccgtgagtgccttccctatacactgtttcgactacgaggtgaaaatccataatacacgtaatggatacttgcagattgagaaactaatgacaaacgcattcatttccattattgacgacctaagtaagtatgacgtccaggtcagggcagctgttagcagcatgtgccgcgaggcaggattgtggagcgagtggtctcagccaatctatgtcggcttcagtcgctag

SEQ ID NO: 251756 - DNA, 1008 bp, Artificial Sequence
  derived and/or modified sequence
atgatcatcgtggcccacgtgctgctgatcctgctgggcgccaccgagatcctgcaggccgacctgctgcccgacgagaagatcagcctgctgccccccgtgaacttcaccatcaaggtgaccggcctggcccaggtgctgctgcagtggaagcccaaccccgaccaggagcagagaaacgtgaacctggagtaccaggtgaagatcaacgcccccaaggaggacgactacgagaccagaatcaccgagagcaagtgcgtgaccatcctgcacaagggcttcagcgccagcgtgagaaccatcctgcagaacgaccacagcctgctggccagcagctgggccagcgccgagctgcacgccccccccggcagccccggcaccagcatcgtgaacctgacctgcaccaccaacaccaccgaggacaactacagcagactgagaagctaccaggtgagcctgcactgcacctggctggtgggcaccgacgcccccgaggacacccagtacttcctgtactacagatacggcagctggaccgaggagtgccaggagtacagcaaggacaccctgggcagaaacatcgcctgctggttccccagaaccttcatcctgagcaagggcagagactggctggccgtgctggtgaacggcagcagcaagcacagcgccatcagacccttcgaccagctgttcgccctgcacgccatcgaccagatcaacccccccctgaacgtgaccgccgagatcgagggcaccagactgagcatccagtgggagaagcccgtgagcgccttccccatccactgcttcgactacgaggtgaagatccacaacaccagaaacggctacctgcagatcgagaagctgatgaccaacgccttcatcagcatcatcgacgacctgagcaagtacgacgtgcaggtgagagccgccgtgagcagcatgtgcagagaggccggcctgtggagcgagtggagccagcccatctacgtgggcttcagcagatag

SEQ ID NO: 251757 - protein, 201 aa, Artificial Sequence
  derived and/or modified sequence
MAATALLEAGLARVLFYPTLLYTLFRGKVPGRAHRDWYHRIDPTVLLGALPLRSLTRQLVQDENVRGVITMNEEYETRFLCNSSQEWKRLGVEQLRLSTVDMTGIPTLDNLQKGVQFALKYQSLGQCVYVHCKAGRSRSATMVAAYLIQVHKWSPEEAVRAIAKIRSYIHIRPGQLDVLKEFHKQITARATKDGTFVISKT

SEQ ID NO: 251758 - DNA, 606 bp, Artificial Sequence
  derived and/or modified sequence
atggccgccaccgccctgctggaggccggcctggccagagtgctgttctaccccaccctgctgtacaccctgttcagaggcaaggtgcccggcagagcccacagagactggtaccacagaatcgaccccaccgtgctgctgggcgccctgcccctgagaagcctgaccagacagctggtgcaggacgagaacgtgagaggcgtgatcaccatgaacgaggagtacgagaccagattcctgtgcaacagcagccaggagtggaagagactgggcgtggagcagctgagactgagcaccgtggacatgaccggcatccccaccctggacaacctgcagaagggcgtgcagttcgccctgaagtaccagagcctgggccagtgcgtgtacgtgcactgcaaggccggcagaagcagaagcgccaccatggtggccgcctacctgatccaggtgcacaagtggagccccgaggaggccgtgagagccatcgccaagatcagaagctacatccacatcagacccggccagctggacgtgctgaaggagttccacaagcagatcaccgccagagccaccaaggacggcaccttcgtgatcagcaagacctag

SEQ ID NO: 251759 - DNA, 606 bp, Artificial Sequence
  derived and/or modified sequence
atggctgccactgctttactggaggccgggttggcacgcgtacttttttacccaaccctgctgtacacactgtttcgaggaaaggtgccaggtagagctcacagagattggtatcatagaattgaccctactgtacttttgggagccctgcctttaagaagcctaactcggcaactggtgcaggatgaaaacgtccgaggtgtgatcacaatgaacgaggaatacgaaactcgttttctgtgtaattcttctcaggagtggaagcggctaggcgttgagcaacttcgcctgagtaccgtagatatgaccggaattcctacactcgataatcttcagaagggtgtgcagttcgcattaaagtatcagtcgctcggacagtgtgtgtacgtgcactgtaaggccgggagaagcagatcagctactatggtggccgcttacctgatacaggtccacaaatggagccctgaagaagcagttcgcgcaatcgcaaagattagaagctatattcacataaggccaggtcagctggatgtccttaaagagtttcataagcagatcacggcccgggctactaaggacgggacctttgttatcagtaagacttag

SEQ ID NO: 251760 - DNA, 606 bp, Artificial Sequence
  derived and/or modified sequence
atggccgccacagccctgctggaggccggcctggcccgggtgctcttctaccccaccctgctgtacaccctcttccggggcaaggtgcccggccgggcccaccgggactggtaccacagaattgaccccaccgtgctgctgggcgccctgcccctgcggagcctgacccggcagctggtgcaggatgaaaatgtgcggggcgtcatcaccatgaatgaggagtatgagacccgcttcctgtgcaacagcagccaggagtggaagaggctgggcgtggagcagctgcggctgagcacagtggacatgacaggcatccccaccctggacaacctgcagaagggcgtgcagtttgccctgaagtaccagagcctgggccagtgtgtgtatgtgcactgcaaggccggccgcagccgcagcgccaccatggtggccgcctacctgatccaggtgcacaagtggagccctgaggaggccgtgcgggccatcgccaagatccgcagctacatccacatccggcccggccagctggatgtgctgaaggagttccacaagcagatcacagcccgggccaccaaggatggcaccttcgtcatcagcaagacctag

SEQ ID NO: 251761 - DNA, 606 bp, Artificial Sequence
  derived and/or modified sequence
atggccgccaccgccctgctggaggccggcctggcccgggtgctgttttatcccactttgctctataccctctttaggggcaaggtcccagggcgggctcaccgagattggtaccaccgaatcgatcccacagtacttctgggcgccctgcccttgcgctcactgacgcggcagctggtgcaggacgagaacgtcaggggagtgattactatgaatgaagaatatgaaaccagattcttgtgcaatagtagtcaagagtggaaacggcttggcgtcgagcagctcaggctttccactgtggacatgacaggaatccctacactcgacaaccttcaaaaaggagtgcaattcgccctaaaataccagtcattaggtcagtgcgtttacgtgcactgcaaggccggaaggagcagaagcgccaccatggtggcagcctacttaatacaagttcacaaatggagcccagaggaagcagttcgggctatcgccaaaatccggtcctatattcacattcgtcctggtcagttggacgtcctgaaagaatttcacaagcagattactgcgagagctacaaaagacgggacgttcgtcatctctaaaacctag

SEQ ID NO: 251762 - DNA, 768 bp, Artificial Sequence
  derived and/or modified sequence
gtcgccgctgcgccgggccgggatggcggccaccgcgctgctggaggccggcctggcgcgggtgctcttctacccgacgctgctctacaccctgttccgcgggaaggtgccgggtcgggcgcaccgggactggtaccaccgcatcgaccccaccgtgctgctgggcgcgctgccgttgcggagcttgacgcgccagctggtacaggacgagaacgtgcgcggggtgatcaccatgaacgaggagtacgagacgaggttcctgtgcaactcttcacaggagtggaagagactaggagtcgagcagctgcggctcagcacagtagacatgactgggatccccaccttggacaacctccagaagggagtccaatttgctctcaagtaccagtcgctgggccagtgtgtttacgtgcattgtaaggctgggcgctccaggagtgccactatggtggcagcatacctgattcaggtgcacaaatggagtccagaggaggctgtaagagccatcgccaagatccggtcatacatccacatcaggcctggccagctggatgttcttaaagagttccacaagcagattactgcacgggcaacaaaggatgggacttttgtcatttcaaagacatgatgtatggggattagaaagaactcaagacactcctgcttgatacagaacaaaaagagcttaacaggaccaacagggcttaagcccagacttgacgtaacagaaatgtgccaataggtaataggtaatttttctttctctga

SEQ ID NO: 251763 - DNA, 606 bp, Artificial Sequence
  derived and/or modified sequence
atggccgcaacagcattgcttgaggccggtctggcccgtgttctcttctaccctaccttgctctacaccctgttccgagggaaggtgcccggacgggctcacagggattggtaccataggatcgatcctacagtgctcctaggagccctgccactgagaagtttgacacgacagcttgtgcaggacgaaaatgtccgcggagtcattaccatgaacgaagagtacgaaacaagatttctgtgcaactcttcgcaggagtggaagcggctgggcgtggaacagctccgactttcaactgtagatatgactggcatcccaacacttgataatcttcagaagggggtccaattcgccctcaaatatcaatctcttggtcagtgtgtctacgtccactgcaaggcgggtcggtctagaagcgcgaccatggtggccgcatacctcatccaggtgcataaatggagcccggaggaggctgtacgggcaatcgctaaaatccgctcatatatccacatcagaccaggacagttagatgtgctgaaggagtttcacaaacaaattaccgcacgcgcaacaaaggacggcactttcgttatctcaaagacatag

SEQ ID NO: 251764 - protein, 491 aa, Artificial Sequence
  derived and/or modified sequence
MPGARDALCHQALQLLAELCARGALEHDSCQDFIYHLRDRARPRLRDPDISVSLLTLVVTACGLALFGVSLFVSWKLCWVPWRERGLPSGSKDNNQEPLNYMDTETNEQENSEDFLDPPTPCPDSSMKISHTSPDIPLSTQTGIQENCAHGVRVQRQVTEPTSSARHNSIRRQLNLSNPDFNIQQLQKQEQLTGIGRIKPELYKQRSLDNDDGRRSNSKACGKLNFILKYDCDLEQLIVKIHKAVNLPAKDFSGTSDPYVKIYLLPDRKTKHQTKVHRKTLNPVFDEVFLFPVPYNDLEARKLHFSVYDFDRFSRHDLIGQVVVDHFLDLADFPRECILWKDIEYVTNDNVDLGELMFSLCYLPTAGRLTITIIKARNLKAMDITGASDPYVKVSLMCDGRRLKKRKTSTKRNTLNPVYNEAIVFDVPPENIDQIHLSIAVMDYDRVGHNEIIGVCQVGNEAERLGRDHWSEMLSYPRKPIAHWHSLVEKR

SEQ ID NO: 251765 - DNA, 1476 bp, Artificial Sequence
  derived and/or modified sequence
atgcccggcgccagagacgccctgtgccaccaggccctgcagctgctggccgagctgtgcgccagaggcgccctggagcacgacagctgccaggacttcatctaccacctgagagacagagccagacccagactgagagaccccgacatcagcgtgagcctgctgaccctggtggtgaccgcctgcggcctggccctgttcggcgtgagcctgttcgtgagctggaagctgtgctgggtgccctggagagagagaggcctgcccagcggcagcaaggacaacaaccaggagcccctgaactacatggacaccgagaccaacgagcaggagaacagcgaggacttcctggacccccccaccccctgccccgacagcagcatgaagatcagccacaccagccccgacatccccctgagcacccagaccggcatccaggagaactgcgcccacggcgtgagagtgcagagacaggtgaccgagcccaccagcagcgccagacacaacagcatcagaagacagctgaacctgagcaaccccgacttcaacatccagcagctgcagaagcaggagcagctgaccggcatcggcagaatcaagcccgagctgtacaagcagagaagcctggacaacgacgacggcagaagaagcaacagcaaggcctgcggcaagctgaacttcatcctgaagtacgactgcgacctggagcagctgatcgtgaagatccacaaggccgtgaacctgcccgccaaggacttcagcggcaccagcgacccctacgtgaagatctacctgctgcccgacagaaagaccaagcaccagaccaaggtgcacagaaagaccctgaaccccgtgttcgacgaggtgttcctgttccccgtgccctacaacgacctggaggccagaaagctgcacttcagcgtgtacgacttcgacagattcagcagacacgacctgatcggccaggtggtggtggaccacttcctggacctggccgacttccccagagagtgcatcctgtggaaggacatcgagtacgtgaccaacgacaacgtggacctgggcgagctgatgttcagcctgtgctacctgcccaccgccggcagactgaccatcaccatcatcaaggccagaaacctgaaggccatggacatcaccggcgccagcgacccctacgtgaaggtgagcctgatgtgcgacggcagaagactgaagaagagaaagaccagcaccaagagaaacaccctgaaccccgtgtacaacgaggccatcgtgttcgacgtgccccccgagaacatcgaccagatccacctgagcatcgccgtgatggactacgacagagtgggccacaacgagatcatcggcgtgtgccaggtgggcaacgaggccgagagactgggcagagaccactggagcgagatgctgagctaccccagaaagcccatcgcccactggcacagcctggtggagaagagatag

SEQ ID NO: 251766 - DNA, 1476 bp, Artificial Sequence
  derived and/or modified sequence
atgccaggtgccagggacgctttgtgtcaccaggctctccagttgctggctgagttatgcgcccggggagcactggaacacgatagctgccaagatttcatctaccacctgcgagaccgggcccggcctcggttgcgagaccccgatattagtgtgtctttgctgaccttggtggtcactgcttgcgggctagcactcttcggggtctctctgttcgttagctggaagctttgttgggtgccctggcgggagagaggactgccctccgggagtaaggataacaaccaagagccactgaactacatggacactgagacaaacgaacaggaaaacagcgaagactttctggatcccccgacgccctgtccagacagctcaatgaagattagtcacacttctcccgacattccactgtccacacagactggtatccaggagaactgtgctcatggcgtacgggtccagaggcaggttacggaacccacatcatccgcccggcataatagcataaggcgtcagctcaacttgtccaatccagacttcaatatccaacagctccagaaacaggaacaactcactggtatcggcaggatcaagcctgagctgtacaaacagcggtccttggacaacgatgacggcaggcggtcaaactccaaggcttgtgggaaacttaatttcattttgaagtacgactgtgacctggaacaactcattgtgaagattcacaaagccgtgaacctccctgcaaaagactttagcggcacatcagatccgtacgtgaagatttacctgttgccagacaggaagactaagcaccagaccaaagttcaccgcaaaaccttgaatcctgtgtttgatgaagtttttctatttcctgtcccttataatgatcttgaagccaggaaattgcatttcagtgtttatgatttcgaccgattttccagacacgatttgattgggcaggtggttgtcgatcattttcttgatctggccgacttcccccgagaatgcatcctgtggaaagacattgagtacgtgaccaacgataacgtcgacctcggcgagctgatgttctccctgtgttacctgcccactgcaggccgcctaacaattactatcattaaggctcggaatctaaaggcgatggatatcactggagcatcggatccctacgtgaaagtatctttaatgtgcgacggaagacggcttaaaaagagaaagacctccaccaaaaggaacacgctgaaccccgtgtataacgaggccatagtctttgacgttcccccagaaaatatcgaccagatccacctgagcattgcagtgatggattacgacagggtgggccataatgaaattattggagtgtgccaggtgggaaatgaggccgagcgccttggacgggatcattggagcgaaatgctgagttacccaagaaagccaatcgcccactggcattccctggtggagaagagatag

SEQ ID NO: 251767 - DNA, 1476 bp, Artificial Sequence
  derived and/or modified sequence
atgcctggggccagagatgccctgtgccaccaggccctgcagctgctggccgagctgtgtgcccggggggccctggagcatgacagctgccaggacttcatctaccacctgcgggaccgggcccggccccggctgcgggaccctgacatctctgtgtccctgctgaccctggtggtgacagcctgtggcctggccctgtttggagtgtccctgtttgtgtcctggaagctgtgctgggtgccctggagggagcggggcctgcccagcggcagcaaggacaacaaccaggagcccctgaactacatggacacagagaccaatgagcaggagaacagcgaggacttcctggacccccccaccccctgcccagacagctccatgaagatcagccacaccagcccagacatccccctgagcacccagacaggcatccaggagaactgtgcccacggcgtgcgggtgcagaggcaggtgacagagcccaccagcagcgcccggcacaacagcatccggcggcagctgaacctgagcaacccagacttcaacatccagcagctgcagaagcaggagcagctgactggaattggccgcatcaagccagagctgtacaagcagaggagcctggacaatgatgatggccgccgcagcaacagcaaggcctgtgggaagctgaacttcatcctgaagtatgactgtgacctggagcagctgattgtgaagatccacaaggctgtgaacctgcctgccaaggacttcagcggcaccagtgacccctacgtgaagatctacctgctgcctgacaggaagaccaagcaccagaccaaggtgcacaggaagaccctgaaccctgtgtttgatgaggtgttcctgtttcctgtgccctacaatgacctggaggccaggaagctgcacttctctgtgtatgactttgaccgcttcagcagacatgacctgattggccaggtggtggtggaccacttcctggacctggccgacttcccccgggagtgcatcctgtggaaggacattgaatatgtgaccaatgacaacgtggacctgggggagctgatgttcagcctgtgctacctgcccacagctggccgcctgaccatcaccatcatcaaggccaggaacctgaaggccatggacatcactggagccagtgacccctacgtgaaggtgtccctgatgtgtgatggaagaaggctgaagaagaggaagaccagcaccaagaggaacaccctgaaccctgtgtacaatgaggccatcgtgtttgatgtgcccccagagaacatcgaccagatccacctgagcattgctgtgatggactatgacagagtgggccacaatgagatcattggagtgtgccaggtgggcaatgaggccgagcggctgggccgggaccactggagcgagatgctgagctaccccaggaagcccatcgcccactggcacagcctggtggagaagaggtag

SEQ ID NO: 251768 - DNA, 1476 bp, Artificial Sequence
  derived and/or modified sequence
atgcccggcgcccgggacgccctgtgccaccaggccctgcagctgcttgcagagctctgtgccagaggtgcgctcgaacatgactcctgtcaggactttatctatcacctccgcgacagagcgaggcctcgactgagagaccccgacatctcggtgtccctgctgactctcgtggtgaccgcttgcggactggccttatttggcgtgagtttatttgtgtcatggaagttgtgttgggtcccatggagagaacgtggcctgccttctggctccaaggacaacaaccaggaaccactcaattatatggatactgagaccaatgaacaggagaattccgaggattttctggacccgccaactccctgccctgatagttcaatgaaaatctcccatacaagtcctgatatccctctgtctacccaaacagggatacaggagaattgcgctcatggcgtgcgcgtacagcgacaggtaactgagccaaccagctctgctagacataactctatacgccggcagctcaacctctcaaatcccgattttaatatccaacagctgcaaaaacaggaacaattaacagggatcgggcgcatcaagcccgaactgtataaacaacgtagtttggataacgacgatggaagacgttctaactccaaagcttgcggcaagctgaatttcattctcaagtacgactgtgatctggagcaactaatcgtgaagatacataaggccgttaacttgcctgctaaggatttctctgggacaagtgatccttatgtcaagatttatctcctcccagatagaaagaccaagcatcagacaaaagtccacaggaagaccctgaaccccgtttttgacgaagtgttcctttttccagtgccttataacgatctggaggcgagaaagctgcacttcagtgtctacgatttcgatcggttctcccgtcacgacttgatcggccaagtggtggtagatcatttccttgatcttgctgattttccacgcgaatgcatcctttggaaggacattgagtatgtaaccaacgacaatgtcgacttgggtgagttgatgtttagtctgtgctacctcccaaccgccgggaggctgaccatcactataattaaggctcgcaaccttaaggctatggatattaccggggcatcagacccttatgttaaagtctcattgatgtgcgacggcagacggctgaaaaaacgcaagacgagcacaaagaggaataccctgaatccggtgtacaacgaggcaatagtctttgatgtcccccctgaaaatatcgatcagatccacctttctattgcagtcatggactatgatagggtaggccacaatgaaattattggcgtttgtcaggtgggaaacgaggctgagagattaggaagagaccactggtccgaaatgctgtcgtatccacgcaaaccgattgctcattggcatagcctcgtagaaaagaggtag

SEQ ID NO: 251769 - DNA, 1476 bp, Artificial Sequence
  derived and/or modified sequence
atgccaggcgctagggacgcgctgtgccatcaggcgctgcagctgcttgccgagttgtgcgctcgcggagcgttggaacacgacagctgccaggacttcatctaccatctgagagaccgggcaaggccaagactccgcgatcccgacatctctgtctccctacttaccttggtcgttacagcctgtggactggcattgtttggagtgagcctgtttgtgtcctggaaattatgttgggtgccctggagggaacgtgggctgccctccggcagcaaggataacaaccaagagccactgaattacatggatactgagacaaatgagcaagagaacagcgaggactttctggatcccccaactccctgtcccgatagtagcatgaagatttctcacacctcgcctgatatcccgcttagcacacagactgggatacaggagaactgcgcacacggcgtccgggttcagagacaggtgaccgagcccactagtagcgcacggcacaacagcatcagaagacagttaaatctgtccaaccctgactttaacatccagcagcttcagaagcaggaacaactgaccgggatcggacgcatcaaaccagagctttacaagcagcgttccctggataacgatgacggcagaagaagcaacagtaaggcttgcggtaagctgaactttatcttgaaatacgattgtgatctggaacagctcatagtgaaaattcacaaggctgtaaatcttccagccaaggacttctcaggtaccagtgacccttatgtgaaaatctacttactgcccgaccgcaagacaaaacaccaaaccaaggtgcatagaaagacactgaacccagtgttcgatgaagtcttcctcttccctgttccctataatgacttggaggcacgaaagcttcacttctctgtgtacgacttcgatcggttttcgaggcacgacctcatcggacaagtggtcgtcgaccatttccttgacctcgccgacttccccagggaatgtatcctttggaaggatattgagtacgtaacaaacgacaatgtcgatctgggcgagcttatgttttccctatgctatttgccaacggcaggcaggctgaccatcactataataaaggcacgaaatctgaaggctatggacattacaggagcttccgacccttacgtaaaggtgtccctgatgtgtgacggcagaagactgaaaaagaggaaaacctccaccaagagaaataccctcaaccccgtctataatgaggctatcgtgtttgatgtcccaccagagaatatagatcagatccatctaagtatcgccgtgatggactacgaccgcgtgggccacaacgaaattatcggcgtgtgtcaggtgggaaatgaggctgagcggcttggacgggatcattggagtgaaatgttgtcctatcccagaaaacctatcgcccactggcactccttggttgaaaagaggtag

SEQ ID NO: 251770 - DNA, 3955 bp, Artificial Sequence
  derived and/or modified sequence
cggagggaccgggcgggagagagagaaagcctgaccgaccggctggcgaagagctgcatgcaaccggtgggaggccgggccggctgggtctggggctcgggctcaggctcgcaccgtttctcggcaggtccctggcggtgagcgcggacggcccggaggcggcggctctgagctggcaggcggagggctgtctcctgcgcccgcctgcccggcgcggtccgaggatgcgggggggcgatgcccggggccagggacgcgctctgtcaccaggcgctgcagctgctggccgagctctgtgcccgtggggccctggagcacgacagctgccaggatttcatttaccacctgcgggaccgtgccagaccccggctccgcgacccagatatctcagtgagcctgctgacccttgtggtcactgcctgtggtctcgctctctttggcgtgtctctcttcgtatcttggaaactctgctgggttccgtggcgagaacgaggcctgccctctggtagcaaagacaacaaccaggagccccttaactacatggacacagagaccaatgagcaggagaacagtgaggacttcctagatcctcccacgccctgccctgactcctccatgaagatcagccacacctcccctgacattcccctctccacccagacggggatccaggagaactgtgcccatggcgtccgcgtgcagcgccaagtcacagagccaacctcgtcggcccggcataattcaatccgaagacaactcaacttgtcaaacccggacttcaatatccagcagcttcaaaaacaggaacagttgactggaattggtagaattaaaccagagttatataagcagaggtcattggataatgatgacgggagacggagtaacagcaaggcttgtgggaaactgaacttcattttaaaatatgactgtgacttagagcagctcatagtgaagattcacaaagctgtcaatttgcccgccaaggacttttctgggacttcagatccttatgtcaagatctatttgcttcctgatcggaaaacaaaacaccagactaaagttcacagaaagaccctgaaccctgtgtttgatgaagtgtttttatttccggttccctacaatgaccttgaagcacggaagcttcacttctctgtgtacgactttgacaggttctctcgtcatgacttaatcggccaagtggtggtggatcacttcctagacttggctgatttccccagggagtgcatcctttggaaggatatcgaatatgtcaccaatgacaacgtggatctgggagagctgatgttttccctgtgctatcttccaacggctggcaggctgaccattaccattataaaagcaaggaatttaaaggcaatggacataacaggagcatcagatccctatgtgaaagtctcgctgatgtgtgatggcagacgactgaagaagaggaaaacatccaccaagaggaacaccttgaatcctgtttacaacgaagccatagtctttgatgtccctcccgagaacattgaccaaatccacttgtccatagcagtcatggactatgaccgtgtaggtcacaatgagatcatcggcgtgtgtcaagtaggcaacgaggctgagaggctgggcagagaccactggagtgaaatgttgtcatatcctcggaagcccattgcacactggcattccctggtggagaaacgatgaccatgggtaagaggactgcttgtgccaaggacaaaataggacaaccatctcacaaagatcttaagtaactttttccatccagcaacatccagacgatttcagtgaccaaatgctcagctgtaaccacagcactaactggccttctttccagattgggtttggtgaacctgaatggtccagccaccttctgcaggtggcccaaggtgatgtgctgcagggaagcatgtctctcatgccaagaaccaagatcggactatgaacaaaaacaaatgatagatatagtgacagtaccaagagtaccaggactcaatgtttcatatgaagcccttggtgatgaggacatagcatctgccctggaaatcgttattccaacataatattattttctagaatgccctggaaggacagaatatttaaaaatatatccaggtgctaaataggcagcagatctcaattcacacatgactacctttgagctaatgactgtctccagaaaataactgtgccccaagaagtgctccagatttgcaaggaatagccccaagagaataccaagacaagcaggctgttccctggaaaaaatctaatgcaaggagggctagttcacagcaaattcactgcctcctcccatgcacgtggtagagagtaccagtatcaacatggccctgttttctgctaaaaccagattttgaggaatcagagacccccaacactactcactcagtagctagcagccccttcctttcaactgggagtgttattagaatgaaaagtaattagttagaagggcatacatctcagtggcatgagcattgtggaatatcctttcctaggcacattcgtccactaagggaacagcctcagaaactggtacagcaatgggtgagatgagatcatggagagagaacacagccatcccctatagaaaggcacagcttttgggcttctctggcctgaatgccttctggggtatttccatatgcaacagcccagagtcatagccttgggcaaccacacatagaggtttccttctcacttcagacacatacatcactttcacaccacttggggatggaaatacctacaagagtgaaggtcaagggccctccccaggcatctcattcattactcagcttccttcctgaccaagtctgccaaccaatggccagctatgcgcctcatcctcattgcttctgcctccacgtaaatgaaaccaaaggcctcagcatatcctgggaggactgggggctgttacctaatggtcctctctgtcccattataggtgcaaggcaccccatccacacatttgcaccactactccaagatagtatttttcttttcacacaatctctttacagcagaatccagagttggattgtagtttaccttcctggaaagctcattatctctgtttgaattaacatttcagcatggaactaactgggcggaggaaggatcgttatacgtcttcagaaagttctcattgccccagctgcctagtactatacaagaagctctactttgatggcagatctaagaaggctataggcctttgtttgtaggaagcagtgtcattacattcaagcttcacttctctgattggcttccaaccactgggattcaaagagaatccaaggttctgcctatgtctgatgacataaggaaaacttggcttcctctgctcaaggttcccctctgctcatccctcctcattcagacatcctccaccataccagtgtttagaagcaaaacatgaagggctagcgccaccaggatagttagcagaaatattgtctgtaaagctaggcagatgagcccagaagaatggtcccagagaaagcagactggctccaatagatatcaggcagcaatcccaataaattctgacatgtccttggcaatggaagcctgggttggagatcctgaggcagctgtgcctactgttccccacctcagaagcttcctgcccagagagccagcagccttgggatactaatgaggatgcaactggcttattggtatgaaatagaaggtggctttgtaggggcaagcaggcaaagagtactatccacatggcaggcaggtggctttgtgtctggaaagctttgcctagccagtacagctgtgagcagaggctggttataaatttgaactccctcagcccatttgcaactctgcctctgttctcttgcattctgtttggttgccctttagtttcctagtaaatgctccttttgaaaaa

SEQ ID NO: 251771 - protein, 1027 aa, Artificial Sequence
  derived and/or modified sequence
MGNLESAEGVPGEPPSVPLLLPPGKMPMPEPCELEERFALVLSSMNLPPDKARLLRQYDNEKKWDLICDQERFQVKNPPHTYIQKLQSFLDPSVTRKKFRRRVQESTKVLRELEISLRTNHIGWVREFLNDENKGLDVLVDYLSFAQCSVMFDFEGLESGDDGAFDKLRSWSRSIEDLQPPSALSAPFTNSLARSARQSVLRYSTLPGRRALKNSRLVSQKDDVHVCILCLRAIMNYQYGFNLVMSHPHAVNEIALSLNNKNPRTKALVLELLAAVCLVRGGHEIILAAFDNFKEVCKELHRFEKLMEYFRNEDSNIDFMVACMQFINIVVHSVEDMNFRVHLQYEFTKLGLEEFLQKSRHTESEKLQVQIQAYLDNVFDVGGLLEDAETKNVALEKVEELEEHVSHLTEKLLDLENENMMRVAELEKQLLQREKELESIKETYENTSHQVHTLRRLIKEKEEAFQRRCHLEPNVRGLESVDSEALARVGPAELSEGMPPSDLDLLAPAPPPEEVLPLPPPPAPPLPPPPPPLPDKCPPAPPLPGAAPSVVLTVGLSAIRIKKPIKTKFRLPVFNWTALKPNQISGTVFSELDDEKILEDLDLDKFEELFKTKAQGPALDLICSKNKTAQKAASKVTLLEANRAKNLAITLRKAGRSAEEICRAIHTFDLQTLPVDFVECLMRFLPTEAEVKLLRQYERERQPLEELAAEDRFMLLFSKVERLTQRMAGMAFLGNFQDNLQMLTPQLNAIIAASASVKSSQKLKQMLEIILALGNYMNSSKRGAVYGFKLQSLDLLLDTKSTDRKMTLLHFIALTVKEKYPDLANFWHELHFVEKAAAVSLENVLLDVKELGRGMELIRRECSIHDNSVLRNFLSTNEGKLDKLQRDAKTAEEAYNAVVRYFGESPKTTPPSVFFPVFVRFIRSYKEAEQENEARKKQEEVMREKQLAQEAKKLDAKTPSQRNKWQQQELIAELRRRQAKEHRPVYEGKDGTIEDIITGLHCQPMVVRHQARSAAPPSGPPRAPGPH

SEQ ID NO: 251772 - DNA, 3084 bp, Artificial Sequence
  derived and/or modified sequence
atgggcaacctggagagcgccgagggcgtgcccggcgagccccccagcgtgcccctgctgctgccccccggcaagatgcccatgcccgagccctgcgagctggaggagagattcgccctggtgctgagcagcatgaacctgccccccgacaaggccagactgctgagacagtacgacaacgagaagaagtgggacctgatctgcgaccaggagagattccaggtgaagaaccccccccacacctacatccagaagctgcagagcttcctggaccccagcgtgaccagaaagaagttcagaagaagagtgcaggagagcaccaaggtgctgagagagctggagatcagcctgagaaccaaccacatcggctgggtgagagagttcctgaacgacgagaacaagggcctggacgtgctggtggactacctgagcttcgcccagtgcagcgtgatgttcgacttcgagggcctggagagcggcgacgacggcgccttcgacaagctgagaagctggagcagaagcatcgaggacctgcagccccccagcgccctgagcgcccccttcaccaacagcctggccagaagcgccagacagagcgtgctgagatacagcaccctgcccggcagaagagccctgaagaacagcagactggtgagccagaaggacgacgtgcacgtgtgcatcctgtgcctgagagccatcatgaactaccagtacggcttcaacctggtgatgagccacccccacgccgtgaacgagatcgccctgagcctgaacaacaagaaccccagaaccaaggccctggtgctggagctgctggccgccgtgtgcctggtgagaggcggccacgagatcatcctggccgccttcgacaacttcaaggaggtgtgcaaggagctgcacagattcgagaagctgatggagtacttcagaaacgaggacagcaacatcgacttcatggtggcctgcatgcagttcatcaacatcgtggtgcacagcgtggaggacatgaacttcagagtgcacctgcagtacgagttcaccaagctgggcctggaggagttcctgcagaagagcagacacaccgagagcgagaagctgcaggtgcagatccaggcctacctggacaacgtgttcgacgtgggcggcctgctggaggacgccgagaccaagaacgtggccctggagaaggtggaggagctggaggagcacgtgagccacctgaccgagaagctgctggacctggagaacgagaacatgatgagagtggccgagctggagaagcagctgctgcagagagagaaggagctggagagcatcaaggagacctacgagaacaccagccaccaggtgcacaccctgagaagactgatcaaggagaaggaggaggccttccagagaagatgccacctggagcccaacgtgagaggcctggagagcgtggacagcgaggccctggccagagtgggccccgccgagctgagcgagggcatgccccccagcgacctggacctgctggcccccgcccccccccccgaggaggtgctgcccctgccccccccccccgccccccccctgccccccccccccccccccctgcccgacaagtgcccccccgccccccccctgcccggcgccgcccccagcgtggtgctgaccgtgggcctgagcgccatcagaatcaagaagcccatcaagaccaagttcagactgcccgtgttcaactggaccgccctgaagcccaaccagatcagcggcaccgtgttcagcgagctggacgacgagaagatcctggaggacctggacctggacaagttcgaggagctgttcaagaccaaggcccagggccccgccctggacctgatctgcagcaagaacaagaccgcccagaaggccgccagcaaggtgaccctgctggaggccaacagagccaagaacctggccatcaccctgagaaaggccggcagaagcgccgaggagatctgcagagccatccacaccttcgacctgcagaccctgcccgtggacttcgtggagtgcctgatgagattcctgcccaccgaggccgaggtgaagctgctgagacagtacgagagagagagacagcccctggaggagctggccgccgaggacagattcatgctgctgttcagcaaggtggagagactgacccagagaatggccggcatggccttcctgggcaacttccaggacaacctgcagatgctgaccccccagctgaacgccatcatcgccgccagcgccagcgtgaagagcagccagaagctgaagcagatgctggagatcatcctggccctgggcaactacatgaacagcagcaagagaggcgccgtgtacggcttcaagctgcagagcctggacctgctgctggacaccaagagcaccgacagaaagatgaccctgctgcacttcatcgccctgaccgtgaaggagaagtaccccgacctggccaacttctggcacgagctgcacttcgtggagaaggccgccgccgtgagcctggagaacgtgctgctggacgtgaaggagctgggcagaggcatggagctgatcagaagagagtgcagcatccacgacaacagcgtgctgagaaacttcctgagcaccaacgagggcaagctggacaagctgcagagagacgccaagaccgccgaggaggcctacaacgccgtggtgagatacttcggcgagagccccaagaccaccccccccagcgtgttcttccccgtgttcgtgagattcatcagaagctacaaggaggccgagcaggagaacgaggccagaaagaagcaggaggaggtgatgagagagaagcagctggcccaggaggccaagaagctggacgccaagacccccagccagagaaacaagtggcagcagcaggagctgatcgccgagctgagaagaagacaggccaaggagcacagacccgtgtacgagggcaaggacggcaccatcgaggacatcatcaccggcctgcactgccagcccatggtggtgagacaccaggccagaagcgccgccccccccagcggcccccccagagcccccggcccccactag

SEQ ID NO: 251773 - DNA, 3084 bp, Artificial Sequence
  derived and/or modified sequence
atgggtaatctggagtctgccgagggggtgccgggggaacccccttctgtgcctctcttgctccccccagggaagatgccaatgccagagccatgtgagctcgaagaacgatttgcattagtactgtcctccatgaacttgcctcctgacaaagccaggttgctgcgtcagtacgataatgagaagaaatgggatctgatttgcgaccaagagaggttccaagtgaagaacccacctcatacttatattcagaaactgcagtctttcctggacccatcagttactaggaagaaattccgacgacgagtccaagagagcactaaagtgctcagggaattggagatcagcttgcggaccaatcacatcggatgggtgcgtgagttcctgaacgacgagaacaaaggattggacgtcctggttgattatctgtctttcgctcagtgttcagtgatgttcgacttcgagggcctggagtccggagatgacggagccttcgataagctcagatcctggtctcgcagtattgaggacctgcaacccccaagcgcactgtcagcaccatttaccaattcccttgcaaggtcagccaggcaaagtgtcctgaggtacagcacgcttcccggtcgtcgtgccttaaagaacagccgactcgtcagtcagaaggatgatgttcacgtctgtatcttgtgtcttcgggccattatgaattatcagtacggattcaatttggttatgtcacatcctcacgcagtgaatgaaatcgctctctcactgaacaacaagaacccacgcaccaaggcccttgtcctggagctgctcgctgcagtctgtcttgtgcgcggagggcacgagatcattctagctgcatttgataacttcaaagaggtctgtaaagaactacacaggtttgaaaagttaatggaatattttaggaatgaggattcaaacatcgacttcatggtggcttgtatgcagtttatcaatattgttgttcacagcgtagaagacatgaattttcgcgtccacctacagtatgaatttacaaagctcgggttggaggagttcttgcagaaatctaggcacacagaatccgagaagctgcaagtgcagatccaggcctacctagataatgtgtttgacgtgggagggctgctcgaggatgccgaaaccaagaacgtggccctcgagaaggtcgaagaactggaagaacatgtttctcatctgaccgaaaagttgctggatctggaaaacgaaaatatgatgagagttgcagaactggagaagcagctgctgcagcgagagaaggaactggaaagcattaaagagacttatgagaacacgagccaccaagtccacactctgcgacgcttgatcaaggagaaggaagaagcattccagcgtagatgtcacctcgaaccgaacgtgcgtggtctcgagagcgttgactcggaggctctggcacgggtgggtcccgctgagcttagcgagggcatgccaccttctgacctggatctgctggcccccgctccacctccggaagaggtgctgcccctgcccccaccaccggcaccaccacttccacctcctccacctccgctaccggacaagtgcccccccgcccctcccctgcctggtgcagccccatccgttgtcctcaccgtgggtctgagcgcaatccgcattaaaaaaccaattaagacgaaatttagactccctgtgtttaactggacagcattaaagccaaatcaaataagcgggaccgttttctcagagctcgatgacgagaaaatcctagaagacctggaccttgacaaattcgaggagctatttaagacaaaagctcaggggcctgctctggacctcatctgtagcaaaaataagacggcgcagaaagcagcctccaaagtgacgctcctcgaagcgaacagagctaagaatctggccatcactttgagaaaggctggtcgttctgctgaagagatctgtcgagccattcatacgtttgacttgcagacgctgccagttgactttgtcgagtgtctgatgcggttcttgcccactgaagccgaagttaaattactccggcagtacgagcgggagcgacaacctctcgaagagctggcagcagaggaccgtttcatgcttctgttcagtaaggtggaacgtctcacccaacggatggccgggatggcatttctaggaaactttcaggataatctgcagatgctaactcctcagctcaacgccatcatcgccgctagcgcatcagtgaagtcatcccagaaattgaaacagatgctggaaattatattggccctgggcaactacatgaattcaagtaagcgtggcgcagtatatggcttcaagctgcagagcctggatttgctgctggacaccaaaagcaccgaccgaaaaatgacgttgctccactttattgctctgacagtcaaagaaaaatatccggatctcgccaacttctggcacgagcttcactttgtggaaaaagccgccgccgtctctctggagaacgtgctgctcgatgtgaaggaattgggaaggggaatggagttgatcagaagagagtgctctatccacgataacagcgtattgcgaaactttctgtccactaatgaagggaagctcgataagctgcagcgagacgccaaaaccgcggaggaggcctacaacgctgtggtcaggtatttcggggagtctcctaaaactacgcccccctctgttttctttcctgtgttcgtaagatttattcgcagctacaaggaggcggaacaggagaatgaagcaagaaaaaaacaagaggaagtcatgcgagaaaagcagctggctcaggaagcaaaaaaactggatgcaaagaccccatcccaacgcaataagtggcaacagcaggagctgatagcagaacttcgacgcagacaggccaaggaacaccgacccgtttacgagggtaaggacgggacaatcgaagacatcatcaccgggttgcattgccagccaatggtcgttagacatcaggctcgcagtgccgcccccccatccggtccaccaagggcccctgggcctcactag

SEQ ID NO: 251774 - DNA, 11192 bp, Artificial Sequence
  derived and/or modified sequence
gagccggccgcctccgtccgccttgcttcggtgcggctgtccgctacgctgcctccgccctcgccgcgcgcccccgccagcgggactccagggaacccccggcgccctcgacggggccgaggagtcgggactcggggagccggcgctgagggaggagcctggtcggagccgcggagccgaaagctccggagcgtggaggtggggggccgaggcccctgagggggccccgccgcgatgggcaacctggagagcgccgagggggtcccgggagagcccccctctgtcccgttgttgctgccgcccggcaagatgccgatgcctgagccctgtgagctggaggaaaggttcgccctggtgctgagctccatgaacctgcctccagacaaggcccggctcctgcggcagtatgacaatgagaagaaatgggatctgatctgtgaccaggaacgattccaggtgaagaatcctccccacacttacattcagaaactccagagcttcttggaccccagtgtaactcggaagaagttcaggaggagggtgcaggagtcaaccaaagtactaagggagctggagatctctcttcgcaccaaccacattgggtgggtgcgggaatttctgaatgatgaaaacaaaggcctggatgtactggtggattacctgtcctttgcccagtgttctgtcatgtttgactttgagggtctggaaagtggtgacgatggtgcatttgacaaactccggtcctggagcaggtcaatcgaggacctgcagccacccagcgccctgtcggcccccttcaccaacagcctcgctcgctctgcgcgccagtctgtgctccggtatagcactctccctgggcgcagggccctgaagaactcccgcctagtgagccagaaggatgacgtccacgtctgtatcctttgtctcagagccatcatgaactatcagtacggattcaacctggtcatgtcccacccccatgctgtcaatgagattgcacttagcctcaataacaagaatccaaggaccaaagcccttgtcttagagcttctggcagctgtgtgtttggtgcgaggaggtcacgaaatcatccttgctgcctttgacaatttcaaagaggtatgcaaggagctgcaccgctttgagaagctgatggagtatttccggaatgaggacagcaatattgacttcatggtggcctgcatgcagttcatcaacatcgtggtgcactcggtggaggacatgaacttccgggtccacctgcagtatgagtttaccaagctggggctagaggagttcctgcagaagtcaaggcacacagagagcgagaagctgcaggtgcagattcaggcatatctggacaacgtgtttgatgtcgggggtttgttggaggatgctgagaccaagaatgtagccctggagaaggtggaggagttggaggagcatgtgtcccatctcacagagaagcttctggacctagagaatgaaaacatgatgcgggtggcagaactagagaagcagctgctacagcgggagaaggaactagagagcatcaaggagacatatgagaacacaagccaccaggtgcacaccctgcggaggctcattaaagagaaggaggaggcctttcagcgtcgatgtcatttggagccaaatgtccggggcctggagtctgtggacagtgaggccctggccagagtaggccctgcagagctgagtgagggcatgccaccctccgacctggaccttctggctccagccccaccccctgaggaggtcctgcctcttcctccaccaccagctccgcccttgccccctccacctcccccattaccagacaagtgtcccccagccccacctctccctggtgctgcaccctctgtggtgttgacagtgggcctgtcagccattcgaattaagaaacctatcaagaccaagttccggctgcctgtcttcaactggacagcactgaaacccaaccagatcagtggcactgtcttcagcgaacttgatgatgagaagatcttggaggacctggatcttgataagtttgaagaattattcaagacaaaagcgcagggccctgcccttgacctcatctgctccaaaaacaagacagcgcaaaaagctgccagcaaggtgactctgttggaagccaatcgtgccaagaacctggccatcaccctacgcaaggctggccgctcggctgaggagatctgcagggccattcatacgtttgacttgcagacactacctgtggacttcgtggagtgcctgatgcgcttcctgcccacagaggctgaggtaaagctgctgcggcaatatgagcgggagcggcagcccctggaggagttggcagctgaggaccgcttcatgctgctcttcagcaaggtggaacggttgacccagcgaatggctggcatggccttcctggggaacttccaggataacctgcagatgctcacaccgcaactcaatgccatcattgcggcgtccgcttccgtcaagtcttcacagaagctgaagcagatgttggagatcatacttgcactggggaactacatgaacagcagcaagcggggagctgtgtatggcttcaagctccagagcctggatctgctgctggataccaagtccactgaccggaagatgacactgcttcatttcatcgccttgacagtgaaggagaaatacccagacctggctaacttctggcatgagctgcactttgttgagaaggctgcagcagtgtccctggagaacgtgctgctggacgtgaaggagctgggccggggcatggagctgattcggcgtgagtgcagcatccatgacaacagcgtcctccggaacttcctcagtaccaatgaaggcaaactagacaagctccagcgggacgccaagacggctgaggaggcctacaatgcagttgtgcgctactttggcgagagtcccaagactacacctccttctgtattcttcccagtatttgtccgattcattcgttcttacaaggaagcagaacaagagaatgaagcccgcaagaagcaggaggaggtaatgcgggagaagcagctggctcaggaagccaagaaactggatgccaagaccccatcccagcggaacaagtggcaacagcaggagttaatagcagagttgaggcggcgccaggccaaggaacaccggcctgtttatgaggggaaggatggtaccatcgaggacatcatcacaggcctccactgccagcctatggttgttcgccaccaagccaggagtgctgcaccgcccagtggtccccctcgggctccaggcccccactgagaccctctcggaggcagaagcacttcacccctcagagtcctacaagtccaaccagtggacctggaattggccaagggctcaggagagggctgtgttgctctctcaaccatgtccgccccagctcttgaggctggatctttctacttgtgccactatgggcactaggtctgtaggtccctggtgcttccagtactgcactttgcccccaaggtctttgacttcatttcctgaagggtcaccaagggtcagctcagggctaggaaaaaccatttccagccttagcctaaacagggcacatagatctctcccactagagcccagagggatgagaggagagagcaactgttctttctttttttttcccttcctttttgcaggcccatggtcagctctggtctagatgtatctaggcttagggagccctgggaccctgccagtctcagttcatctcttaccaggagcaaggccctctgaagcatgggccgtgccagctgtgccctagtgataagggtaagaggagagatgtcaggctcactgcccttatttctctgcccatttcattctaggctcacactgtccttgtcaaggtgggcagaagagcagaggtcttctctgcaccaaccactctctgcagatggctggagaaagggtgtgccaactcttcaccttctttcctcagctacggtttttttttttttttttttttttttggcaggggacaaggagcatggtggtcttggctatttgcttaccttcccgtttctcctctgcccctggaagggaatgtgggggcccacttttttgtacatgtaccacctccctttcctcttactgtacataaacctcagactctccccctctcaacaaaggcttgatgcaccaggcctgactttgtctcctctttctgagcttagggggctagggtggccatttagtctgacctgggctatggggatagaaaagaaatctttggggcactgcatctgttttggaggagatgagatcagaactctggggaaaggagaaccggctaggtgggctctagccacacaaagggaagcaggcctgccatgagacactagtgccctctgctgggcatgtgtccagtccccagcctgccccagtagcacatggaaaagagtcactggccatgttataaatattgttatttaaaaaacaaaaaacaaaacacacgtacattaggtcctgggtggaggaagaagtggtggagcctcagggccagggcaggcaggagcaggcactgatgctagagggtgatgaccctgccctctgccacccaggctgcgtccaacagcctgtgactcttccctggagaccccttctctcacacttttatctactggcatcacccaccccacatggcatataccacccatctctggtctggggctgagggcaaggactgcactagtccagggagtaggggacccttgaacaccaagagcaaccttgagaggtgccaacaatggtgtgctgggggtggggttactttagaaaaagtggacacagaccagactaaggaagaagtctgaggcagacggtgagggtggcccaggagccatggcctcacacagacccgaggcagagaacagctcattgggtcactggtgatcatccagctgctgtaggagtgtccgccgccgcctctccagctcaccctcactcagctcactttctgacgtgtcccagcctgtctgttggagcaaaggcacagttcacccttagcctgcactaagggccgtggaagcttgaccagcgtgctgactggcctagggcccctgcccctcaccttctccttcttgattccaaagcctggggaacggttagggagctctgcctgttggagctccctgtccttgtcctgttcttgttctttctcatcgctctccttgccagctttctcctcagggtctgtctcactctcaggactattctgtaagagtccagagcccacctcctcagttcctgtggatagcctgggaggcaggtagaacagaactcacaaaatagcaggggcttaggtagaagttccttcactcaccgacttgtgtcttctcttcttagttttcttttttggtttcttggctttccgaaggccatgatctagagatagaaaaatccctactaagtcccaacaggagaaagacaggctctttttctttgttctagcccctctgttcattcttcacaggcaggaacctcatgctctgaggaagtctaagtccagttttccttctccagcttcttgcttgggcaggtagaggaagttctttctacttccacaggtgcagccctcccaatccagtctaccctcaaaggagctggggcttgtggagggcatcctctcagtctgggacaacagttctccagcttctacgctcacagcaactgcttacctgctccaagaagatgggaggaaggggagccccgtcctccaagggcagcacccccactttcaactgaatcaagtgaggaagagggctcagagcctgactctgaggggttccgcctcctccgcttggggggccggagagatggtgggggcagctcctcttcttctgactcagagccctgggcagatcagcagatacatgtcagtgcagaggttctctgccctccagaagccctcgtctgggaattcgagagaggaggaggacccagggccaaaggaatcctcaaacttccctccaagggagatattgtaaggggaaaacaaagtgtttatttccccaaaacaacccagcttcaccccatgtcccttctacacgcttactcactgagggtgagtgggaacgcttgtgatggtgcttcttgcctttcctgccatgctttcggcctttggtgtggaggtgctggcattcagtctgctagaggcagaggaagaagggtgaggacagcaccagacttagccccaggaaggatcctacttcctaaaatctggctttgcctccctttctcagactagagccttctgcctatcccagggatcctcaggcctccccttccttagctggccaggagtgccctaagggtaagagggaggccactgaggtctctgttgaactggtctaatgagttcaagggcctgaggcagatccagaggacaagcctgcctcacctccagcacctgtaggaactcccggaagagccggatccgctccgactccagggtgatctgctcaaaggctgagtcacacacaaaacgctcacggaccttgaacgaggagagcactgctgatcagactaggccccactcagcctggcctggacaccgccatgagcacagggcagggctggggcagagaaaggaagggaactggagctggcccagggctgtgacgtgactggggtgggccctcagtggtgaagcaccgctgccctcaggcttgaggggtgcttggggccaggctacgctcctgacctcttcccaggcagtgcctagctccagagcaggcacagcctgcctcagcatgcttcgaaaggcagcttccctgcgccgcatcctgcgtgcctcctccttctcccgctccctctcccgtgcctctgctttctccagcagctgaggaaagaagggacacggaacagggtcacccaggagggtggatgccaggtcccactcaggcataccttaggaggtggaaagttagggtctgggcttctaccaccatcccctgaattgggaatatagtcagtgggacagtgagtgagaaggaatggagcaagacacagatgaattagagaacttcccacgccccgcccagcccctcacactattgaaggtcagcttgatgttgcctgcgtccagtgcggcagccctcttgtcaaagcttatgacgtgggcgaagtcctcaaaggccgtgttcacctccacgcagaagccccggtcctgtgggtacagcagtgcatgaagcaggggcaccacgtgcctgaggccaaagctggcaggcagagtggtcacattacagatggtcaagaaggcccttgcctctggaagagatccacaggactgtggtctgcattagaaaccaagttatccaagtcctcatcacttgacaattaagcccccatgcctacccttggtttggatgtcacacagagctgaaggggttgggagatgtctcccaactgctgattaatgctgagtttctcaaaattaacttttgttcctttggcttaaagctctggccccagctgggccctcctgctgctcagcagtgcttccatgcattctcaatcaacatttgctggcccctaccctttgggtctatttattgagtgcttactatgtaccaggtaccatgatgagtgtttcacacattatctcatttaatcctcttggttctacatttaagaataggtcctagtatcctaattttacacagaaggagaaaccaaggttcagagaaactagagcacttgcccaaggtctcacagctgatatacggctgggcaagaaccctaccctgggggggctctctatccccaaagtgtctgctttcaagcaccacacccacccagatgacttagtccatgggagaaacggaggccaccaggtgtgcagctccccaccaatactaaaaacatgtccacaggccaggctctatgcttctcatttaggcctcacaacattccagtgaagcagaggcttagaaaagtgatctcagttggcccaagatgacatgagtggtaaatgaagccactggagttcaaagtctggctctcacgtcagttaagcacaggccagattccctttctctccctccacatagctctcacctcctctggcctttttgctgatggcagaggtgtgctcctctttcttctttccaagggtacttcctcaaccctgctacagtccttatcaacacagcattcattctcagggaattgaaagctccaagtcacccttgttactggctccttccatcaagcagacacctcacctaacctggaacatcctttccaccatgctctccccttcatcaagctaactacctctgctcttttccattgtttcaaaacctcttgaaatgcagcagaaaggaaaaggaataaacatttattgagaacctattagacactttacagatgttatttaattctcacaaccttacctatgaattatccctgatttacaggtgagcaaacaggctcagagacacggaacttacggaggtctcagagccaataagcaaccaggagtaatctgactctaaaacatgtgctgcccccatgccacctccatgactctactctcccaaaggttgcttgtgtctactagccaaatccaaggccgccttctttgtcctcactcatctggtcctcagtgcctctaccacttacttcttcaacactcccctctccaggtcacaccctctctgaccttttattctcttgcatatgcatgttcctgagaacagcacttagtcctctttcactacccaatctgtactccctcgcaatctcatccttcatctctcctgattttcaaacatcctagactggatatttcagacacttaaaattcaacagatctcaagagaatatatttctcatgagcatcctccatggatctccctgacccggatctgtctgcctgttctaagtccagggctctttgcattatcctatgggatgaaaggcaccatcatggtctgcctggctgtggaaagcaagagggactcctgggctcatctgccctccataggcaggaacccaaatggggaaagaggaagggaactgtctaaaaaagttgctttctcaggttgtgtggagagacaggactcagtgaggataggcccctacaggcctatcaaccagccactctgtggctaaaagttaattgtccaataaaatttagctatcccaggataaggcatttctactttatacgattattctgttttaaaatatatttgctttgagagtaattccccaaatagaattcctattttctacagccttgctcttcttgttttatccttatcaatagtgccatcatccactgccctgacacctctgattccttcctttccctccatttcacaaaatctatcaattctacttagtgactctatcccactggtgttgaattctcccttttttttttaaacagcagaaacagtttattaaaatagaaatcttatgtagaacctttatgcataaaaaagattcaagctgcttcacttgaaaacaggaagcagcaccaaatccccccatactcaactccaacccttgcttgtctcaaggcacctacatagaaacccagagtgtctcagaagaacagctggagcgctacagcctgctctcttctgctgtccccactgcccccggctaggatcacctcctacaagattcctgcacagcctactgacttttctccctgctcaccctcttccatccctctaacccagctcctagcatctagtgcttcttggacttttgtaccaagtagccccaacagtaggagagaggtctggggataagtgaaatgaatatgactatttgaattaccactatcagttttagtatcttgaggcttcaagaactgctctacctagcaccaccaccttccctaaggacataagtacgtactctagactgaaaggttctactatacaccatctaatctgatcattccccggttcctcattacttacgagagaaaaatccaaatttcttattttagcattcaaggcactttacatgcagggctctacttccaagctggggcatgtggttccagagaaagagaggatacctcaggacagtatgatacatcttacctaatggtaagtaatttaaaatattaaatttatattaaataggtaatatggtgttaaaatgcaacacctacgtgaatttgtaaggcaaaacagtacttcaaagaaatgtatatgcagtgagacatttctagctttatttccagatccctttcaacccaggtaccatttaatctctgtaattaggtgtactctggtggaacactcaccattttttagatgaggaaacagggtcagaaaggtcaagtgacctatccaaggtcacacaactagcaagcagttaagctagacttttactgtaggcagtctgcctccagtcccgctcctaaccactgtactgtattatctcctcaaatgcattagaatcttcacttccataaagaaatatgctctttgtttttttcttttggaacacaaggtttagtccatcactcactcacttttccacttttgataagatgtaaatattgagaactatttctcttctccagtagaagaagagcaacaggccatgtgtgatggtaaatggcagctgacacttgcgacagtatcaagaaggcactaaggaatggtgagaaggatgacttgccctttctaaagtggcatctcagcttgagtctgcagaatgccttgcaaatccagctcagtactgctagataatccatattgacaagagaagctaaagattcagattttctatgtgaagtttcctggttttaaaatgttagcaacaaattccaaatttttacagaacactgtacaggccagaaagaacaatctgtgtgctaccagtttacaattagctatgcttcttcctcctcagacctggcatgccctttccacccccttgcctttgctcttagtaccccgtgtacactccaacctcttccacctacaaatttctaaatgcacagttcaaatgttagttcttcagattcctgtctctgtaataacacttgcccctttgtataacagttctcatgtatatcttcctattagaccatgagctcctgtggtagaaattgtgtattcattactgtatccctagtgtgcagtaaaggatcacagtag

SEQ ID NO: 251775 - DNA, 3084 bp, Artificial Sequence
  derived and/or modified sequence
atgggcaacctggagagcgctgagggcgtgcctggagagccccccagcgtgcccctgctgctgcccccaggcaagatgcccatgcctgagccctgtgagctggaggagagatttgccctggtgctgagctccatgaacctgcccccagacaaggcccggctgctgcggcagtatgacaatgagaagaagtgggacctgatctgtgaccaggagcgcttccaggtgaagaaccccccccacacctacatccagaagctgcagagcttcctggaccccagcgtgaccaggaagaagttcagaagaagagtgcaggagagcaccaaggtgctgcgggagctggagatcagcctgcggaccaaccacatcggctgggtgcgggagttcctgaatgatgagaacaagggcctggatgtgctggtggactacctgagctttgcccagtgcagcgtgatgtttgattttgagggcctggagagcggagatgatggagcctttgacaagctgcgctcctggagccgcagcattgaggacctgcagccccccagcgccctgagcgcccccttcaccaacagcctggcccggagcgcccggcagagcgtgctgcgctacagcaccctgcctggaagaagagccctgaagaacagccggctggtgtcccagaaggatgatgtgcacgtgtgcatcctgtgcctgcgggccatcatgaactaccagtatggcttcaacctggtgatgagccacccccatgctgtgaatgagatcgccctgagcctgaacaacaagaaccccaggaccaaggccctggtgctggagctgctggccgctgtgtgcctggtgcggggcggccacgagatcatcctggccgcctttgacaacttcaaggaggtgtgcaaggagctgcacagatttgagaagctgatggagtacttcagaaatgaagacagcaacatcgacttcatggtggcctgcatgcagttcatcaacatcgtggtgcacagcgtggaggacatgaacttccgggtgcacctgcagtatgagttcaccaagctgggcctggaggagttcctgcagaagagccgccacacagagagcgagaagctgcaggtgcagatccaggcctacctggacaacgtgtttgatgtgggcggcctgctggaggatgctgagaccaagaatgtggccctggagaaggtggaggagctggaggagcacgtgagccacctgacagagaagctgctggacctggagaatgaaaacatgatgagggtggccgagctggagaagcagctgctgcagcgggagaaggagctggagagcatcaaggagacctatgagaacaccagccaccaggtgcacaccctgcggcggctcatcaaggagaaggaggaggccttccagaggcgctgccacctggagcccaacgtgcggggcctggagagcgtggacagcgaggccctggcccgggtgggccctgctgagctgtctgagggcatgcccccaagtgacctggacctgctggccccagcccctcctcctgaggaggtgctgcccctgcccccacctccagccccacccctgcccccacctcctccacccctgcctgacaagtgccccccagccccacccctgcccggggccgcccccagcgtggtgctgactgtgggcctgagcgccatccgcatcaagaagcccatcaagaccaagttccggctgcccgtcttcaactggacagccctgaagcccaaccagatctctggaacagtgttcagcgagctggatgatgagaagatcctggaggacctggacctggacaagtttgaggagctgttcaagaccaaggcccagggccctgccctggacctgatctgcagcaagaacaagacagcccagaaggccgccagcaaggtgaccctgctggaggccaacagagccaagaacctggccatcaccctgaggaaggccggccgctctgctgaggagatctgccgggccatccacacctttgacctgcagaccctgcctgtggactttgtggagtgcctgatgaggttcctgcccacagaagctgaggtgaagctgctgcggcagtatgagcgggagcggcagcccctggaggagctggccgctgaggaccgcttcatgctgctcttcagcaaggtggagcggctgacccagaggatggccggcatggccttcctgggcaacttccaggacaacctgcagatgctgaccccccagctgaatgccatcatcgccgccagcgcctctgtgaagagcagccagaagctgaagcagatgctggagatcatcctggccctgggcaactacatgaacagcagcaagagaggagctgtgtatggcttcaagctgcagagcctggacctgctgctggacaccaagagcacagacaggaagatgaccctgctgcacttcatcgccctgactgtgaaggagaagtacccagacctggccaacttctggcatgagctgcactttgtggagaaggctgctgctgtgtccctggagaatgtgctgctggatgtgaaggagctgggccggggcatggagctgatcagaagagaatgttccatccatgacaacagcgtgctgaggaacttcctgagcaccaatgaaggcaagctggacaagctgcagagagatgccaagacagctgaggaggcctacaatgctgtggtgcgctactttggagagagccccaagaccaccccacccagcgtcttcttccctgtgtttgtgcgcttcatccgcagctacaaggaggccgagcaggagaatgaggccaggaagaagcaggaggaggtgatgagggagaagcagctggcccaggaggccaagaagctggatgccaagacccccagccagaggaacaagtggcagcagcaggagctgattgctgagctgcggcggcggcaggccaaggagcacaggcctgtgtatgagggcaaggatggcaccatcgaggacatcatcaccggcctgcactgccagcccatggtggtgcgccaccaggcccggtctgctgccccacccagcggccccccccgggcccctggcccccactag

SEQ ID NO: 251776 - DNA, 3084 bp, Artificial Sequence
  derived and/or modified sequence
atgggcaacctggagagcgccgagggcgtgcccggcgagcccccctccgttcccttattactgccacccggtaagatgccgatgccagaaccgtgcgagctggaagaaagattcgccctggtgctctcctctatgaacctccccccagataaggcccgccttctacgtcagtatgataatgaaaagaaatgggacttaatttgtgaccaggaaagatttcaggtgaagaaccccccccatacgtatattcagaagctgcaatccttcctggacccatccgtaacacgtaaaaaatttaggcgtcgggttcaggagtccaccaaagtgctaagggagctggaaataagtctgcgcaccaatcacatcggatgggttcgcgagttcttgaacgacgaaaataagggccttgacgtccttgttgattatctgtccttcgcccagtgcagcgtgatgttcgatttcgagggattggagagcggtgacgacggtgcatttgacaagctccgatcctggagccgatccattgaggaccttcagcccccctcggccttgagtgcgccttttactaattctttagcacgtagtgcccgccagtccgtgctcaggtattctacacttcccggcagaagagcccttaaaaacagcagattagtatcccagaaagatgatgttcatgtgtgcatcttatgcctgagagccatcatgaattatcagtatgggtttaacttggtgatgtcacatccccatgctgtgaacgaaattgccttgtccttgaataacaaaaatccacggaccaaggctctcgttttagaattgctcgctgcagtatgcttggtgcgtggtggccacgagatcatattggcagcattcgacaattttaaggaggtgtgtaaagagctgcaccggtttgagaagttgatggagtatttcagaaacgaagacagcaacattgacttcatggtggcgtgtatgcagttcattaatattgtggtccatagcgtcgaggatatgaatttccgagtccatctccagtacgaatttacgaaattaggcttggaagaattcctgcagaaatcacggcacacagagtccgaaaaactacaagtccaaattcaggcctatctggacaatgttttcgacgtgggtggcttgttagaggacgccgaaaccaaaaacgtggccctggaaaaagtcgaggagctggaggagcatgtgagtcatctcacagaaaaactcttagatttggagaacgaaaacatgatgcgggttgctgagctagaaaagcagctgctccagcgggaaaaggagctggaatccattaaggaaacctatgaaaatacatcacatcaggttcatactctgcgacgcttgatcaaagagaaggaggaggccttccagcgccgctgccatctggaaccaaatgtgagggggctggagagtgtggactctgaggcactggcaagagttggaccagcagagttatctgaggggatgccaccatctgacctggacttactggccccagccccacctccagaagaagtcttgccacttcctccacctccagcccctccgcttccgccacccccgcccccactacccgacaagtgcccccccgctccgcctctgccaggcgctgctccctcagttgtgctgacggtaggcctctccgcgattaggatcaagaaacccatcaagactaaattccgcctgcctgtcttcaactggacggccctgaaaccaaaccagatatccggtacagtgttcagtgagcttgatgacgagaaaatccttgaggatttggacctggataagttcgaggagctgttcaagaccaaggcccaggggccggcactggacctgatctgttccaaaaataagacagcccagaaggctgcctctaaggtgacactgctggaagctaatcgggctaagaacttggctattaccctgcgcaaagctggcaggtctgccgaagaaatttgtcgagcaattcacacttttgacctgcagactctgcctgtggattttgttgagtgcctaatgcgcttccttcctaccgaggctgaggtgaaactgctgcggcagtatgagagggagcgccaaccactcgaggaactggctgctgaagacagatttatgctgcttttctctaaggtggagcgcctgacacaaaggatggcgggtatggccttccttgggaatttccaggacaacctccagatgttgacaccgcagctgaatgctattattgccgcatctgcctccgtgaaaagttcacagaagcttaagcagatgctggagatcatcctggccctgggcaattacatgaattccagcaagcggggagccgtgtatggctttaaactccagtcattagaccttctgcttgacacaaagtctacagataggaagatgaccctactccatttcatcgccctgacagtgaaagaaaagtatcctgacctggcaaacttttggcacgagctgcattttgttgagaaagccgccgctgtttccctggaaaatgtcctgttggacgtcaaagagctcgggaggggcatggaactgatccgtagggagtgcagtatccacgataattccgtgcttcgaaacttccttagcaccaacgagggcaagctggataagctgcagcgtgacgcaaaaaccgccgaggaagcctataatgccgtagtgcgttatttcggcgagagccctaagacgacccccccttctgtgttctttcccgtgtttgtaagatttataaggtcttataaagaggcagagcaagaaaacgaggcccgaaaaaagcaggaagaggttatgagggagaagcagctcgctcaggaggccaaaaagctcgatgcgaagaccccctcccagaggaataagtggcaacagcaggaattgatagccgaacttcgaaggcggcaggccaaagagcacaggccagtttacgagggcaaggatgggacaattgaggatatcattaccggactccactgccaacccatggtcgtgagacaccaagccaggtccgctgctccaccaagtggacccccgcgagctccgggaccacactag

SEQ ID NO: 251777 - DNA, 3084 bp, Artificial Sequence
  derived and/or modified sequence
atgggcaacctggaaagcgcagagggagtgcccggagagcccccttctgtacctttgctcctgcccccaggcaaaatgcccatgcccgaaccatgtgaattagaagagcggtttgcactggttctctcctccatgaaccttccacccgataaggcacgtttgctgaggcagtatgacaatgaaaaaaagtgggatctgatatgcgatcaggaaagatttcaggtgaaaaatcccccacacacctacatccagaagctgcagagttttctcgatcccagcgtgaccaggaaaaaatttagacgcagagtgcaagaatccacaaaggtcctgcgggagctggagatcagtctgagaacgaatcatatcggttgggtgcgtgaattcctgaacgatgagaacaagggactggacgtgttggtcgattatctcagctttgctcagtgctccgttatgttcgatttcgagggcctggagtccggtgacgacggagctttcgataagctgcgcagctggagccgctctattgaggaccttcagccaccatcagctctctccgcccctttcaccaacagcttggcccgatccgccagacagtcagtcctgagatactcgactttgccgggaaggcgggctcttaagaattctaggctggtgtctcagaaggacgacgtccatgtgtgcattctctgcttgcgcgctatcatgaactaccagtacgggttcaatcttgtaatgtcccatccgcatgctgtgaatgagattgccttgtctctgaacaataagaacccacggactaaggcccttgtcttagagcttctggctgccgtgtgtctggtgcgcggtgggcacgaaataatcctcgcagcatttgataacttcaaggaggtgtgtaaggagctgcatcggtttgagaagctcatggagtatttccggaatgaagactctaacatcgattttatggtcgcctgtatgcagttcataaatattgtggttcacagcgtggaggacatgaactttagggttcacctgcagtatgaattcactaaactgggcctggaagaattcttgcagaaatctcgccacactgagtctgaaaaactgcaggtgcagattcaggcttatctggataacgtctttgacgtgggaggcctgctggaagacgccgaaaccaagaacgtagctctggaaaaggtggaggagttagaagaacacgtttcccatttgaccgagaagctcttagatcttgagaacgagaacatgatgcgcgtcgcagaacttgagaaacaactgctgcaaagagagaaagagctcgagtccattaaggagacctacgagaacacctcgcaccaggttcatacgctacgtcgactgattaaagaaaaggaggaagctttccagcgtagatgccacctggaacccaatgtcaggggactggaaagcgtcgattccgaggctctggcccgtgtagggcctgccgaactttcggaaggtatgcctcctagcgatctggacctgttagcgccagcacctcctccagaggaggtactacccttgcccccacctccagccccacctcttcctcccccacctcctccactgccggataagtgcccacccgctcctcccctgccaggcgctgctcctagcgttgtccttactgtgggactgtccgccattcggatcaaaaagccaataaaaactaagttcaggctccccgtctttaattggaccgccctcaaacccaaccagatatccggcaccgtcttttctgagctcgatgacgaaaagattctggaggacctggatctcgataaattcgaggaattattcaaaactaaggcccagggaccagcactcgatcttatatgttctaaaaataagacagcgcagaaggcagctagcaaagttactctcctggaggccaacagagcaaagaacctcgcaatcacccttcgtaaggctggtaggtccgccgaagagatctgtcgggctatccacacctttgatctccagaccttgcctgtggacttcgtggaatgtctgatgcggtttctgcccactgaagccgaggtaaagctccttcgccagtatgaacgcgaacgacagccacttgaagagttggccgctgaagacagatttatgctgctgttcagcaaagtggagaggctcacacagcggatggcaggaatggcgtttctgggcaatttccaagataacctacagatgctcactccccaactgaacgccatcatagctgcgagcgccagcgtgaaaagcagtcagaaactgaagcagatgttagagattattctggcccttgggaactatatgaacagttctaagcgtggcgcagtttatgggttcaagctccaatccttagatttgctgctggataccaagtctactgaccgaaaaatgactctcctgcactttatcgctctgactgtgaaagaaaagtaccccgacctggcaaatttttggcacgaactgcactttgtcgaaaaagccgcagctgtgtccctcgagaatgtgctgctggatgtaaaagaactcggcaggggtatggagctcatacgtcgggagtgttccattcacgataattcggtgttaagaaactttctcagcacgaatgaaggcaaacttgataagctccagcgagatgccaagactgccgaggaagcatacaatgccgtcgtgagatacttcggtgagagccccaagacaactccccctagcgtattctttcccgtcttcgtgagattcatccggtcctataaggaggcggagcaggaaaacgaggctagaaagaaacaggaagaagttatgcgcgaaaagcaactggcgcaggaggcaaaaaagcttgatgcaaagaccccttcgcagcggaataagtggcagcagcaggagcttatagcagaactgagaaggcgtcaggcgaaggagcatcgccctgtttacgaggggaaggacggaaccattgaagatatcataaccggtttacactgccagcccatggtagtccgccatcaggcacgcagcgcagctccccctagcggaccccctagggcgcctgggcctcattag

SEQ ID NO: 251778 - protein, 1044 aa, Artificial Sequence
  derived and/or modified sequence
MKPGCAAGSPGNEWIFFSTDEITTRYRNTMSNGGLQRSVILSALILLRAVTGFSGDGRAIWSKNPNFTPVNESQLFLYDTFPKNFFWGIGTGALQVEGSWKKDGKGPSIWDHFIHTHLKNVSSTNGSSDSYIFLEKDLSALDFIGVSFYQFSISWPRLFPDGIVTVANAKGLQYYSTLLDALVLRNIEPIVTLYHWDLPLALQEKYGGWKNDTIIDIFNDYATYCFQMFGDRVKYWITIHNPYLVAWHGYGTGMHAPGEKGNLAAVYTVGHNLIKAHSKVWHNYNTHFRPHQKGWLSITLGSHWIEPNRSENTMDIFKCQQSMVSVLGWFANPIHGDGDYPEGMRKKLFSVLPIFSEAEKHEMRGTADFFAFSFGPNNFKPLNTMAKMGQNVSLNLREALNWIKLEYNNPRILIAENGWFTDSRVKTEDTTAIYMMKNFLSQVLQAIRLDEIRVFGYTAWSLLDGFEWQDAYTIRRGLFYVDFNSKQKERKPKSSAHYYKQIIRENGFSLKESTPDVQGQFPCDFSWGVTESVLKPESVASSPQFSDPHLYVWNATGNRLLHRVEGVRLKTRPAQCTDFVNIKKQLEMLARMKVTHYRFALDWASVLPTGNLSAVNRQALRYYRCVVSEGLKLGISAMVTLYYPTHAHLGLPEPLLHADGWLNPSTAEAFQAYAGLCFQELGDLVKLWITINEPNRLSDIYNRSGNDTYGAAHNLLVAHALAWRLYDRQFRPSQRGAVSLSLHADWAEPANPYADSHWRAAERFLQFEIAWFAEPLFKTGDYPAAMREYIASKHRRGLSSSALPRLTEAERRLLKGTVDFCALNHFTTRFVMHEQLAGSRYDSDRDIQFLQDITRLSSPTRLAVIPWGVRKLLRWVRRNYGDMDIYITASGIDDQALEDDRLRKYYLGKYLQEVLKAYLIDKVRIKGYYAFKLAEEKSKPRFGFFTSDFKAKSSIQFYNKVISSRGFPFENSSSRCSQTQENTECTVCLFLVQKKPLIFLGCCFFSTLVLLLSIAIFQRQKRRKFWKAKNLQHIPLKKGKRVVS

SEQ ID NO: 251779 - DNA, 3135 bp, Artificial Sequence
  derived and/or modified sequence
atgaagcctggctgcgcagccggctctcccggtaacgaatggatcttcttctctacggatgaaataactactagatatcggaacaccatgtcgaatggcggactacagcgctcggtcattctcagtgccttaattctgttaagagctgtgaccggttttagtggggacgggcgggccatatggtccaagaatcccaacttcacacctgttaatgagtcccagttgtttctttacgacactttcccgaagaacttcttctggggtatcgggaccggcgccctgcaagtcgagggaagctggaaaaaagacgggaagggaccaagcatttgggaccactttatccacacgcatctgaagaatgtcagctccacgaacgggtcgagcgacagttacatttttctcgagaaggatctgagcgctctggactttattggcgtctctttctaccagttttcgattagctggcctcgcctttttcccgatggtatcgttaccgtcgctaacgctaaaggattacaatactactcaacactgctggatgccctggtcctaaggaacatcgagcccatcgtgaccttgtaccactgggacctgccccttgcccttcaggaaaagtacggtgggtggaagaacgacacgattattgacatattcaacgactacgcaacttactgctttcagatgttcggtgatcgggttaagtactggatcacaattcataatccttacctggtggcctggcacggatacggaactggcatgcacgccccaggagagaagggcaaccttgccgcggtgtacaccgtaggccataacttgatcaaggcccacagcaaggtgtggcacaactacaacacccactttcgcccccaccagaaggggtggttaagtattactctgggaagtcattggatagagccgaaccgaagtgaaaacactatggacatattcaagtgccagcagtctatggttagcgttctagggtggttcgcaaacccgattcatggggatggagattaccccgaaggtatgcggaagaaattgttctccgttctgccaatcttctctgaggctgaaaaacatgagatgaggggcaccgctgatttttttgcattttccttcggaccaaataactttaagcccctgaataccatggctaaaatgggtcagaacgtgtctcttaacctgcgcgaggcactgaactggattaaactagagtataacaacccacggatccttatcgcagagaatgggtggtttactgatagccgcgttaaaacagaggatactacggccatctacatgatgaagaactttctgtcacaggtactgcaggccatacgtctggacgaaattagggtctttggatacaccgcctggtctctgctggacggattcgagtggcaggatgcctacactatcaggcgtggattattttacgtcgacttcaacagcaagcaaaaagagagaaaacctaaatcctcagcccactattacaagcaaattattcgcgaaaacggattctctctcaaagaatctacgcccgacgtccagggacagtttccctgcgattttagctggggagtcaccgaaagcgtgctgaaaccagagagcgtggcctcatcccctcagttcagtgatccccacctgtatgtctggaacgctaccggtaaccggctgctgcatagggttgaaggggttcgtctaaagacccggccagcccaatgcacagacttcgttaatattaaaaaacagctggaaatgttagccaggatgaaagtgacccactataggttcgctttggactgggctagcgtgctccctaccggcaacctgtcagctgttaaccgacaggcactgcgatactatcggtgcgtggtctctgaagggcttaaactgggcatttcggcaatggtgacgttgtactatcccacccacgcccacctcggcctacctgaaccccttttgcatgcagacggctggctgaacccaagtacagccgaagcttttcaagcatatgccggcctgtgtttccaggaattgggcgatctggtcaagctatggattaccatcaatgagcctaaccgactgagcgacatatacaatcgctctgggaacgatacatacggcgcagcccacaatctgctcgttgcccatgctctggcttggcgcctttatgacagacagttccggcccagccagagaggggccgtctcactgtctttacatgctgactgggctgagcccgccaatccctacgccgatagccattggagagcggcagaacggtttctacaattcgaaatcgcctggttcgcggagcctctgtttaagacgggcgattaccccgccgcaatgagggagtatatcgcctcgaaacatcgccgtggtctgagcagctccgcccttccccgcctgactgaggccgagcgtcgcctgcttaagggcactgtggatttctgcgctctgaatcatttcactacccgctttgtgatgcacgagcagctggcgggctcccggtacgatagtgatagagatatccagttcctccaagacattacccgcctgagcagccccactcgtcttgccgtgattccttggggcgtcagaaaactgttacgctgggtgcggagaaattatggcgatatggacatctatattacggccagcggaatcgatgatcaggcacttgaggatgataggctgagaaagtactatctgggcaagtacctccaggaggtgctaaaggcttatctgattgataaggttcgcatcaaaggatattacgcgtttaaattggccgaggaaaagtcaaagccacgttttggattcttcacctccgactttaaagccaaatcctccatccagttttataacaaagttatttccagccgggggttcccattcgagaacagctctagccggtgctcccagacacaggaaaacactgaatgcacagtgtgtctgtttttggtgcagaaaaagcctctgatattccttgggtgctgctttttcagcaccttggtcctgctgctttccatagcaatatttcaacgccagaagcgaaggaagttttggaaagccaagaatttacagcatatccccctgaagaagggaaagcgggtcgtcagctag

SEQ ID NO: 251780 - DNA, 6082 bp, Artificial Sequence
  derived and/or modified sequence
atcctcagtctcccagttcaagctaatcattgacagagctttacaatcacaagcttttactgaagctttgataagacagtccagcagttggtggcaaatgaagccaggctgtgcggcaggatctccagggaatgaatggattttcttcagcactgatgaaataaccacacgctataggaatacaatgtccaacgggggattgcaaagatctgtcatcctgtcagcacttattctgctacgagctgttactggattctctggagatggaagagctatatggtctaaaaatcctaattttactccggtaaatgaaagtcagctgtttctctatgacactttccctaaaaactttttctggggtattgggactggagcattgcaagtggaagggagttggaagaaggatggaaaaggaccttctatatgggatcatttcatccacacacaccttaaaaatgtcagcagcacgaatggttccagtgacagttatatttttctggaaaaagacttatcagccctggattttataggagtttctttttatcaattttcaatttcctggccaaggcttttccccgatggaatagtaacagttgccaacgcaaaaggtctgcagtactacagtactcttctggacgctctagtgcttagaaacattgaacctatagttactttataccactgggatttgcctttggcactacaagaaaaatatggggggtggaaaaatgataccataatagatatcttcaatgactatgccacatactgtttccagatgtttggggaccgtgtcaaatattggattacaattcacaacccatatctagtggcttggcatgggtatgggacaggtatgcatgcccctggagagaagggaaatttagcagctgtctacactgtgggacacaacttgatcaaggctcactcgaaagtttggcataactacaacacacatttccgcccacatcagaagggttggttatcgatcacgttgggatctcattggatcgagccaaaccggtcggaaaacacgatggatatattcaaatgtcaacaatccatggtttctgtgcttggatggtttgccaaccctatccatggggatggcgactatccagaggggatgagaaagaagttgttctccgttctacccattttctctgaagcagagaagcatgagatgagaggcacagctgatttctttgccttttcttttggacccaacaacttcaagcccctaaacaccatggctaaaatgggacaaaatgtttcacttaatttaagagaagcgctgaactggattaaactggaatacaacaaccctcgaatcttgattgctgagaatggctggttcacagacagtcgtgtgaaaacagaagacaccacggccatctacatgatgaagaatttcctcagccaggtgcttcaagcaataaggttagatgaaatacgagtgtttggttatactgcctggtctctcctggatggctttgaatggcaggatgcttacaccatccgccgaggattattttatgtggattttaacagtaaacagaaagagcggaaacctaagtcttcagcacactactacaaacagatcatacgagaaaatggtttttctttaaaagagtccacgccagatgtgcagggccagtttccctgtgacttctcctggggtgtcactgaatctgttcttaagcccgagtctgtggcttcgtccccacagttcagcgatcctcatctgtacgtgtggaacgccactggcaacagactgttgcaccgagtggaaggggtgaggctgaaaacacgacccgctcaatgcacagattttgtaaacatcaaaaaacaacttgagatgttggcaagaatgaaagtcacccactaccggtttgctctggattgggcctcggtccttcccactggcaacctgtccgcggtgaaccgacaggccctgaggtactacaggtgcgtggtcagtgaggggctgaagcttggcatctccgcgatggtcaccctgtattatccgacccacgcccacctaggcctccccgagcctctgttgcatgccgacgggtggctgaacccatcgacggccgaggccttccaggcctacgctgggctgtgcttccaggagctgggggacctggtgaagctctggatcaccatcaacgagcctaaccggctaagtgacatctacaaccgctctggcaacgacacctacggggcggcgcacaacctgctggtggcccacgccctggcctggcgcctctacgaccggcagttcaggccctcacagcgcggggccgtgtcgctgtcgctgcacgcggactgggcggaacccgccaacccctatgctgactcgcactggagggcggccgagcgcttcctgcagttcgagatcgcctggttcgccgagccgctcttcaagaccggggactaccccgcggccatgagggaatacattgcctccaagcaccgacgggggctttccagctcggccctgccgcgcctcaccgaggccgaaaggaggctgctcaagggcacggtcgacttctgcgcgctcaaccacttcaccactaggttcgtgatgcacgagcagctggccggcagccgctacgactcggacagggacatccagtttctgcaggacatcacccgcctgagctcccccacgcgcctggctgtgattccctggggggtgcgcaagctgctgcggtgggtccggaggaactacggcgacatggacatttacatcaccgccagtggcatcgacgaccaggctctggaggatgaccggctccggaagtactacctagggaagtaccttcaggaggtgctgaaagcatacctgattgataaagtcagaatcaaaggctattatgcattcaaactggctgaagagaaatctaaacccagatttggattcttcacatctgattttaaagctaaatcctcaatacaattttacaacaaagtgatcagcagcaggggcttcccttttgagaacagtagttctagatgcagtcagacccaagaaaatacagagtgcactgtctgcttattccttgtgcagaagaaaccactgatattcctgggttgttgcttcttctccaccctggttctactcttatcaattgccatttttcaaaggcagaagagaagaaagttttggaaagcaaaaaacttacaacacataccattaaagaaaggcaagagagttgttagctaaactgatctgtctgcatgatagacagtttaaaaattcatcccagttccatatgctggtaacttacaggagatatacctgtattatagaaagacaatctgagatacagctgtaaccaaggtgatgacaattgtctctgctgtgtggttcaaagaacattcccttaggtgttgacatcagtgaactcagttcttggatgtaaacataaaggcttcatcctgacagtaagctatgaggattacatgctacattgcttcttaaagtttcatcaactgtattccatcattctgctttagctttcatctctaccaatagctacttgtggtacaataaattatttttaagaagtaaaactctggggctggacgctgtggctcacacctgtaatctcagcactttgggaggccgaggcggggagatcacctgaggtgaggagttcgagaccagcctggccaacatggtgaaaccatgtctctactaaaaatacaaaaaattagccaggcgtggtgacagtggcacctgtaatcccagctacttgggaggctgaggcagaagtttgaacccaggaaacaggttacagtaggccaaaattgcgccactgcactccagcctaggcgacaacagcaagactgtgtccaaaaaaaaaaaaaaaagcaaaagcaaaactttgttttgttagactctacagcagagatttaacacccttctttaaactgggtagtcagtgatagataatatatattctgtcacttctaataaggtgccttctcctttaggtcagggtggttctaaaatggaaagaaaacacaatagggtaagtagtgcttgtctaagccagttacaacacagactcttaaagaggatcaagcccttcatttttctaacaacaaaaaatcacctatagaatatctaatttgtgatcttttactagatctgattttttaaaataatgtaatttccggccaggcacggtggcaccgcctgtaatcccagcactttgggaggccaaggcaggtggatcacctgaggttaggagttcgagactagcctggccaacatggcaaaaccccatctctactaaaaatacaaaagttagccgggcatggtggtgggcacctgtaatcccagctactcaggaggccgaggcaggagaatcgcttgaacccgagaggcagaggttgcaatgagccaagatcgtgccattgcactccagcctgggggacagggcaagactgtctctcaaaataaaaaaaaataataaaaataaaaataaaagtaatttccaaaacctcatctcatggaaagatcacaggatgaaggaaagctagactcaactctgtgaatagaagttgctatactgtaagtaaagcaacaattcagaatactgaatgagtttaaattgttttatatagcacccttttgggctagggttaattactagatctgacttggataatttgacactttgggaaatgaactctgttcttgagacttgttcagtgtattttaaacatctgaggaagaaaacttaaatatgcacctatttatacctattctttctttaggtcaacatttaacacccactgcatacattaatttgtccttgtctgctcactccagcaatttagaccttaacagtcacaagagacgttcttctgttacaaagccttagtaaattaaggcagttttgattatattctaggtccacctatgtctgaagctaaattcagtatctaactgctaatgaacaagtttccaaaatactgtaaaaatacaattagtcaatttgagtaaatgcaaatatgatgagaaatcaatttgctatttggcctggcaaatgggaacagtaaaattctgctttactcttctctagtctccttgccccagctgcacccactaccccaaagttggcagttttgaggtatgattttcaaggaatttttttagtattaacatctccctctgagaactatgtacctaaggtcacgcatacaactagtcaattctgtttttattactctaactatgtagaaacagtaagtcacttaaaacaatcacttggctgggttttttcccctttgtgccacattgattcaccctgacccaagaactccagggaaaattctttaatgtcaactgggcaactcattaacctctctttaacatcaagggcttgggaaaaaaaaaaaaaaggttagccacaggaataacaaaaacctggaatttatctttcaggttttgctttctctttctcactttgtttaaagtatctcgtactcacagttcacaaattaaccttcactgtctctttcacattaagagcttatgcttaaagcatgccccccttttctaacttgctggtttaccataaactcccctaagtaataaaattcctaacccagtactgagagtcctccttctctgccacttgggcattattttactagtttttaagccatcatcgcacaagaatccaaaaacccttaaattttttaaccactggcaaatatgtacagcaaattaggttaagcatttaatctggctcatgctctatcatactaaatattcaggtttatcataaactccttaaaaaccatcaaaggtcaaccagaaactgataactcttgaaaggagcaaacaggtaagatctttggagtttaagcttttctgagatgtgttgtgaaaaatctaacgtgtttatcgtatattcaatgtaacaacctggagaatcacaactatatttaaagagcctctggaaaatgaggccagtacagtgtgactacatgtttaattttcaatgtaatttattccaaataaactggttcatgctgaccacttgtattcaactaacaa

SEQ ID NO: 251781 - DNA, 3135 bp, Artificial Sequence
  derived and/or modified sequence
atgaagccaggctgtgccgccggcagccctggaaatgagtggatcttcttcagcacagatgagatcaccacccgctacagaaacaccatgagcaatggaggcctgcagaggagcgtcatcctgagcgccctgatcctgctgcgggctgtgacaggcttctctggagatggccgggccatctggagcaagaaccccaacttcacccctgtgaatgaaagccagctgttcctgtatgacaccttccccaagaacttcttctggggcattggaactggagccctgcaggtggagggctcctggaagaaggatggcaagggccccagcatctgggaccacttcatccacacccacctgaagaatgtgagcagcaccaacggcagcagtgacagctacatcttcctggagaaggacctgagcgccctggacttcatcggcgtgtccttctaccagttcagcatctcctggcccaggctcttcccagatggcatcgtgacagtggccaatgccaagggcctgcagtactacagcaccctgctggatgccctggtgctgagaaatattgagcccatcgtgaccctgtaccactgggacctgcccctggccctgcaggagaagtatggaggctggaagaatgacaccatcatcgacatcttcaatgactatgccacctactgcttccagatgtttggagacagagtgaagtactggatcaccatccacaacccctacctggtggcctggcacggctacggcaccggcatgcacgcccctggagagaagggcaacctggccgctgtgtacacagtgggccacaacctgatcaaggcccacagcaaggtgtggcacaactacaacacccacttccggccccaccagaagggctggctgagcatcaccctgggcagccactggattgagcccaacagaagtgagaacaccatggacatcttcaagtgccagcagagcatggtgtctgtgctgggctggtttgccaaccccatccatggagatggagactacccagagggcatgaggaagaagctgttctctgtgctgcccatcttcagcgaggccgagaagcatgagatgaggggcacagctgacttctttgccttctcctttggccccaacaacttcaagcccctgaacaccatggccaagatgggccagaatgtgtccctgaacctgcgggaggccctgaactggatcaagctggagtacaacaacccccgcatcctgattgctgaaaatggctggttcacagacagccgggtgaagacagaggacaccacagccatctacatgatgaagaacttcctgagccaggtgctgcaggccatccggctggatgagatccgggtgtttggctacacagcctggagcctgctggatggctttgagtggcaggatgcctacaccatcagaagaggcctcttctacgtggacttcaacagcaagcagaaggagaggaagcccaagagcagcgcccactactacaagcagatcatcagagaaaatggcttcagcctgaaggagagcaccccagatgtgcagggccagttcccctgtgacttctcctggggcgtgacagagagcgtgctgaagccagagagcgtggccagcagcccccagttcagtgacccccacctgtatgtgtggaatgccaccggcaaccggctgctgcaccgggtggagggcgtgcggctgaagaccaggcctgcccagtgcacagactttgtgaacatcaagaagcagctggagatgctggccaggatgaaggtgacccactacagatttgccctggactgggcctctgtgctgcccactggaaacctgtctgctgtgaaccggcaggccctgcgctactaccgctgtgtggtgtctgagggcctgaagctgggcatcagcgccatggtgaccctgtactaccccacccacgcccacctgggcctgcctgagcccctgctgcacgcagatggctggctgaaccccagcacagctgaggccttccaggcctatgccggcctgtgcttccaggagctgggggacctggtgaagctgtggatcaccatcaatgagcccaaccggctgagtgacatctacaacagaagtggaaatgacacctatggagctgcccacaacctgctggtggcccacgccctggcctggaggctgtatgaccggcagttccggcccagccagagaggagctgtgtccctgagcctgcacgccgactgggccgagcccgccaacccctatgctgacagccactggagggctgctgagcgcttcctgcagtttgaaattgcctggtttgctgagcccctcttcaagacaggagactacccagctgccatgagggagtacatcgccagcaagcacagaagaggcctgagcagcagcgccctgccccggctgacagaagctgagcggcggctgctgaagggcaccgtggacttctgtgccctgaaccacttcaccaccaggtttgtgatgcatgagcagctggccggcagccgctatgacagcgaccgggacatccagttcctgcaggacatcacccggctgagcagccccacccggctggccgtcatcccctggggcgtgaggaagctgctgcgctgggtgagaagaaactacggggacatggacatctacatcacagccagcggcattgatgaccaggccctggaggatgaccggctgaggaagtactacctgggcaagtacctgcaggaggtgctgaaggcctacctgattgacaaggtgcgcatcaagggctactatgccttcaagctggccgaggagaagagcaagccccgcttcggcttcttcaccagtgacttcaaggccaagagcagcatccagttctacaacaaggtgatcagcagccggggcttcccctttgagaacagcagcagccgctgcagccagacccaggagaacacagagtgcaccgtgtgcctcttcctggtgcagaagaagcccctcatcttcctgggctgctgcttcttcagcaccctggtgctgctgctgagcatcgccatcttccagaggcagaagaggaggaagttctggaaggccaagaacctgcagcacatccccctgaagaagggcaagagggtggtgtcctag

SEQ ID NO: 251782 - DNA, 3135 bp, Artificial Sequence
  derived and/or modified sequence
atgaagcccggctgcgccgccggcagccccggcaacgagtggatcttcttctccactgacgaaatcaccacaaggtaccggaataccatgtccaacgggggcctgcagaggagtgttatcttgagtgccttaatcctgctgagagctgtaaccgggttcagcggtgacggcagggccatttggtccaaaaatcctaactttaccccggttaacgagtctcagctgttcctatatgatacttttccaaagaatttcttttgggggatcggcaccggggcccttcaggtggaaggctcttggaagaaagatgggaagggaccatcgatctgggaccattttattcatactcaccttaagaatgtgtcaagcactaacggcagctcggattcctacatcttcctggaaaaagacctcagcgccctggactttatcggagtgtccttttatcagttctcaattagctggccacggctgtttccagacgggattgtgaccgtggcaaacgcaaagggcctccaatattactcaacgctgctcgacgctctggtcctgagaaatatcgagccaatagtgactctctaccattgggatctcccccttgccctgcaggagaaatacggcggttggaagaacgatacaattatcgatattttcaatgattatgcaacatattgtttccagatgttcggagacagggtaaaatactggattacaattcataacccctaccttgtggcttggcatggctacggcaccggtatgcacgcccctggcgagaaaggcaacctggcggcggtttatactgttgggcataacctcatcaaggcacactcaaaagtgtggcacaactacaacactcatttccggcctcaccagaagggatggctgtcaattaccctgggctcccattggattgagcctaaccggtcagaaaacaccatggacatcttcaaatgtcagcagtccatggttagcgtactcggctggtttgccaatccaatccatggggacggcgactatccagaaggcatgaggaagaagctgttcagcgtcctgcccatcttctctgaggccgagaaacatgaaatgcgaggtactgctgacttcttcgcgttctcttttggaccaaataactttaaacctttgaacactatggccaaaatggggcagaatgttagtctgaatttaagagaagcactgaattggattaagctggagtacaataatccccgcattttaattgccgagaacggatggttcaccgacagtagggttaaaaccgaggacacgacagccatctacatgatgaagaatttcctcagccaggtcttacaggcaatcaggttagatgaaattagggtgtttgggtacactgcctggtctttactggatgggtttgagtggcaagacgcatacacaatccgtagagggctgttctacgtcgatttcaacagtaagcagaaagagcgtaagcctaagtcatctgcccactactataagcagattattagggaaaatggtttcagcctcaaagagagtacacccgacgtgcagggacagtttccctgcgacttctcttggggcgttacagagagcgtgttgaagcccgagtcagtggctagttcccctcagttttccgacccccatctgtacgtgtggaatgctaccgggaacagactccttcacagagtggagggcgtccgcctcaagactcgccctgctcaatgtactgactttgtgaacataaagaagcaactcgaaatgttagcccgaatgaaagtgacacattaccggttcgcactcgactgggctagcgtgctacccaccggcaacttatctgcagtgaaccgacaagccttgcgctactaccgctgtgtcgtatccgaggggctaaagttgggcatcagtgcaatggtgacactttattacccgacacacgcacaccttggcctgcccgaacccctccttcacgccgatggatggcttaatcctagcaccgctgaggctttccaggcctatgccggcctgtgttttcaagagctgggagaccttgtgaagctgtggatcacgatcaacgaacccaaccggcttagtgacatttacaataggtcgggcaatgacacgtatggagcagcgcacaacctgctggtggcacatgcgctggcatggcgcctgtacgaccgacaatttcggcccagccagagaggggcggtgtccctgtcattacacgctgattgggccgagccagccaacccttatgctgattcgcactggagagctgccgagcgctttcttcaattcgaaattgcctggtttgccgagccattattcaagaccggggattatcccgctgctatgcgcgagtacatagccagcaagcataggcgcggcctcagcagtagtgccctgccgaggctgacagaggctgaacggcgcctgctgaaggggaccgttgacttttgcgccctcaatcatttcacaacaaggttcgtgatgcatgagcagttagcagggagccgatacgactccgaccgtgatatccaattcctgcaggacataactaggctctctagccccacacgtttagccgtcattccctggggagttcgcaagctgctcaggtgggtgcgccggaactacggggatatggacatctatatcactgcatctgggatagatgaccaggctctggaggacgaccggcttcgcaagtattatttgggcaagtacctccaagaggtactgaaggcttacctgatcgacaaggtgagaattaaaggatactatgcgttcaagttagctgaggagaaaagtaagcccagatttgggttctttacttctgacttcaaagccaaatctagcattcagttctacaacaaagtgatttcgtccagggggttccctttcgaaaattcaagcagccggtgctctcagacccaggaaaatactgagtgcactgtctgcctctttctggtgcagaaaaagcccttaatcttccttggatgttgttttttcagtacactcgtcttgctcctgagcatagcaatcttccagaggcagaagcgccgaaaattctggaaggctaagaacctgcagcacatcccactcaagaagggtaagcgcgtggtgtcctag

SEQ ID NO: 251783 - DNA, 3135 bp, Artificial Sequence
  derived and/or modified sequence
atgaagccgggatgtgccgcagggtcacccggaaatgagtggattttctttagtacggacgagataactacacgctaccgtaatacaatgtccaatggtggactacaacgtagcgtcatactgtccgccctgattctcttacgggctgttactggtttttccggggacgggcgagcaatttggagcaagaacccaaattttactcctgttaatgagtctcaacttttcctatacgacacattccccaaaaactttttctgggggataggcactggcgcactgcaagtggagggatcgtggaaaaaagacggtaagggtcctagtatctgggatcacttcatacatacacatctgaaaaacgtctcctccacaaacggatcaagtgactcctatatctttctagagaaggatctgagtgctcttgactttattggagtgtccttttaccagttcagtatttcatggcctcggcttttccctgacggaatagtcactgtggcaaacgctaaagggctccagtattacagtaccctgctggacgcactggtgcttagaaatatcgaaccaatcgtcaccttataccactgggacttacccctggccctgcaagaaaaatacggagggtggaagaacgacaccatcatagatatcttcaatgactacgcaacgtactgcttccagatgtttggagacagagtgaaatattggataaccatccacaacccctatctggtggcgtggcatggttacggaactgggatgcatgcgcctggcgaaaaagggaatctggccgctgtctataccgttggacataatctcattaaagcccatagtaaggtgtggcacaattacaacacacatttcaggccccaccagaagggctggctctccattaccctcggctcacattggattgagcctaatcggtctgaaaacactatggacatattcaagtgtcaacagagtatggtctcagtcctggggtggttcgctaatcccattcatggcgatggtgactacccagaaggtatgagaaagaagctgttctctgtactgccaatatttagtgaagccgagaaacacgaaatgcgtggtactgcagatttttttgcattctcatttgggcctaacaatttcaagcccctgaacacgatggccaagatgggtcagaatgtgtctctgaatttgcgagaagcccttaactggatcaaactggagtacaataatcctcggatactgatcgccgaaaacgggtggtttacggactcccgagttaaaactgaggatacaacggccatttacatgatgaagaactttctgagccaggtcctccaggcgattcgtcttgatgaaattagagtgtttgggtacaccgcatggagcctcctcgacggctttgaatggcaggacgcctacacgataaggcgtggactcttttatgtcgatttcaacagcaagcagaaagagcggaagccaaagagctctgctcactattataagcagatcattcgggaaaacggtttctccctcaaggagtctactcccgacgtccaaggacagtttccatgtgattttagctggggagtcaccgagagtgtcctgaaacctgagtccgtagcaagctcgccacagtttagcgatcctcacctatacgtgtggaacgccactggtaacaggctcttgcaccgggttgaaggcgtaagactcaagacacgacccgctcagtgcaccgactttgtcaatattaagaaacagctcgagatgctggcccgaatgaaagtgacacattaccgttttgccctcgactgggctagcgtgctgccaacaggaaacttgtcagccgtgaatcgacaggcattaaggtattatagatgtgtggtttccgaagggctgaagctcggaatctcagcgatggtgacactttattacccaactcacgcccacctcgggttacctgaacccctgctacacgcagacgggtggctcaatccctccaccgctgaagcctttcaggcctatgctggcctgtgtttccaggagttgggcgaccttgtgaaactctggatcaccattaatgaacccaaccgcctatccgacatctacaataggtctgggaatgatacatacggcgctgctcacaacctgttagttgcacacgcccttgcgtggcgcctgtacgacagacagttcagacccagtcagagaggggctgtgtcactttcccttcatgccgactgggcagaacccgctaacccatacgccgacagccattggcgcgctgcggagcgcttcctgcaattcgaaatcgcctggttcgcagagccccttttcaagaccggcgactatcccgcagcaatgagagagtatattgcctccaagcatcgtagaggcctttcatccagtgccctcccgaggctcactgaggcagaaagaaggttgctgaagggcaccgtagatttttgtgccctgaaccactttaccacacgcttcgtcatgcacgagcagttggcgggaagccgctatgactctgatagggatatacagttcctgcaggatattacaaggctcagctcaccgaccaggctggcagtcattccttggggagtcaggaagcttctacgctgggttcgccgaaattacggagatatggatatctacatcaccgcctcaggcattgacgaccaggcactggaagacgatcgcctcagaaagtattacctcggaaaatatctgcaggaagtccttaaggcctacctaatcgataaggtcagaatcaaagggtattacgccttcaagttagccgaagaaaagagcaaaccgagattcggtttcttcacttccgactttaaagccaaaagctctatacagttctacaacaaggttataagctcacggggttttcccttcgagaactcctccagtcggtgcagtcagacccaagaaaacactgaatgcaccgtgtgtctgttcctagtccagaagaagcctctgatcttcttgggctgctgtttcttttccactctcgtgctgctcctgtctattgctattttccagcgacagaagagaaggaagttttggaaagccaagaatttgcagcatatccccctgaaaaaggggaagcgagtggtatcatag

SEQ ID NO: 251784 - DNA, 3132 bp, Artificial Sequence
  derived and/or modified sequence
atgaagcccggatgtgcagctggttcacctggcaacgaatggatcttcttttctaccgacgaaatcactacccgttacagaaatactatgtcaaacggtggtctgcagcggtcggtgatcctgagcgcccttatacttctgagagcggtcaccggcttttccggagacgggcgtgccatatggtccaagaatccaaactttacgccagtgaatgaaagccagctgttcctgtacgatacgttcccaaagaactttttctggggaattgggactggcgccctgcaggtggaaggttcctggaagaaagatggcaaggggccttccatctgggaccacttcatccatactcatcttaagaacgtgtcatcgaccaacggttcctccgatagctacatattccttgagaaggatctttcagcactggatttcatcggtgtctcgttttaccaatttagtattagctggcctcgactgttccctgacggcattgtgaccgtggcaaacgcaaagggtctgcaatactattcgacccttttggacgcactggtgcttcggaatatcgagcctattgtgaccctgtaccattgggaccttcctttggcactccaggagaaatacggaggatggaagaacgacactataatcgatatctttaatgattacgccacctactgtttccaaatgtttggagatagagtgaagtactggattactatccataatccttaccttgtggcatggcatggatacggaactggaatgcacgccccgggtgagaagggaaacctggcggcagtctacaccgtgggccataatctgataaaagcgcatagcaaggtgtggcacaactataacacccactttaggcctcaccagaagggatggctctcaattaccttgggttcgcattggattgaaccaaatcgctccgaaaacaccatggacattttcaagtgccagcaatcgatggtgtcggtgcttgggtggttcgcaaatcctatacacggcgacggagattacccagaaggaatgaggaagaaactgtttagcgttttgcctatattctcggaagcagaaaagcacgagatgcgaggtacggcagatttcttcgctttctcatttggcccaaacaatttcaagcctttgaatactatggccaaaatgggtcagaacgtgtcactgaacctgcgcgaagcactcaactggattaagctcgagtacaacaacccacgcatactcatcgcagaaaacggctggtttacggactcccgggtgaaaaccgaggacaccactgcgatttacatgatgaagaactttctttcgcaggtcctgcaagccattcgcctggacgaaatccgggtgttcggatataccgcatggtccttgcttgacggatttgaatggcaggacgcgtatactattcgtcgaggcctgttctacgtggatttcaacagcaaacagaaggagcggaaaccaaaatcatcggcacattactacaaacaaatcattcgtgaaaacggattctcgctgaaggaaagcaccccagatgtgcagggtcaatttccatgcgatttttcatggggcgtcaccgaatcggtgcttaaaccagagagcgtcgcctcctctcctcaattttctgatccccacctgtacgtttggaacgcaaccgggaaccgtcttttgcatagggtggaaggtgtcagactgaaaactcggcctgcacaatgtaccgactttgtgaacattaagaagcaactggaaatgctcgcacggatgaaggtgacccactaccgttttgcactggattgggcgtccgtgctgccaactgggaatctttcggccgtgaacagacaagcactgagatattacagatgtgtcgtctctgaaggtcttaagctcgggatatcggcaatggtgacgctgtactaccctacgcacgcacaccttggattgcccgaaccgctgttgcacgcagatggatggcttaacccttccactgcagaagcatttcaggcgtacgcgggcctgtgcttccaagaactgggggatcttgtcaaactgtggatcactatcaacgagcctaacaggctgtcggacatatacaaccgctccggcaatgatacttacggtgcagcacataatctcctcgtcgcacacgccctggcctggagactgtacgaccgccagtttcgcccgtcacagaggggcgcagtgtcactttcactgcacgcagattgggcggaaccagcaaatccttacgcagactcgcactggcgcgcagccgaacgctttttgcagtttgagatagcatggtttgccgaacctctctttaagaccggagactaccctgcggcaatgcgagagtacatcgcatcaaagcatcgtagaggactttcgagctccgcacttccaaggctgaccgaagctgaacgcagactgctcaagggcactgtcgacttctgtgcactcaatcactttactacgaggtttgttatgcatgaacaacttgccggttcacgatacgatagcgatcgggacattcagttcctccaagatattacccggctgtcgtcgcctactagactggccgtgattccctggggtgtccgcaaacttttgcggtgggttcgaaggaattatggggatatggacatctacataactgcgagcggaattgatgaccaagccctggaagatgatagactgcgaaagtactacttggggaagtaccttcaagaagtgcttaaggcctaccttatcgacaaagtccgtatcaaaggttactatgcctttaaacttgcagaagaaaagtccaagccacggtttggcttcttcacctcggatttcaaggcaaagtcatccattcagttttacaacaaggtcatctcgtctaggggatttccatttgaaaactccagctcaagatgttctcaaacccaagagaacaccgagtgtactgtgtgtctttttctcgtccaaaagaagcccctgatcttccttggatgctgcttcttctccaccctcgtgctgcttctcagcatcgcaatcttccaacgacagaagcgccgcaagttctggaaggcaaagaaccttcagcatataccgctgaagaaaggaaaacgcgttgtctca

SEQ ID NO: 251785 - DNA, 3132 bp, Artificial Sequence
  derived and/or modified sequence
atgaagcccggctgtgccgcaggaagccccgggaatgaatggatatttttcagcactgatgaaatcacaactcgttatcgtaacacaatgagcaacgggggcctccagagatctgtgatcttatcagctcttatattgttacgagcagtgaccggattcagtggggatggacgcgccatatggtctaaaaatcctaatttcacaccggtgaacgaaagccagctgttcctatatgacacttttcctaagaatttcttttggggcattggaactggcgcgctgcaggttgaggggtcatggaaaaaagatggcaaaggcccaagcatctgggatcacttcatccacactcacctcaagaatgtgagctcaaccaacgggtcctcggactcttatatcttcctggagaaggacctgtcggctctcgatttcatcggagtatctttctatcaattttccatttcttggcctaggttgttccctgatggcatcgtgaccgtggcgaatgccaaagggctccagtactactcaacattgcttgacgccctcgtgctgagaaatatcgaacccattgtgaccttgtatcactgggatctgccactggctctgcaggagaaatatgggggttggaagaacgataccattatagatatattcaacgactacgcaacgtactgttttcagatgttcggggacagagttaaatactggatcaccattcataatccttatttggtggcgtggcatggctacggaacaggtatgcacgccccgggcgagaaggggaacctggccgccgtgtatacagtgggccacaatctaatcaaagcacacagcaaagtctggcacaactataacacccatttcagaccccaccagaagggatggctctctattactctaggttcacattggattgagccaaacaggagcgaaaataccatggacatttttaaatgccagcagtcaatggtgagtgtcttgggctggttcgcaaaccccattcacggtgatggggattacccagaggggatgcgcaaaaagctgttcagcgtactgccgattttttccgaagccgagaagcatgaaatgagagggacggcagacttcttcgcctttagctttggacccaacaatttcaagccactgaatacgatggcaaaaatgggacaaaatgtttccctgaacctgagagaggctctcaactggatcaagttggagtataataatccacgtatactgatcgccgagaacggctggttcacagactcaagagtgaaaacggaggatactactgccatctatatgatgaagaattttctgtcacaggtgctccaggctattaggctggatgaaattcgggtttttgggtacacggcgtggagtctgctagacgggttcgagtggcaggacgcttataccatccggagagggctgttctacgtcgacttcaatagcaagcagaaggagcgtaagcccaagtcctcagctcattactacaaacagatcatcagggagaatggcttctcactgaaggagtctactcctgacgtgcaaggccagttcccctgcgacttcagttggggcgtcactgagtcagtgcttaagccagagtcagttgcttctagccctcaattcagcgatccacatttgtacgtgtggaacgccacaggaaatcgcttgctgcaccgagtggaaggcgtccgactcaaaacaaggcccgcacagtgcaccgacttcgtgaacataaagaagcaactggaaatgcttgcccgcatgaaggtcacacattaccggtttgctttggattgggctagtgtcctgcccacgggcaatcttagcgctgtcaatagacaggctctacgttattatcgttgtgttgtgtctgagggcttgaagctcgggatcagtgccatggtgacgctgtattaccctacacacgcacacttgggcctgccggaaccgctgttgcacgcggatgggtggctgaatccttccaccgcggaagctttccaagcttacgctggcctgtgcttccaggagctgggcgatctggtgaaactctggataaccatcaatgaacccaacaggctgtcagacatttacaatcggagtggcaacgacacatatggtgcagcccacaaccttctcgttgcacacgccctcgcttggcggctgtatgaccgccagttccgaccctcccagcgtggagcagtttctttatctctccatgccgactgggccgagcccgcgaatccctacgccgactcccattggcgggctgcggaaagattccttcagttcgagatagcttggtttgctgagccattgttcaagactggcgactaccctgccgccatgagagagtacattgcctcaaagcatagacggggcttaagcagctccgcacttccacgactgaccgaggccgagaggcgtttgctgaagggcaccgtagacttttgcgctctgaaccacttcactaccagattcgtcatgcatgagcagctagcagggagtcgctacgacagtgatagggacattcaattcctccaagacatcactagactatcttcccctactcgtctggcagtgattccatggggagtgaggaaactactgcgatgggtgcgccgcaactacggagacatggacatctacataacagcttcgggcatcgatgaccaggccctggaagatgaccgtctgcgaaaatattacctcggtaagtatttgcaggaggtactcaaggcttatctcattgataaagtcaggattaaaggatattacgctttcaaactggctgaagaaaagtccaaacctcggttcggcttttttacgtccgactttaaagcaaagtcgtcgattcaattctataacaaggtgatcagctctcgggggttcccttttgaaaactctagtagcaggtgttcccaaacacaggagaataccgaatgcacagtttgcttgtttctggtccagaagaaacccctcatcttcctcggctgctgcttttttagtaccctagtgctgttgctctcaatcgctatcttccagcgtcagaagaggagaaagttttggaaggcaaagaaccttcagcacatccctcttaagaaaggaaaacgcgtcgtcagt

SEQ ID NO: 251786 - DNA, 3132 bp, Artificial Sequence
  derived and/or modified sequence
atgaagccaggatgcgctgcaggatcgcctgggaacgagtggatcttcttctcgactgacgaaatcaccactagataccggaacaccatgtccaatggagggctgcagcggtccgtgattctgagcgcgctgatcctcctccgggccgtcaccgggttctcgggagacggaagagccatctggtcgaaaaacccaaatttcactcctgtgaacgaatcgcagctctttctgtacgacacgttcccgaaaaacttcttttggggaatcggcaccggagccttgcaggtggaaggctcctggaaaaaggacgggaagggaccttccatttgggaccacttcatccatacccacctgaaaaacgtcagctcaactaacggatcgagcgatagctacatcttcttggagaaagatttgtcggcactcgatttcatcggagtgtccttctaccagttttcgatctcctggccgcggctcttcccagacggaattgtgaccgttgcgaatgcaaagggcctgcagtactactccactctcctcgatgcgctggtccttcggaacatcgaaccgatcgtgaccttgtaccactgggacctgccattggcattgcaggagaaatacggagggtggaagaatgacactatcatcgatatcttcaacgactatgcgacgtactgctttcagatgttcggtgacagagtcaagtactggataaccatccataatccatacctcgtcgcttggcatggctacggcaccggaatgcatgcgccaggtgagaagggcaatttggccgccgtgtacaccgtgggacacaacctgattaaggcacactccaaagtctggcacaactacaacactcacttccggccgcaccagaagggatggctgtctattactttgggctcgcactggatcgagccaaaccggagcgagaacaccatggatatcttcaaatgtcagcaatcaatggtgtcagtgctcggatggtttgccaaccctatccatggtgacggagattatcccgaaggaatgagaaagaagttgttttcggtgctcccaattttctcggaagcagaaaaacacgaaatgcgcggaactgccgatttcttcgcgttttcgtttggaccaaacaactttaaaccgctgaataccatggccaaaatgggacaaaatgtcagcctgaacctccgcgaagcgctcaactggatcaagctggaatacaacaaccccagaatactgatcgccgaaaatggatggttcacggactcacgggtcaagaccgaagatacgactgccatttacatgatgaagaactttctctcccaggtgctccaggcaatccgactggatgaaatccgggtctttggatacactgcctggagcctgctcgatgggttcgaatggcaagacgcttacactatccgccgcgggctcttctacgtggatttcaactcaaagcaaaaagagcgcaagccaaagtctagcgcgcattactacaagcaaatcattcgcgaaaatggtttctccctgaaggagagcacccctgacgtgcaaggacagttcccatgtgatttttcatggggagtcaccgaaagcgtactcaaaccggaatcggtcgcatcgtccccccagttctccgacccgcacctgtatgtgtggaacgctaccggcaaccggctgctgcatcgcgtggagggggtgagactcaagacccgccctgcgcaatgcactgatttcgtcaacattaagaagcagctggaaatgcttgcacgcatgaaggttactcactaccgcttcgccctggattgggcctcagtgctgcccacgggaaacctgtcggcggtgaaccggcaggcgctgaggtactacagatgcgtggtatcggagggactcaaacttggaatctcagctatggtcaccttgtactatccaacccacgctcatctgggacttcccgaaccactgcttcacgccgatggttggctgaacccctccactgctgaggcctttcaggcttacgcgggactttgctttcaagaactcggggacttggtcaagctgtggatcactatcaacgagccgaatagactgtcggacatctacaaccgctctggaaacgacacctacggggccgcccataacttgctggtggcccacgcgctggcatggcgcctctacgatcgccagttccggccaagccagagaggagctgtctcgctttcgctgcacgcagactgggcggagccggcaaacccgtacgcagatagccactggcgcgcggcagaacggtttttgcagttcgagatcgcatggttcgccgaacctctcttcaaaaccggcgactacccagccgcgatgcgtgaatacatcgcatcgaagcatcggcgcggcctgtcctcttcggccctcccgcggcttactgaagctgaacgccggctcctcaagggaaccgtggacttctgcgcgcttaatcacttcactacgcgcttcgtgatgcatgaacagttggccggatcgcgctacgatagcgatcgggatatccaattcttgcaggatatcacccgcctgtccagcccgacgagattggcggtgataccgtggggtgtccgcaaactgcttagatgggtccgccgcaactacggcgacatggatatctacatcactgcgtccggcatcgatgaccaagcattggaggacgacagactgagaaaatactacctgggtaagtacctgcaagaagtgctcaaagcctatctcatcgataaggtgcggatcaagggttactacgccttcaaactggctgaagaaaagtcgaagcctcgctttgggttctttacctcagacttcaaggcgaagtcatccattcaattctacaataaagttatttcaagccgcggatttccctttgagaacagctcatcccgttgttcgcaaactcaggagaacaccgagtgcaccgtctgccttttcctcgtccaaaagaagccgctgatcttcctcggatgttgcttcttcagtactctggtgctgctcctcagcatcgcaatctttcagagacaaaagcgcaggaagttctggaaagccaagaacctgcaacacatccctctgaagaaaggcaaacgggtcgtgtcc

SEQ ID NO: 251787 - DNA, 3132 bp, Artificial Sequence
  derived and/or modified sequence
atgaaacctggctgtgcggcaggctcccctgggaacgagtggatattcttctcaaccgacgagataaccaccagatacaggaataccatgtcgaatggcggtttgcagcggtccgtgattctgagcgcactgattctgctgcgcgcagtcactggttttagcggtgacggccgcgcaatctggagcaaaaatccaaatttcactcctgttaacgagagccagctgttcttgtacgacaccttccctaagaatttcttttggggaattggaactggcgcgctccaagtggaaggatcctggaaaaaggatggtaagggtccgtcaatatgggatcactttatccacacccatctcaaaaacgtgagctccactaacggctcatcagactcgtacatttttcttgagaaagacctgtcggctcttgacttcataggagtcagcttttatcagttcagcatttcctggcctcgcctgttcccggatggtattgtgaccgtggcaaacgcaaagggcttgcaatactacagcacgctcctcgacgcactggtccttcgaaacatcgagcccatagtgaccttgtatcactgggatctgcctctggccctgcaagaaaagtacggaggctggaaaaatgataccataatagacatctttaacgattacgccacctactgtttccagatgtttggtgatagggtcaaatactggatcactattcataacccttacctcgtggcatggcatggttacggaaccggtatgcatgctcctggtgagaagggaaaccttgcagccgtgtacactgtgggccacaatttgattaaggcacattcgaaggtctggcataactacaacacccattttagacctcaccaaaaaggctggctgtcgattaccctgggatcgcattggattgagcccaaccgctcggagaacactatggacatattcaaatgtcaacaatcgatggtcagtgtcctggggtggtttgcaaatccaatccatggagacggagactacccagaaggaatgaggaaaaaacttttttcggtccttccaattttcagcgaggcagaaaagcacgagatgaggggaactgctgatttcttcgcattcagctttggtcccaacaactttaaacccctgaacaccatggcgaagatggggcaaaatgtgagcctgaatcttagagaggcgcttaactggatcaaactggagtacaacaaccctcgaattttgattgccgaaaatggatggttcaccgacagccgggtgaaaaccgaagatactaccgcaatttacatgatgaagaacttcttgagtcaagtgctccaagcaattaggctggatgagattagggtgtttgggtacaccgcatggtcgcttctggatgggtttgaatggcaggatgcatataccattcgcagaggcctcttctacgtggatttcaactccaagcagaaggaacgcaagccaaagtcctctgcgcactactacaaacagatcattcgcgaaaacgggttttcactgaaggaatccacgcctgatgtgcaaggacaatttccatgcgatttctcgtggggagtcaccgaaagcgtgctcaagccggagtcggttgcctcgtccccacaattctcggaccctcacctttatgtgtggaatgcgactggtaatagactcctgcatcgggtggaaggcgtgcggcttaagacgcgcccggcacaatgcacggattttgtgaacataaagaagcaactggaaatgcttgcaagaatgaaagtgacccactacagattcgcactggattgggcatccgtgctccctactggcaacctgagcgccgtgaatcgacaggctctgcggtactacagatgcgtggtgtccgaaggcctgaagctgggaatctcggcaatggttacgttgtattacccgacccatgcacatctgggattgcctgagccactcctccatgctgatggatggctgaatccctccaccgcggaagcgtttcaggcttacgcaggtctgtgttttcaagaactgggagatctcgtcaagctgtggattaccataaatgaacccaaccgtctctccgatatctacaacaggtcgggaaacgatacctacggagcggcacacaaccttctcgtggcacatgcactggcctggagactgtacgatcggcagtttcgaccttcccaacgaggggctgtgtcgctttcgcttcacgcagattgggccgaacctgcgaacccatacgcagactcacactggagagcagcggagaggtttctccaatttgaaattgcatggttcgcagaaccgctcttcaaaactggcgattaccctgccgctatgcgcgaatacattgcatcgaagcataggcggggactttcctcgtctgcactccctcgactgacggaggcagagcggcggctgctcaagggtacggtcgatttttgcgcacttaaccactttactactagatttgtgatgcatgaacaactcgccggatcgcggtacgattcggaccgcgatattcagttccttcaagacattaccagactttcttcccctacccggctcgctgtcataccatggggagtgagaaagctgctccggtgggtcagacgtaattacggagacatggatatctacatcaccgcaagcggaattgacgaccaagctcttgaggatgatagactgcggaagtattaccttggaaagtacctgcaagaagtgctgaaggcgtaccttattgacaaagtgcggattaaggggtactacgccttcaagctggcagaagagaagtctaagccacgatttggctttttcacctcggactttaaggccaagtcgtcgattcagttctacaacaaggtgatttcctccagaggattccccttcgaaaactcctcgtcgcgatgctctcagacccaagaaaacactgaatgtactgtgtgtctgttcttggtccagaagaagcccctgatctttctgggatgttgctttttctcgaccctggtccttcttctctcgattgccatttttcaaagacagaagcggcgcaagttttggaaggcgaagaacctgcagcatatccctctgaagaagggcaagcgtgtggtgtca

SEQ ID NO: 251788 - DNA, 3132 bp, Artificial Sequence
  derived and/or modified sequence
atgaaacccggctgcgccgccggttccccagggaatgagtggatctttttctcaacagatgagataacaactcgctaccgaaacacaatgagcaatggcggtctccagagatctgtcattctcagtgcactgatcctcctgagggcagtcactgggttctctggtgacggtcgggccatctggtcaaaaaatcctaacttcacaccggtcaatgagagtcagttgttcctgtacgacacatttcccaagaatttcttttgggggattggcacaggggcactgcaggtggaggggtcctggaagaaggacggcaaagggccaagcatttgggaccacttcattcatactcatcttaagaacgtttcctcaaccaatggatctagtgatagctatatcttcctcgaaaaagacctttccgccctggactttattggggtttccttctatcagttcagcatctcatggccaaggctgttcccagacggaattgttacagttgcaaacgcaaaagggttgcagtattactctacgttgcttgatgccttggtgctcagaaacattgagcctattgtgacgctctatcattgggatctcccactggccctccaggagaagtacggtgggtggaagaacgacacgatcatagacatcttcaacgattacgccacttattgctttcagatgtttggcgatagagtaaagtattggatcacgatacacaatccctacctcgtagcctggcatgggtacggcaccggaatgcacgcgcccggcgaaaagggaaatctggccgcagtctatacggtgggtcacaacctcatcaaggcacattcaaaggtgtggcataattataacacacacttccgccctcatcaaaagggatggttgagtatcacgctgggaagccactggatcgagccaaatagatcagaaaataccatggacatttttaagtgccaacagtctatggtttctgtcttgggctggttcgcaaacccaatccacggcgatggggattatccagaggggatgcgcaaaaagctgttcagtgttctgccaatctttagcgaagcagagaagcacgaaatgaggggaacggctgatttcttcgccttctctttcgggccgaacaatttcaagcctctgaataccatggccaaaatggggcagaatgtgtctcttaatctgagggaagcccttaattggataaaacttgaatacaacaatcctaggatcctcatagcggagaatgggtggtttacggattctagagtgaagacagaagatactacagccatctatatgatgaagaacttcctgtcccaagtgctgcaggctatacggctcgacgagattagagtttttggctataccgcatggtccctgctcgacgggtttgaatggcaggacgcatatacaatcaggcgagggctcttttatgtggatttcaattcaaaacagaaagaaagaaaaccgaagagttccgcacactattacaaacagatcatcagagagaacggcttcagcctgaaggaatcaacccccgacgtccagggccagttcccctgcgatttcagttggggcgtgacggaatcagtgctgaagccagagtctgtggcatcctcacctcagtttagtgatccccacctgtatgtctggaacgccaccggcaacaggctgctgcacagggtggagggtgtgaggcttaagacacggcccgctcagtgcactgattttgtgaacattaaaaagcagctggagatgctcgccaggatgaaagtgacgcattacaggtttgcgctggattgggcatctgtgctgccgaccggcaatctgtctgccgtgaatcgccaggcccttaggtactaccgatgtgtggtttccgagggcctcaagctgggaatttcagctatggtgactctgtactatcccactcacgcccatctcggactgccagagcctctgctccacgcggatggatggctcaatcccagtacggcagaggcctttcaagcctatgccggactctgttttcaggagctgggcgaccttgtcaagctctggataaccatcaatgagccaaacaggttgagcgacatttataacagatccggtaatgacacatatggagctgcccacaacttgctggttgcacacgccctcgcctggagactgtacgatcgccagtttagacccagccagcggggcgccgtcagtctgagtcttcacgccgattgggctgagcccgctaacccttatgccgactctcattggcgggccgcagagcgatttctgcaattcgaaattgcttggttcgccgagcctttgttcaagacaggggattatccagccgcaatgcgggagtacatcgcttctaagcacaggagagggctcagttccagcgccctgcctcgcttgaccgaggctgagcggaggctcttgaagggtacagtggacttttgcgctctgaatcatttcaccactaggtttgtcatgcacgagcagctcgctggtagccggtacgactcagatcgggacatccaattccttcaggacatcactcgactgagtagccctactagactggccgtgataccttggggcgttagaaagctgttgcggtgggtccgacgcaactatggggacatggacatctatattactgccagcgggattgacgatcaggccctggaagatgatcggcttcgcaagtactatttgggaaagtatctgcaggaagtgctgaaagcctaccttatcgataaggtgcgcatcaagggctactacgcctttaagttggctgaagagaaatcaaagcctcggtttggtttcttcacatctgactttaaagcaaagagctcaatccagttttacaataaggttatatctagtcgaggctttcccttcgagaacagctccagtcgctgtagtcagactcaggagaacacagaatgtacggtctgccttttccttgtgcagaagaaacccctgatctttcttgggtgttgtttcttctcaaccctcgtcctcctgctgtccatcgcaatttttcagagacagaaacggcggaagttttggaaggccaagaacctccagcacatccccctgaaaaaaggcaagcgggttgtgagt

SEQ ID NO: 251789 - DNA, 3132 bp, Artificial Sequence
  derived and/or modified sequence
atgaaaccgggttgtgcggcgggttcgccgggtaatgaatggatatttttttcgacggatgaaataacgacgcgttatcgaaatacgatgtcgaatggtggtctacaacgttcggttatactatcggcgctaatactattacgtgcggtaacgggtttttcgggtgatggtcgagcgatatggtcgaaaaatccgaattttacgccggttaatgaatcgcaactatttctatatgatacgtttccgaaaaattttttttggggtataggtacgggtgcgttacaagtagaaggttcgtggaaaaaagatggtaaaggtccgtcgatatgggatcattttatacatacgcatttaaaaaatgtatcgtcgacgaatggttcgtcggattcgtatatatttctagaaaaagatttatcggcgttagattttataggtgtatcgttttatcaattttcgatatcgtggccgcgactatttccggatggtatagtaacggtagcgaatgcgaaaggtctacaatattattcgacgctattagatgcgctagtattacgaaatatagaaccgatagtaacgttatatcattgggatttaccgttagcgctacaagaaaaatatggtggttggaaaaatgatacgataatagatatatttaatgattatgcgacgtattgttttcaaatgtttggtgatcgtgttaaatattggataacgatacataatccgtatttagtagcgtggcatggttatggtacgggtatgcatgcgccgggtgaaaaaggtaatttagcggcggtatatacggtaggtcataatctaataaaagcgcattcgaaagtatggcataattataatacgcattttcgaccgcatcaaaaaggttggttatcgataacgttaggttcgcattggatagaaccgaatcgttcggaaaatacgatggatatatttaaatgtcaacaatcgatggtatcggtactaggttggtttgcgaatccgatacatggtgatggtgattatccggaaggtatgcgaaaaaaactattttcggttttaccgatattttcggaagcggaaaaacatgaaatgcgtggtacggcggatttttttgcgttttcgtttggtccgaataattttaaaccgttaaatacgatggcgaaaatgggtcaaaatgtatcgttaaatttacgagaagcgttaaattggataaaattagaatataataatccgcgtatattaatagcggaaaatggttggtttacggattcgcgtgttaaaacggaagatacgacggcgatatatatgatgaaaaattttctatcgcaagtattacaagcgatacgtctagatgaaatacgtgtatttggttatacggcgtggtcgttattagatggttttgaatggcaagatgcgtatacgatacgtcgaggtctattttatgtagattttaattcgaaacaaaaagaacgtaaaccgaaatcgtcggcgcattattataaacaaataatacgagaaaatggtttttcgctaaaagaatcgacgccggatgtacaaggtcaatttccgtgtgatttttcgtggggtgttacggaatcggtattaaaaccggaatcggtagcgtcgtcgccgcaattttcggatccgcatttatatgtatggaatgcgacgggtaatcgactactacatcgagtagaaggtgttcgtctaaaaacgcgaccggcgcaatgtacggattttgttaatataaaaaaacaattagaaatgttagcgcgaatgaaagtaacgcattatcgatttgcgctagattgggcgtcggtactaccgacgggtaatttatcggcggttaatcgacaagcgttacgatattatcgttgtgtagtatcggaaggtttaaaattaggtatatcggcgatggttacgttatattatccgacgcatgcgcatttaggtctaccggaaccgctattacatgcggatggttggttaaatccgtcgacggcggaagcgtttcaagcgtatgcgggtctatgttttcaagaattaggtgatttagttaaactatggataacgataaatgaaccgaatcgtctatcggatatatataatcgttcgggtaatgatacgtatggtgcggcgcataatctactagttgcgcatgcgctagcgtggcgattatatgatcgacaatttcgtccgtcgcaacgaggtgcggtatcgttatcgctacatgcggattgggcggaaccggcgaatccgtatgcggattcgcattggcgagcggcggaacgatttttacaatttgaaatagcgtggtttgcggaaccgttatttaaaacgggtgattatccggcggcgatgcgtgaatatatagcgtcgaaacatcgacgtggtttatcgtcgtcggcgttaccgcgtctaacggaagcggaacgacgtttactaaaaggtacggtagatttttgtgcgctaaatcattttacgacgcgttttgttatgcatgaacaattagcgggttcgcgatatgattcggatcgtgatatacaatttctacaagatataacgcgattatcgtcgccgacgcgactagcggttataccgtggggtgttcgaaaactattacgatgggttcgacgaaattatggtgatatggatatatatataacggcgtcgggtatagatgatcaagcgctagaagatgatcgtctacgtaaatattatctaggtaaatatctacaagaagttctaaaagcgtatttaatagataaagtacgtataaaaggttattatgcgtttaaattagcggaagaaaaatcgaaaccgcgttttggtttttttacgtcggattttaaagcgaaatcgtcgatacaattttataataaagttatatcgtcgcgaggttttccgtttgaaaattcgtcgtcgcgatgttcgcaaacgcaagaaaatacggaatgtacggtttgtctatttttagtacaaaaaaaaccgttaatatttctaggttgttgttttttttcgacgctagtattactactatcgatagcgatatttcaacgacaaaaacgacgaaaattttggaaagcgaaaaatctacaacatataccgctaaaaaaaggtaaacgtgtagtatcg

SEQ ID NO: 251790 - DNA, 3132 bp, Artificial Sequence
  derived and/or modified sequence
atgaagccagggtgcgccgctggaagccctggaaatgaatggattttcttctcgacagatgaaatcactactagatatcgaaatacaatgtccaatggaggtcttcaacggtcggtgatccttagcgcacttatccttttgcgagcagtcaccgggttttcgggggatggaagggctatttggtctaagaatcctaattttactccagtgaacgaatcacagttatttttgtatgatactttcccaaagaattttttctgggggattggtactggggctctgcaagtcgagggtagttggaagaaagacggaaagggtccttccatttgggaccatttcattcatacgcatttgaagaacgtgtctagcactaatggatcctctgactcgtatatttttcttgaaaaggacctttcagccctcgacttcatcggagtctctttttatcagttcagcatctcgtggccccgtttgtttccagacggtattgttactgttgcaaacgccaagggcttgcagtattattctaccttactggatgctctcgttctaagaaatatagagcccattgttactctctatcattgggacttgccacttgcacttcaagagaagtacggtggttggaaaaatgataccattattgatatttttaatgattatgccacctattgctttcagatgtttggagacagagtgaagtattggatcaccattcacaacccatacctagtggcctggcatggatacggaacaggaatgcatgctccgggagaaaaggggaacctcgctgcagtttatactgtgggccataatttgataaaggcacatagtaaagtctggcacaactataatacgcactttaggcctcatcaaaagggctggttgagcattaccctcggaagtcactggatcgaacctaataggagcgaaaacactatggatatatttaaatgtcaacaatcgatggtttcggtacttggatggtttgctaacccaatccatggagatggagattaccctgaaggtatgagaaaaaaattgtttagtgttttgcccattttttctgaggccgaaaaacacgaaatgagaggcaccgctgattttttcgctttttcgttcggaccaaacaatttcaagcctctaaatactatggcaaaaatgggacagaatgtttccctaaatttaagagaagcactgaactggatcaaactcgagtataacaaccctcgaattttgattgcggaaaacgggtggtttacagactccagggttaaaactgaggatacgacagctatttacatgatgaaaaatttcctatcacaagtgctgcaagcaattagacttgacgaaatccgtgtattcggatatacggcctggtccctgttggacggtttcgagtggcaagatgcatatacaataaggaggggactgttctatgtcgatttcaattctaaacagaaggaacgtaaacccaagtcgtctgcacactattataagcaaatcataagagaaaacggtttttctcttaaggagtctacaccagatgtgcaaggtcaatttccttgcgatttctcttggggggttacagaatcggtgttgaaaccggagtcggttgcttcgtccccacagttctctgatcctcatctatatgtttggaacgctaccgggaaccggctcttacaccgtgttgaaggtgtgagattaaagacacgtcctgcacaatgtactgatttcgtaaacattaaaaaacaactggagatgctggcgaggatgaaagtgacccattatagattcgctctcgactgggcatccgttctgccaactggaaacctctcagccgttaataggcaagccttgaggtattatagatgtgtagtatctgagggtttaaaacttggtatttcagctatggtcacattgtactacccaacgcatgctcatctaggtctcccagaaccacttcttcatgcagacggttggctgaatccttccacagctgaggcttttcaggcttatgctgggctctgttttcaagaattgggagatctcgtgaagttgtggatcactattaacgagccaaaccgtttatcagacatctataatagatctggaaacgacacctatggtgctgcacataacttacttgtggcgcatgcattggcctggcgactttatgataggcagttccgcccgtcccaaaggggtgctgttagtttgtcgctccacgcggattgggccgagcctgcaaacccctatgctgactcacattggcgagctgctgaacggttcttgcagttcgagattgcctggtttgccgaaccactttttaagacgggtgattacccagcggctatgagagagtacattgcttccaagcatagaagaggactgagctcaagtgcactgcctagattgactgaagcagagagaagattgcttaaaggtacggttgatttctgcgctttaaatcattttaccactcgttttgttatgcacgagcaactagctggatcgagatatgattcggatagagatattcaattccttcaggatataactagactgtcgagcccgactcgtctcgctgtcattccatggggagtgagaaagttgttgcgttgggttcgcaggaactatggtgatatggacatttacattacagcatctggcatcgatgatcaggctcttgaagacgacagactccgaaagtactaccttggtaaatatttgcaagaggtcttgaaggcatacctcatagataaggtgagaattaaaggctattatgctttcaagcttgcggaagagaagtctaagccgaggttcgggttcttcacaagcgattttaaggctaagtcttcaatccaattttataacaaggtaatcagtagtagggggttcccattcgaaaattcctcttcgaggtgttcgcagacacaggagaatacagaatgtaccgtttgcctttttttggttcaaaaaaaacccttaatctttcttggctgttgttttttttctacgctcgttctacttttgagtatcgcaattttccaacggcagaagcgaaggaaattctggaaagctaagaatcttcagcacatccctcttaaaaaggggaagagggtcgttagt

SEQ ID NO: 251791 - DNA, 3132 bp, Artificial Sequence
  derived and/or modified sequence
atgaaacctggttgcgcggccggatcgccaggaaacgaatggatctttttctcgacggacgaaatcacgaccagatatagaaataccatgagcaacggaggacttcaacggtcggttattctgtctgcgctgattttgcttcgagccgtgactggtttctcgggggatggccgcgcaatttggtcgaaaaatccaaacttcaccccagtgaacgaatcgcagctgttcctgtacgataccttccctaaaaactttttctggggaattggtaccggagccctccaagtcgaaggatcgtggaagaaggatggtaagggaccttccatctgggatcatttcattcatacccatcttaagaatgtctcaagcaccaacggatcgtcagactcctacatttttctggaaaaggacctttcagcactggactttatcggcgtgtcgttctaccagttttccatctcttggcctaggctctttcccgatggcattgtcaccgtggctaacgccaaaggtttgcagtactactcaaccctcctggatgcactggtgctccgaaacattgagcctatcgtgactctttaccattgggacctgccactcgcactccaggaaaagtatggcggatggaaaaacgatactatcatagacatattcaatgactacgctacctactgctttcagatgtttggggatcgcgtgaagtattggattaccattcataacccatacctggtggcgtggcatggatacggtactggtatgcacgcaccgggggagaagggaaatcttgccgccgtgtacactgtggggcacaatctgatcaaggcccatagcaaggtgtggcacaattacaacacgcattttagacctcatcaaaagggttggctttcgatcactctgggatcccattggattgagccgaatcgcagcgaaaacactatggacatattcaagtgtcaacaatcgatggtgtccgtcctcggctggtttgcgaacccaattcatggtgatggcgattacccggaaggcatgcgtaagaaactgttctccgtgctgcccatctttagcgaagccgaaaagcacgaaatgcgcggtaccgcagatttcttcgcgttcagtttcgggcctaacaatttcaaacctctgaacactatggctaagatgggacagaacgtttccctcaacctgcgcgaggcacttaactggattaagttggaatacaataatcctcgcatactcattgctgaaaacggatggtttaccgactcgagggtgaaaactgaagataccaccgccatctacatgatgaagaattttctgtcacaggtgctccaggcaataagattggacgaaattagagtgtttggatacactgcctggtcgctgttggatggatttgaatggcaagatgcttacacgattagacgggggctcttttacgtagacttcaactcaaaacaaaaggaaagaaagccgaaatcatcggcccattactacaagcaaatcattagagagaatgggttttcgcttaaagagagcactcccgacgtgcagggtcagtttccatgtgattttagctggggtgtgaccgagagcgtgttgaaaccagaatccgtggcgtctagccctcaattttcagatccacatctttacgtctggaacgccaccggaaatcgtttgcttcatcgggtggagggagtgagacttaagacccgccccgcacaatgtactgatttcgtgaacattaagaaacaacttgaaatgctcgcaagaatgaaggtaactcattaccggtttgcacttgattgggcatcagtgctcccgactggcaacctgtccgcagtgaatagacaagcgctcaggtactaccgctgtgtcgtgtcagaaggcctcaagctcggcatctccgcaatggtcactctttactaccctacgcacgcgcatctgggacttcctgaacctctgctgcatgcggatggatggctgaatccatccactgcagaagccttccaagcctacgcaggactctgtttccaagaattgggtgaccttgtgaagctctggatcactatcaatgagcccaacaggctgtccgacatttacaatagatccggaaacgatacctacggagcggcccataaccttctcgtcgcacatgcattggcttggagactttatgacagacaatttagacctagccagcgtggtgcagtctcgttgtctttgcatgcggactgggcagagcctgccaatccctatgcggattcccattggagagctgcagagaggttccttcaattcgagatcgcctggtttgcagaaccactgttcaaaaccggtgattaccctgctgccatgcgcgagtacatcgcatctaagcatcgcagaggactttcctccagtgccctccccagactcactgaagcagaacgccggctgcttaagggtactgtggacttttgtgcccttaatcactttactactcgatttgtgatgcatgagcaactggcaggttcgcgctacgattcagacagagatattcaatttctccaagatataactagattgagcagccccactcgactggccgtgattccatggggagtgaggaaactccttcgatgggtgcgaagaaactacggggacatggacatttacatcaccgcctcgggtattgatgaccaagcactcgaggatgataggcttagaaagtactacctgggaaagtaccttcaagaagtcctgaaggcatacctgattgataaagtgcgcataaagggatactacgcgtttaaactcgccgaagagaagtccaagccacgttttgggttctttacttcggatttcaaggcgaaaagcagcattcagttttacaacaaggtcatctcatccaggggatttccatttgaaaacagctcctcgagatgttcgcagacccaagagaatactgaatgcaccgtctgtctctttttggtgcagaagaagcccctgatattcctggggtgttgttttttctccaccctggtcctgcttctgagcattgctatctttcagcgacaaaagcgccgtaagttctggaaggccaagaatctccaacacattccgttgaagaaaggaaagagagtggtgagc

SEQ ID NO: 251792 - DNA, 3132 bp, Artificial Sequence
  derived and/or modified sequence
atgaaaccaggctgcgctgctggatctccgggcaatgaatggatcttcttctcgacagatgagattacaacccggtatcggaataccatgagtaatggtggattgcaaaggtccgtgatactgtccgccctgattctcctccgagctgttacgggcttctccggcgacggccgcgccatttggtcaaaaaatccgaacttcacgcccgtgaatgaaagtcagctgttcctgtacgatacttttcctaagaacttcttctggggcatcggtacaggagcactgcaggtcgaggggagctggaagaaggacgggaaaggaccatccatctgggaccactttattcacactcacttaaagaatgtgtcttccactaacgggtccagtgattcttacatttttttggagaaagatctgagtgccctggatttcattggagtgagtttctaccagttttccattagctggccccgcttgtttcccgacgggatcgtgactgtggcaaacgctaaagggctacaatattattcaaccctgctggacgcgcttgtgctgcggaatattgaaccaatcgttactctgtatcactgggacctgccactggctttgcaggaaaaatacggcggctggaaaaatgataccatcattgatatatttaacgactatgccacatactgcttccagatgtttggcgacagggtcaagtattggattaccatccataacccttacctggtcgcctggcacggttacggcactggaatgcacgctccaggggagaaaggaaatctcgcagctgtgtataccgtgggacacaatttgatcaaggcccactccaaggtctggcacaattacaacactcacttccgcccacaccagaaggggtggttaagtatcacactggggtcccactggatcgaacccaacagaagcgaaaacacaatggatatttttaaatgccagcagtcgatggtgagtgtactgggttggttcgctaaccccattcatggcgatggtgactatccagagggaatgagaaagaagttgtttagcgtactgccaattttcagcgaggctgaaaagcatgagatgcgaggcaccgcggacttctttgcgttctcattcggtcccaataacttcaagcccttgaacaccatggccaagatgggacagaacgtgagcctcaatctgcgagaagccttaaattggatcaaactggagtacaacaatcctagaattctcatcgccgagaacggctggttcacggactcgagagtgaaaacggaagatacgacagccatctatatgatgaagaactttttgagccaggtactccaagccatcaggctggacgagatcagagtgtttggttacacagcctggtcactccttgatggctttgagtggcaagacgcatatactattcggaggggtctcttctacgtagattttaatagtaagcagaaggagcgcaaacccaagagttccgcccattattataagcagatcatcagggagaacggcttcagccttaaggaaagcacccctgacgtacaagggcagtttccctgtgacttttcttggggcgtgacggagtccgtcctgaagccagagtccgtagccagcagcccacagttctccgaccctcatttatacgtctggaacgccactggcaaccggctgctccaccgggttgagggtgtgagactcaaaacacgcccagcacagtgtacagacttcgtgaatatcaagaagcaacttgaaatgcttgcccgaatgaaggttacccactaccggttcgccttggactgggctagcgtcctccctacaggcaacctgtccgccgtcaatcgtcaggctctcagatattatcgttgcgtggttagcgaggggcttaagctcggcatcagcgcgatggtgaccctgtattacccaacccacgcccacctggggttacccgagcccctgctacatgccgacggatggctgaacccctccaccgctgaggcttttcaggcatacgctggactgtgcttccaggagttgggcgatttggtcaagctttggataaccatcaacgagcctaacagactgtccgacatctataatcggtccgggaacgatacatacggagcggctcacaacctcctcgttgcccacgctctagcctggcgcttgtacgacaggcagtttaggccttcgcaacgtggtgccgtgagtctctctctgcacgccgactgggccgaacccgctaacccgtacgccgattcacactggcgcgccgctgaacggtttctgcagttcgagatcgcctggtttgccgagcctctgtttaagaccggcgactatcctgctgccatgcgggagtacatagcgtcaaagcatagaagaggccttagcagcagtgcccttccccggttaactgaggccgagaggagactgcttaagggcacagttgacttctgcgctctaaaccatttcacaaccagatttgtaatgcatgagcagctggccggatccaggtatgatagcgaccgcgatatccaattccttcaagatatcacacgcttatccagccctacacgcttagctgtgatcccttggggagttcgtaagctgcttcgttgggtaaggagaaactacggggatatggatatctatattacagcttctgggatcgacgatcaggccctggaggatgaccgcctacggaagtactacctcgggaagtatctgcaagaggttctcaaagcctacctgattgacaaggtgcggatcaagggttactatgcttttaaattggcagaagaaaagagcaagccgcggttcgggttcttcaccagcgatttcaaggcgaagtcgtccatccaattctataacaaggtgataagctctcgcggtttccctttcgagaactcatcctccaggtgttcccagactcaggagaataccgaatgcacggtgtgtctgttccttgtgcagaagaaacctttgatttttctggggtgttgtttcttcagtactttagtacttttgttgtcaatcgccatatttcagagacaaaagcggcgcaagttttggaaggccaaaaacttacagcacatcccacttaaaaaaggaaagagagtcgtgtcg

SEQ ID NO: 251793 - DNA, 3132 bp, Artificial Sequence
  derived and/or modified sequence
atgaaaccaggatgtgctgccggatcaccggggaatgagtggatcttcttctcaaccgatgagattactacgcgttatcgtaacaccatgagtaatggaggactccaaagatccgtcatattgtctgcactaatcttgcttagagctgttacaggattttcaggcgatggccgagctatttggtcgaaaaatccaaatttcacaccagtgaatgaatctcaacttttcttgtatgatacgtttcctaagaatttcttctggggaatcggtactggagctctccaagttgagggatcatggaaaaaagatggtaaaggaccatcgatctgggaccactttattcatacacacctaaagaacgtctcatccactaatgggtcatcggattcttatatcttcctcgaaaaagatctgtctgcgcttgattttatcggcgtgtccttctatcaattctccattagttggccgagactatttccggacgggattgttacagtagctaatgccaagggattgcaatactactctacgcttttggatgccctagttctacgtaacatcgagccaattgtcactttgtatcattgggatttaccattggcactgcaagagaaatacgggggatggaaaaatgatactataatcgatattttcaacgattatgctacctattgttttcaaatgtttggagatcgtgtcaagtattggattacaattcacaacccttacctcgttgcctggcatggatacggaactgggatgcacgcacccggagagaaggggaaccttgctgctgtttacacggtgggacataatttgatcaaagcccacagcaaggtttggcataattacaatactcattttaggccgcatcaaaagggttggctctctattaccttgggatcacattggatagagccaaatcgttcagaaaatacgatggacatcttcaagtgtcaacaaagcatggtcagcgtcctcggatggtttgccaatcctattcatggtgatggagattatccagaaggcatgaggaaaaaacttttctccgtattaccaattttctctgaggctgaaaaacacgagatgaggggaacagctgacttctttgctttctcatttggaccaaacaactttaagccccttaacactatggcaaaaatgggccaaaatgtctctctgaatcttagagaggctctgaattggattaaactggaatataataatcctagaattcttatagcagaaaacgggtggttcacggattcacgtgtcaagactgaagatactacagccatttatatgatgaaaaacttcttgagtcaagtgcttcaggcaatacggctagatgaaattcgggtttttggatacactgcatggtcgttattggacggatttgaatggcaagatgcttatactattcgaagaggcttattttatgtcgatttcaattccaaacaaaaagaaagaaaacctaaaagcagtgctcattattacaagcagattatcagagagaatggattcagtctcaaggaaagcacacctgatgtgcaaggacaatttccttgcgatttctcgtggggtgtaactgagtcagtccttaaaccagaatcagtagcctcttcgccacaattttctgatccccatctttatgtctggaatgctacagggaacagacttctacatagagttgaaggcgttagattgaaaacacgacctgcacagtgcaccgactttgtaaacattaaaaaacagctcgagatgcttgctcgtatgaaggtaacccactatcgatttgctctagattgggctagtgtattgccgacagggaatttgagcgcagtaaaccgacaggctttgagatactacagatgtgtcgtttccgagggactcaaactgggtataagtgcgatggtcactctttactaccctacgcatgctcatttgggacttccagagccacttttgcatgctgatggatggctgaatccatcgactgctgaagccttccaggcgtatgctggattgtgctttcaagagttaggagatctggttaaattgtggattacgattaatgaacctaatcgactttctgacatttataacaggagtggaaatgacacttatggggccgctcacaacttacttgtcgcacatgcgcttgcttggagattgtatgatcgacaattccgaccttctcaacgcggagccgtatctctttcactccatgcagattgggcagagcccgcaaatccatatgctgattctcattggcgagccgccgagcgctttttacaatttgaaatcgcttggttcgctgaaccattatttaaaactggtgattatccagctgctatgcgagagtatatagcctcgaaacaccgtcgtggtctctcgagcagtgcgttaccaagattgactgaagccgagagacggttgcttaaaggaacagttgacttctgcgctctaaaccacttcacgacgcgttttgttatgcacgaacagttggcaggatcacgctacgattcagatcgagatatacagttcttacaagatattactagactgagttcaccaactagattggctgtaatcccatggggagtccgaaaacttctgcgttgggtgaggagaaattatggtgatatggacatttatattaccgcctccggcattgatgatcaggctttagaagacgatagactccgtaaatactatcttggaaaataccttcaagaagtcctcaaggcatatctcattgataaggtgaggattaaaggttattacgcatttaagctggcagaggaaaagtcgaagccacgtttcggattttttacctctgatttcaaagcaaaaagctctatccagttttacaacaaagtcatttcaagcaggggattcccatttgaaaattcatcctcccgttgctcccagacgcaagaaaatacagaatgcacagtgtgcttatttctggtccagaaaaaaccgcttatttttctcggttgctgctttttctcaactttggtacttttactatccatcgctatttttcagcggcaaaagagacgtaaattttggaaagctaagaatcttcagcatattcctttaaaaaaaggaaagcgtgtggtgtcc

SEQ ID NO: 251794 - DNA, 3132 bp, Artificial Sequence
  derived and/or modified sequence
atgaagccaggctgcgcagctggttcccctggcaacgaatggattttcttctccaccgacgagatcaccacgcgctaccggaacaccatgtcaaacggaggactccagcgtagcgtcatcctgtctgccctcatcctgctgcgagccgtcacgggtttctccggagatggtcgcgccatttggtcgaaaaacccgaattttaccccagtcaacgaatcccagctctttctgtacgacaccttccccaagaacttcttctggggcattggtactggcgctctccaggtcgagggaagctggaaaaaggacggcaagggcccatctatctgggaccacttcattcacacccacttgaagaacgtctcttccaccaacggctcctccgactcttacatcttcttggaaaaggacctatctgccttggacttcatcggtgtctcgttctaccagttctccatctcctggcctcggttgtttccggacggcatcgtcacagttgccaacgcaaagggacttcagtactacagtactctcctcgatgccctagtcctgcggaacatcgagcccatcgtgactctctaccattgggatctgcccctcgccctgcaagaaaagtacggtggttggaagaacgacacgatcattgatatcttcaatgactacgccacctactgcttccagatgtttggcgacagagtgaagtattggattacaatccacaacccttacctggtggcctggcatggctatggcaccgggatgcatgcccctggcgaaaagggaaacctggccgcagtttacaccgtgggccataacctgataaaagcacacagtaaagtttggcataactacaatacccacttccgcccccatcagaagggttggctgtccatcactctaggttcgcattggatcgaaccaaaccgctccgagaataccatggacatcttcaagtgccaacagtccatggtgtccgtgttgggttggttcgccaaccccattcacggcgacggcgactaccccgagggcatgcggaagaagctcttctctgtcctgcctatcttctctgaggcagagaagcacgagatgcgtgggactgccgatttcttcgctttctcatttggtccgaacaacttcaagcccttgaacactatggccaagatgggccaaaacgtctctctgaacctccgtgaagcgctcaactggatcaagttggagtacaacaacccccgtattctgatagcagagaacggatggttcaccgacagccgggtcaagacggaggacaccaccgccatctatatgatgaagaacttcctgagtcaggtcttgcaggccatccgcttggacgaaatccgtgtattcggctacaccgcctggtccctacttgatggtttcgagtggcaggacgcttacacaattcggcgcggattgttctacgtcgatttcaacagcaagcagaaggagcgcaagcccaagtcctccgcccattattacaagcagatcattcgtgagaatggtttctcgctgaaggagagcactccagacgttcagggtcagttcccctgtgattttagctggggcgttaccgagtcggttctcaaacctgagtccgttgcatcgtccccgcagttctccgatccccacctgtacgtgtggaatgcgaccggtaaccggctgctgcaccgggtcgagggtgttcgtctgaagacccgcccagcacagtgcactgactttgtgaacatcaagaaacagcttgagatgttggcccgcatgaaggtaacccactaccggttcgcgttggactgggcttccgtgctgcccaccgggaatcttagcgcggtcaaccgtcaggccctgcggtactaccgttgcgtggtcagcgaaggccttaagctcggcatcagcgccatggtcaccctttactaccccacccacgcccatctgggactgcccgagccgctcttgcacgctgacggctggcttaacccttccaccgctgaggccttccaggcttacgccggcctttgttttcaggagcttggagatctcgtcaaactatggatcacgatcaacgagcccaataggctctctgacatttacaaccggtctggtaacgacacctacggcgccgcgcacaaccttcttgtggcccatgcactcgcttggcgcctttatgatcgtcaattccgcccttctcagagaggcgccgtgtcgctgagcctgcatgcggattgggcggagccagcgaacccttacgcagactcccactggcgtgcagctgaacgtttcctgcaatttgagatcgcgtggttcgcagagccgttgttcaagaccggtgattacccggctgccatgcgcgagtacattgccagcaagcatcggcgcggcctgtcgtcaagtgcccttccccgcctcactgaggctgagcgtcgcctgctcaagggtaccgtcgacttttgcgccctcaaccactttactacccgcttcgtcatgcacgaacagctcgctggcagccgttacgattcggatcgcgatattcaatttctccaggacatcacgagactttccagtcccactcgcctggccgtgatcccctggggagttcgtaagctgctgcgttgggtgcggcgtaactacggtgatatggatatctacatcaccgcttccggtatagatgaccaggctctagaggatgacagactgcgcaagtattaccttggcaagtatctgcaggaagtcctgaaggcctaccttatcgacaaggttcggattaaaggctactatgcattcaagctggctgaggaaaaatcaaaaccgagatttggcttctttacctccgactttaaggccaagagttccatccagttttacaacaaggtcatctcttcgcgcggttttcccttcgagaactccagttcgcgatgctcgcaaacccaagagaatactgagtgcaccgtgtgcctcttcttagtccagaagaaacccctgatcttcctaggctgctgcttcttctccacactagttcttctgctctcgatcgctatcttccagcgtcagaagcgccgcaagttctggaaggcgaaaaatctccagcacatcccccttaagaagggcaaacgtgtcgtatcg

SEQ ID NO: 251795 - DNA, 3132 bp, Artificial Sequence
  derived and/or modified sequence
atgaaacccggttgtgcagcagggtctcctgggaatgagtggattttcttttccaccgacgaaatcaccacacgctaccgcaatacgatgtcgaacggaggcctccaacgaagcgttatactctctgcgctgatccttctgcgagctgtgacaggcttctccggggatgggcgcgctatctggtctaagaatcctaatttcaccccagtgaatgagagccaacttttcttgtatgacacattccccaaaaattttttctggggaatcgggactggcgcacttcaggtcgaggggagttggaagaaggacggtaagggaccatcaatatgggatcactttatccacacccacttaaaaaatgtaagcagtacaaacggatcatctgactcatatatattcctggagaaagatttgtctgccctcgacttcatcggtgtgagtttctaccagttttctatttcttggcctcgactatttcccgatggaatagtcaccgtagccaacgcgaaaggcttgcagtattatagcacattactcgatgctctggtgctgcgcaacatcgaaccaatagtgaccctttatcactgggacctgcccctggcactacaagagaagtacggggggtggaagaacgacactattatagatatctttaatgactacgctacctactgcttccaaatgttcggtgaccgggtgaaatactggatcacaattcacaatccctatttagtggcctggcatggatacggtactggcatgcatgcgcctggtgagaaggggaacttggctgctgtttatacggtcggccacaacttgatcaaagcccactccaaagtttggcataactacaacacccacttccgccctcaccagaaaggatggctgtccataacccttggctcccactggatcgagccaaaccgcagtgagaacaccatggatatttttaaatgtcagcagtccatggtctcagtgctggggtggttcgctaatcctattcacggcgatggtgattatcccgaaggaatgcgtaaaaagcttttctctgtgttaccaatcttctcagaggccgagaagcatgaaatgaggggaacggctgacttcttcgcatttagtttcgggcccaacaatttcaaaccattgaacacgatggcaaaaatggggcagaacgtctccctgaacctgagagaagccctgaactggatcaaactggagtataataaccctcgcattttaatcgcagaaaacggctggttcaccgacagtagagtgaaaaccgaagacactaccgccatatatatgatgaagaatttcctgagtcaagtgctccaggctattcgccttgatgaaataagggtgtttggttataccgcctggagtctacttgacggcttcgagtggcaagacgcctatacaatcaggagggggctgttttacgttgattttaactcaaagcaaaaggaacgcaagcctaagtcctctgcccattattacaaacagattatccgagagaatgggttctcgctgaaagaatctacacccgatgtgcaggggcagttcccctgcgacttttcttggggggtgaccgaaagtgtgctcaagcccgaatcagtcgcaagctctccccagttttctgatccacatctctatgtgtggaacgcaacagggaaccggctcctccatcgggttgaaggcgtgcgtctaaagactagacccgcacagtgcaccgattttgtcaacatcaagaaacagttggagatgttagctcggatgaaggttacccattatcgttttgccctagactgggcaagcgtcctgccaaccggaaacctgtctgctgtaaatagacaagcactccgctactatcggtgtgtggtaagcgagggactgaagttaggaatcagcgcgatggtgacactctattacccaacacacgcgcacttgggcctgcctgagcctctattgcatgcagacggctggcttaatcctagcaccgcagaagctttccaagcctatgcaggactttgtttccaggagctcggcgacctcgtaaagttgtggatcacgatcaacgaacccaaccgactctctgacatctacaacaggtcagggaatgatacatacggagcggctcataatcttctcgtggcgcacgctttggcatggcggctatacgatcggcaattcaggccgagccagaggggggccgtgtctttgagtctccatgccgattgggcagagcctgcgaacccctatgctgattctcattggcgtgccgctgaacgcttcctgcagttcgagattgcatggtttgccgagcccctattcaaaaccggggattacccggcagctatgcgcgaatatatcgcgagtaagcatcgccggggtttgagtagttcagccctccccaggttgacagaagctgagcgtaggctactgaagggcactgtcgacttctgtgcacttaatcacttcacgacacgcttcgttatgcacgaacaacttgccgggtctcgctatgattcagacagggacattcagttcttgcaggatatcacaagacttagctcgcctactagattggcggtcattccttggggggtacgaaaactgctccgttgggtgcggcgtaactatggagacatggacatatatatcactgccagcggtatcgacgatcaggcacttgaggacgatagacttagaaaatactacctcggaaaatacctgcaggaggtcctaaaagcgtacttgatcgataaggtgagaataaagggttactatgcctttaagttagccgaagagaagagtaaaccacgatttggcttctttacttctgacttcaaagctaagtcaagcattcagttttataacaaggtgatctcctctagaggctttccttttgagaacagttccagccggtgcagccagacccaagaaaatacggagtgcactgtttgcttgttcctcgtgcaaaagaagcccctgatttttctggggtgttgcttcttcagcactctcgtgttgctgctgagtatagccatttttcaaaggcagaagcgacggaaattctggaaagccaagaatttgcagcacataccgttgaaaaaagggaaaagagttgtgtcg

SEQ ID NO: 251796 - DNA, 3132 bp, Artificial Sequence
  derived and/or modified sequence
atgaaacccggctgtgctgccgggtccccaggcaacgagtggatcttctttagtacagatgagattaccacccgatatcgtaacaccatgagcaacggaggtctccaaagaagcgtcattctgtcagcgctcattctgctcagggctgtgaccggatttagcggagatggacgcgctatttggtcaaaaaaccccaactttaccccagtcaatgaaagccaactctttctctatgacacatttcctaaaaacttcttttggggaattgggaccggcgcacttcaggtggagggaagctggaaaaaagacggtaaaggaccatctatatgggatcactttatccacacccatcttaaaaatgtgagcagcaccaatggttcatctgattcgtacatcttcctggaaaaagacctctccgctttagactttataggggttagtttttatcaattttcgatctcatggccaaggttattcccggatgggatagtcacggtggcgaatgctaagggattacagtactattctacactgctggatgcactcgttttacggaacattgagcctatagtgaccctgtaccactgggatcttcctttagccctgcaggagaagtacgggggttggaaaaacgacactatcatcgacatctttaacgattatgccacttattgctttcaaatgtttggcgacagggtgaagtattggatcacaatacataacccatacttagttgcctggcatggctacggtacaggcatgcatgctcccggtgagaaagggaacctggcagctgtctacactgttggacacaatcttatcaaagcccattccaaggtctggcacaattacaacactcattttagacctcaccaaaaagggtggctgtcgatcactttggggtcacattggatcgaacccaaccgatccgaaaacactatggacattttcaagtgccaacagagtatggttagcgtactgggctggttcgccaacccaatccacggggatggcgactatcctgaaggaatgcgcaagaagctcttctcagtgctaccaatcttcagcgaggcagaaaaacatgaaatgaggggcaccgccgattttttcgccttcagctttgggcccaacaacttcaagccactgaacacaatggccaagatgggacaaaacgtctctttgaacttgagggaggcactcaactggatcaaattggagtacaataatccaaggattctcattgccgaaaacggttggtttacagatagccgtgttaagacggaggatactaccgccatctacatgatgaagaactttctgtctcaagtgcttcaggcaatcaggctggacgaaattagggttttcggctatacagcctggtcgttgctcgatggctttgaatggcaagacgcctacacaatccgtcgaggattgttttatgttgactttaactctaagcagaaggaaaggaaaccgaaatcaagcgctcattactacaagcaaattattagggagaacggtttttctctgaaggagagcactccagatgtccagggacaatttccctgtgatttttcctggggcgtgaccgagtccgttcttaagccggagagcgttgccagtagcccccaattttcagaccctcatctgtatgtctggaacgcaacaggcaacagacttcttcaccgagttgaaggcgttaggctcaaaactcgcccggcccagtgcacagatttcgtgaacataaaaaaacagctcgagatgttagcgagaatgaaagtgacccactataggttcgcactcgattgggcctctgtcctgccaaccggtaacctttctgccgtaaatcggcaggcccttcgttactataggtgcgtcgtgtctgaaggattaaaacttggcattagcgctatggttactctgtactaccccactcatgcccacttgggactgcccgagccgcttctgcacgctgatggctggcttaaccccagcaccgctgaagcttttcaggcctacgctggcttgtgctttcaggaactgggggacctcgtgaaactctggattaccatcaatgaacccaaccgtcttagtgatatttacaaccggagtggtaacgatacatacggcgcggctcacaatttgctcgttgctcacgccttagcctggcggctctacgatagacagttcaggcccagtcaacgtggagcagtttctttgagcttgcatgccgactgggccgaacccgctaatccatacgccgactcgcattggcgcgctgccgagcggttcctacagttcgagattgcatggttcgcagagccactgttcaagaccggcgattacccggctgcaatgcgggaatatatcgcgtcaaaacacagacgcgggctctcatcctcagcactgcctcgcctcaccgaagccgaaaggcgcctcttgaaagggacagtggatttctgcgccctgaaccactttaccacccgatttgtgatgcatgaacaacttgccggaagcaggtacgactccgacagagacatccagttcctgcaggatattaccagacttagcagtcccactagacttgctgtgatcccttggggagtgaggaaactgttgaggtgggttaggcgcaactatggggatatggacatctacatcacggcatcggggatcgatgaccaagccctggaagatgacagactgaggaaatactatctgggtaagtacctgcaagaggtccttaaagcgtacctgatagataaggtcaggattaagggctattacgccttcaagctggctgaggaaaaaagtaagccaaggtttggttttttcacatctgactttaaagccaaatcatctatacagttctataacaaagtgatcagttctcgtgggttccccttcgagaactcttccagccgatgcagtcagacccaggaaaacacagagtgcaccgtgtgcttgttcctggtacagaagaaacctctgatattcctgggatgctgttttttctctaccctggtgcttttactctccattgctatctttcagcgccaaaagcgccggaagttttggaaagctaaaaatctccaacacatcccactcaagaagggtaaaagggttgtgagt

SEQ ID NO: 251797 - DNA, 3132 bp, Artificial Sequence
  derived and/or modified sequence
atgaagcccgggtgtgccgcagggtctcccggtaacgagtggattttcttttcaacagacgaaataacaaccagataccgcaacaccatgtccaacgggggcctgcagaggagcgtgatcctcagcgccctgattttgctgcgtgccgtgactgggttctcaggagacggaagagctatttggtctaagaaccctaacttcacgccagtcaacgagtctcagctatttctctacgacacttttccaaagaactttttctgggggattggaacaggagcccttcaggtggaaggaagctggaaaaaggatggcaaggggccatcgatctgggaccacttcatacacacccatttgaaaaacgtgtcttctacaaacggatcgtctgactcctacatctttctggaaaaggatttaagtgccttggacttcattggggtctcattttaccagtttagcatcagctggcccagacttttcccagacgggatcgtaacggtggcaaacgccaaaggcctccagtattactcaacccttctggatgccctggtcctgcgcaatattgagccaattgtgaccctttatcactgggatcttccactagcgttgcaggaaaagtatggaggatggaagaacgacacaatcatagacattttcaatgattacgcgacatattgctttcagatgttcggagacagggtgaaatattggataaccatacataacccatatctcgtggcgtggcatggttatggcacaggcatgcacgcccctggagagaagggtaatcttgcagcagtctacaccgtgggacacaatctaatcaaggcccactccaaggtttggcataactataacactcatttccgcccgcatcagaagggttggttgtccatcacactgggcagccattggatcgagccgaacagatcagaaaataccatggacatcttcaagtgccagcagtctatggttagcgtcctggggtggttcgcgaatccaatacatggtgacggagattaccccgagggcatgcgcaaaaagctcttcagcgtcctcccaatctttagtgaggctgagaaacatgagatgcgggggacagctgattttttcgcctttagttttgggcccaacaattttaaacctctgaatacaatggctaaaatgggacagaatgtgtccttgaacttaagagaagcccttaactggattaagcttgaatacaataacccccggatcctcatcgcagagaatggctggttcactgattctcgggtaaagacggaagacaccaccgccatttatatgatgaagaattttctgtctcaggttttgcaggccatccggctggacgagattcgcgtattcggatatacggcatggagtttattggatggattcgaatggcaagacgcatatactatccggagggggctgttctacgtggacttcaatagcaagcaaaaagagcgcaagccaaaatccagcgcccactactacaagcagatcataagggagaacggctttagcctcaaggaaagtacccctgatgttcagggccaattcccttgcgacttctcttggggtgtaaccgagtctgtcttgaaaccagaatccgtagcttcatcaccgcagttttccgaccctcacctgtacgtgtggaatgccaccgggaatagactgctacatagggtggagggagtgcggctgaagacaaggccagcacagtgcaccgactttgtgaatatcaagaagcagcttgagatgctggcacgcatgaaggtgacgcattatagatttgccctggactgggcatctgtgctgcctaccgggaacctttccgcagtgaatcgccaagctctccgttattatcggtgcgtcgtttctgaggggctgaaactcggcatctccgcaatggtgaccctgtactaccctacgcatgcgcacctggggttacccgaacccctgctccacgccgatgggtggctaaacccatccacggccgaagcctttcaggcctacgctgggctctgttttcaggagctgggtgacctggttaagctgtggatcactattaatgaacctaatcggctatcagacatctataatcgatctggaaatgacacttatggcgcagctcacaatctgctggtggcccacgccctagcatggaggttgtatgacagacaatttcgcccctcacaacgaggtgctgtgtctttgtctctgcacgcggactgggcggaacctgctaatccttatgccgactctcactggagggccgcggaacgctttctgcagtttgaaatcgcttggttcgcggagcccctattcaaaactggcgattatccagccgctatgagagaatatatcgcgagtaagcaccggcggggactgagtagctctgccctgcctaggctgaccgaggcggaaagaagattgcttaaaggaaccgttgacttttgcgctctgaatcatttcacgactcggttcgttatgcatgaacagctggcggggtcccgatatgactcagaccgcgatattcagtttctgcaggatatcactcggttgtcttctcccacacgtctggccgttattccttggggtgtccgcaaactgctgcgctgggtgaggcgtaactacggagacatggacatctacatcacagcctccggtatagacgatcaggcactggaagacgatagacttagaaaatattatcttggcaaatatctgcaagaagtgctcaaggcatatcttatcgataaagtcaggattaaaggatactatgctttcaagctcgcggaggagaagtctaaacccaggttcggtttcttcacgagtgactttaaagccaagagcagcatccaattctataacaaagtgatcagctctagaggcttccccttcgaaaatagttcaagtagatgttcccaaactcaggaaaataccgaatgtactgtttgtctgttcttagttcagaagaaacccttgatcttccttggctgttgctttttttcgaccctggtgctgctcctgtctatcgctatttttcagaggcagaagcggcggaagttttggaaagccaagaaccttcaacacataccgctgaaaaaagggaaaagagtggtgtcc

SEQ ID NO: 251798 - DNA, 3132 bp, Artificial Sequence
  derived and/or modified sequence
atgaagccgggatgcgcagcgggaagcccgggcaacgagtggatatttttttccacagatgaaatcactacgcgataccgaaatacaatgagtaacgggggcttacaacgcagtgttattttgtcagcattaattctgttacgcgcggtaaccggcttttctggcgacggcagagctatatggagcaaaaaccctaacttcacgcctgttaacgaatctcagctttttctgtatgacacctttcctaaaaatttcttttggggcattgggacaggagcacttcaagtagaaggttcttggaagaaggatggtaaaggcccgtctatctgggatcactttatccatacgcacttaaagaacgtatcatccacaaatggtagttccgactcctatatttttttagaaaaggacttgagcgctctggactttataggcgtctccttttaccaattttctatctcatggcccagattatttccggatgggattgtaacggttgcaaatgcaaaagggctccagtattattcgacacttctggacgcactggtactcagaaacatcgagccgattgtgactctgtatcattgggatcttccgttagcacttcaagaaaaatatggcggatggaaaaacgacacgattattgatatctttaacgattatgctacatattgcttccaaatgtttggcgatcgcgtgaaatactggattacaatacataacccttacctggttgcgtggcatggatacggcacgggaatgcatgcgccgggagagaaaggtaaccttgcagccgtttacaccgtaggacataatctcattaaagcgcacagcaaagtgtggcataattacaatacgcattttcgcccgcatcaaaagggctggttgtctatcacattaggatcgcactggattgagccaaatagatcagaaaatacaatggacatttttaagtgtcagcagtcaatggtgtcggtcttgggatggttcgcaaatcctattcacggagatggtgattacccagaaggcatgagaaagaaacttttttccgttttgccgattttctcggaagcagaaaaacacgaaatgcgcggaactgcagatttttttgcattctcctttggaccaaataattttaagccgttaaatacaatggcgaaaatgggtcagaacgtctcacttaatttgcgagaagccctgaattggatcaaattagaatataacaatccaaggattttaatcgctgaaaacggatggtttacagacagccgcgttaagaccgaagatacaacggctatttatatgatgaagaactttttatctcaggttttgcaggctattagacttgacgaaatccgggtgtttggatatacagcttggtctttgttggacggttttgagtggcaggatgcatacacaatcagacgtggattattttatgtggacttcaacagcaaacagaaggagagaaaaccaaagtcgtctgcccattattataaacagattatacgggaaaatggtttctcattaaaagaaagcacaccggatgttcagggacaatttccatgcgacttttcttggggcgttacagaatccgtactgaaaccggaatcagttgctagcagcccacaattttcagacccgcatctttacgtctggaatgcaacgggaaatcgtctcctgcatcgggtcgaaggcgtccggctgaagacgcgtccggcccagtgtacagattttgtaaacatcaaaaaacagcttgagatgctggcgagaatgaaggtaacccattacagattcgccctggattgggcttctgtcttgccgacgggcaatctttcagcggtaaacagacaggctctacgttattacaggtgtgttgtcagcgaaggcctgaaattgggcatttcggcaatggtcacgttatattatccgacacatgcgcaccttggcctgcctgaaccgcttctgcatgcggatggatggcttaatcctagcaccgcagaagcatttcaggcgtatgcaggattgtgtttccaggaattgggcgatcttgtgaaactttggattacaatcaacgaaccaaacaggctgtccgatatatataacaggtcaggaaacgatacctatggcgcagcgcataaccttcttgtggctcatgcgctagcctggaggttgtacgacagacaatttcggccttctcaacggggcgctgtgtccctttcgttgcacgcggattgggccgagccggccaatccatacgccgattctcactggcgagcggccgaacgctttctgcagtttgaaatcgcctggttcgctgaacctttatttaaaactggagattatcctgcggcaatgcgggaatatatagcgtcaaaacaccgccgtggcctcagttcaagcgccctgccaagactgacagaggctgaaagacgcctgctgaaaggtactgtggatttttgcgctctgaatcattttacgacaagatttgttatgcacgaacaattagcaggatcacgctacgattcggatagggacattcaatttctgcaagatataactagattgagttcaccgacgcgcttggctgtaatcccgtggggggttcgtaaactcctgagatgggtcaggagaaattatggagatatggatatctatataactgcctcaggcatcgacgatcaggcgttggaagacgaccgtttgcggaaatactatctcggcaaatatttacaagaggttctaaaagcctatttgattgacaaagtacgcatcaagggatattatgcatttaagctcgctgaggaaaaatctaaaccgcggttcgggtttttcacgagcgattttaaagccaaatcgagtattcagttctacaacaaagtcatttcctcaaggggcttccctttcgaaaattcttctagccgttgctctcagacacaagaaaatacggaatgtactgtttgcttatttttggtgcagaaaaaaccattaatttttttagggtgttgcttttttagcacgttggtccttctattgagcattgctatctttcagagacagaagcgcagaaaattctggaaggccaagaatcttcagcatattcctctcaaaaaaggtaaacgggttgtatcc

SEQ ID NO: 251799 - DNA, 3132 bp, Artificial Sequence
  derived and/or modified sequence
atgaagcccggatgcgctgcaggatctcccggcaacgagtggattttttttagcaccgacgagatcacaactaggtacaggaatacaatgagcaacggaggcctgcaacgcagcgtgatcctgtctgctctcatcttgctgagggctgtgacaggcttctcaggtgacggacgcgctatttggagtaagaacccaaatttcacacctgtaaacgagagccagctgttcctttacgacactttcccaaagaactttttttggggcatcggtacgggcgctttgcaagtggagggcagctggaagaaagacggaaaaggcccttctatatgggaccattttatccatactcaccttaaaaacgttagttctaccaacggctcatctgactcttacatttttctcgaaaaggatctttctgccctcgatttcatcggagtgagcttttatcaattctctatcagctggcccaggctcttccccgacggtatagtgacggtggccaacgctaagggacttcagtactactctacgctgctcgacgccctcgtgctccgcaacatagaacccatagtgacactgtaccactgggacttgcctctggccctgcaggagaaatacggcggctggaagaacgataccataatcgacatatttaacgattatgcaacctactgtttccaaatgttcggtgatagagtcaagtattggattacgatacataacccttatctcgtggcctggcacggctacggtactggcatgcatgcacctggtgagaaaggaaatctggcagctgtctacaccgtgggccataatttgatcaaggcgcattctaaagtgtggcacaactacaacacccatttcagaccccaccagaagggctggttgtccattactctcggcagccactggatagaacctaataggtccgagaataccatggatatttttaaatgccagcagagtatggtgtcagttcttggatggttcgctaacccgatacacggagacggcgattacccagagggaatgaggaagaagctgttctcagtgctgcccattttttccgaggcagagaagcatgagatgagaggaactgccgactttttcgctttctcatttggacctaataacttcaagccattgaacactatggccaaaatgggccagaatgttagtctgaacctgagagaggcgctcaactggatcaaattggagtacaacaatccaagaatactcatcgccgagaatggttggtttaccgactctagggttaaaaccgaagatactactgccatctacatgatgaagaacttcttgagccaggtgttgcaggctatcagacttgacgagatcagggttttcggatataccgcctggtctttgctggatggtttcgaatggcaggacgcatacacgattaggaggggtctcttctacgtcgattttaattcaaagcagaaagaaagaaagccgaagagttctgcccactactataagcagataatccgcgaaaacggattcagccttaaagaatcaaccccagatgtccagggtcagtttccgtgcgatttttcctggggagtcactgagtctgtcttgaagcccgagtccgtagccagctcccctcaattctctgaccctcacctctatgtttggaatgctaccggtaatagattgctgcacagagttgagggcgtcagactgaaaacgagacccgcccagtgcaccgacttcgttaacatcaagaagcagttggagatgcttgccaggatgaaagtgactcactacaggttcgcactggactgggcttctgtgcttccgacaggaaacctgtccgccgtgaatagacaggctctgaggtactatagatgtgtcgtgtcagaaggcttgaagcttggtatctccgccatggtaaccctttattaccctacccacgcacacctcggcctgcctgagcccctgttgcacgccgacggctggctcaacccctcaaccgcagaagccttccaggcgtacgccggactttgcttccaagagcttggagacctggtaaagctttggatcaccattaacgagcccaacaggctgtccgatatctataaccgctcaggaaatgacacttacggagctgctcacaatttgctggtggcccacgccctggcttggagactgtacgacagacagttcaggcctagtcagagaggcgccgtctccctgagccttcacgccgattgggctgaacccgcaaacccttacgctgattcacactggagagcggccgagaggttcttgcagttcgagatcgcttggttcgctgagccattgtttaagaccggagattacccagccgccatgagggaatacatagccagcaaacacagaaggggtctcagttcctccgctctcccaagactgaccgaggccgagcgcaggctccttaagggtacagtagacttctgtgctttgaaccatttcaccaccaggttcgtgatgcacgagcagttggcaggatccaggtacgactctgacagggatatacagtttcttcaagatatcactaggctgtctagtccaacaaggcttgctgtaatcccttggggagtgagaaagctcttgaggtgggtgaggagaaactatggtgacatggatatatacatcaccgcaagcggcatcgacgatcaggcgctggaggatgaccgccttcgcaaatactatctgggaaagtacctgcaagaagtgttgaaggcttaccttatcgataaggtgcgcattaagggctactatgcattcaagcttgcagaagagaagagtaaaccaaggttcggtttcttcacttccgactttaaggccaagtcttccatccagttctacaataaagtgatatccagtaggggatttccctttgaaaattccagttctaggtgctcccagacacaggagaacactgagtgcaccgtctgcctctttctggtgcaaaagaagccccttatcttcctgggttgctgtttcttctctactttggtactgctgctctccatcgccatcttccaaagacaaaaacgcaggaagttctggaaagcaaagaacctgcagcacattccactgaagaaaggtaagagagtcgtttct

SEQ ID NO: 251800 - DNA, 3132 bp, Artificial Sequence
  derived and/or modified sequence
atgaagccgggctgtgccgccggttcccctggcaacgaatggatctttttctcaaccgatgaaattacgaccagatacagaaacactatgtcaaatggcggcctgcagagatcggtcatcctcagcgctctgatcctcctccgcgcggtcaccggattctcgggggacggccgagcaatctggtccaagaatcctaacttcacgccggttaacgaaagccagctgttcctgtacgataccttcccaaagaactttttctggggcatcggtactggagcactgcaagtcgagggcagttggaagaaggacgggaagggaccatcgatctgggatcactttatccacacccatctgaagaacgtgtcctcaactaacgggtcaagcgatagctatatcttcctggagaaggacctcagtgcccttgatttcatcggtgtgtcattctaccagttctccatctcatggccacgcctctttcccgacggcattgtcactgtggcgaacgctaaaggacttcagtactacagcaccctgctggacgctcttgtgctcagaaatatcgagcccattgtcactctgtaccattgggaccttccccttgctctccaggaaaagtacggcggatggaaaaatgacaccatcatcgatatcttcaacgattacgcaacctactgcttccagatgtttggcgatcgggtcaagtactggatcaccatacacaatccgtacctggtggcatggcatggatacggaaccggaatgcatgcaccgggagagaagggcaatcttgcggccgtgtacactgtggggcacaatctgatcaaggcacatagcaaggtctggcacaactacaacacccatttccgcccgcaccaaaagggttggctgagtattaccctcggaagccattggattgaaccgaaccgatccgaaaataccatggacatcttcaagtgccaacagtccatggtcagcgttctcggatggtttgccaatccaatccacggagatggggactatcctgaggggatgagaaagaaactcttttctgttctcccgatcttcagtgaggcggagaaacatgagatgagaggaactgccgacttcttcgccttctccttcggacccaacaatttcaagccgctgaataccatggcgaaaatgggacaaaatgtgtcccttaatctgcgagaagccctgaactggataaagctggaatacaacaatccgcggatcctgattgcggagaatggttggttcactgactctcgcgtgaaaactgaggataccactgccatttacatgatgaagaacttcctgtcgcaagtcttgcaggccatccgcctcgacgaaatcagagtattcggctacaccgcatggagcctgctcgatggattcgaatggcaggatgcctacactatccgcaggggactgttctatgtcgactttaactccaagcagaaggaacgcaagccgaaatcatcggcacattactacaagcagatcatcagagagaacggattttcgttgaaggaatcaacgcccgacgtgcaagggcaatttccctgtgacttctcatggggagtgactgaaagcgtgctgaaaccggagtccgtggcgtcatcaccgcaattttctgaccctcacttgtacgtgtggaatgcaactgggaaccgactgctgcaccgcgtggagggagtccggctgaaaacccgtccggcccagtgcactgacttcgtgaacatcaaaaaacaactcgagatgctggcgcggatgaaggtaactcactatcggttcgctctggattgggcctcggtcctgccgaccggaaacctgagcgctgtgaaccggcaggcgctgcggtactaccgctgtgtggtgagcgaagggctcaagctgggaattagcgccatggtcactctctactacccgacccacgcccacctcgggcttcctgaacctctgctgcacgctgatgggtggctgaacccctccaccgcggaggccttccaggcctacgctggactgtgttttcaagaattgggcgacctggtcaagctctggattactatcaacgaacccaaccgcctctcagacatctataacaggtcgggaaacgacacgtatggggccgctcacaaccttctggttgcccatgctctggcgtggcggctctacgaccgccagtttcggccttcgcaaaggggagcagtctcgttgtcgctccacgccgactgggccgagccagcgaacccgtacgcagactcccactggcgcgccgcagaaaggttcctgcagttcgagattgcttggttcgcagaacccctgttcaaaaccggcgactacccagctgccatgagggagtatatcgcgtcgaagcaccgtagaggcttgagctccagcgcactcccgcgcctcacggaggccgaacgccggttgctgaagggaactgtggacttctgcgccttgaaccactttactacccggttcgtgatgcatgagcaactcgccggatcacggtacgactccgatcgcgatatccaattcctgcaagatataacccgcctgtcgtcaccaacgcggttggcagttatcccttggggtgtgcggaagttgcttcgctgggtgaggaggaactacggcgacatggacatctacatcaccgcgtcaggcattgacgaccaggccctggaagatgacagactgcggaagtactacctgggcaaatacctgcaagaagtgcttaaagcgtatctgatcgataaagtccggatcaaggggtactacgcgttcaagctggccgaagagaaatccaaaccacgcttcggttttttcacttcggactttaaagcaaagagctcaatccagttctacaataaggtgatttccagccgcggatttccttttgaaaattcgagctcgcggtgctcccagacccaggagaacaccgaatgtacggtgtgccttttcctggtgcagaagaagccgttgatcttccttgggtgctgctttttctccacgcttgtcctcctcctgagcatcgctatcttccagcgccagaagcggagaaagttctggaaagctaagaatctgcagcatatcccgttgaaaaaaggcaagagagtggtatcg

SEQ ID NO: 251801 - DNA, 3132 bp, Artificial Sequence
  derived and/or modified sequence
atgaagcccgggtgcgctgccggtagtcccgggaatgaatggatctttttctctaccgatgaaataactacgcgttatagaaatacaatgagtaatggcggcctacagagaagtgttatattgtctgcactcattctcctccgcgcagtgaccggattttctggtgatggacgggccatctggtccaagaaccccaatttcacgcctgtgaatgagagccagctgttcctgtatgataccttccctaaaaatttcttctgggggataggcactggagccctgcaggtcgagggtagttggaaaaaggatgggaaaggtccttcgatctgggaccacttcatccatacgcatctaaagaatgtcagcagcaccaatggctcttccgactcctatatattcctggagaaggatctgtcggccctcgattttattggcgtctccttctaccagttcagcattagctggcctagactgttccctgatgggattgtgaccgtggctaatgccaagggtctccagtattattctaccctactggacgccttggtgctcaggaacatcgagcccattgtcacactgtaccactgggacctacctctagcattgcaggaaaagtacggcgggtggaagaacgatactattatcgatatttttaacgactacgcaacatactgtttccaaatgtttggggacagagtgaagtactggatcaccattcacaacccgtacctcgtggcgtggcacggatacggtacgggaatgcatgcccctggggagaagggaaatcttgctgccgtatacacggtcggtcacaatttaataaaggcccacagcaaagtgtggcacaattataacactcacttcaggccccatcagaagggatggctctcaataacacttggaagtcactggatcgaaccaaaccggagtgagaataccatggacatcttcaagtgccagcaaagtatggttagcgttctcggatggttcgccaatccaatccacggggatggcgattacccagaagggatgagaaagaagctgttcagcgtactgcccatctttagtgaagccgaaaaacacgaaatgagggggactgctgactttttcgctttctccttcggaccaaataacttcaaacctcttaataccatggccaagatggggcagaacgtgtccctgaacctgcgcgaggctcttaactggatcaagctagagtataacaacccgcggatactcatcgcagagaacggctggttcacagacagccgggttaaaactgaggatactacagctatctacatgatgaagaacttcctctcccaggtacttcaggcaattagactggatgaaattcgggtgttcggctatacagcttggagcttgctggacggatttgaatggcaagatgcatatactataaggcgcgggctgttttacgtcgattttaacagtaagcagaaggagagaaagccaaagtccagcgcacactattataagcagataatcagggaaaacgggttctcactgaaggagagtacccccgatgttcagggtcaattcccctgtgattttagctggggcgtgaccgagagtgtcctgaagcctgagtccgtagcctcttcaccccagttttcggatcctcatctgtatgtctggaatgccaccggaaaccgactacttcaccgagtggaaggagtgcgcctcaagactagaccagcccaatgcaccgacttcgtgaatattaagaaacagcttgagatgctggctagaatgaaggtgacccattatcggttcgccctggattgggcgtccgtcctacctacgggtaatctgtcagctgtgaatcgccaggcgttacggtactatagatgcgttgtgtctgaaggcctcaagctggggattagcgcaatggtgaccttatactatcctactcacgcacatctgggacttccggagcccttactgcatgctgacggctggctgaatccatctaccgcagaggcctttcaggcatacgcggggctctgtttccaggagttgggggatctcgtgaaattgtggattactattaacgagccgaatcgccttagtgacatttacaaccggtctggaaatgacacttatggcgcggcccacaacctgctagtcgcccatgccctggcctggaggctttatgacaggcagttccgccctagccaacggggggcagttagcctctctctgcatgctgactgggccgagccagccaatccctacgccgatagccattggagggcagccgagcgatttctccagttcgaaatcgcttggttcgcggagcccctgtttaagacaggggactatccagccgcaatgagggaatatatcgctagtaaacatcgaaggggcttatcttcgtccgctctacctcggctcaccgaagccgaacgtaggctgctaaaaggcacagtggacttctgtgctctgaatcattttacaacaagatttgttatgcatgagcagctggccggaagtcggtacgactcagatagggatattcaattcctccaggatattacacggctgtcatcaccaaccaggctcgccgtcattccttggggggtccgaaagctgctccgctgggtgcggcgaaactacggagacatggacatctacatcaccgcctctggcatcgatgaccaagcgctagaagacgatcgtctccgtaaatattatcttggtaaatatctgcaggaagtgcttaaggcatacctaatagacaaggtgcgcatcaagggatattatgcattcaaactcgcagaggaaaaaagcaagcccagatttggcttcttcacaagcgactttaaggccaagtcaagtatccagttctacaataaggtgatctcaagtcgtggctttccttttgaaaactcctctagtcgctgttctcagacccaggaaaatacagaatgcacagtgtgcctgtttctggtacaaaagaaaccgctcattttcttgggttgctgcttcttttccacattggtcctgttactatccattgccatcttccagagacagaagagaagaaaattttggaaagccaaaaatctgcagcacattcctcttaagaagggcaagcgcgtggtgtcc

SEQ ID NO: 251802 - DNA, 3132 bp, Artificial Sequence
  derived and/or modified sequence
atgaagcctggatgcgcagcgggtagcccaggaaatgagtggatctttttcagcaccgatgaaatcaccacccggtaccgcaacactatgtcgaatggcggactgcaacggagcgtcattctgtcggctctcatcctgcttcgcgccgtgaccgggttcagcggtgacggccgcgccatttggtcaaagaacccgaatttcactccagtgaacgagtcccagctgttcctctacgataccttcccgaaaaacttcttttggggcatcggcactggagcgctgcaggtggagggttcatggaaaaaggacggaaagggaccgtccatctgggaccactttatccacacccacctcaaaaacgtctcatcgaccaacggatcgtcagacagctacatcttccttgagaaagacctgtcagcgcttgactttatcggggtcagcttttaccagttttccatctcatggccgcgcctgttcccggatggcatcgtgaccgtggccaatgcaaagggactgcaatactattctactttgctggacgcactcgtgctccgaaacattgaacctatcgtgactctgtaccactgggacctccccctcgctctgcaagagaaatacggaggatggaagaatgacaccattattgacatattcaatgactacgcaacctactgctttcagatgttcggcgacagggtgaaatactggattaccatccataacccgtacctggtcgcttggcacggatacggcactggcatgcacgccccgggagagaaaggaaacctggcggctgtgtacactgtgggacataacttgattaaagcacactccaaggtgtggcacaattacaacacccactttagaccccaccagaaggggtggcttagcatcaccctgggatcacactggattgaaccgaacagaagcgaaaacactatggacatctttaagtgccagcagtcaatggtgtccgtgttgggttggttcgcaaatccgatccacggagacggtgattacccggaagggatgcgaaagaagctcttctcggtgctgcccatcttttcggaggcggaaaagcatgaaatgagaggaaccgctgacttcttcgcattctcgttcggacccaacaacttcaaaccactgaatacgatggccaaaatgggacagaacgtctccctgaacctccgggaagcgctgaactggatcaagctggaatacaacaatccgcgcatccttatagctgaaaatggatggttcacggactcaagagtgaaaactgaggatactactgccatctacatgatgaagaactttctctcacaagtgctccaggcgatccgcctggatgaaatcagggtgtttggatacacggcttggtcgctgctggatggattcgaatggcaggatgcttacaccatcagacgcggtctgttttacgtggactttaactccaagcagaaggagcggaagccgaagtcctccgctcattactacaagcaaatcattcgggaaaatgggttttccctcaaggaatccacccctgatgttcagggacagttcccatgcgacttctcttggggagtcaccgagtccgtgctgaagcctgaatcggtggcgtcctcgccgcaattctcagaccctcacctgtacgtctggaatgctacgggtaatcgcctcctgcatagggtggagggagtcagattgaaaacccggccggcgcagtgcactgatttcgtgaacattaagaagcagcttgagatgctggcacggatgaaggtgacccactatcgcttcgctctggattgggcgtcagtcctcccgaccggtaatctttcggctgtgaatagacaagcactgcgctactaccgctgcgtcgtgtccgaagggctgaaactgggaatctccgcgatggttactttgtactaccctactcatgcccatctgggactgccagaaccgcttctccatgccgacgggtggctcaacccgtcaaccgctgaggcgttccaagcctacgccggattgtgctttcaagaactgggagatctggttaaactgtggatcaccatcaacgaaccgaacaggctgtccgacatctacaatagaagcggcaacgatacttatggggcggcccacaacctgcttgtggcccacgcgcttgcatggcgcttgtatgaccggcaattccggccatcgcagcgcggcgccgtctcgctgtcgctccacgcggactgggcagagccagcgaacccctacgccgatagccactggagggctgcagagcgattcctgcagttcgagatcgcatggttcgccgaaccactgttcaagaccggagactaccccgccgctatgcgcgaatacatcgcctcaaagcatcggaggggcctgagctcatcggctctcccgcgtttgaccgaggccgaaaggagactgcttaaaggcacggtggacttctgcgccttgaaccattttacgacccgcttcgttatgcatgagcaactggcaggaagccgatacgactcagatcgcgatatccagttcctccaagacatcactcggctgagctcgcctactaggctcgcggtgatcccttggggcgtccggaagttgctgaggtgggtgcggcgcaactatggtgatatggacatatacatcaccgccagcggcatagacgatcaggcgctggaggacgacagactgcgcaaatactacctgggtaaatacctccaagaggtcctcaaagcctacctgatcgacaaagtgcggatcaaaggatactacgcattcaagctcgcggaggagaagtccaagccgagatttggtttcttcacctcggacttcaaagccaaatcatcgatccagttctacaataaggtgatctcctcacgcggcttcccgtttgaaaactcgtccagcagatgttcccagacccaggagaataccgaatgcaccgtctgtctcttcctggttcagaagaaacctctcatcttcctgggatgttgcttcttctcgaccctggtgctgctgcttagcatcgcaattttccagcgacagaaaagaaggaagttctggaaggcgaagaacctgcagcacatccctttgaagaaaggcaagcgggttgtctcg

SEQ ID NO: 251803 - DNA, 3132 bp, Artificial Sequence
  derived and/or modified sequence
atgaaaccaggttgcgcagcaggatcgcccggcaacgagtggattttcttctcgaccgatgaaattactactagatacagaaataccatgtcgaacggtgggctgcaaaggagcgtgattcttagcgccttgattctcctccgcgcagtcaccggattttcgggggacggaagagctatttggagcaagaaccccaacttcactcctgtcaatgagtcacaactgttcctgtacgatacctttcctaagaactttttctggggtatcggcacgggggcacttcaggtcgagggaagctggaaaaaggatgggaagggaccttcgatttgggatcactttatccacacgcatctcaagaacgtctcctcgacgaacggctcctccgattcgtatatctttcttgaaaaagatctcagcgcccttgatttcatcggagtgtcgttttaccaattctcgatctcatggccgagactgttccctgacggtattgtgaccgtggccaacgcaaagggcctgcagtactactcgacgctgctcgacgccctggtcctgcgcaacattgaaccaatcgtgaccctgtaccattgggatctgcctcttgcacttcaggaaaagtacggaggatggaagaacgacactatcatagacatctttaatgattacgcaacctactgtttccagatgttcggtgatcgggtgaaatactggatcaccatccataacccatacctggtggcttggcatgggtacggaaccggtatgcatgcaccgggcgaaaagggtaatcttgctgccgtttacaccgtgggtcacaacctcattaaagcacactcaaaggtgtggcataactacaacactcactttcgcccacatcagaaagggtggctttccatcactctgggttcccactggatagaaccaaatagaagcgaaaatactatggacatattcaagtgccagcaatcgatggtgtcggtgctgggttggtttgccaaccctattcacggagatggggactacccggagggcatgcgaaagaagttgtttagcgtgcttcctattttctcggaggcagaaaagcacgaaatgaggggaaccgcagacttcttcgcgttttcgtttgggcctaacaatttcaaaccactcaacactatggccaagatgggtcaaaacgtgtcgcttaacctgcgtgaagcgcttaactggattaagttggagtacaataatcctagaattcttattgccgaaaacggctggttcaccgattcgcgtgtgaaaaccgaagataccacggccatttacatgatgaaaaacttcctctcgcaagtgctgcaggccatccgcctggatgaaattagagtgtttggttacaccgcctggagccttctggatggcttcgagtggcaagacgcgtacaccatcagacgcggcctcttctacgtggatttcaattcaaaacaaaaggaaagaaagccaaagtcatcagctcactactacaagcagattatacgagaaaatggtttttctctgaaggaatcgacccctgacgtgcagggccaattcccctgcgacttttcgtggggggtgaccgagtccgtgctgaagccagaatcagtggcatcaagcccacaattttccgatccgcatctgtacgtctggaacgccactggaaataggctcctccatagagtggagggagtcagacttaagaccagacctgcacagtgcactgattttgtcaatatcaaaaagcagctggaaatgttggcacgtatgaaagtgactcattacaggtttgcgcttgattgggcatcggtcctgcctaccggtaatctttccgctgtgaatagacaagcactccggtactaccgctgtgtcgtctcggaaggtcttaaactgggaatctcggcaatggtcactctgtactaccctactcatgcgcatttggggcttccagaacctctccttcatgccgatggatggctgaacccctctacggcggaggcatttcaggcatacgcaggtctttgttttcaagaactgggcgatctggtcaaactttggattaccataaatgagcccaacagactgtcggatatctacaatcgctcgggcaacgatacttatggtgccgcgcacaacctgcttgtcgcccatgccctggcatggaggctgtacgacagacagttcagaccttcgcaacgcggtgccgtctccctgtcattgcatgcagattgggcagaaccagcgaatccttatgcggactcacactggcgcgcagcagagcggttcctccaattcgagatcgcatggttcgcagaacctctgtttaagactggtgattaccctgctgcaatgagggaatacattgcgtcgaagcacagacgggggctctcctcgtccgcgctcccaaggcttactgaagcagaacggcggcttcttaaggggacggtggacttttgtgcgctcaaccatttcaccaccagatttgtgatgcatgagcaactggcaggttcccggtacgactccgatcgagatatacaatttcttcaagatatcacgagacttagcagccctactagactggcagtgataccgtggggcgtccgtaaacttcttcggtgggtccgacggaattacggggatatggacatttacattaccgcaagcggaattgacgatcaggcgctggaagatgatagattgagaaagtactacctcggcaagtatctgcaagaggtcctcaaagcgtacctgatcgataaggtgcgcatcaaggggtattacgcctttaagctcgcagaagaaaagtcaaagcctcggtttggttttttcacttccgatttcaaagcaaaatcttcaatccagttttacaacaaagtgataagctcacggggatttccattcgaaaattcaagctcaaggtgctcgcaaactcaggagaacaccgagtgcactgtctgtctcttcctcgtgcaaaagaagcccctcatttttcttgggtgctgtttcttttccactcttgtgcttctcctcagcatagcaatctttcagcgccagaagcggcgaaagttctggaaggctaagaacctccaacacatcccactgaagaagggaaagagggtggtgtcc

SEQ ID NO: 251804 - DNA, 3132 bp, Artificial Sequence
  derived and/or modified sequence
atgaaacctggatgcgcggcgggatccccgggcaatgagtggatcttcttttcgaccgacgagatcaccaccaggtacaggaataccatgtcaaatggaggcttgcaacggagcgtgatcctgtctgctctgattctgctccgggccgtgaccggattcagcggagatggaagagctatctggagcaagaaccctaatttcaccccagtaaatgaatctcagcttttcttgtacgatactttcccaaagaacttcttctggggtatcggaaccggcgcgctccaggtggagggatcgtggaagaaggacggaaagggcccatcgatttgggaccactttatccatacgcacctcaagaacgtctcctccaccaatggatcgtccgattcctacatcttccttgagaaagatctgagcgcgctggatttcatcggggtcagcttctatcagttctcgatctcatggccgcgcttgttccccgatggtatagtgacggtggcgaacgcgaagggactgcagtactactcgactctgcttgatgctctcgtgctgcgcaatatcgagccgatcgtcactctgtaccactgggatctccctctcgccctccaggaaaagtacggagggtggaagaacgacaccatcatcgacattttcaacgactatgcaacctactgcttccagatgttcggagatagagtgaaatactggataaccattcataatccctacctggtggcatggcacggctacggcacgggaatgcacgcaccgggcgaaaagggaaacctcgccgccgtctacaccgttggccacaacctgatcaaggcgcattccaaggtgtggcacaactacaacactcattttaggccacaccaaaagggctggttgtcgattaccctcggatcccactggatcgagccgaaccggtcggagaataccatggatatcttcaagtgtcaacaaagcatggtgagtgtgttgggctggttcgccaatccaatccatggagacggagactaccccgaaggaatgcgtaagaaactgttctcagtgctcccaatcttctccgaggcagagaaacacgaaatgcggggaactgccgacttcttcgcttttagcttcggtccgaacaacttcaagccgctcaacaccatggctaagatgggacaaaatgtgtctctgaacctgagagaggctctcaactggatcaaacttgagtacaataaccccagaatcctgattgcagaaaacggatggtttaccgactccagagtgaaaactgaagatactacggctatctacatgatgaagaacttcctgtcccaggtgctccaggcaatccgcctggacgaaatccgggttttcggatacactgcgtggtcactgctggacggtttcgaatggcaagacgcctacaccatcagacgcggactgttctatgtggatttcaactccaaacaaaaggaacgcaagccgaagtcctccgctcactattacaagcagatcatccgcgaaaacggtttctccctgaaagaatcgactcctgatgtccagggtcagttcccttgtgatttttcctggggagtcactgaatcggtgctgaagccagagtccgtggcctcgtcgccgcagttctccgatccacacctgtacgtgtggaacgccacggggaatcgcctcttgcatagagtcgaaggggtgagactgaaaaccagacctgcccagtgtactgatttcgtgaacattaagaaacaactggagatgctggctcgcatgaaggtgactcactaccggttcgccctcgactgggccagcgtgctcccaactggaaatctgagcgcggtgaaccgccaggcccttcgctactaccgctgcgtggtgtcagagggtctgaagctcggtatctcagctatggtcaccttgtactaccccacgcatgcacacctgggactcccagagccactgctccatgccgatggatggctgaacccgtcgacggcggaggcctttcaggcatacgctggactttgttttcaggagctcggagatctggtcaagttgtggataactatcaatgagccgaacagactctcggacatctacaatcggtcgggcaatgacacttacggcgctgcacacaacctgctggtggcgcacgcactggcctggcgcctctatgatagacagtttcggccctcccaacgaggagccgtcagcctgagcctccacgcggattgggcagaaccggccaacccgtacgccgactcccattggcgggcggccgaacgctttctgcagttcgagattgcgtggttcgctgaaccattgttcaaaaccggtgattacccggcggcaatgcgcgaatacatcgcctctaagcaccgccggggcctcagctcgagcgccctccctcggttgactgaagccgagcggaggctgctcaagggcaccgtggacttctgcgcgctgaaccactttaccaccagatttgttatgcatgaacagctggcaggctcacggtacgacagcgaccgggatatccagttcttgcaggacattacccggctgtcctccccgacccgcctcgcggtcatcccgtggggagtgagaaagttgttgaggtgggtgcggaggaattacggagacatggacatctacatcactgcctcgggaatcgacgaccaggccctggaggatgaccgcctgcgcaaatactacctcggaaagtacctccaagaagtcctgaaggcctacctgatcgacaaggtgcgcataaaaggttattacgcctttaagctggcagaggaaaagtctaaaccacggtttggattcttcacttcggacttcaaagcaaaatcatccatccagttttacaacaaggtcatatcctccagaggattccccttcgaaaactcgtcctcgcgttgtagccaaactcaagaaaataccgagtgcactgtctgcctgttcttggtgcaaaagaagcctctcatcttcctgggatgctgcttcttctcgactctcgtgctgttgctttccatcgccatcttccaaaggcaaaagcggcgcaagttctggaaagcgaagaacttgcagcatattcctctcaagaagggaaaaagagtggtcagc

SEQ ID NO: 251805 - DNA, 3132 bp, Artificial Sequence
  derived and/or modified sequence
atgaagccaggttgtgccgcaggctctcctggaaatgaatggatcttcttttctactgatgaaattacaacccgctaccggaatactatgtctaatggcggcctgcagcggtctgttattttgagcgccctcatcttactgagggccgtgaccggcttttcaggagacggaagggccatatggagcaaaaatccaaactttacacctgtgaacgagtcacagctcttcctctacgacactttccctaagaacttcttctggggtattggcaccggtgctctgcaagtcgaaggatcttggaaaaaagatgggaagggaccatcaatctgggaccatttcatccacacacacctgaagaacgtgagctccaccaacgggagcagcgacagctatatcttccttgaaaaagacttatctgctttggatttcatcggcgtgagcttttatcagttttctatctcctggccacggctgtttcccgatggaatagttacagttgccaatgccaagggactgcagtactacagtactctgctcgacgctctggttctgagaaacattgaacccattgttaccctgtatcattgggatctgcccctggccctacaggaaaaatatgggggatggaagaacgacaccataatagatatctttaatgactacgccacatattgcttccagatgttcggcgacagggttaagtactggataaccattcataatccctacctcgtggcttggcatgggtacgggaccggcatgcatgcaccaggcgaaaaaggaaacctcgccgccgtgtacaccgtggggcataacctcataaaggcccactctaaagtttggcacaattacaacactcattttagaccacatcagaaggggtggctgtccattaccctaggatcccactggattgaacccaatcgcagcgagaataccatggatatatttaagtgccagcaatcaatggtgagcgtgctgggatggttcgccaatccaattcacggggacggcgattacccagaaggcatgcgaaagaagctcttcagcgttttaccaattttctctgaagcagagaaacatgagatgagaggcaccgctgactttttcgcattctccttcggacctaacaatttcaaacctctgaacacaatggccaagatgggccagaatgtgtccctgaacctgcgggaggccttgaattggatcaaactggagtacaataacccacgcatcctgatcgctgagaacgggtggttcacagactctagggtgaaaaccgaagacaccacagcaatctacatgatgaaaaatttcctgtcccaagtgctgcaggccattagattagatgaaattcgggtttttgggtacaccgcttggtcactcctggacggcttcgaatggcaggacgcctataccatccgcagaggcctcttttacgtggatttcaacagcaaacagaaagaacgcaagcctaaaagtagtgctcactactacaagcagatcattcgggagaacgggttcagtctgaaggaaagcactcctgacgtgcagggccagttcccttgtgattttagctggggcgtcaccgaatccgtattgaagcccgaaagtgtcgcctcctctccccagtttagcgatccacacctgtatgtctggaatgctactggaaataggctgctgcatcgggtggagggggtcaggttaaaaacacgccctgcccaatgtactgatttcgtgaatattaaaaagcagttagagatgctagcacggatgaaggttacccactacaggtttgccctggattgggcatcagtactgccaacaggcaacctcagcgctgtgaaccgacaggcactgcgttattacaggtgtgtagtgtctgaaggacttaagctggggatcagcgccatggtcaccctctactacccaacacacgcccatctagggttacctgaaccacttctgcatgccgatggctggctgaatccatccacagccgaagctttccaggcttacgccggcctgtgcttccaagagttaggtgatctcgttaaactttggataaccataaatgaaccaaatagactgtccgacatttacaatcggtccggcaatgatacttacggcgcagcacataatctcctcgtggcacatgccctcgcatggcgcctgtacgatagacagttccgtccaagtcagaggggcgcagtttctctgtcactccatgccgattgggctgagccagctaacccttatgctgacagtcactggcgcgcagcagagagatttctgcagttcgagatcgcttggttcgccgagcctttatttaaaacaggcgactacccagctgcaatgcgcgaatacatagctagtaaacatcgtagaggcctgtcaagcagcgctctgccccggctcacagaggccgagaggagactgctcaagggcaccgtggacttttgtgccttaaatcatttcaccaccagatttgttatgcacgagcagctcgcaggctctagatatgattctgacagagacatccagttcctacaggatattaccaggctgagcagcccaacaagattagctgttataccatggggagttaggaaactgctacgatgggttaggaggaattacggcgacatggatatatacatcacagctagcgggatcgatgatcaggctctggaagatgacaggttaaggaaatactacctaggcaaatacctgcaggaagttctgaaagcctatctgattgataaagtgaggattaaagggtattacgcttttaagctagcagaggaaaagtccaagcctaggtttggtttctttacttccgatttcaaggctaagagttcaatacagttctacaataaggtcatttcttcacgcggctttcctttcgagaattcatcctctcgttgtagtcaaacacaggaaaacacagagtgcacagtgtgtctctttttagttcagaagaagcctctgatcttcctaggatgctgtttcttttccaccctggtgcttctgctatctattgccatatttcagcgccagaaacggcgtaaattttggaaggctaagaatctgcagcacattccactgaaaaagggtaagcgcgtagtatcc

SEQ ID NO: 251806 - DNA, 3132 bp, Artificial Sequence
  derived and/or modified sequence
atgaaacctggttgcgccgcaggatcaccaggcaacgaatggattttctttagtacggacgagattactacccgctatagaaacactatgtctaatggcgggctccaaaggagcgtgatcctttccgcgctgattctcctgagagctgtgaccggatttagcggcgatggacgcgccatatggtccaagaacccaaacttcacgcctgtcaatgaatcgcagctctttctctacgacacctttcccaagaactttttctggggaataggtactggtgctctgcaagtggagggatcgtggaagaaggatggaaagggtccgagcatctgggatcacttcattcatactcatctgaagaacgtgtcctcaactaatggatcctctgatagctacattttccttgaaaaggacctgtcagctctggatttcattggtgtgtccttctatcaattctccatttcatggccccggctgtttcccgatggaattgtgactgttgcaaacgccaaagggctccagtactattcgaccctgctcgacgcccttgtgctgcggaatatcgaaccgatagtgaccctgtaccattgggaccttcctcttgcactccaagagaagtacggcggctggaaaaatgataccatcatagatatctttaatgattatgcaacttactgttttcaaatgtttggggacagagtcaagtattggataaccatccataatccgtaccttgtggcctggcacggttacggtacggggatgcacgcgcctggagaaaagggaaacctggcagccgtgtacaccgtgggccataacctgataaaagcccattccaaggtctggcataactacaacacccacttcagacctcatcagaaggggtggctgagcatcactttgggatcacattggattgaacctaatagaagcgagaacaccatggatatcttcaaatgccagcaatccatggtcagcgttctgggatggttcgcaaatcctatacatggagacggtgactacccggaaggcatgcgtaagaagctcttcagcgtgctgccgatcttctccgaggcagagaagcatgaaatgcggggcacggcagacttctttgcattttcgttcggacccaacaactttaagccacttaatactatggcaaagatggggcagaacgtgagcctgaacctgagagaagcgctcaactggatcaaactggaatacaataatccacgaattttgatcgctgagaacggatggtttaccgattcgcgcgtaaagacggaggatacgactgccatttacatgatgaagaattttctgtcgcaagtgctgcaagcaatacggctggacgaaattagagtctttggatatactgcgtggtcccttctcgatggattcgaatggcaagacgcctacaccattcgaagagggcttttctacgtggatttcaattcgaagcagaaagaaagaaaaccaaagtcgtccgcgcactactacaagcaaatcataagagaaaacggctttagcctcaaggaatccacccccgatgtccagggccaattcccctgcgattttagctggggtgtcaccgagagcgtgctgaaacctgagagcgtggcatcctcgccccaattctcggacccgcacctttacgtctggaatgcaactggaaatcggctgctgcatagagtggagggagtgagactcaaaactagacctgcacaatgtacggactttgtcaacatcaagaaacaactggagatgcttgctagaatgaaggttacccactaccgcttcgcactggattgggcatcggtgctcccaactggtaacctctcagcagtcaatcgccaagccctccgatactacagatgtgtggtttccgagggacttaaactgggaatcagtgcaatggttactctttactaccctacccacgcacatctgggcctgccagaacctttgctgcatgctgacggctggctgaacccttcgactgcagaagccttccaggcatacgcagggttgtgttttcaggagctgggtgaccttgtgaaattgtggattactatcaacgagccaaatcgactgagcgacatctataacaggtctggcaatgacacgtacggagctgcccacaacctgctcgtcgcacacgctctggcatggcggctctacgatagacaatttagacccagtcagcgtggggccgtgtcgctctcactccacgcagattgggccgaaccagccaacccttacgcagattcgcattggagagcagccgaacgcttcctgcaatttgaaattgcatggttcgcagaacctttgtttaagactggtgactacccagcagcaatgagagaatacatcgcgagcaaacacagaagaggattgagctccagcgcgcttccacgacttactgaagcagagcgcagacttttgaaggggactgtggacttctgtgctcttaaccacttcactactaggtttgtgatgcatgaacagctggcaggcagcaggtacgacagcgatagagacatccaatttctgcaggatattactcggctgtctagccccacccgccttgcagtgattccttggggagtccgaaaactgctgcgatgggtgcggaggaactacggtgacatggacatttacatcactgcatcaggtatcgatgatcaagcactcgaagatgatcgactcagaaagtactacctcggcaagtaccttcaggaagtgctgaaggcatacctgatcgataaagtgcgcataaagggttactacgcatttaagctggcggaagagaagtcgaagccacggtttggtttctttacctcagactttaaggccaaatcatccatccagttttacaacaaggtaatttcctcccgtggattcccattcgaaaacagcagctcgcgatgttcccagacccaggaaaataccgaatgcaccgtgtgtttgtttcttgtgcagaagaaaccactgatttttctcggttgctgtttcttttccaccctggtcctccttttgtcgatcgcgatttttcaaaggcaaaaaagaagaaagttctggaaagccaagaacctgcaacatatcccacttaagaaggggaagcgggtggtgtcc

SEQ ID NO: 251807 - DNA, 3132 bp, Artificial Sequence
  derived and/or modified sequence
atgaaaccaggatgcgcggctggcagtccaggcaatgagtggatctttttctccacagatgaaattaccactcgctaccggaataccatgtcaaatggggggctgcaacgcagcgtgatcctgagtgcactgattctgctgcgtgccgtgaccgggttttctggcgacgggagggcaatctggagtaagaatccaaactttactccagtcaatgaaagccagctcttcctgtacgacacctttccgaaaaacttcttctgggggataggtaccggtgccctgcaggtggaaggcagttggaagaaagatggaaagggaccttctatctgggatcactttatacacacgcacctgaagaacgttagttcgaccaatgggagctccgattcctacatcttcctcgaaaaggacttgtctgctctggactttatcggggtatcattttatcaattctcaatcagttggccaaggctctttcccgacggtatcgtgactgtcgccaatgctaaggggctgcagtattatagcactctactcgatgcactggtgctccgaaatatcgagccaattgtgaccctgtaccactgggatcttccactcgcccttcaggagaaatacggcggctggaaaaacgataccattatcgatatcttcaacgactacgctacttattgttttcagatgttcggagatagggtgaagtactggatcaccattcacaatccgtacctggtggcctggcatggttatggcaccggaatgcatgcacctggcgaaaagggaaatctggctgctgtttacactgtcggtcacaaccttatcaaagcgcacagtaaagtttggcataactataacacacacttcaggccacatcagaaaggatggctttccatcactctcgggtctcattggatcgagcccaatcgatccgagaatacaatggacatttttaagtgccagcagtcaatggtgagtgtgctcggttggttcgctaaccctatccatggtgatggcgactaccccgaaggtatgagaaagaaattgttttccgttcttccaattttcagcgaggctgaaaaacacgaaatgagaggcaccgccgatttttttgccttctctttcgggcccaataactttaagccactgaataccatggcgaaaatggggcagaatgtttccctcaatctcagggaggctctgaattggattaagctggaatataacaaccctcgtatcctcattgccgagaacggatggtttaccgacagccgagtaaagactgaggacacaaccgctatttacatgatgaaaaactttctttctcaagtgcttcaggctatcagattagacgaaatccgagtgtttggctatactgcttggtccttgctggatgggttcgagtggcaggacgcttacacaattaggcggggcctgttttatgttgactttaactcgaagcaaaaagagcggaagcccaagtcatcagcacattactataagcagattatccgtgaaaacggcttttcactcaaggagagtacaccagacgtccaggggcaatttccctgcgatttctcttggggtgtgaccgagtcagtcctcaaaccggagtctgtggcgagcagtccccagttttctgacccccatctgtatgtgtggaatgctacggggaaccgactgctccacagagttgagggagtccgactgaagacgaggcctgcccagtgcaccgacttcgtgaatataaaaaaacagcttgagatgctagccaggatgaaggttactcactatagatttgcactggactgggctagcgttctaccaaccggaaatctttcggccgtgaaccggcaagccttacgttactaccgttgcgtggtgagtgaggggttaaagcttggcatcagtgcaatggtgactctgtattaccctacacatgctcatctcggtttgcccgagccactgttacacgcggacggatggctgaatccgtccaccgcagaggccttccaagcctacgccggcttgtgcttccaagaattgggcgacttagtgaaactgtggattaccataaacgagcccaacaggctaagcgacatttacaaccgttcgggtaacgacacctatggcgcggctcacaaccttctcgttgcacatgcactcgcttggcggctgtatgatcggcagtttcgacccagtcagcgaggggccgtctcattgtcactgcacgctgactgggcagaaccagccaacccatatgctgattcacactggagagcagctgaacgatttctgcagtttgagatagcttggtttgccgagcccctgttcaagacaggtgactaccctgcagccatgagagagtacattgcgagtaaacatagacgaggcctgtcaagcagtgctctcccacgactgacagaggccgagcgaaggctcctgaaagggacagtcgacttctgtgccctgaaccattttactacccggttcgtgatgcatgagcagctagctggttccaggtacgactctgatagagacatccagtttctgcaggatatcacccgactatcttctccaactcgattggcagtgataccctggggcgtgcgaaaactgctgagatgggtcaggcgaaactatggcgatatggacatctatatcactgcaagcggaatcgatgaccaggctctggaggatgatagactccgtaaatactacctcggaaagtatttgcaggaagtgttgaaggcctatctcatcgacaaagttcgaatcaagggatattatgcgttcaagctggcagaagagaaatccaagccacgattcggattctttacctcagactttaaggcaaaaagtagcatccagttttacaacaaggtgataagctcacgtggattccccttcgaaaactccagctctcgatgtagtcagacccaggagaataccgaatgtaccgtatgtctcttcctggttcagaagaaaccactgatcttcctgggctgctgtttcttcagcactcttgttctgctgctgtccattgcaatatttcaacgtcagaaaaggagaaagttttggaaagcgaagaatctccagcacatccctctcaaaaaaggcaagcgagtggtcagc

SEQ ID NO: 251808 - DNA, 3132 bp, Artificial Sequence
  derived and/or modified sequence
atgaaacccggctgtgcagccggaagcccaggtaatgaatggatcttcttcagcactgacgagattacgacccggtacagaaataccatgtccaatggagggctccagcgttcagtgatcctgagcgcgctgatcctcctccgcgccgtcaccggatttagcggggacggcagggccatttggtcgaaaaacccgaatttcaccccggtgaacgagtcgcagctgtttctttacgatacctttccgaagaacttcttctgggggatcggaaccggagcgctgcaggtggagggatcgtggaagaaggacggcaagggaccgtcaatctgggaccatttcatccatacgcatcttaagaatgtgtcgtcaaccaatggctcgtcggattcctatatcttcctcgaaaaagatctgtcggccctggacttcatcggagtgtcattttaccagttctcaatcagctggccgcgcctgtttcctgacggaatcgtcaccgtcgccaacgccaagggactgcagtactactctacccttctggacgccttggtcctccgcaacatcgaacctattgtgacgctctatcactgggatttgcctctggcactgcaagagaagtacgggggatggaagaacgacactatcatcgacatcttcaatgactacgcaacctactgcttccagatgtttggggaccgcgtgaagtattggattactatccataacccctacctggttgcttggcacggatacggaaccggaatgcatgccccaggcgaaaagggaaatctggcagcagtgtacaccgtaggtcacaatctcatcaaggcacacagcaaggtctggcataactataacactcacttccgccctcaccagaaagggtggctcagcatcaccctggggagccactggatcgaaccgaacagatccgaaaacactatggatatcttcaagtgccaacaatccatggtgtccgtgctgggctggttcgccaatcctatccacggagacggcgactacccagagggaatgcgcaagaagctcttcagtgtcttgccgatcttctccgaggcggagaagcacgagatgcgggggacggctgacttcttcgctttttcgttcggtcctaacaatttcaaaccgctgaacactatggcaaaaatggggcagaacgtttctctgaaccttagggaagccctcaactggatcaagctggagtacaacaacccgcgcatcctgattgcggaaaacggatggtttaccgatagccgcgtcaagaccgaggacacgactgctatttacatgatgaagaacttcctgtcgcaggtcctgcaggctatccgcctggatgagatcagggtctttggatacactgcctggtcgctgctcgacgggttcgaatggcaggatgcctatactatccgcagaggactcttctacgtggactttaactctaaacagaaggagcgcaaaccgaagtcgagtgcccactactacaagcaaatcatccgtgaaaacggattctcactcaaggagtcaacgccggatgtccaagggcaattcccgtgcgatttttcctggggagtcaccgagtccgtattgaagccggagtcggtggcctcttctcctcaattcagtgaccctcatctttatgtttggaacgccactggcaaccgcctgctgcatagagtggaaggggtgcggcttaaaaccagacctgcacaatgcaccgacttcgtgaacatcaaaaagcagctcgaaatgctggccagaatgaaggtgactcactaccgctttgcgctggattgggcttccgttctgccaacgggtaatctgagcgccgtcaatcggcaggccctccgctactaccggtgtgtcgtctccgaaggacttaagctgggaattagcgcgatggtgaccctttactaccccacccatgcgcacctcggcctgccggaaccgctcctccatgctgatggatggctgaacccgtccaccgcagaagcgttccaggcctacgctggactttgcttccaggaactgggggatctggtcaagctgtggatcacgatcaatgagcccaacaggctgtcggatatctacaatcggtccggcaacgacacctatggcgctgctcataatctgctcgtggcccacgctctcgcttggcggctttacgatcgccaattcagaccgagccaacggggcgctgtgtcgctctcacttcacgcagattgggcggaaccggcaaacccctacgcagattcgcattggcgcgcggcagaaagatttctgcagttcgagatcgcctggttcgccgaaccactgttcaagactggggactaccctgccgcgatgcgcgagtacatcgcctcaaaacatcgccggggactctcgtcatccgccctgccgcgcttgactgaagccgagaggcggctgctgaagggaactgtcgatttctgtgcattgaatcacttcaccactcggttcgtcatgcatgaacagctcgccggatcaagatacgacagcgaccgggatattcagttcttgcaagatatcactagactgtcgtcgccgactcggctggctgtgatcccttggggggtgcggaaactgctgcgctgggtgaggcggaactacggcgatatggacatctacatcaccgcctccggcatcgacgaccaggcacttgaggacgacaggctgagaaagtactacctgggaaagtacctccaggaagtcctgaaagcctacctgatcgacaaggtgcgcatcaagggatactacgctttcaaactcgcggaagagaaaagcaagccaaggttcggattcttcaccagcgactttaaggccaagtcatcgatccagttttacaataaggtgatctcatcgagaggctttccattcgagaattcgtcgtccagatgctcacagacccaggagaacaccgaatgcactgtgtgtctgtttctggtccaaaagaagccgctcatcttcttgggatgctgcttcttctcgactctggtgctcctcctgtcgatcgcaatcttccagagacaaaagcgccggaagttttggaaggcaaagaatctgcagcatatcccgcttaagaaaggaaagcgggtggtgtct

SEQ ID NO: 251809 - DNA, 3132 bp, Artificial Sequence
  derived and/or modified sequence
atgaaaccaggttgtgcagctggatcaccaggaaatgagtggattttttttagtacagatgaaattacaacacgttatcgaaatactatgtctaatgggggacttcaaagatcagttattttatcagctttaattttattacgagcagttactggattttcaggagatggaagagctatatggtctaaaaacccaaattttactccagttaatgaaagtcaattattcttatatgacacttttccaaagaattttttctggggaattggaacaggagctcttcaagtcgaaggttcatggaaaaaggacggaaaaggaccatccatttgggatcatttcattcatactcatttaaaaaatgttagttcaacaaatggttcttctgattcatatatttttcttgaaaaagacttatcagctttagacttcattggagtttcattttatcaattctcaatttcttggccacgtcttttccctgatggaattgtaactgttgcaaatgctaaaggattacaatattattctacattattagatgctcttgtacttagaaatattgaacctatagttaccctttatcattgggatcttccattagcattacaagaaaaatatggaggatggaaaaatgacacaattattgatatttttaatgattatgcaacttattgttttcaaatgtttggagatagagtaaaatattggattacaatacacaatccatatcttgttgcttggcatggttatggtactggaatgcatgctccaggagaaaaaggaaatcttgctgctgtttatacagttggacataatttaattaaagcacatagtaaagtttggcataattataatactcattttagaccacatcaaaaaggatggctttctattactcttggatctcactggattgaacctaatagaagtgaaaatactatggatatctttaagtgtcaacaatctatggtctctgtgcttggatggtttgctaatccaattcatggagatggagattatccagaaggaatgagaaaaaaattattttcagtattaccaattttcagtgaagctgaaaaacatgaaatgagaggtacagcagatttttttgcattttcatttggaccaaataattttaaaccattaaatactatggctaagatgggacaaaatgttagtcttaatttaagagaagctttgaattggattaaattagagtataataacccacgaattttaattgctgaaaatggttggttcacggactctagagtcaaaacagaagatactactgctatttatatgatgaaaaattttctttctcaagttttacaagcaataagacttgatgaaataagggtttttggatacacagcttggtctcttcttgatggatttgaatggcaagacgcttatactattagacgtggattattctatgtagattttaattctaaacaaaaagaaagaaaaccaaaaagttctgctcattattataaacaaattattcgtgaaaatgggtttagcctaaaagagtcaactccagatgttcaaggacaatttccttgtgatttttcatggggagttactgagtcagtgttgaaaccagaatcagttgcaagtagtccacaattctcggatccacatctatatgtatggaatgcaactggaaatcgtttacttcacagagtagaaggagtaagattgaaaacaagaccagcacaatgtacagattttgttaatataaaaaagcaattggaaatgcttgcaagaatgaaagttacacattatcgattcgctttagactgggcatcagttttaccaacaggaaacttatcagccgttaatagacaagccttaagatattatagatgtgttgttagtgaaggattaaaattggggattagtgcaatggttactttatattatccaacacatgctcatttaggattaccagaacctttgttacatgcagatggatggttaaatccttctacagcagaagctttccaagcttatgcaggattatgttttcaagaattaggtgatttagttaaattatggataacaattaatgaaccaaatagattaagtgatatttacaatcgttctggaaatgatacttatggagcagctcataaccttctagttgcacatgctttagcttggagattatatgatcgtcaatttagaccttcacaaagaggggctgtatcattatcacttcatgcagattgggcagaacctgctaacccttatgcagattcacattggagagctgctgaaagatttttgcaattcgaaattgcttggtttgccgaaccattatttaaaactggagattaccctgctgctatgagagaatatattgcaagtaaacatagaagagggttaagtagttcagctttaccaagacttactgaagcagagagaagacttcttaaaggaacagtagatttctgtgctttaaatcatttcacaacaagatttgttatgcacgaacaattagcaggatctagatatgattcagatcgtgatattcaattccttcaagatattacaagactttcatcaccaacacgtttagctgttattccatggggagttagaaagcttttacgatgggttagacgtaattatggtgacatggacatttatataacagcatccggtattgatgaccaagctcttgaagatgatcgacttagaaaatattatcttggaaagtatttacaagaagtccttaaagcttatttaattgataaagttagaattaaaggttactatgcatttaaattagcagaagaaaaatcaaaaccacgttttggtttttttaccagtgatttcaaagctaaaagttctattcaattttataataaagttatttcttcaagaggatttccatttgagaattcatcatcaagatgtagtcaaactcaagaaaatactgaatgtacagtttgtttattccttgttcaaaaaaaacctcttattttcttgggttgttgttttttttctacccttgtcttattacttagtattgctatttttcaaagacaaaaaagaagaaaattttggaaagcaaagaatcttcaacatattcctttaaaaaaaggtaaaagagttgtttca

SEQ ID NO: 251810 - DNA, 3132 bp, Artificial Sequence
  derived and/or modified sequence
atgaaacctggctgcgccgctggtagtccaggaaatgagtggatcttcttttcgaccgatgaaatcacaacacgttaccggaacaccatgtccaacggcggcctgcagcgatccgtgatattgagcgcactaatactgttgcgggcagtcaccggcttttccggagatggtagagctatttggtccaaaaaccctaacttcacacctgtgaatgaaagtcagctgtttctgtatgacacgttccctaagaatttcttttgggggatcgggaccggagctcttcaagtggaggggtcctggaagaaggacggtaaggggccatccatctgggatcattttattcacacgcacctgaagaacgtatcctcaacaaacggcagctctgactcgtatatattcctggagaaggacctgagcgcccttgatttcataggtgtgtcattttatcagttttctatatcgtggccgaggctttttcccgatggtatcgtgactgtcgccaatgccaagggcctgcagtactacagcacactgctggacgccctagttctgcggaacatcgagcctatagtgactttgtatcactgggacctgccgttggctctacaggagaagtacggcggctggaaaaatgacacaatcatcgacatttttaacgactatgcaacttattgcttccagatgtttggcgatagggttaaatattggattactatccataatccttatctggtagcctggcacgggtacgggaccggtatgcacgcccccggagagaaaggcaaccttgccgctgtgtatactgttgggcataatctgattaaagcacatagcaaggtgtggcataattacaatacacatttccggcctcaccagaaaggctggctctcaattaccctaggctcccattggattgagcccaatcggagcgagaataccatggacatctttaagtgtcagcagtctatggtctctgtgctgggatggttcgcaaacccaatacatggcgatggagattaccctgaggggatgcgcaaaaaactcttttccgtgctgcccatattcagtgaggcggagaaacacgaaatgcggggtactgccgacttctttgctttctcctttgggcctaacaacttcaagccactgaacactatggctaagatggggcaaaacgtgagtctaaatctgcgagaggcgttgaactggatcaagcttgagtacaataatcccaggattctgattgccgagaacggttggtttactgacagccgcgttaagaccgaggataccactgccatctacatgatgaagaacttcttgtcacaggtgctccaagcaatccgcctcgacgagatccgggtattcgggtacactgcctggagtctgctcgatggatttgagtggcaggatgcttacaccattaggagaggactgttctacgtagactttaattccaagcagaaggaaagaaaacccaagagcagcgcccactactacaaacagattattcgtgaaaacggtttctctctcaaagaaagcacaccagatgtacaagggcagttcccatgtgatttttcttggggcgtgactgaaagcgtgctgaaacctgaatcagtggcctccagtccccagttttcagacccacacttgtatgtgtggaacgcgactggcaaccggttgctccatcgggtcgagggcgtgagacttaaaacgaggcccgcacaatgcaccgattttgtgaacatcaagaagcaactcgagatgttggcccggatgaaagtgactcactaccgcttcgcactagactgggcttctgttctgccgaccggaaacctctccgcagttaatcggcaggccttgagatactaccggtgcgtagtaagtgaaggactcaagctgggcatcagcgccatggtgaccctctactaccctacacatgctcatctggggctgccagagcccctactgcacgcagatggctggctgaacccctctaccgccgaggcattccaagcctacgccggcctctgttttcaggaattaggggatctggtgaaactgtggatcacaatcaacgaacccaaccggctaagcgatatttacaatcgctcaggtaacgatacttacggcgccgcgcataacctgctggtggctcatgccttggcctggagactctacgataggcagtttcgacctagccagcggggggccgttagcctttcccttcatgcggactgggccgagcctgcaaacccctacgctgatagccattggcgggccgcagagaggtttctccagtttgaaattgcttggtttgccgagcccctgttcaagaccggggattacccggcagccatgcgggagtacatagcgtccaagcatcggcgtgggctgtccagctccgccctgccgagacttacggaagccgagaggcgcctgctgaaaggcaccgttgacttctgcgccctcaaccactttaccacacgttttgttatgcacgagcagctcgctggtagtagatacgacagcgacagagatattcagtttcttcaggatataactcgactctcatctccaaccaggctggccgtgattccctggggcgttaggaagctgctccggtgggtgcgccgtaactatggcgacatggatatatatattaccgccagcgggatcgatgaccaggcactcgaagacgacaggctacgcaaatattacctgggaaagtatctacaggaagtcctgaaagcgtacctgattgacaaagtgcgcattaagggttactacgcatttaagttagcagaggagaagtcgaaaccaaggtttggtttcttcactagcgattttaaggccaaatcttctatccagttctacaacaaggttatcagcagccggggcttcccgtttgagaatagcagtagccgctgttctcagacccaggaaaacacagagtgcaccgtctgcctgtttctcgtccagaagaagcctctgatattcctgggctgttgcttcttcagcaccctcgtgctcctgctcagcatcgcgattttccagcgtcagaagcgtagaaaattctggaaagcaaaaaacctgcagcacatccccctaaagaaaggcaagagggtcgtttcc

SEQ ID NO: 251811 - DNA, 3132 bp, Artificial Sequence
  derived and/or modified sequence
atgaagcccggatgtgcagccggttcacctggaaacgagtggatctttttctccaccgatgagatcactacccggtaccgtaatactatgtcaaacggaggactccaaaggtcggtgatactttcggccctgatactgctccgtgcggtgaccggattcagcggggatggacgtgcaatctggtcgaagaatcccaacttcactcctgtcaacgaatctcaactcttcctgtacgacacctttcccaagaactttttctggggaattggaaccggggcccttcaagtcgaaggaagctggaagaaggacgggaagggaccttcaatatgggatcactttatacatacccacctgaagaatgttagctctacgaatggctcgtccgactcgtacatattccttgaaaaggatctttcggcactcgactttatcggtgtgagcttctaccagttttccatctcctggccaagactgtttcccgacggtattgtgaccgtggcaaacgcaaagggactgcagtactactcgaccctgcttgacgccctggtgctgagaaacatcgagccaatcgtgaccctgtaccattgggaccttcctctcgcgctgcaagaaaagtacggagggtggaagaatgatacgattattgacattttcaacgattacgcaacttactgctttcagatgttcggggaccgcgtcaagtattggattaccattcataacccgtaccttgtggcttggcatggatacggaaccggaatgcatgcccctggagagaaagggaatctcgccgcagtctacaccgttggccataacctgattaaggcccactcgaaggtctggcataactacaacactcatttcagacctcatcagaagggatggctgtcgattactcttggatcccactggattgagccaaacaggagcgagaacactatggacatctttaagtgtcaacaatcgatggtgtcggtcctcggatggtttgctaaccctatccatggtgatggtgattaccctgagggtatgagaaaaaagctgttcagcgtcctccctatattctccgaagccgaaaagcatgaaatgagaggcacggcagatttctttgcattttcctttggtcccaataactttaagcctctgaacactatggcaaagatgggacaaaacgtgtcactgaaccttagagaggcgctgaattggatcaaactggaatacaataatccgcggatcctgattgccgaaaacggatggtttacggactcgagggtgaaaacggaggacaccaccgctatttacatgatgaagaactttctctctcaagtccttcaggcgattcgcctggatgaaattagagtgtttggctatactgcatggtcgttgctggatggtttcgaatggcaagatgcatacaccattcgccgtggtctgttttacgtggatttcaattcgaagcaaaaggaaaggaagcctaaatcctccgcacactactacaaacagattatcagggagaatggtttttccctgaaagaatcaaccccagacgtccaaggtcagttcccgtgtgatttctcgtggggggtcaccgagtcagttctgaaaccagagtccgtggccagcagccctcaattttccgatcctcacctttacgtatggaacgctaccggaaatcggttgctgcatcgggtcgagggcgtccgcctcaagactaggccggcccaatgcactgattttgtcaacatcaaaaaacagcttgagatgctggcaagaatgaaggtgacccactatcgctttgcactggactgggcatcggtgctgcctactggaaatctttcagctgtgaaccggcaagccctgcggtattacaggtgtgtcgtgagcgaaggactgaaacttggaattagcgcaatggtcactctctactacccaactcatgcacacctcggccttcctgagccgctccttcatgcagacggatggctgaacccatcaaccgcagaagcatttcaggcatatgccggcctttgttttcaggaactcggtgatctggtgaaactttggattactattaacgaaccaaatagattgtcggatatctataatcggtccggcaacgatacctacggggccgcgcataacctccttgttgcacacgcccttgcatggagactttatgatagacagtttaggccttcgcagcgaggcgccgtctcactttccctccatgcagattgggcagagcctgcaaacccttacgcagacagccactggcgggcggcggaacggttcctccagtttgagattgcctggttcgcagaaccgctctttaagaccggggactatccagcagcaatgcgcgagtacattgcatcaaaacatcggaggggtctgtcctcctcggcacttcctaggctcaccgaagcagaacggcgactgcttaagggaaccgtcgatttttgcgcacttaatcattttaccaccaggtttgtgatgcatgaacaactggccggatctaggtacgattcagacagagacattcagtttctgcaggacattacccgtctgtcgagccctaccaggctcgccgtcattccttggggagtgcgaaaacttctccgttgggtgcgtaggaattatggtgatatggacatttacatcaccgcgtcaggaattgacgatcaagcacttgaagatgacagactgcgaaaatactacctcggaaaatacctgcaggaagtgctcaaggcatacctcatcgataaagtgagaatcaaaggatactacgctttcaaacttgcggaggagaaatcaaaaccacgttttggattcttcacctcagactttaaagcaaagtcgtcaattcagttttacaataaggtgatttcgtcccggggctttccatttgaaaattcctcatcccgctgttcgcaaacgcaagaaaacacggagtgcactgtgtgcctttttctggtgcaaaagaaacccctgattttccttggatgttgcttcttctccactctggtgcttctgctgtccatcgctatctttcagcggcagaaacggaggaagttttggaaggccaaaaaccttcaacacatccctttgaaaaaggggaagcgcgtggtgtcc

SEQ ID NO: 251812 - DNA, 3132 bp, Artificial Sequence
  derived and/or modified sequence
atgaagccaggctgtgctgccgggtcgcctggcaatgagtggatattcttcagcacggatgaaattacaacccgttatcggaataccatgagcaacggtgggctccagcgaagtgtaatcctgtccgcgttgatactcctgcgggcggtgacgggcttcagcggtgacgggagggccatctggtccaaaaatccaaatttcactccggtgaatgaatctcagctctttttgtatgacactttcccaaaaaacttcttctggggcatcggtaccggcgcccttcaggtagagggttcctggaagaaggatgggaagggccccagcatttgggaccattttatccacacccatctgaagaacgtatcctcaaccaatggcagctccgactcttacatcttcctggaaaaggacctaagtgccctggatttcattggtgtcagcttctaccagttctctatctcatggccccgtctgtttccggacggcattgtaacggttgcaaacgctaaaggcttgcagtattatagtaccctcctcgacgcgttggtgctgcgcaatattgagccgatcgtgacgttatatcattgggatctcccactcgctctgcaagagaaatacggggggtggaagaatgacaccatcatcgacattttcaatgactacgcgacttattgtttccagatgttcggagatcgcgttaagtattggatcacaattcacaacccatatttagtggcttggcacggctatgggaccggtatgcacgccccaggagagaaaggtaaccttgccgcggtctataccgtaggccacaacctgatcaaggcccatagcaaggtttggcataattataacacacatttccgaccacaccaaaagggttggcttagcattacattgggaagccattggattgagcctaatagatccgaaaacacgatggatatcttcaagtgccaacaatccatggtcagcgttcttgggtggttcgccaaccccatccatggtgacggtgactaccccgagggcatgcgcaagaagttgttttctgtattgcctatcttctccgaggcagaaaaacatgaaatgcgggggacagcagacttctttgccttctctttcggcccaaataatttcaaaccactgaacaccatggctaagatgggacaaaacgtgtccctgaatctccgggaggcactaaactggatcaagttggagtacaataacccccgcattttgatcgccgaaaatgggtggtttaccgacagtcgcgtcaaaactgaagacacaacggccatctacatgatgaaaaattttctctctcaagttctacaagccattcgactggatgagattagagtgttcggatacaccgcctggtccttgcttgatggatttgaatggcaggacgcatataccatccgccgagggctcttttacgttgatttcaacagcaagcagaaagaacgcaaaccgaagtcgtctgctcattactataagcagatcatccgcgaaaatggcttctccttaaaagagagtactcccgacgtccagggccaattcccatgcgattttagttggggagtaaccgagtcagttctgaagcctgagtcggttgcatcttccccacaattttccgatccccatctgtacgtgtggaatgccaccgggaaccggctcctgcatcgagtcgagggagttcgccttaagactagaccagcacagtgcaccgactttgtgaatatcaaaaagcaactggagatgctcgcgaggatgaaggtcactcactatagatttgccttagactgggcttcggtcctccctaccggaaacctttccgctgttaaccgccaggctttaaggtattataggtgcgtcgtctctgaggggctcaaactgggaattagcgcgatggtcactctttattatcccacccatgcccacctaggactccctgagcccctgctgcacgctgacggatggctaaatccgagcacggccgaagcattccaggcctacgctggcctgtgttttcaagaactgggagatctcgtcaagctctggattacaatcaacgaacctaatcgtttgagcgacatttacaatagatctggtaacgatacttacggtgcagctcataacctgttggtggctcacgcgctcgcctggagactctacgaccgccagtttcggccatcacagcggggggccgtgtctctgtctcttcacgcagactgggctgagccagcaaatccttacgcggattctcactggagggcagctgagcgcttcctgcagtttgagattgcatggtttgccgaacccctttttaaaactggagattatccagccgcaatgagggagtacattgcctcaaaacaccgcaggggactgtcctcttcagctttgcctcggttaaccgaagcagaaaggaggttactgaaagggactgttgatttctgcgcattgaatcactttactactcgttttgtgatgcacgaacagcttgccgggtcgagatacgatagcgatagggatatacaatttctgcaggacataactagattatcttccccaacaaggctcgccgtgatcccgtggggggtgagaaaactgctccgctgggtccgaagaaactacggcgatatggacatctacatcacagcgtcaggaattgacgaccaagccttagaagatgacagacttcgtaagtattatctgggaaagtacttgcaagaggtactgaaagcctatctgattgataaggtgcggatcaaaggctactatgcgtttaagctcgccgaagaaaagagtaaacctcggttcgggttttttacctccgacttcaaggcaaaatcaagtatccagttctataataaagtgattagttctaggggcttcccttttgaaaatagctcctcgcgctgcagtcagacccaagagaacactgagtgcacagtgtgtctttttcttgtgcaaaaaaaacccctaattttccttggctgctgtttctttagcacattggtattactcttatccatcgctatctttcagagacagaagagacgaaagttctggaaagctaagaatcttcagcacatcccactgaaaaaggggaagcgcgtggtcagc

SEQ ID NO: 251813 - DNA, 3132 bp, Artificial Sequence
  derived and/or modified sequence
atgaaacccggatgtgcagctggatctcctgggaatgaatggatttttttttcaacggatgagatcacaacaagatatcggaacacgatgtctaatggaggactgcagagatctgtgatactcagtgccctcattcttctaagggccgttactgggttttctggggacgggagggctatctggagtaagaaccccaacttcacacccgttaacgaatctcagttattcttgtatgatacttttccaaaaaacttcttctgggggatagggacaggagcattacaggtggaaggaagttggaaaaaggatgggaaagggccttctatatgggatcacttcatacacactcacctcaaaaatgtgtccagtacaaatgggtcctccgattcatatatttttctggaaaaggatctgagtgcactcgatttcatcggagtctcattttatcagttttctatatcgtggccccggctttttcccgacgggatagtcactgtcgccaatgccaaagggttacagtactactctacactccttgatgcccttgtgcttagaaatatcgaaccaatcgtcacactataccattgggatctccccctcgcactacaggaaaaatacgggggatggaaaaatgatacaataatcgatatattcaacgattatgctacgtattgcttccagatgttcggagaccgagtcaaatattggatcacaatccataatccatacttagttgcctggcatgggtacggaacaggaatgcatgcacccggagaaaaagggaatctcgccgcagtgtacacagtggggcacaatctcataaaagcacactctaaagtgtggcacaattataatacacattttcgccctcatcagaagggatggttatctatcacactcggatctcattggatagaacctaaccgctcagaaaacacaatggacatttttaaatgccagcaatccatggtgtctgtgctggggtggtttgcaaaccctatccatggagatggggactatcctgaaggaatgaggaaaaaacttttttccgtgttacctatcttctctgaagcagaaaaacacgaaatgcggggaacagcagatttctttgcgtttagttttggacctaataattttaagcctctcaacacaatggccaaaatgggacagaatgtatccctgaacctgagggaagctcttaactggattaaactcgaatacaacaatccacgaattttaattgcagaaaacgggtggtttactgactctcgggtaaaaacagaagatactactgctatctacatgatgaaaaattttctatcccaggtcctgcaggcaataaggcttgatgagatccgggtttttggatatactgcttggagtttactcgatgggtttgaatggcaggatgcttatacaatccggcgtggactcttctatgtggatttcaactccaagcagaaagaaagaaagccaaaatcatctgcacactactataaacagatcattcgggaaaacggattttcactcaaagaatccacacctgatgtgcagggacaattcccttgtgatttttcctggggggtcactgaatcagtgttaaaaccagaaagtgtagcttcttccccccagttcagtgatcctcacctctacgtgtggaatgcaactggaaacagactcttgcatcgagtggaaggggtcagactgaagactagaccagcgcagtgcactgattttgtgaacattaaaaaacagttagaaatgctcgcaagaatgaaagtgacacactataggtttgccttggattgggcttccgtgctccctacaggaaacctctcggcagtgaataggcaggctctccggtactataggtgtgtagtttctgaaggacttaagctcgggatctccgcaatggtgactctgtattatcccacacacgcccatcttggactccccgaacctttgctgcacgccgatggatggctaaaccctagtacagcagaagccttccaggcttacgctggactgtgcttccaggaactaggagatctggtgaaactgtggatcacaataaatgaacctaatagactctctgacatctacaatcgcagtggaaatgatacttatggggctgcacacaacctcctggtggctcatgcacttgcttggcgtctctacgatcgccagttcagaccaagtcagagaggagcagtatcgctgtctctccacgccgattgggccgaacccgccaacccctatgccgatagtcattggcgggctgccgagcgcttcttacagttcgaaatcgcttggttcgcggaaccccttttcaaaactggagactaccctgctgccatgcgagaatatatcgcctctaaacatcgaagaggactctccagttctgctctccccagactgactgaagccgagagacggctgcttaaagggactgtagatttctgtgccctgaaccacttcacaacacgtttcgttatgcacgaacagcttgccggatcaagatatgattccgatcgggatatacagtttctacaagatatcactagactttcttcccccactcgactggccgttattccatggggagtcaggaaactcctgagatgggttaggaggaactatggggacatggacatatacattactgccagtgggattgacgatcaggctctagaggacgataggttaagaaaatattacttagggaaatatctccaggaagtgctgaaagcctacttaatagataaagtgcgcattaaagggtattacgcatttaaattagctgaagagaaatctaagcctagattcgggtttttcacatctgactttaaagcaaaaagtagtatccagttttataataaagtgatctcttctagagggtttcccttcgaaaactcttcctctcggtgtagtcagacgcaggaaaacacagaatgtacagtgtgcctctttttggtccagaaaaaacccctgatatttctcgggtgttgtttcttttcaacattagtactccttctgagtattgctattttccagagacagaaacgaagaaaattctggaaagccaaaaatctgcaacacatccctctaaaaaaaggaaaacgggtggtatcc

SEQ ID NO: 251814 - DNA, 3132 bp, Artificial Sequence
  derived and/or modified sequence
atgaaaccaggatgtgcggccggatcccctggcaatgagtggatttttttttctaccgacgaaatcacaacgaggtacaggaacactatgtctaatggcgggctgcaacggtccgtcatcctgtcagcactgatcctgctgcgggccgttacaggcttttcaggggacggccgcgcaatttggagtaagaatccgaacttcactcccgtgaatgaatcacaattgtttctgtatgacaccttccccaaaaacttcttctggggaatcggtacaggcgccctgcaggttgaagggtcttggaagaaggacgggaagggcccatccatctgggatcacttcatccacactcacttgaaaaatgtgtccagtactaacgggagttcagactcatatatctttctggaaaaggatttgagtgcgttggactttattggcgtgtctttttatcagtttagtattagttggcctagactgtttccggacggcatcgtgacggtggccaacgctaagggtctccagtattatagcacactgcttgacgcactcgtactcagaaatatcgagccaatcgtaactctgtaccactgggacctgcccctggccctgcaggagaagtatggtggttggaaaaatgataccattatagatatcttcaatgactatgctacctattgtttccagatgtttggtgaccgcgtgaagtactggataacaatccataacccatacctggtggcatggcacggctacggcacaggaatgcatgctccaggagaaaagggcaatctggctgcagtttatactgttggtcacaacctgattaaagcacatagtaaagtgtggcacaactataatactcactttcgcccccatcagaaggggtggttgagtatcaccctgggtagccactggatcgaaccaaatcggtctgagaacacgatggatattttcaaatgccagcagagcatggtgagcgtgcttggctggttcgctaaccctatccacggggacggggactacccggagggcatgcgaaagaagctctttagcgttttgcctattttcagcgaggccgaaaaacatgaaatgagaggtacggctgatttctttgcattttcattcggtcccaacaactttaaacccctgaatacaatggccaaaatggggcaaaatgtcagcctgaacctgcgcgaggccttgaattggataaagttggaatataataaccctagaatcctgattgcggaaaatggatggtttacagattcccgcgtcaagacggaggataccactgccatctatatgatgaagaacttcctgtcacaggtactccaggctataaggctcgacgaaatcagagtgttcggatacaccgcatggagccttctcgacggtttcgagtggcaggacgcatacaccattaggcggggcctgttttatgttgattttaacagcaagcaaaaagaacggaaaccgaaatcctctgctcattactataagcagataattagagagaacggctttagcctcaaagaaagtacgcccgacgtccagggccaattcccctgcgacttctcttggggcgttaccgaaagcgtactcaagcctgaaagcgtcgccagcagccctcagttttccgatccccatctgtacgtctggaacgctacgggaaaccgactccttcatcgagtggagggagtacggttgaagactagacccgcacaatgcacggacttcgtgaacataaagaaacagctggagatgttggctagaatgaaggtgacccattatcggtttgccctcgattgggccagtgtgctcccgaccggaaacctctctgcagtgaatcggcaggcacttcggtactaccgatgtgtggtgtccgagggtctgaaactgggcatctcagctatggtgaccctctactaccccacccatgcgcaccttggtctgcctgaacccctcctgcatgcagacgggtggctcaatcctagcactgccgaggctttccaggcttacgctggactctgtttccaggagctcggagaccttgtgaagctgtggataactattaatgaaccaaacagattgtctgatatctataatcgctccggaaacgatacttacggcgcggcccataatctgctggtggcacacgcgctcgcatggcgcctctacgatcgacaatttcggccttcccaaaggggggctgtctctctttcactgcacgccgactgggccgaaccagcaaacccatacgcagactcacactggagagccgccgagagattcttgcagttcgagatagcttggtttgcggaacctctgtttaagacgggggattacccagctgcaatgcgcgaatatatcgcctcaaagcacagaaggggactgtcctccagtgctctgcctagactgaccgaagcggaacgacgactgcttaaagggactgtcgatttctgcgcactgaaccattttacaaccaggttcgttatgcacgaacagttggcagggagtaggtacgattcagatagggatatacagttcctgcaggacatcactcggctgtcatccccaacaaggcttgccgttatcccatggggcgttaggaaattgctgcggtgggtccgaaggaactatggagacatggacatctacatcaccgcatctgggattgatgaccaggccctggaggatgatagacttagaaagtactatctggggaagtacctgcaggaggtcctgaaggcctatctgattgataaagtccggattaaagggtactacgcatttaagttggccgaggagaaaagtaagccccggtttggattttttacatctgattttaaagctaagagctccatccagttttacaataaggtgattagctcccggggctttccattcgaaaacagcagctccagatgctcacagacccaggagaatactgagtgcaccgtgtgtctgttcttggtgcagaaaaagcctctgatatttctcggctgttgtttcttcagtactctggtacttttgctgtctatcgccatttttcagcgccagaagcgccggaagttttggaaagccaaaaatcttcagcacattccactgaaaaagggtaagcgggtggtgtcc

SEQ ID NO: 251815 - DNA, 3132 bp, Artificial Sequence
  derived and/or modified sequence
atgaaacccggctgtgctgctggctctcctgggaacgagtggattttcttttccactgacgaaattacaacacggtataggaatacaatgtcgaatggtggactgcaaaggtccgttattctgtccgccctgatactgcttagggctgttacaggattttcgggggacggacgcgctatctggtcgaaaaatccaaactttacgccagttaatgagtcccagttatttctatacgacacattccctaagaactttttctggggtataggcactggggctctgcaggtggaaggatcttggaagaaagatggtaaggggccctcaatttgggaccacttcatccacacacaccttaagaatgtgtcgtccacaaatggctcctcggactcttacatatttctagagaaggacctttcggcccttgatttcattggcgtgtcattctatcagttcagtatctcatggccacggctctttcctgacgggatcgtgacagtggccaatgccaaagggctgcagtactattcaaccctcctggatgctctggtccttagaaacattgaacctatcgtcacactgtaccactgggatctgccattggccctacaggaaaagtatggcggctggaaaaacgatactattattgacatctttaatgactatgccacatattgctttcaaatgtttggtgatagagtgaagtactggataaccattcacaatccatatttggtggcctggcacggatatgggaccggaatgcacgctcctggggaaaaaggaaatctcgctgccgtatacactgtcggtcacaacctcattaaggcgcactctaaggtttggcacaactacaatactcatttccgcccgcatcagaaaggctggcttagcatcacactcggtagccactggattgagcccaatagaagtgagaacactatggacatctttaagtgtcagcagtctatggtttcagttctgggatggttcgcgaaccctatccacggcgatggcgactaccccgaaggtatgaggaagaaactgttttctgttttgccaatctttagtgaagcagagaaacatgagatgagggggacagccgacttcttcgccttcagctttggacccaataacttcaagccactgaacactatggccaagatgggtcagaatgtgagcttaaatctgcgggaagcccttaattggattaaactcgagtataacaatccccggatccttatagcagagaacgggtggttcactgatagtagggttaaaactgaagacacaacagctatctatatgatgaaaaattttctgagccaagtgttgcaggccattcggctcgacgaaattcgggtgtttggctataccgcatggtcgcttctggatggatttgaatggcaggacgcatacacaattagacgtggactgttctatgtggatttcaactcaaagcagaaggagcgcaagcctaaaagtagcgctcactattataagcaaatcatccgcgagaacggattctcattgaaagagagtacacctgacgtgcagggccagtttccatgcgacttttcctggggcgtgacagaatcggttctcaagcccgagtctgttgcctcatctccccagttctctgaccctcacctgtacgtatggaatgccactggcaatcgcctcttgcaccgtgtggagggagttaggctgaagactcgccccgctcagtgtacggacttcgtgaatatcaaaaaacagctcgagatgctggctcggatgaaggtgacgcactaccggtttgccttggactgggccagcgtcctgcccaccggaaatctgagcgcagtgaaccgtcaggctctgcgatattatcggtgtgtggtgagtgagggattgaaacttggcatctccgcgatggtgacactgtactaccctacacacgctcatctgggcttgcctgagccgctcctccatgccgacggatggctcaatccatctactgccgaggcatttcaggcctacgccggactgtgctttcaggagctgggagaccttgttaaactgtggattaccatcaatgaaccgaatcggctctctgatatctataacaggtctgggaatgacacctacggcgctgcgcacaatcttctagtggcgcatgctctggcttggcgtctgtatgaccgtcagttccgtcctagccagcggggcgctgtgtccctgtctctgcacgctgattgggcggagcccgctaacccctacgcagatagccactggagagccgccgaaaggttcctgcagtttgaaattgcgtggtttgccgagcctctcttcaaaacaggagactatcctgcagcaatgagggagtacattgccagcaaacacagaagagggctcagcagctcagcgctgcctcgactcacagaggccgagcggcggttgctgaagggtacagtcgatttttgtgcgctgaatcattttaccactaggttcgtgatgcacgagcagctggctgggagtcgctatgactccgacagggacatacagtttcttcaggacatcacccgattatctagtcccacccgtctggccgtgataccatggggcgttcgcaaactcctaagatgggtgcgacgaaattacggggatatggatatctacatcacggcttctggcattgatgaccaagccctggaggacgaccggctgaggaaatattatttgggcaagtacttgcaggaggtcctcaaagcatatcttattgataaagtcaggataaaggggtattatgcattcaagctggccgaggaaaaatctaaacctcggttcgggttcttcacaagtgatttcaaggcgaaatcctccatacagttttacaataaggttatctcttcccgcgggttcccctttgaaaacagttcttcccgctgttcacaaacacaggaaaatacggagtgtacagtctgtctgttcctggttcaaaagaagcctctaatatttctcggttgttgctttttctctacgctggtgttactccttagcatcgccatttttcagaggcaaaaaagaagaaagttctggaaggctaagaatcttcagcacatccccctgaaaaagggcaagcgcgtcgtctcc

SEQ ID NO: 251816 - DNA, 3132 bp, Artificial Sequence
  derived and/or modified sequence
atgaagcctgggtgcgccgctggttcacccggaaatgaatggatattcttcagcaccgatgaaatcaccactcgttatcggaatactatgtccaacgggggactccagcggagtgtgattctgtcggcactgatccttttgcgcgccgtcactggttttagcggagacggacgggccatctggtccaagaaccccaatttcaccccagtgaacgagtcacagctttttctgtacgatacttttccgaagaacttcttttggggaatcggaacgggagcactgcaggttgaagggtcctggaagaaagatggaaagggcccgagcatctgggatcactttatccacacccatctgaaaaacgtgtcatccaccaacggatcgtcagactcgtatatcttcctggagaaggacctctccgccttggacttcattggagtctcgttctaccagttcagcatcagttggccccggctgttcccggatgggatcgtcaccgtagctaatgccaagggcctgcaatactattcgaccttgctggatgcgcttgtgctgcggaacattgagccgatagtcaccctctaccactgggatctgccactggcccttcaggaaaagtacggaggatggaaaaacgataccatcatcgacatcttcaacgactatgctacgtactgcttccagatgttcggcgaccgggtgaaatactggataacgatccacaatccctacctggtggcatggcatggatacggcactggaatgcacgctccgggagagaaaggaaacctggccgctgtgtatactgtgggacacaatctgatcaaggctcactctaaagtctggcacaattacaatacccacttcaggccgcaccagaaggggtggttgtcgattaccctgggtagccactggatcgaacctaaccggagcgaaaataccatggacatctttaagtgtcagcagtcgatggtcagtgtcctgggatggttcgcaaatccgattcatggagatggcgactacccagaaggaatgaggaaaaagctgttcagcgtcctgccaatcttttcggaagccgaaaagcacgaaatgaggggaactgccgatttcttcgccttttcctttggacccaacaatttcaaacctcttaacactatggcgaaaatgggacaaaacgtgtccctgaatttgcgcgaagcgctgaactggatcaaactcgagtacaacaacccgcggattctcattgcggaaaacgggtggtttactgacagccgcgtaaagaccgaagatactacggctatctacatgatgaagaactttctgtcacaagttctgcaagccatcagactggacgaaatccgagtgttcggatacaccgcatggagcctgctcgacgggttcgaatggcaagacgcgtacactattaggcgcgggttgttctacgttgacttcaactccaagcagaaggagaggaagccaaaatcctcggcacattactacaaacagattatcagggaaaatggtttctcgttgaaagagtcgaccccggacgtgcaaggccagtttccctgcgacttctcctggggagtgaccgagtcggtgttgaagcctgagtcagtggcgagctccccgcaattctcagatccacatctgtacgtctggaatgcgactggtaacagactgctccatcgcgtggagggggtccgtctcaagactaggccggctcagtgtactgacttcgtgaacattaagaagcagctcgaaatgctggcgcgcatgaaagtgacccactaccgctttgccctcgattgggcatccgtgctgcctactggcaatcttagcgcggtgaaccggcaagcacttcgatactacagatgtgtcgtttccgagggcctgaagctgggaatctctgcgatggtcactctctactacccaacccatgcacatctgggcctcccggagcctctcctccacgccgatggttggctgaacccgtccaccgccgaggccttccaagcatacgcgggcctgtgcttccaggaactcggtgaccttgtgaagttgtggattacgatcaatgaaccgaaccggctgtcggatatctacaatcgctccggcaacgacacctacggggcggcccacaatctgctggtggcacacgctctggcctggcgtctctacgacagacaattccgcccttcacagcggggcgccgtgtcgctttcattgcatgccgattgggctgagcccgccaacccttacgccgacagtcattggcgggcggcagagcgcttcttgcagttcgaaatcgcctggtttgcggaacctctcttcaagactggtgattacccggctgccatgcgcgaatacatcgcctcaaagcatcggcgcggactgtcgtcgtcagctctgccacggctgaccgaagcagagagacgtttgctcaaaggcaccgtcgacttctgcgcactcaaccactttactactcggttcgtgatgcacgagcaattggccggaagccggtacgacagtgacagagacatacagtttctgcaggacatcaccagactctcctcgccaacccgcctggccgtgataccgtggggggtgcgcaagctgctgcggtgggtgagaagaaactacggcgatatggatatctacatcaccgccagcggaatcgatgatcaggcgctcgaggacgaccggctgagaaagtactacctgggcaagtaccttcaagaagtgttgaaggcgtacctgatcgacaaggtcagaatcaagggatattacgcctttaaactcgccgaggagaagtctaaaccaagatttggcttcttcacgtccgactttaaggcaaaatcgtcgatccaattctacaataaggtgatctcaagcagagggttcccgttcgaaaatagcagcagccgctgctcgcagacccaggaaaacactgagtgcactgtctgccttttcctcgtccagaagaagccactgattttcctcggatgttgcttcttctcgacgttggtcctcctgctgtcgatcgcgatcttccagcggcaaaaacgacgcaagttctggaaggcgaaaaacctccagcatatcccgttgaagaagggtaagagggtggtgtcg

SEQ ID NO: 251817 - DNA, 3132 bp, Artificial Sequence
  derived and/or modified sequence
atgaagccaggctgcgccgcagggagtcccggtaatgagtggatatttttctccactgacgaaatcacaacgcgttacagaaacactatgagcaatggcggtctccaacggtctgtcatcttgagtgccctgattctgctgagagcggtcaccggattttccggagacggaagagccatttggagtaagaaccctaattttacaccagttaatgaatcccaactcttcctgtatgatacatttcctaaaaatttcttctggggaataggcacgggagctctgcaggttgaaggctcgtggaaaaaggacggaaagggcccctcaatctgggatcacttcatccacacacatctgaagaatgtgtcatcaaccaacggatcttccgattcctatatatttctggagaaggacttgtccgctctcgattttattggtgtgtcattttaccagtttagtataagttggcccaggctgtttccggatgggatcgttaccgttgccaatgccaagggcctgcagtattactctaccttgcttgatgcattagttttgagaaacatcgagcctatcgtgactctttaccattgggacctaccccttgctttgcaggagaaatatgggggatggaagaatgatacaatcatcgacatcttcaatgactatgccacctattgttttcagatgtttggcgacagggtgaaatattggattaccatccacaatccctatctggtggcctggcatgggtacggcaccggtatgcatgcgcctggggaaaagggtaacctggccgcagtgtacacagtgggacacaacctgatcaaggcccactctaaggtgtggcacaactataacacccactttcgaccccaccagaaggggtggctttccataactttgggatcgcattggatcgagccaaatagatcggagaatacaatggacatatttaaatgtcaacagagcatggtgagcgtgctgggctggtttgcgaatcccattcatggggacggtgactaccccgaaggaatgcgcaagaaactgtttagcgtcttacccattttcagtgaggcagagaaacacgagatgcgcgggacagccgacttcttcgctttttctttcgggccgaacaatttcaagccgctgaacacaatggccaagatgggtcagaacgtttctctgaacctcagagaggctctcaactggattaaactggagtacaacaacccgcgcatcctgatcgccgagaacggatggtttacagactcaagagtaaaaaccgaggatacgacggcaatctacatgatgaagaactttttatctcaagtgttgcaggcaatacgtttggatgagatacgggttttcggctatactgcctggtccctgctggacggattcgagtggcaagatgcgtatacaatacgccggggccttttttatgtggattttaactctaaacaaaaggagaggaaacccaagtcctccgcccactattacaagcagattatcagggagaatgggtttagtcttaaagagagcacgcctgatgtacagggtcagtttccctgcgacttttcctggggcgtaaccgagtctgttctcaaaccggaaagtgtggcttcgagtccccaattctccgacccccacctttatgtgtggaatgccacagggaacagactcctccacagggtggaaggtgtacggctgaagacgcggcctgctcagtgtacagatttcgtgaacattaaaaaacagctcgagatgctggcccggatgaaagtcacccactacaggtttgccctggattgggctagcgtactaccgacagggaacctctccgccgtcaacagacaggcactccggtactatcgctgcgtagttagtgaaggccttaagttaggaatctctgcgatggtcactctctactatcctacccacgcgcatctgggtctgccggagcccttgttgcatgcagacgggtggcttaatcctagcacagctgaggcattccaagcatacgcgggtctgtgtttccaggaactgggcgatctagtgaaactgtggataactatcaacgagccaaatcggctcagtgacatctacaaccgatcgggcaatgatacctatggagccgcccacaacctgctcgttgcccatgccctggcctggcggctgtacgaccgtcagtttcgcccaagtcaacgcggagccgtatccttgagcttgcatgctgactgggcagaacctgctaacccctacgcagactcgcactggcgagctgcagaacgattccttcagttcgagatagcatggttcgctgagccactgttcaaaaccggtgattatccggcggcaatgcgggagtatattgctagtaaacaccgacgtgggttaagtagttccgcgctaccccggcttaccgaagctgaaaggaggcttctgaagggtaccgtcgatttctgcgccctaaatcacttcacgactagattcgtgatgcatgaacagctcgccggatctaggtacgatagcgacagggatatccagtttttacaggatatcactaggctgagctcacccacacgactcgccgttataccctggggcgtgcgcaaactattgcgatgggtgcgcagaaactacggcgatatggacatctatattaccgcgagtggcattgatgaccaggcactggaagatgacaggctgcgtaagtactatcttggaaaatacctccaggaggtattaaaagcttaccttattgataaagtgcgcataaaggggtattatgcgttcaagctggctgaggagaaatctaaaccacgattcggttttttcactagtgattttaaagcaaagtcgtctatccagttctataacaaggtgatttcttcacggggttttccctttgagaatagttctagccggtgttcgcaaacacaggagaataccgaatgcactgtttgcctttttttagtccaaaagaaaccgctcatttttctcggctgctgcttttttagcaccctggtgctgcttctgtcgatcgccatcttccagcggcaaaaaaggagaaagttctggaaagctaagaaccttcagcatattccgctgaagaagggtaaaagggtggttagc

SEQ ID NO: 251818 - DNA, 3132 bp, Artificial Sequence
  derived and/or modified sequence
atgaagcccgggtgtgcagcagggtcccctggaaatgaatggatctttttcagtactgacgagattaccacccggtaccggaacaccatgtcgaatggaggcttgcaaaggtcggtgatcctttcggcactgattctccttagagcagtgaccggttttagtggagacggacgagccatctggtcaaagaatcccaatttcacccctgtgaacgaaagccaactttttctttacgatacgtttccgaagaacttcttttggggcatcggtaccggagcactgcaggtcgaaggaagctggaagaaggatggaaaggggccatcgatttgggatcatttcattcatacgcacctgaaaaatgtgtcctctaccaacggatccagcgactcctacatttttcttgaaaaggatcttagcgcactggatttcatcggagtctcattttaccagtttagcatttcctggccccgtctctttccagatgggatcgtgaccgtggctaacgccaagggactccagtactactcaacccttctcgatgcacttgtgctccgcaacattgagcctatcgttactttgtaccactgggacctccctttggctctccaagagaagtacggaggctggaagaacgataccataattgacatcttcaacgactacgcaacctactgctttcaaatgtttggggatagagtcaaatactggatcactatacacaatccttacctggtggcatggcatggttacgggaccggtatgcatgcacccggtgagaaaggaaacttggcagcggtgtacactgtgggacataacctgattaaggcacattcaaaagtgtggcacaactacaatactcacttcagacctcatcaaaaaggttggctcagcattacccttggctcccactggatcgagccaaatcgcagcgagaacaccatggacatctttaagtgccaacaatccatggtgagcgttcttgggtggtttgccaaccccattcatggggacggagattatcctgaaggtatgcggaagaaattgtttagcgtgctcccgatctttagcgaggcagaaaagcatgaaatgagaggaactgctgatttctttgcattctcctttggtccaaacaactttaaacctctgaataccatggctaagatgggtcagaatgtgtcgctgaacctgcgcgaagcactcaactggattaaactggagtataacaatccacgtatccttattgcagaaaatgggtggtttactgactcgcgggtgaaaacggaggacaccactgcaatatacatgatgaagaattttctctcccaggttcttcaagctatccgtctcgatgagatcagagtgttcggatacactgcgtggtcccttttggatgggttcgaatggcaggatgcatatacgattaggaggggactgttctatgtggatttcaattccaagcaaaaggagaggaagcctaagtcctcagcacactattacaagcaaatcatcagggaaaacgggttcagcctgaaggaatcaacccccgatgtgcaggggcagttcccctgtgatttttcctggggggtgactgagtccgtccttaagcctgaaagcgtagcctcgtcccctcagttttcggatccacatttgtacgtctggaacgcaaccgggaacaggctgcttcacagagtggagggtgtccggctgaaaacccggcctgcacagtgtactgacttcgtcaacataaagaagcaactggagatgctggcccgaatgaaggtcactcactaccggtttgctctggattgggcgtccgtgctgcctaccggcaacctttccgcagttaaccgccaagctctgcgatactaccgctgcgtggtttccgaagggctgaagctcggtatttcggccatggtgactctgtactacccgactcatgcgcatctcggactgccggaacctctgctgcatgcagatggatggctcaacccatctaccgccgaggcattccaggcatacgctggcctctgctttcaggagcttggggatctggtcaagctgtggattactattaacgaaccaaatagactctcggacatatacaaccgaagcgggaacgacacttacggtgcagcgcacaatcttctggtggcccatgcacttgcctggcggctgtacgatcgccaattcagaccatcccaacgcggagcagtctccctttcactgcatgccgattgggcggaacctgcaaatccttatgcggactcacactggcgtgcagcggagcgctttcttcaatttgagatcgcctggttcgcagagccactgttcaagaccggagactaccctgctgctatgagagagtacattgcctccaaacatcgtcgcggtttgtcatctagtgcattgcctagacttacggaggccgaacggaggcttctgaagggaactgtggatttttgtgcgcttaaccactttaccacccgttttgtcatgcacgaacagcttgccggctcccggtacgattctgaccgcgacatccaattcctgcaggatattactagactgtcctcacccactagactggcagtgatcccatggggcgtgaggaaacttctgcggtgggtgcgccgcaattacggggacatggacatatacattactgcatccggaatcgacgatcaggcgttggaagatgatagacttaggaagtactatcttggtaagtatcttcaggaagtcctcaaggcttaccttattgataaggtgcggattaagggatactacgcctttaaacttgcagaagagaagtccaagcctagattcggattcttcacgtcagatttcaaagcaaaatccagcatacaattctacaacaaggtgattagctcacgtggctttccttttgagaactcctcttcgcgatgttctcagacgcaagaaaacactgaatgtactgtctgtctctttctggtccagaagaagcctctgatttttctgggctgttgtttcttctcgactctcgtgttgcttctttccattgcaattttccaacggcagaagcgcagaaagttttggaaggcaaagaacttgcagcatatcccgttgaagaaaggtaaaagagtcgtgagc

SEQ ID NO: 251819 - DNA, 3132 bp, Artificial Sequence
  derived and/or modified sequence
atgaagcccggatgtgctgccggaagcccgggaaacgaatggatcttcttttccaccgatgagatcacgacgcggtaccggaatactatgtcaaacggcggactgcagcgcagcgtgatcctttcagccctgatcctgctccgggcagtaactggtttctcgggtgacggaagagccatctggtccaaaaacccgaacttcactccagtcaacgaatcacaactgttcctctacgatacctttcccaaaaacttcttctgggggatcggaacgggcgcgctgcaggtcgaaggctcctggaagaaggatgggaagggaccatcaatctgggaccatttcatccacactcatctgaagaacgtgtcctctaccaacgggtcctcggacagctacattttcctggaaaaagatctgtcagcactggatttcatcggcgtctccttctaccagttctccatctcctggccacggctgttccctgacggaatcgtgactgtggccaatgccaagggccttcaatactactccaccctcctggacgccctcgtgctgcggaacatcgaacccatcgtaaccctgtaccactgggacctcccgctggcccttcaggaaaagtatggaggatggaaaaatgatactatcatcgatatcttcaacgattacgccacctattgctttcaaatgtttggtgaccgcgtcaaatactggatcaccatccacaacccttacctggttgcatggcacggatacgggactggcatgcacgctcctggtgagaagggtaatctggccgctgtgtacaccgtcggacataatctgatcaaggcacactcaaaggtctggcataactacaacacccatttcaggccacaccagaaaggctggctcagcatcacgctgggatcacactggattgaaccgaaccggtccgagaataccatggatatcttcaagtgccagcagagcatggtcagcgtgctgggatggttcgctaatccgatccacggcgatggagactacccggagggcatgcggaagaaactgttctccgtcctccctatcttttccgaagcagagaagcatgaaatgcgcgggactgccgatttcttcgccttctcgtttggaccgaacaactttaagcctctgaacactatggcgaagatgggtcaaaatgtctcactgaatctcagagaggcgctgaattggatcaagctcgaatacaataacccgcggatcctcatcgctgaaaatggatggtttactgattcccgggtgaaaaccgaggacactaccgccatctacatgatgaaaaacttcttgtcccaagtgctgcaggccatccgcctggatgaaatccgcgtgttcggttacacggcttggtcactgctcgatggatttgagtggcaggacgcctacaccattcggagaggattgttttacgtcgatttcaattccaaacaaaaggaaaggaagccaaagtcctcagcgcattactacaagcagattatccgagagaatggcttttccctcaaggagagcaccccggatgtgcagggccagtttccgtgcgacttttcgtggggggtcactgaatccgtgctgaaacccgaatccgtggcgagctctcctcaattctccgacccgcacctgtacgtctggaacgctacggggaatcggttgctccaccgggtggaaggagtgcgcctgaaaactcgccctgcccagtgcacggacttcgtgaacatcaaaaagcaactcgaaatgctggctagaatgaaggtgactcactaccggttcgccctcgactgggcctcagtgctgccgactgggaatctctccgctgtgaaccgccaggcgcttcggtactaccggtgcgtcgtgtcagaaggactcaagctgggaatctcagcgatggtgactctctactaccccactcatgcccatctcggcctgccggaacctctgctgcatgcggatggatggctgaacccttcgaccgccgaggcgttccaagcgtacgcgggtctgtgcttccaggagctgggcgacctcgtcaaactgtggattactatcaacgagcccaaccggttgagcgatatctacaatcgcagcggcaacgacacctacggggccgctcataacctgctggtggcgcacgccctcgcctggcgcctgtacgaccgccaattcagaccatcccagcgcggagcggtgtcactgtccctgcacgcagactgggccgaacccgccaatccgtacgccgactcgcattggcgggcggctgaacggtttctgcagttcgaaatcgcctggttcgctgaaccacttttcaaaaccggtgactacccggcggcaatgcgcgaatacatcgcctcgaagcaccggcgcggcctgagctccagcgccctgccgcgactcactgaagcggagcggcgcctccttaaaggaaccgtggatttctgcgccctcaaccactttactacccgcttcgtgatgcatgaacagcttgcgggctcgagatacgattcggatagggacatccaatttctccaagacattacccggttgagctcgcctacgagactcgccgtgatcccatggggagtgcgcaagctccttcgctgggtccgccggaattacggggacatggatatctacattaccgcatccggaatcgacgaccaggcactggaggacgaccggctgaggaagtactatctggggaagtacctgcaggaagttctgaaagcatacctgatcgataaagtccgcatcaagggatattacgccttcaagctggcggaggagaaatcaaagccgcgcttcggattcttcacgtctgactttaaggccaagtcgtcgatccagttctacaacaaagtcatcagcagccggggctttccgttcgagaattcctcatcgcgatgtagccagacccaagaaaacaccgaatgcaccgtctgtctgttcctcgtgcagaagaagccactgattttcctcggatgctgcttcttctctaccctggtgttgttgctgtcgattgccatattccagagacagaaacgccgaaagttctggaaagccaaaaatctgcaacacatcccactgaagaagggtaaacgggtcgtctcg

SEQ ID NO: 251820 - DNA, 3132 bp, Artificial Sequence
  derived and/or modified sequence
atgaaaccagggtgtgctgcgggtagccctggcaatgaatggattttcttctcgacagacgagataacgacgcggtaccggaacaccatgtctaacggcggactacagagatccgtgattctgtccgctttgatcctactccgtgccgtgaccggattctcgggcgacggtagggccatttggtctaagaatccaaatttcactcccgtgaacgaaagccagctcttcctgtacgacacgtttcctaagaattttttctgggggataggaacaggcgcactccaggtggagggttcctggaagaaggacgggaagggccctagcatatgggaccacttcatacacacccacctgaaaaatgtgtcatccacaaacggtagctcagactcttacatattccttgaaaaggatttgtccgcccttgatttcattggggtgagtttttatcaattctccatatcatggccgaggctctttccagatgggattgtaaccgttgccaacgccaagggtctgcagtactacagtacattgctcgacgccctggttctacggaacatagaaccgatcgtgacactgtatcactgggatctccccctggctctccaggaaaagtatgggggctggaaaaatgacaccatcattgacatctttaatgactacgctacctactgctttcagatgttcggggatcgagtcaagtattggataactattcacaacccttacctcgtggcgtggcatgggtacgggacaggcatgcacgcccccggcgagaagggcaatctcgccgccgtatatactgtaggtcacaacttgattaaagcgcactccaaggtgtggcataactataacacccactttaggccacatcagaagggttggctgagtattactctggggtctcactggatcgagcccaatcggagtgagaataccatggatattttcaaatgtcagcagtctatggtatctgtgctcgggtggtttgcaaaccccatccacggggatggagactacccggaggggatgcgcaagaagcttttctcggttctccccatctttagtgaagctgagaagcatgaaatgcgtggtacagctgatttcttcgcctttagctttggccccaataattttaaaccgctgaacacaatggccaagatgggccaaaatgttagccttaatctgagagaggccctcaattggatcaagctagaatacaacaaccctagaattcttatcgcggagaatggctggtttacggactcacgcgttaagaccgaggatacaacagccatctacatgatgaagaacttcctcagccaggtgctccaagcaattcgccttgacgaaattcgggttttcggatatacagcatggtctttgcttgacgggttcgagtggcaggatgcgtatactatccggagaggtctcttctacgtggatttcaattccaagcagaaggaacggaagcctaagtcatccgcacattattacaagcagattattcgggagaacggcttctcactgaaggagtccacccctgatgtgcagggtcagttcccatgcgacttcagctggggcgtaacagaaagcgtgctcaagcctgagtctgtggcatctagcccacagttcagcgaccctcacttgtatgtgtggaatgcgaccgggaaccgccttctgcacagagtggaaggtgtccggcttaaaactcgtcctgcgcagtgcactgatttcgtcaacattaagaaacaactggagatgctggcccgaatgaaggtaacccattatcgcttcgctcttgattgggcttccgtgctacctacgggcaaccttagcgctgtcaaccgacaggctcttcgctactaccggtgtgtggtgtccgagggcctgaaactggggatttccgcaatggtgaccctgtattatccaacacacgcccacctgggacttccagagccactgctgcatgccgacggatggctcaatccaagtaccgccgaggctttccaggcctacgcaggtttatgtttccaggaactgggcgatttagtgaaactctggataacgattaatgagcccaaccgcctttccgatatctacaaccggagtggtaatgacacgtatggtgcagcccataatctgctcgtcgctcacgcgctggcatggcggctatacgatcgacagtttcggccctcgcagcgaggggccgtgtcgctcagtctgcatgccgattgggccgaaccggctaatccgtatgccgactcccactggcgagcagcggagcgattcctgcagtttgaaattgcatggtttgccgagcccctctttaagaccggcgactatcctgctgcgatgagagagtacattgcaagcaagcacagacggggcctgtcttcctctgctctaccgaggctgacggaagcggagcggagactgctgaaaggcactgtagatttttgcgccttaaaccacttcacaacacgctttgtgatgcatgagcagcttgcggggtcgcggtacgacagcgacagggacattcagttcctgcaggatatcactcgcctgagcagtcctacccgcctcgccgtgatcccctggggcgttcgcaagctcctgagatgggttcgcaggaattacggcgatatggatatatacatcacggcctccggcatagacgatcaggccctggaggatgaccgcttgcggaaatactacttgggtaagtatctacaggaggtcctgaaggcctatcttattgacaaagtgcggattaagggatattatgccttcaaactagctgaagagaaatccaagcctcgcttcggattctttaccagcgattttaaagcgaagagcagtatccagttctacaataaagtgattagtagtagaggatttccatttgagaatagttctagcagatgctctcaaacgcaagagaacactgagtgcacagtttgcctatttctggtgcagaaaaaaccactcatcttcctgggctgttgcttttttagcaccctcgtgctgctgctcagcatcgctatcttccagcgacaaaagagacggaagttctggaaggctaaaaacctgcagcatatcccccttaagaagggcaaaagagtggtttca

SEQ ID NO: 251821 - DNA, 3132 bp, Artificial Sequence
  derived and/or modified sequence
atgaagcctggatgcgcagcaggatcccctggtaatgagtggatctttttcagcaccgatgaaattacgactcggtaccgcaataccatgtctaatggtggcttgcagcgatcggtgattctcagcgcattgattttgctccgcgcagtgactggattcagcggagacggaagagcgatttggtccaagaacccaaactttactccagtgaacgagtctcaactcttcctttacgataccttccctaagaacttcttctggggcattggcactggagcccttcaagtcgaaggatcctggaagaaggacggcaagggcccatccatttgggatcactttatacatacccacttgaaaaatgtgtcgagcactaatggaagcagcgatagctatatctttctggaaaaagatctttccgcactggatttcattggcgtctcattttaccaattttcgattagctggcctagactgttccccgatgggattgtcaccgtcgcaaacgcaaagggacttcaatactactcgaccctgcttgatgctctcgtgctgaggaacatcgaaccgatcgtcaccctttatcattgggatctgcctttggcccttcaggaaaagtacgggggctggaagaatgacacgatcatcgacattttcaatgactacgcgacttactgtttccagatgttcggagatcgcgtgaagtactggatcactattcacaacccgtacctcgtggcgtggcacgggtacggtactgggatgcatgccccaggcgaaaaaggtaacctggcagcagtatacactgttggccacaacctgattaaggcacattccaaggtgtggcataactataacactcactttagaccccatcagaagggatggctttcgatcaccctcggctcacattggattgaacctaaccggtcggagaacaccatggatatcttcaaatgtcaacaaagcatggtgtcggtgcttgggtggtttgcgaatcctatacacggtgatggagattaccctgagggcatgcgaaaaaagctgttttccgtccttcctatattctcggaagcagaaaagcatgagatgcgcgggactgcggacttttttgcgttttcctttggacccaacaacttcaagcccctgaacaccatggccaagatgggccaaaatgtgagcctgaatcttcgtgaagccctcaactggattaaacttgaatacaacaatcctcggatcctcatagcagaaaacggatggtttaccgattcaagggtcaagaccgaagatacgactgcaatatacatgatgaaaaacttcctctcccaggttctgcaggcaatccgccttgatgaaattagagtgtttggttacactgcgtggtcccttctggatggatttgaatggcaggatgcatacaccatcagacggggtcttttctacgtggactttaactctaagcaaaaggaaaggaagccaaagtccagcgcacactactacaaacaaatcatacgtgagaatggatttagcttgaaggaatctacccctgacgtgcaagggcaatttccctgcgatttttcgtggggggtgaccgaaagcgtgctgaaaccagaatccgtggcctcgtcccctcaattctcagacccacatctgtacgtgtggaatgcaacgggaaaccgccttctgcaccgggtggaaggggtgcggcttaagacccgacccgcacagtgtaccgatttcgtgaacatcaaaaaacaacttgaaatgcttgcccgaatgaaggtgacccattacaggttcgcactcgattgggcatccgttcttcctactggtaacctttccgctgtgaatagacaagccctgaggtactaccgctgcgtggtgagcgagggtctgaaacttggtataagcgcaatggtgaccctttactacccgacccacgctcatcttggcctccccgaaccactcctgcacgcagacggatggctgaatccatcaaccgcagaagcctttcaagcatacgccggactttgctttcaggaactcggcgatctggtgaagctgtggatcacgattaatgaacccaataggctgtcggatatctataaccgctccgggaacgatacctacggagccgcccataaccttcttgtggcgcacgcattggcctggaggctttacgatagacaattcaggccatcgcagagaggagcagtcagcctgtcattgcatgcggactgggcggaaccggcaaatccgtacgcggattcgcactggagagcagccgagaggttcctgcaatttgaaattgcctggtttgcagaaccactgtttaagacgggagactacccggcggccatgcgcgaatacattgcaagtaaacatcggagagggctttcctcctctgcactccccagacttaccgaagccgaaagacggctcctgaagggaaccgtggacttctgcgcgctcaaccattttaccacccgcttcgtgatgcacgagcaacttgcaggttcgaggtacgattcggatagggatattcaatttctgcaggatattactcggctttccagccctaccagactcgcagttatcccatggggagtgcgcaaacttctccggtgggtccggagaaattacggagatatggatatctacattacggccagcggtatcgatgaccaagcccttgaagatgataggctccggaagtactacctcggtaagtaccttcaggaagtgttgaaagcctaccttattgataaggtgcgcattaaagggtattacgcctttaaacttgccgaagagaaatcgaagccccggtttggatttttcacttctgactttaaggctaagtcctccatccaattctacaacaaggtgatttcgtccagaggttttccctttgagaattccagctcacgctgttcgcaaacgcaggaaaacaccgaatgtaccgtgtgcctgtttctcgtgcagaaaaaacctcttatctttctgggatgttgttttttctcgactctggtgctcctgctttcaatcgcaatcttccaacggcagaagagaagaaagttttggaaagcaaagaacctgcagcatattccacttaagaagggaaagcgagtggtgagc

SEQ ID NO: 251822 - DNA, 3132 bp, Artificial Sequence
  derived and/or modified sequence
atgaaacccgggtgtgctgccggatctcctgggaacgagtggatatttttttcaactgatgaaataacaactcggtatcgaaatacaatgtcgaatggaggactacaacgcagtgtgatcctgtcagcactcatcctccttcgggctgttactgggttttctggagatgggcgggctatctggtctaaaaacccaaattttacaccagtgaacgaatctcagctattcctctacgatacttttcctaaaaactttttctgggggattgggacaggggccttgcaggttgaagggtcttggaaaaaagatgggaaaggaccctcaatctgggatcatttcatacatacacacttaaaaaacgtcagttccactaatgggtccagtgattcttatattttcctcgaaaaagatctcagtgccctcgatttcatcggggtttccttttatcagttctctatatcttggccacgcctctttccagatgggatagtgactgtcgctaatgcaaaaggacttcagtactattccacactgctggatgcactcgtgctgcggaacattgaaccaatagtcactttataccactgggatctgccactggccctccaggaaaaatatgggggatggaaaaatgatacaataattgatattttcaacgattacgctacatactgcttccagatgtttggagatcgggtgaaatactggatcactattcataacccatatcttgtcgcctggcatgggtacgggacagggatgcatgcacccggggagaagggaaatctggcagctgtatatacagtggggcataatctaatcaaagcacattctaaagtctggcataattacaacacgcactttcgtcctcaccagaagggatggctaagtatcacattaggatcacattggattgaaccaaacagatctgaaaacacaatggatatattcaaatgccaacagtcaatggttagtgtactcggatggtttgctaatcctatacacggggatggagattatcccgaggggatgcgaaaaaaattattttcggtactccccatcttttctgaagctgagaaacacgagatgcggggaactgctgatttttttgcattctcctttgggcctaacaattttaaacctttaaacacaatggcaaaaatgggacaaaacgtgtctctcaatttaagggaagctcttaactggataaaactagagtataataaccctagaatactgatcgcggaaaacggatggttcacagattcccgcgtgaaaactgaagatactactgcgatttatatgatgaagaatttcctctctcaagtccttcaggctatacggttggatgagatacgagtctttgggtatactgcatggtccctcctcgatgggtttgaatggcaggacgcatatacaatcagacgcggactcttttacgtagatttcaattccaaacagaaggaaagaaaacccaaaagttccgcacactattacaaacagatcatacgggaaaatggattttctcttaaggagtctactcctgatgtacagggacagtttccctgcgatttttcttggggggtgacagaatcagtgctgaaaccagaatctgtggcgtcatcacctcagttttccgatccccacctgtatgtctggaatgccacagggaatcggctgctccaccgggtggaaggagtgagactaaaaactcggccagcacagtgcacagatttcgtcaacatcaagaaacagttggaaatgctggcaagaatgaaagtgacacactaccggtttgccctggactgggcatctgttctgccaacagggaacctgtctgccgttaataggcaggcactgagatattacaggtgcgtggtctctgagggactaaaactggggatatctgccatggtaacactctattatcccacacacgctcacctcggactgcctgaacccctccttcacgcagatgggtggctgaacccatcgactgctgaagcattccaggcctatgctgggctctgctttcaggaattaggggatctggtcaaactctggatcacaataaatgagcccaatagactaagtgatatatataaccggtcggggaatgatacttatggggctgcacacaaccttcttgtggcccacgcccttgcttggagactgtatgatcgccagtttagaccaagtcagaggggagctgtctcattatctcttcatgctgattgggccgagccggccaatccatacgcagatagtcactggagggctgccgagcgcttcttgcagttcgaaatagcatggtttgccgaacccctcttcaagacaggagattatcctgctgcaatgcgggaatatatcgcttctaaacatcggaggggactctctagttctgcactgccacgcctgactgaggcagaaagacgcctcctgaaagggacagtagatttctgcgcattgaaccacttcactacacgcttcgttatgcatgaacagctggccggaagtcggtacgattctgatagggatatccagtttctccaggatatcacacggctgtcctccccaactcgcctggccgtgatcccatggggagttagaaaactcctcaggtgggttcgcagaaactacggggatatggatatttatataacagccagtgggattgatgatcaggccctggaagatgatcggcttcgcaaatattatctcgggaaatatttgcaggaagtactcaaagcttacctcatcgataaagtcaggatcaaaggatattatgcgtttaaattagctgaagaaaaatccaaacctaggttcgggtttttcacttcagattttaaagctaaatcctccatacagttctacaacaaagtgatcagttctaggggattccctttcgagaattcctcttctaggtgtagtcagacacaagaaaacacagaatgcacagtgtgtctcttccttgtgcagaaaaaaccactgatctttcttggatgctgttttttttctactctcgttttactcctgtctatagcaatatttcagcgccagaaacgacggaaattctggaaagccaaaaaccttcaacatatacctctcaaaaaagggaagagggtggtgtca

SEQ ID NO: 251823 - DNA, 3132 bp, Artificial Sequence
  derived and/or modified sequence
atgaaaccaggatgcgccgctggcagccccgggaacgagtggattttcttcagcactgacgagataaccacccgctaccgtaacaccatgagtaatggagggttacagaggtccgtgatcttgtcggcacttatactactgagggctgtcacgggattttctggagatgggcgcgctatatggtccaagaacccaaatttcacgccagtgaatgagtctcagctttttctatacgatacatttccaaagaacttcttttggggtattgggaccggtgccctccaggtcgaagggtcttggaagaaggatggcaaggggccttctatatgggatcacttcattcacacacacctgaagaacgtatcttccactaatggttcctccgatagctacatctttctcgaaaaagatctttctgctctggacttcataggtgtgtctttttatcaattctccattagctggccaagactgtttcccgatggaattgtgactgtcgccaacgcaaaaggattgcagtactattctaccttgctcgacgcactggtcttgaggaatattgaacccatcgtaactctgtatcattgggatctgccactggccctgcaggaaaagtacgggggctggaaaaatgataccataatagacatctttaacgactacgctacctactgttttcagatgttcggtgacagggtgaagtattggattactatccataacccatacctcgttgcctggcacggctacgggactggcatgcacgcccccggggaaaagggaaacctcgcagcggtgtatacagttggacacaacctgatcaaggcgcactctaaggtgtggcacaattacaacacacactttcggccacatcagaaaggctggctgagcatcacattgggtagccattggatagaaccaaataggtcggaaaacactatggacatttttaaatgtcaacagagtatggtgtctgtcctgggttggtttgcgaaccccatccacggtgatggcgactacccggaagggatgcggaaaaaattattcagcgtcctgccgattttcagcgaggccgagaaacatgagatgcggggcactgccgattttttcgcattctccttcggccctaataatttcaagccactgaacaccatggcgaaaatgggacagaatgtgagcttgaatctcagagaggcactcaattggatcaaattggagtataacaatcccagaatcctcattgccgaaaacggatggtttaccgattctagggtgaagactgaggacaccaccgccatctacatgatgaagaatttcttgtcccaagtgctgcaggccattcgcctagacgagatcagggtcttcggctacaccgcttggtctctacttgatggcttcgagtggcaggatgcctacaccattcgccgtggcctgttctatgtggacttcaactcgaaacaaaaggaaaggaaacccaagtcgagcgcgcattattataagcaaattattcgggagaatgggtttagcctgaaggagagtactccggatgtgcagggacaattcccgtgtgatttttcctggggtgtgactgagtctgtgctgaagcccgagtccgtggcctctagcccacagttctctgacccacacctttacgtgtggaacgcgactggtaacaggctgttacatcgcgtcgagggcgtgcgactgaagactcgcccagcacagtgcactgattttgttaatataaaaaaacagctcgaaatgttggccaggatgaaagtgacacactacagatttgccttggactgggccagcgtgttgccaaccgggaatctcagcgccgttaacaggcaggccctgcggtattataggtgcgtggtatctgagggattgaaactgggcatctccgctatggtgactctctactatcccactcacgcgcacctaggcctcccagagcccttgctccacgccgatgggtggctgaacccaagcacggccgaagccttccaggcttacgcaggattgtgtttccaagagctgggggatctcgtcaagctgtggatcaccataaacgagcccaaccgactgagtgacatctacaaccgctccgggaacgacacttacggcgctgcccacaacctccttgttgctcacgcccttgcctggagactgtatgacagacaattccgcccctcacagcgaggagcagtcagcctctcattacacgccgactgggccgagcccgccaatccctatgccgatagtcactggcgcgcggccgagcgattcctccaatttgaaatcgcttggttcgcagaaccgctcttcaaaaccggagactaccctgccgccatgcgggagtatatcgcctcaaagcacaggcgcggattgtcctcatccgctttgcctagattaacagaggctgagaggaggctcttgaagggaacagtggatttttgcgctctgaatcactttacaacccggtttgtgatgcacgagcaactggcggggagcaggtatgattcagatcgggatatccagtttctgcaggacattacaagactcagttccccaacacgcctcgccgttattccttggggggtgcgcaagctgttgaggtgggttagaaggaactacggagacatggatatatatattactgcgtccggcattgacgatcaggcccttgaagatgacaggctgaggaagtattatttgggcaagtacctccaggaagtgctgaaggcctacttgatcgacaaagttaggatcaagggctattacgctttcaagctggcggaggaaaaatcaaagccgcgtttcgggttctttacttcggatttcaaggcgaagagcagcatacagttctacaacaaggtgatcagctcgagagggttcccctttgaaaactccagcagtagatgctctcagacacaagagaacacggagtgcaccgtgtgcctcttcctggtccagaaaaaacctcttattttcttaggatgttgcttcttcagcacactggtgctactactgagcatagcgatcttccaaagacaaaagaggaggaaattctggaaagcaaagaatctgcagcacatcccccttaagaaaggtaagcgagttgtatct

SEQ ID NO: 251824 - DNA, 3132 bp, Artificial Sequence
  derived and/or modified sequence
atgaaacccggctgtgcggccggctcccctggaaatgaatggatattttttagcacagatgagatcaccacccggtaccgcaatactatgtccaacggaggcctgcaacgtagtgtgatcctgtccgcccttatattgctgcgtgcagtcacaggattcagcggcgatgggcgggccatctggagcaaaaatcctaattttacaccagtcaacgagagtcagctttttctgtacgatactttccccaagaattttttttggggaatagggacaggggctcttcaagtggaaggcagctggaagaaagacgggaaaggtccttcaatctgggaccactttatccacacacaccttaaaaatgtgtcctctacaaacggttcctcagacagctatatctttctcgaaaaagatctgagtgcgctcgatttcatcggagtgagcttctaccagtttagcatctcatggcctagactgttccctgatgggatcgtgaccgtggccaacgccaaaggccttcagtactactctacactattggatgccctggtgttgcggaatatcgagcccatcgtcacactctaccactgggatttacctctggccctccaagagaagtacggtggttggaagaacgatactatcatcgacatcttcaacgactacgcaacctattgctttcagatgtttggggaccgcgtgaagtactggataactatccataacccatacctagtcgcatggcacgggtacggaaccggcatgcacgctcctggtgagaaaggaaatttggcagccgtgtacaccgtgggacacaacctgatcaaagcgcacagcaaagtttggcataactacaacacacactttcgccctcatcagaaaggatggttgagcataacactgggttctcactggatagagccgaatcgcagcgagaataccatggatatctttaaatgtcagcagtccatggtcagtgtgctggggtggtttgcaaaccccatccatggtgacggagactaccctgagggcatgcgcaaaaagttattttcagtactgcctattttttctgaggccgaaaaacacgagatgcgaggcaccgcagattttttcgcattctccttcggccccaacaactttaagcccctgaacaccatggcgaaaatgggtcagaacgtcagcctcaacttgcgggaggcgttgaactggattaagctggaatataataatccccgcattctgattgcagagaacgggtggtttaccgactctcgtgttaaaacagaggatacaaccgccatttatatgatgaaaaactttcttagtcaggtgttacaggctataagattggacgaaattcgcgtctttgggtacaccgcatggtcattactcgacggttttgaatggcaagacgcttataccattagacgcggattattctacgttgactttaactctaaacagaaggagaggaagcctaaatcttctgcgcactattataagcaaatcatcagggagaatggattttccttgaaagaatccactccagacgtgcaagggcagttcccttgcgacttcagttggggggtgacggagtcggtgctgaagcctgaatcagtggcatcatctccccagttttcagatcctcatctgtacgtctggaacgcaactgggaacagattgctgcatcgggtggaaggggttagactcaaaactcggcccgcccagtgtactgattttgtgaacattaagaaacaattagaaatgctcgcccgcatgaaggtgacacactatcgatttgccctggattgggcctcagtcctgcccactggaaaccttagcgctgtgaacaggcaggccctgaggtattacaggtgtgtagtgagcgagggcctcaaactagggatttcagccatggtgactctctattatcctacgcacgcccaccttggcctacccgagcctctactgcatgccgacggctggctgaatcctagtaccgctgaggctttccaggcctatgctgggttatgcttccaagagctgggggacctggtcaagctgtggataaccatcaatgaacccaacagactgtctgatatctacaaccggtccgggaacgatacctatggagcggcccacaacctcttggtcgcccatgctttggcatggcggctatatgacagacagttccgacctagccagagaggggccgtgagcctctcactgcacgccgattgggccgagccagcgaacccctatgcagactcccactggagggcagcagagcggttcttgcagtttgaaattgcatggtttgcagagccactgtttaagaccggggactatcccgctgccatgagggagtatatcgcttccaagcatcgacgcggcctgtcctccagtgctttgcccagactaactgaagctgaacggcgtcttctgaagggcaccgtggatttttgcgctctgaaccactttacaacaaggttcgtaatgcacgaacagctggcaggctctcgatatgattccgaccgggacattcaattcctgcaggatatcacaagactttcatcaccaactcgcctcgcagtgatcccgtggggagtcagaaagctattgagatgggtgcgtcgaaattacggcgacatggatatctacatcacagctagcgggattgatgaccaggcactggaagacgataggctgcgaaagtactacctggggaaatacctgcaggaggtccttaaggcctacctgatcgacaaagtgagaatcaagggctattatgcattcaagctggctgaggagaaatctaagccacggtttgggttctttacgtctgacttcaaagctaagtcctcaattcaattttacaacaaagtcatctcaagccgcggtttccccttcgaaaacagctcctccagatgttcccagacccaagaaaacaccgagtgtacagtttgtttgttcctggttcagaagaagcccctaattttcttaggatgctgtttcttttccactctcgtgctactgctgtcaatagctattttccagcgtcagaagagacgcaagttttggaaagccaaaaacctccagcacatacccctaaagaaagggaagagggtagtgtct

SEQ ID NO: 251825 - DNA, 3132 bp, Artificial Sequence
  derived and/or modified sequence
atgaagccgggttgcgctgcaggatcccctggtaacgagtggatcttctttagcaccgatgagataaccaccaggtataggaatacaatgagtaacggtgggttgcagaggagtgtcatcctgagcgctctgattctcctgagagcagtgacaggcttttccggcgatgggagggccatatggagcaaaaacccaaatttcactccggtgaatgaatctcaactttttctttacgatacttttcctaagaacttcttctggggaattggcacgggagctttacaggtagagggcagttggaagaaggacggaaaaggaccttcaatatgggatcattttatccacactcatctgaagaacgtgagcagcactaacggatcatccgattcctatatttttctagaaaaggacctgagcgcgctcgacttcataggcgtgagtttctatcaattcagcatatcatggccccgactttttcctgacggaattgtgactgtggccaatgcaaagggtctacaatactacagcacactgctggatgcgttagtgctacgaaatatagagcccatcgtcacactgtaccattgggatctgcctctggccctgcaggaaaagtatggcggctggaagaacgatacaatcatcgatatattcaacgattacgccacctactgcttccagatgttcggagacagggtgaagtactggatcacaattcacaacccatacctcgtggcctggcatggctatgggacgggtatgcacgcccccggggagaagggcaacctagcagctgtgtacactgtgggccacaacctgatcaaagcccattcgaaggtgtggcataattataatacacatttcagaccgcatcagaagggctggttatccattacactgggaagccattggattgaacctaacagatccgaaaacacaatggacattttcaagtgccagcaatccatggttagtgtgctaggatggtttgctaatcctattcacggcgacggagattatccagaaggcatgcggaaaaaactcttttcagttctacctattttcagcgaggctgaaaagcatgagatgcgaggaacagccgacttctttgcgttctcctttgggcccaataactttaaacccctgaataccatggcgaagatgggccagaacgtctctctgaacctacgggaggctctgaactggatcaagcttgaatataataaccctagaatacttattgcagaaaacggatggtttacagacagtagggtgaagacggaagataccacggcaatctatatgatgaagaactttctctctcaagtgctgcaggcaattcggctggacgagattagggtgttcggttatacagcgtggtccctgctcgacggttttgagtggcaagatgcctatactattcgcaggggactcttctacgtagacttcaacagtaagcaaaaggagcggaaacccaaaagttccgctcactattataagcagatcattcgcgagaacggcttctcactcaaggagtccacccccgacgttcaggggcagtttccatgcgatttttcctggggcgtgacagagtcggtgctcaagcccgaatccgtcgccagctctcctcagttttccgacccacatttatacgtatggaatgccactggcaataggctcttgcacagagtggaaggcgtgcgactgaagacacgaccggcgcagtgtaccgacttcgtcaacataaagaaacagcttgagatgcttgcgcggatgaaggtaacccattataggtttgcccttgactgggcatccgtcctgccaacgggcaacctgtcggccgtgaatcgacaggcactgaggtactatcgatgtgtggtctcggaaggccttaaactcggcatttccgcaatggtgactctttactaccccacacacgcccaccttggtctgccagagcccctcctccatgctgacggctggctcaacccatctacagcagaggcctttcaggcctatgccggtctatgcttccaggagctcggcgatctggtgaagttatggatcacaattaatgaacccaacaggctgtcggacatttacaatagatccggaaacgatacttacggagccgcccataatctattagtagcccacgctctcgcatggcgcctttacgataggcaattcagaccctcccagcggggtgcggtttctctgagtctccacgctgactgggcggagccggccaacccgtacgccgatagtcattggagagctgctgaacggttcctgcagttcgagatcgcgtggttcgcggaacctctgttcaagaccggcgattatcctgccgcaatgagggaatacatcgcttctaagcaccgtcggggcttatcttcttctgccttgcctaggcttaccgaagcagagcgtcggctgctcaagggcactgtggacttctgcgcattaaatcacttcaccactagatttgtaatgcacgagcagttagccgggtcccggtacgactctgaccgggatattcagtttttgcaggacatcactcgcctctccagtcccactagattagctgtaattccttggggtgtccggaaattgctgaggtgggtgaggcgtaattacggtgacatggacatttacatcaccgcgtctgggatagatgaccaggctctggaggacgaccggctacgcaagtattacctgggcaaatatctgcaggaggtgctcaaagcgtacttaattgacaaagtgcggatcaaaggctattacgcttttaaacttgcagaagagaaaagtaagccacgttttggttttttcaccagcgattttaaggcgaagtcctctatacaattctataataaggtgatttcttcgcgtggatttccctttgaaaattcctcaagcagatgctcacaaactcaggagaacaccgagtgcacagtatgcctgtttctagtgcagaagaaacccctaatctttctaggctgttgctttttctccaccctcgtgctcctgctgtcaatagccatctttcaacgacagaagcgcaggaaattctggaaagcaaagaacctgcagcacattcctctgaaaaaggggaagcgcgtagttagc

SEQ ID NO: 251826 - DNA, 3132 bp, Artificial Sequence
  derived and/or modified sequence
atgaagcctggatgcgctgcgggtagtcccgggaatgagtggatcttcttcagcaccgacgaaattaccaccagataccggaatacaatgagcaacggtgggctgcagcggagcgtgatcctgagtgcgcttatcctgctgcgcgccgttacaggcttctcaggagatggaagggctatttggtcaaagaaccctaattttaccccagtaaacgagagtcagctgttcctctatgataccttccctaagaactttttttggggaattggaaccggagctctgcaggtcgagggatcatggaaaaaagatgggaagggtccaagcatttgggatcattttattcacacccaccttaaaaatgtgagctctactaacggctcttcagacagctatatctttctggagaaggacctcagtgctctcgattttatcggggtgagcttctaccagttcagcatcagctggccacgcctcttcccagatggaatagtgacagtggccaatgcaaaaggactccagtactattctacccttctcgatgctctggtgctgcgtaatattgagccaattgtcaccttgtaccattgggatctgcccctggcacttcaggaaaaatatggggggtggaaaaacgatacaatcatcgacatctttaatgactacgctacttattgcttccagatgttcggcgacagggtaaaatattggatcaccattcataacccttacttggtagcatggcatgggtatggaaccggtatgcacgctccaggagaaaaaggcaatctcgcagctgtgtacactgtgggccacaacctgataaaggctcattcaaaagtgtggcataattataatacgcatttccggccacaccagaaaggttggttgagcatcacgctgggatcacactggatagaaccaaaccgtagcgaaaataccatggacattttcaaatgtcaacagagtatggtgtcggtgctaggttggtttgctaatcctatacatggagacggggactatccagagggcatgcgcaagaaacttttctccgtcttgccaattttctcagaggctgagaagcatgagatgaggggcactgctgacttttttgctttttccttcggcccaaataatttcaaaccccttaacaccatggctaagatgggccaaaacgtgtctctcaatctcagggaagctctgaactggatcaaactggaatataacaacccacgaattctcatcgcagaaaacggctggtttactgattcccgcgtaaagaccgaggatacaaccgcaatatatatgatgaaaaactttttgagccaagtcctgcaggctattagactcgacgaaatccgtgtttttgggtacacagcgtggagcctccttgacggctttgaatggcaagatgcatataccatccggcgaggtcttttctacgtcgatttcaacagtaaacaaaaagaacgtaaaccaaagtcgagcgcccattactacaagcaaatcatacgtgagaatggatttagtttgaaagagtcgactcctgacgtgcaaggtcaattcccatgcgattttagttggggcgtgactgaatccgtgctcaagcctgagtccgtggctagtagcccgcaattttcagatccccacctttacgtctggaatgctaccggaaacaggctgctgcacagagtggaaggagtgcgcctcaagacaagaccagctcaatgcactgactttgtgaacattaagaaacagctggaaatgttagctcgaatgaaggttacacattataggtttgctctggactgggcctcggtgctgcccacgggaaacctgtccgctgtgaacaggcaggcgctgaggtattataggtgcgtggtcagcgagggcctcaagctcggaatctccgccatggtcaccctgtattatccaactcatgcgcacctgggactcccggagcccttgcttcacgccgatgggtggctcaaccctagcaccgctgaggcctttcaggcctatgccggactgtgtttccaggaactcggcgacctcgtgaagttgtggattacaatcaatgagccaaatcgcttaagtgacatatacaacaggtctggaaacgatacttacggcgccgcgcacaatcttctcgtcgctcacgctctcgcatggcgcttatacgaccgccaatttaggcctagccagcggggcgccgttagcttgagtctgcatgcggactgggccgagccagctaatccttacgccgatagccactggagggctgctgaaagattccttcaatttgagatagcctggtttgccgagcctctgtttaagaccggcgattatcctgcagccatgagggaatacatagcaagtaaacacaggagaggcctgtcaagttctgcccttccaagactgaccgaagccgagaggaggttgcttaaggggaccgtggatttctgtgcgctcaaccactttaccactaggtttgttatgcacgaacagctggctggctctcgctatgacagcgatcgggatatccagttccttcaagatatcacaagactctccagccctacccgtcttgctgtgatcccttggggagtcagaaaacttctgagatgggtgaggagaaactatggagatatggacatctacataaccgcatcgggaattgatgatcaagccctggaggatgaccggctgcgcaaatactaccttggcaagtatttgcaggaagtacttaaagcttaccttatcgacaaggtgaggataaagggctactacgcatttaaactcgcagaagaaaaaagcaagccaagatttggcttttttacctccgactttaaggctaaaagcagcatccagttttataataaggtgatcagcagcagaggcttcccttttgaaaactcctccagcagatgttcccagacacaagagaacactgaatgcaccgtttgcttgtttttggttcagaaaaaacccctcatctttcttgggtgttgttttttttctaccctggttttgttgttaagcattgctatttttcaaagacagaagcgcaggaaattttggaaggctaagaacctgcaacacataccgctgaagaaaggtaagagagtagtgagt

SEQ ID NO: 251827 - DNA, 3132 bp, Artificial Sequence
  derived and/or modified sequence
atgaagccaggttgcgccgccggctcacctggcaacgagtggatcttctttagcacggatgagatcacaacgagataccgcaacacaatgtccaatggcggtcttcagcgcagcgtaatactctccgcacttatcctgttaagagccgtgaccggcttctcaggcgacgggcgcgcaatctggtctaagaatcctaacttcacccccgtcaatgagagccagctcttcctgtatgataccttcccgaagaatttcttttgggggatcggtacgggtgctcttcaggtggaaggtagttggaaaaaggacggcaaaggcccttccatttgggatcattttattcacactcacctgaagaatgtgtccagcaccaacgggagctctgatagctatatctttctggagaaagatctttcagcgctcgactttatcggcgtgagcttttatcaattctctattagctggccgcgcctgttcccggatggcattgtcacggtggcgaacgctaaaggcttgcaatactatagcaccctgctggatgccctggtgctccgcaatatcgagcctatcgtgaccctgtaccactgggacctgcccttagctctgcaagagaagtatggaggctggaagaacgatacgataattgatatatttaatgattatgctacctactgcttccagatgttcggggatagggtgaagtattggattaccatccacaatccatacctggtcgcgtggcacggatatggtacgggcatgcatgcacctggcgagaaaggaaacttggctgccgtgtacaccgtgggccacaacttgatcaaggctcactccaaggtttggcacaattataacactcactttcgccctcatcaaaagggatggctcagtataaccctgggttctcattggatcgagccaaatcgcagcgagaacacgatggacatctttaaatgccaacagagcatggtatccgttctcgggtggtttgctaatcctattcacggcgatggagattacccggaaggtatgagaaagaaattgttctccgtgttgccaatttttagcgaagccgaaaagcatgagatgcggggaaccgcagacttctttgctttcagctttgggccgaataacttcaagccgctgaacaccatggcgaagatggggcagaatgtgtccctgaaccttagggaggcgctgaactggattaaactggagtataacaatcctcgcatcctgatcgcagaaaatggctggttcaccgactcccgcgtgaaaaccgaggataccacggcgatctacatgatgaaaaattttttgagccaagtgctgcaggccatccgactggacgagataagggtttttggatataccgcatggtctctgcttgatggttttgaatggcaggacgcgtatacgatccgccgtggcttgttttacgtcgactttaatagcaaacaaaaggaacggaaaccgaagtccagtgcacattactacaaacaaattattcgagagaatggcttttctttgaaagagagcacaccggacgtacaaggccagtttccttgtgacttcagctggggagtaacggagtccgttctcaagccggagagcgttgcgtctagcccgcagttttcggatccacacttgtatgtctggaatgcaactggtaaccgcctgctgcatcgcgtggagggcgtacgcttgaagaccaggcctgcgcagtgcaccgactttgtcaatattaagaaacagctggaaatgctggcgaggatgaaagtgacgcactatcggtttgccctggactgggctagcgtgctaccgaccggtaatctctccgcggtcaaccgccaggccttgcggtactacagatgcgtggtgagcgagggcctgaaactcggtatcagcgctatggtgaccctgtattacccaacccatgcccacctgggtctgccagagccactgctccatgctgacggttggctgaatccgtcaacagccgaagcgttccaagcatacgcaggtctatgcttccaagaactgggcgacttggtcaaactgtggatcactatcaatgagcctaacagactgagcgacatttataatcggtccggcaatgacacgtacggtgccgctcacaatctcctggtggcgcacgcgctggcctggcgcctgtacgaccgtcagtttcgcccttcccaacgcggtgcggtctctcttagcctacatgcggattgggctgaaccagcaaacccatacgcggactcccactggcgggccgcggagcgctttcttcaattcgaaattgcgtggtttgcggaaccgctgtttaagacgggtgattacccggccgcaatgcgcgaatatattgcttccaagcatagacgtggtctgtcctcatccgcgctccctcgcttgacggaagccgagcgccggctcctgaagggtactgtggacttctgcgcactgaatcatttcaccacgcgcttcgtgatgcatgagcagttggcaggctcccgttacgacagtgatagggatatacagttcttgcaagacatcaccaggctgagctcaccgacccgcctggcagttattccttggggtgtgcgcaaactgctgcgctgggtcaggaggaattacggggatatggacatttatatcacggctagcgggattgacgatcaagccctggaggatgacagacttcgcaagtattacctgggcaaatatttgcaagaagtgttgaaggcgtacttgattgataaggtccggatcaagggctattatgcttttaaactggcggaagaaaagtctaagcctagatttgggttcttcacgagcgacttcaaagcgaagtccagcatccagttttataataaagtcatcagcagccgcggttttccgttcgagaatagctcatcgaggtgttctcagacccaggaaaacaccgagtgtaccgtgtgcctgttcctagtccagaagaagcctctgatcttcctcggttgctgttttttctccaccttagttctgctgctgtccatagcaatcttccaacggcagaagcgccgcaagttctggaaggcgaagaatctccagcatatcccgctcaagaaggggaagcgcgttgtaagc

SEQ ID NO: 251828 - DNA, 3132 bp, Artificial Sequence
  derived and/or modified sequence
atgaagccgggttgcgcagcaggttcaccagggaacgaatggattttcttcagcactgatgagatcaccacccgctaccgcaacactatgtcaaacggcggactgcaacgctcagtgatcctgtctgctctgatcctgctgcgggcggtgaccggcttctcgggagacggtagagccatctggtccaaaaacccgaactttacccctgtgaacgaaagccagctcttcctgtatgatacttttcctaagaacttcttctggggtattggtaccggggccctgcaagtcgaaggatcttggaagaaggatggaaagggaccctcgatctgggaccactttatccacactcatctgaaaaatgtgtcgtcgaccaacgggtccagcgactcctacatcttcctggaaaaggacctctcggcgctggatttcatcggagtttcgttctaccagttttccattagctggcctcggctgtttccggatggcatcgtgacggtggccaatgcgaaggggctccaatactactcaaccctgctggacgccctggtgctgcgaaacatcgaaccgatcgtcactctctaccactgggacttgccactggccctgcaagagaaatacggaggatggaagaatgacaccatcatcgacatctttaatgactacgcgacctattgcttccagatgtttggcgacagagtcaagtactggatcaccatccataacccgtacctggtcgcttggcatgggtacggcactgggatgcacgcaccgggagaaaaaggaaatctggcagcggtgtataccgtggggcacaacctcatcaaggcgcattccaaggtgtggcacaactacaatacgcatttccgcccgcaccagaaaggatggctttcgatcactctcggaagccactggatcgagccaaacaggtcggagaataccatggacatcttcaaatgccaacagtccatggtttccgtgctgggatggttcgccaacccaattcatggagatggagattatccggagggaatgagaaagaaactcttttcagtcctcccaatcttctccgaggcggagaagcatgagatgcgggggactgcagacttcttcgctttctcttttgggccaaacaatttcaagccactcaacactatggcaaaaatgggacagaatgtgtcccttaacctgcgggaggcactcaactggatcaaactggaatacaacaaccctagaatcctcatcgcggagaatggttggttcacggactcgagagtcaagactgaggacactaccgctatctatatgatgaagaacttcttgtcgcaagtgcttcaggccatcagactggatgagatcagggtctttggatacaccgcttggtcgctcctggacggattcgagtggcaggacgcatacactatccgccgcggacttttctacgtggactttaatagtaagcagaaggaacggaaaccgaaatcgtccgcacactactacaaacagatcattagagagaatgggttttccctcaaggaaagcaccccagacgttcagggacagtttccatgcgacttttcgtggggcgtgactgagtccgttctgaagcccgagtcagtggcgtcatccccacaattctcggacccgcacctgtacgtgtggaacgccaccggcaatcgcctgcttcatcgggtggaaggagtgagactgaagacccgcccggcacaatgtaccgactttgtcaatatcaagaagcaactggaaatgctggcgcgcatgaaagtcactcattaccggttcgcactcgactgggcctcagtgctcccgactggcaacctctccgctgtgaacagacaagccctgcgctactacagatgtgtcgtatcggagggtttgaagctgggtattagcgcaatggttaccctgtactacccaacccacgcccatctgggcctcccagaaccactgctccatgctgatggatggcttaacccatccactgcggaggccttccaggcctacgccggactgtgcttccaggagctgggagatctggtcaagctgtggatcactattaacgaaccgaaccggctgagcgacatctacaaccggtccggaaatgacacctacggggcggcacacaacctgctggtggcgcacgccctcgcctggagactgtacgacaggcaattccgcccgagccagagaggagctgtgagcctctccttgcatgcggactgggcagaaccggctaatccatacgctgacagccactggcgggccgcggaacgcttcctgcagttcgaaattgcctggttcgccgaaccgctcttcaaaacgggcgattaccctgctgctatgcgcgaatacattgcctccaagcatcggcgcggactgtccagctcagcgctgccgcggctgaccgaagccgagaggagactgctgaaagggaccgtggatttctgcgcgcttaaccacttcaccactcggttcgtgatgcatgaacagttggcggggagcaggtacgatagcgatcgggacatccagttccttcaggatatcactaggttgagcagcccgaccaggctggcggtcatcccatggggggtgcgcaagctgctgcggtgggtgagacggaattacggagatatggatatctacatcaccgccagcggcatcgacgaccaagcgttggaggatgatagactccgcaagtattacctggggaagtacttgcaggaagtgttgaaggcctacttgatcgacaaggtccggattaaaggatattacgccttcaaactcgccgaagaaaaatcaaagccaagatttggtttcttcacctccgatttcaaggcgaagagcagcatccaattctacaacaaggtcatctcgagcagagggttccctttcgagaactcaagctccagatgctcccaaactcaggagaacaccgaatgcaccgtttgcctgttcctcgtccagaagaagcccctgatttttctgggttgttgcttcttctcgactttggtcctgctgctctcaatcgccatctttcaacgccaaaagcgccgcaagttctggaaggcgaagaaccttcagcacatccctctgaagaagggcaaaagagtcgtctcc

SEQ ID NO: 251829 - DNA, 3132 bp, Artificial Sequence
  derived and/or modified sequence
atgaaacctggttgtgcagccggttcacccggaaatgaatggatattcttctccacagacgagattacgacaaggtacagaaacacaatgagcaacggcggcttgcagcggtccgtcatcctgtcagccctgatcctcctgagggccgtcaccggattctccggagatggaagggccatctggtcaaagaatcccaactttacccccgtgaacgaatcacaacttttcctgtacgacactttccctaagaatttcttctggggaattggtactggagcgctgcaggttgagggttcatggaagaaggatggcaaggggccgtctatctgggaccattttattcatacacacctgaaaaacgtcagctccacaaatggctcttccgatagctacatctttttggagaaagatctctcagcacttgatttcataggagtgagtttttatcagttcagtatctcttggcccagacttttccctgacggaattgtcacagtcgcaaacgcaaaagggttgcagtactactccaccctactagacgctctcgttttacgcaacatcgaaccaattgtcacgctgtaccactgggatctccctctggcccttcaggaaaagtatggcggttggaagaatgacactatcatagatattttcaatgattacgctacctactgttttcagatgtttggcgaccgggtgaagtactggatcacgattcacaatccatatctcgtggcttggcacggctatggtacaggcatgcatgcaccaggcgaaaaaggcaatctggccgctgtgtacactgtgggacataatctaatcaaggctcattcaaaagtttggcataattacaacacccacttcaggccccaccagaaggggtggctttccattacactcggctcccactggatcgagccgaataggtccgagaatacaatggacatctttaagtgccaacagtcaatggtgtcagttctaggatggttcgccaacccaatccacggggatggcgattacccggagggcatgcgcaagaagttgttctcagtgctccctattttcagcgaggctgagaaacatgaaatgagaggcactgctgacttcttcgccttcagtttcggacctaacaacttcaagcccctaaataccatggccaagatggggcaaaacgtctctctgaatctcagggaagcacttaactggatcaaacttgagtacaataacccccggatcctcattgccgagaatggttggttcactgacagtcgcgtgaagacggaagataccactgccatttacatgatgaagaacttcctgtcccaggtcctccaagcgattcgcctcgacgaaattagggtgtttggttataccgcatggtctcttctggatggcttcgagtggcaggacgcatacaccattcggagggggttattctacgtggattttaactccaagcagaaggagaggaaacccaagtcatccgctcactactataaacagataattagagaaaatggtttctcccttaaagagtccactcctgacgttcagggccagtttccttgtgattttagctggggagtgacagaaagtgtgctgaagcccgaatctgttgcaagctcccctcagttcagtgaccctcacctgtatgtgtggaacgccactggcaaccgacttctccaccgcgtggaaggggtccggctgaagacccgacccgcgcagtgcacagactttgtgaatataaaaaagcagctggagatgctggccagaatgaaggtgactcattaccggttcgcactggattgggcaagcgtgctgcctaccggcaacctgtctgcagtcaatcgacaggctcttaggtattaccggtgtgttgtgagtgaagggctgaagctcggcataagtgccatggtgacactctattacccaacacatgcacatctgggcctgccagagccccttctccacgcagacggatggctgaaccccagcaccgccgaggcatttcaggcctacgcaggcctctgcttccaggagctgggggaccttgtaaagctttggatcactattaatgagccaaaccggctgtctgacatctacaacaggtccgggaacgacacgtacggagcagcccacaacttgctggtggcgcacgccctcgcttggcggctgtacgaccgccagtttaggccttcacagcgtggcgctgtcagtctcagcctacacgccgattgggctgagcccgctaatccatacgccgattctcactggcgggcggcggagagatttcttcagtttgagatagcatggtttgcagaaccgttattcaagactggagattaccctgccgcaatgcgtgaatacattgctagcaagcacaggcgcggcttatcatccagtgctctgcctcgcttaacagaggccgagagaagactgctgaagggcaccgtggacttctgcgcacttaaccactttacgacgcgatttgtgatgcacgagcagttggcggggtctaggtacgattctgacagagatatccaatttctccaagacatcacacggctctcaagcccaaccaggctcgccgtaatcccttggggggtgagaaagctgttgcgatgggtaaggcgcaattacggtgacatggatatatatatcacagcaagtgggatcgatgatcaggccctcgaggatgatcggctgcggaaatattatcttggcaagtacctccaggaggtccttaaagcatacctgattgacaaggtcaggattaaggggtactatgcctttaagcttgctgaggaaaaatctaagcccagattcggctttttcactagcgattttaaagccaaaagctctatccaattctacaataaggtaatcagctcccgaggttttccgtttgaaaactcaagcagccgttgctcccaaacacaggagaacacagaatgcactgtgtgtcttttcctcgtgcagaaaaagcctcttatcttcctgggctgctgctttttctcgacactggtgctgctgttatccatcgccatttttcagagacaaaaacgtcgaaaattctggaaagctaagaacctccagcacatccccttaaaaaaggggaagcgggtggtgtcg

SEQ ID NO: 251830 - DNA, 3132 bp, Artificial Sequence
  derived and/or modified sequence
atgaaacctggatgcgccgcaggatctcctggaaatgagtggatcttcttctcaactgatgagataactacaagatataggaacactatgtcaaatggcgggctgcagaggagtgtgattctttccgcacttattctgctaagagccgtgactggcttttccggcgacgggcgggcaatctggagcaaaaacccaaattttactccagtaaacgaatcgcagttgttcttgtacgatacatttccaaagaatttcttctgggggatcggcaccggagcacttcaggtcgaaggttcctggaaaaaggatggtaaaggccctagcatatgggatcacttcatccatacccacctgaagaacgtttcatccaccaatggtagctcagacagttacatatttctcgagaaagacctctccgcgttggacttcattggcgtgtcgttctatcagttttcgatctcttggccacgactgttccctgatggcatcgtcactgtggccaacgcgaagggacttcagtattactccacactgctcgacgcactcgtgctgcgcaacattgagcctatagtgaccctttaccactgggacctgcccctagcactgcaggagaagtatggcgggtggaagaacgacacaatcatagatatctttaacgactatgctacatattgcttccagatgttcggggatagagtgaagtattggataaccatccacaacccgtatttggtggcgtggcacggctatggcactggtatgcatgcacctggggaaaagggtaacctagccgcggtatataccgttggtcataatctcattaaggcccacagcaaggtttggcataattataatacccatttcagaccccaccagaagggatggctcagcatcaccctgggctcccattggatcgagccaaatcgctccgaaaacaccatggacattttcaagtgtcaacagtccatggtgtccgtcttaggctggttcgcaaatcccatccacggcgatggggactaccctgaagggatgcggaagaaactgttttcggtgctgcccatattctccgaggccgagaagcacgagatgcgtggaaccgcggatttcttcgctttctcattcggccctaacaacttcaagcctctgaatacaatggctaagatggggcaaaatgtgagcctgaacctgagggaagcactcaattggatcaagctggaatataataatccgcgtatcctaattgcggagaacggatggtttaccgactcccgggtaaaaacagaagatactaccgctatctatatgatgaaaaatttcctgtctcaggtgctacaggccattaggttggacgagattcgcgtttttgggtacactgcctggagtctccttgacggcttcgagtggcaggacgcatataccattcgtcgcggcctgttttacgttgacttcaattctaagcagaaggaaagaaagcctaaatcttcagcccattattacaaacaaataatcagagagaacggcttcagcctgaaagaaagtactcctgacgtccagggccagtttccatgtgatttttcttggggtgtgaccgaatcagtgctcaagccagagagcgttgcaagttcaccacaattttctgacccacatctctacgtgtggaacgcaacaggaaatcggctattacaccgagtcgaaggggtacggttgaagacccgtccagcgcaatgcacagactttgttaacatcaagaagcagctcgagatgctcgccagaatgaaggtgacccactatcgcttcgcgttggattgggccagtgttctgcccacaggtaatttgtctgcagtgaaccgtcaggctctcagatactatcgctgcgtggtctccgagggactcaagttgggcatctccgctatggtgaccctttattacccaacccacgcccatctcggcttgcctgaaccgctgctgcacgccgacggttggctcaatccatcaacagccgaagctttccaagcctatgctggactgtgctttcaagaactcggggatctggtgaagctctggatcaccattaatgaaccgaatcgcctcagcgatatctataatcggtcggggaacgatacatacggtgccgcgcacaacctgctggtagcccatgccttggcatggcgcttatatgaccgccagttccgccccagccagcggggagcagtgtctctgagcctgcacgctgactgggcagaacccgccaacccatatgcggattcccattggagggcagctgagcgcttcctccagtttgagattgcgtggttcgccgaaccactgtttaagactggggactacccggccgccatgcgtgaatatatcgcctctaagcaccgccggggcctgtcatctagcgctctccccagactgacagaggcagaacggcgcctgttgaaaggtactgtggatttctgcgctttgaaccacttcaccacgcgtttcgtgatgcatgagcaactggccggcagcagatatgactctgacagagatatacagttcctgcaggacataactaggttgtcctcgcctacgcgcctggcggtgatcccgtggggtgtgagaaaattgctgcgatgggtgagacggaattatggcgatatggatatttacattacagctagcggaatcgatgatcaggccttagaggacgaccgcctgcgcaagtattatttagggaaatacctgcaggaggtactgaaagcctatctcatagataaggtgcggataaaggggtactatgcctttaagcttgcagaagaaaaaagtaaacccaggtttggattctttacgtctgacttcaaggccaagtccagcatccaattttacaacaaggtcatcagcagccgcgggttcccctttgaaaactcatcttcacgctgctcgcagacccaggaaaatacagaatgtacggtgtgtttattcctcgtccagaagaaaccactaatatttctggggtgctgcttctttagcaccctcgtgctgctgctgtccattgccatattccagcgccagaagcggcgaaaattctggaaggctaagaacctgcagcatatccccctaaaaaagggaaaaagggtggtctcg

SEQ ID NO: 251831 - DNA, 3132 bp, Artificial Sequence
  derived and/or modified sequence
atgaagcccgggtgtgccgcagggtctccaggcaatgaatggatatttttctctaccgacgaaattacgacacgctatagaaacactatgtctaacggcggccttcaacgaagcgtgattctgtctgctctcattctgctcagagccgttacgggattctctggcgacgggcgtgccatctggtctaaaaaccccaactttactccagtgaacgagtcacagctgtttctgtacgacaccttccccaaaaactttttttgggggatcgggactggcgctctgcaggttgagggctcatggaagaaagatggaaagggtccgagcatatgggaccatttcattcatactcacctgaaaaatgtgtcaagcacaaatggttcctccgactcttacattttcttggagaaggacctatctgctcttgacttcattggagtatccttttatcaattctccatttcttggccaagactattccctgacggaattgtgaccgtggccaacgccaaaggactacagtactactcgacattgcttgacgcattagtgcttaggaatatcgagcctatagtaaccttgtatcactgggatttgccactggccctgcaggagaagtacgggggatggaagaacgacaccatcattgacattttcaatgattacgccacatactgtttccagatgtttggcgatcgcgttaagtactggataaccatccataacccctacctggtagcctggcatgggtatggaaccggaatgcatgccccaggtgagaaaggtaatctggccgccgtgtacaccgtcgggcataatctcattaaagctcacagtaaagtgtggcacaattacaatacccacttccgcccccaccagaaaggatggctatccatcaccctcgggagtcattggatcgagccaaatagatccgaaaataccatggatatttttaagtgtcagcagagtatggtgtcagtgctgggatggttcgctaatcccattcacggcgacggcgactaccctgaagggatgagaaaaaaacttttttcagttctccccatcttctcggaagctgaaaaacacgaaatgcggggcactgccgattttttcgcctttagctttgggccaaataacttcaagcccctaaatactatggctaaaatgggacaaaacgtgagcctcaaccttcgcgaagccttgaattggatcaaactggaatacaataatccgcgaattttgatcgccgagaatgggtggttcacagattcccgagtcaagacggaggataccaccgccatctatatgatgaaaaacttcctgagtcaggtactgcaggcgattagactagacgagatacgggtgttcggatacaccgcctggtctctactagatggttttgagtggcaggacgcttacaccatacggcgtggactgttttatgttgacttcaactccaaacagaaggaaaggaaacccaagtcttccgcacattattataagcagatcatccgagaaaatggattcagcctgaaggagtccactcctgacgtgcaaggtcagtttccctgcgatttcagctggggggtgacagaaagcgtccttaaacctgagtctgtggcctccagtccccagttctctgatccccacctgtacgtctggaacgctactgggaaccggctgctccatcgggtcgagggcgtgaggctgaagacccggcccgcccagtgtactgattttgtgaatatcaagaaacaactcgagatgctcgcaagaatgaaggtaacacattatagatttgccctggactgggcatctgtgctgcctaccggcaacttaagcgcggtgaatcgtcaggcattgagatattaccgttgtgtcgttagcgaggggctgaaacttggaatttctgcaatggtgacactctactatccaacccatgcccacctggggctgcctgagcccttactccacgctgatggctggttgaatcctagtactgcagaggcatttcaggcctacgccgggctgtgtttccaagaattgggcgatttggtcaagctgtggattaccatcaacgagcccaatagactctctgatatttacaaccgcagtggtaatgacacctatggtgccgcccataatctgctcgtagcgcacgccctcgcatggaggctctatgatcgccagtttcggccaagccaacgaggtgcggtctctctatcattgcacgccgactgggccgaaccggccaatccctacgcggactcccactggagggcagctgaacgcttcctgcagtttgagatagcttggtttgcagagcccctgttcaagaccggtgattacccagctgcgatgagggaatatattgcatccaagcacaggagggggctgtcttcatctgccctaccgaggcttactgaggccgagcggaggcttttgaagggaaccgtcgacttttgtgctttgaatcactttaccacccgattcgtcatgcacgaacagctcgcaggtagtcggtatgatagcgatagagatatccagttcctgcaggacataactcgcttgagctcccctacgcggttggccgtgatcccttggggtgtgcgcaaattgcttaggtgggtccgtcggaactatggagacatggacatctacattactgcttcaggaattgatgaccaagcactggaggacgatcgccttcgaaaatattaccttggcaagtatctccaagaggtgctgaaggcctaccttatcgacaaagtgagaatcaaaggctactatgcctttaaactggcagaggaaaagtcgaagcctcgattcggcttttttacttcagacttcaaggctaaaagctcgatccagttttataataaggtgatctcttcacggggatttccttttgaaaactccagcagccgctgttcccagactcaggagaatacagagtgcactgtctgcctcttcctggttcagaagaagcctcttatttttcttggctgttgctttttttctactctcgtcctactactgagcatcgctatcttccagaggcagaaaagacgcaagttttggaaggctaagaatttacagcacatccctctgaagaagggaaaacgagtggtgtca

SEQ ID NO: 251832 - DNA, 3132 bp, Artificial Sequence
  derived and/or modified sequence
atgaagcctggatgcgccgctggctctcctgggaacgaatggatttttttcagcacagacgagatcaccacgcgctacaggaacactatgtcaaacggtgggctgcagaggagcgtgatcctttccgcgctcatcctgctgcgtgccgtaaccggattttccggcgacggccgcgccatatggagcaaaaacccaaatttcaccccggtaaacgagtcacagcttttcctgtacgacaccttcccaaagaactttttttggggtataggcaccggcgccctacaggtcgagggatcatggaagaaagatggcaaaggccccagtatttgggaccatttcattcatacccatctcaaaaatgtgtcctcaacgaacggttcgagcgactcttatatatttctcgagaaagacctgtccgcattggatttcatcggtgtaagcttctatcagttcagtatctcgtggcccagactcttccccgacgggatcgtaaccgttgctaacgctaaaggccttcaatactacagcactctgctggacgcccttgtgctgcgcaatatcgagcccatagtgacgctttatcattgggatctgccgcttgcgctgcaggaaaagtacggcggttggaaaaatgacaccatcatcgacatcttcaacgattatgcaacatactgtttccagatgttcggggaccgggtgaaatactggattacgattcacaatccatacctggtcgcctggcacggctacggtaccggcatgcatgcccctggagaaaagggaaatctggcagccgtttatacggtcggacataacctgatcaaggctcacagtaaggtgtggcataactacaatacccacttccgtcctcaccagaaaggctggctgagcatcaccctgggtagtcattggatcgagccgaacagatcagaaaacactatggatatattcaagtgccagcaatcaatggtttccgtcttgggctggtttgctaacccaattcacggggacggcgattaccctgagggcatgaggaagaaactcttctccgtcctccccatttttagcgaggccgagaagcacgagatgcgcggtaccgccgacttcttcgccttcagtttcggaccaaataacttcaagcccctcaacaccatggcgaagatggggcagaatgtgagcttgaatctgcgtgaggccctgaactggatcaaactggagtacaacaacccacgtattcttatcgccgaaaacgggtggttcaccgatagccgcgttaagaccgaagataccactgccatctatatgatgaagaacttcctgagtcaagttctacaggcaatccggctggacgagatacgtgtgttcggatacactgcatggtccctccttgatggctttgagtggcaggacgcctacaccatccgaagaggtctcttttacgttgatttcaactcgaaacagaaggagagaaagcccaagtcgagcgcacattactacaaacagatcattcgcgaaaatggttttagcctcaaagaaagtactcctgatgtccaggggcagttcccatgtgatttttcttggggcgtgaccgaatctgtgctaaaacctgagtctgtagccagtagcccccagttttccgacccgcatctctacgtctggaacgctaccggcaaccgtctgttgcatcgcgtcgaaggagttaggctcaagacccgccctgcccagtgtacagattttgtgaacattaaaaaacaactcgaaatgttggcccgaatgaaagtgactcactaccggttcgctctggactgggccagtgtgcttccaactgggaatctcagtgctgtcaatcgccaggctctgcgctactaccgctgtgtagtgagtgaaggcttgaagcttggcatctccgccatggtgactctgtactaccccacacacgcacaccttggcctgcctgagccacttttgcacgctgatgggtggctcaacccatcaaccgccgaggccttccaagcctacgcaggcctgtgcttccaagagctcggagacctcgtgaagttgtggattaccatcaatgaacccaacagattgagtgatatttataatagatcaggcaatgacacatacggggcggcccacaatctgctcgtggcccatgcactggcttggcgcctgtacgatcgccaatttagacccagccagcggggggcggtgtctcttagtctgcacgctgattgggcagagcctgctaatccttacgccgactcacactggcgagcggccgagaggttcctccagtttgaaattgcctggttcgcagagcctttgttcaaaaccggtgactaccccgccgccatgagggaatatatcgcttccaagcacagacgcggactctcttcctccgctctgccgagactaacagaggctgaaagaaggctgctcaagggcaccgtagacttctgtgctttgaaccattttacaactcggttcgtcatgcatgagcagcttgccggaagcagatatgactccgatagggatatacagttcctgcaggacataaccaggttgtcttcccctacgagacttgccgtgattccttggggtgtgagaaagctcttaagatgggtgcggagaaattatggcgacatggacatctatataacggcctctggcatcgacgatcaggctctggaggatgatagattacgcaagtactacctcgggaaatatcttcaggaagtcctaaaggcgtaccttatcgataaggtccgtatcaaaggctattatgccttcaagctagcggaagaaaaaagcaagccacgcttcggcttttttacgtcagactttaaggccaagtcctcaatccagttttacaacaaggtcattagcagtcgcgggtttcccttcgagaacagcagctcgagatgctcccagacacaggagaataccgaatgtacagtgtgcctttttttagttcagaaaaagcccctaatttttctgggctgttgttttttctccaccctcgtcttgctcttatctatcgcaatcttccaacgccagaaacggcgcaagttttggaaggctaaaaacctacagcatatccccttgaagaagggaaagagggtagttagt

SEQ ID NO: 251833 - DNA, 3132 bp, Artificial Sequence
  derived and/or modified sequence
atgaagccaggctgtgctgctggctcacccggaaacgagtggattttcttttctactgatgagataaccactcggtatcgaaacactatgtctaacgggggactccagagatctgtgattctcagcgcgctcatcctgttgcgagccgttacgggcttctcaggggacggcagagccatttggtctaaaaaccccaactttacaccagtcaatgagagccagcttttcctctacgatactttccccaagaactttttctggggtattggtaccggcgcacttcaagtcgaaggctcctggaaaaaggacgggaagggcccatccatctgggatcattttatccacacccaccttaaaaacgtcagctccactaatggtagcagtgacagctatatcttcctggaaaaggacttgagtgccctcgacttcattggcgtaagcttctaccaattttccatcagctggcctagactattccctgacgggatcgttacagtggctaacgctaagggcctgcagtactactcaacattactcgacgcactggttcttcggaacattgaacctatcgtgaccctgtatcattgggatctgcctctggccctgcaggagaagtacggtggttggaaaaatgacaccatcattgacattttcaacgattacgcaacctactgctttcagatgttcggagatcgagtcaagtactggattaccatccataacccatatctcgtggcatggcacggctatgggacaggcatgcacgcgcctggggagaagggaaatcttgccgccgtctacacagtcggacacaacctgataaaggcacatagtaaggtatggcataattacaacactcacttccgacctcaccagaaggggtggctgtccatcaccctgggctcacactggatcgaacctaatcgctccgaaaatacgatggatatcttcaaatgccagcaatctatggtgtcggtgctgggctggttcgctaaccctattcacggggatggggattacccggagggcatgagaaagaagctgttctccgtcctacccatttttagcgaggcagagaagcacgaaatgagaggtaccgccgacttttttgctttcagttttggacctaacaacttcaagccacttaacacaatggcaaagatgggtcagaacgtttctttgaacttgagggaggccctcaattggattaagcttgaatacaacaatccacggatcctgatcgctgagaacgggtggttcacagactcgcgggtaaaaacagaagacactaccgcaatctacatgatgaagaacttcctgagtcaggtgctgcaggcgatacggcttgacgaaattcgggttttcggttacactgcctggtcactgttggacgggtttgagtggcaggacgcctatacaattaggcgagggttattctatgtggatttcaattctaaacagaaggagaggaagccaaaaagttccgctcactactacaagcaaattattagggagaacggcttctcactgaaagagtccacccctgatgtccagggccagttcccttgtgatttttcctggggagtaaccgaaagcgtgctgaagcccgagagcgtggccagttcaccgcagttcagtgatccccacctgtacgtgtggaacgcaaccggaaatcggctccttcatcgcgtcgagggagtgaggctcaagacacgccctgcccagtgcactgactttgtcaacattaaaaagcagctggagatgctggcccggatgaaggttacacattatagatttgctctggactgggcttccgtactgcccactggtaatctgagtgccgtgaatagacaagccttaagatactatcggtgcgtggtttccgagggtctgaaactcggtattagcgctatggttactctgtactaccccactcacgcccacctcgggctccctgagccactcctacacgctgacgggtggctcaacccttctactgcagaagcatttcaggcttacgccggtctgtgtttccaggaactgggcgacctcgtgaagctgtggatcaccataaatgaacctaatcggttatctgacatttacaatcgaagcggaaacgacacgtacggtgccgctcacaaccttctggtggcccacgctctcgcctggcgcttgtatgacaggcaattcaggccatcacagcgaggtgccgtttccttaagcctacacgccgattgggctgagccagcaaatccttatgctgatagtcattggcgcgcagctgagcgttttctccaattcgaaattgcatggtttgccgaaccactcttcaagactggcgattacccggccgctatgcgagaatacatcgcttctaagcaccgccggggactgtcctcttccgcactcccccgtttgactgaagctgagagaaggctgctcaaggggactgtggatttctgtgccctaaatcatttcactacccgtttcgtcatgcatgagcagctggccggtagcaggtacgacagtgatcgcgatattcagttccttcaagacattaccagattaagcagccccacccgactagccgtcatcccgtggggggtgcgcaaacttctgaggtgggtgaggcggaactacggagatatggacatctacatcactgcttccggcatcgacgatcaggctctcgaagatgatcggcttaggaagtattacctgggcaaatatctgcaggaggtcttgaaggcgtacctcatagacaaggttagaattaaagggtattacgcctttaagctcgctgaggaaaagagtaagcccaggttcggattcttcacctccgactttaaggccaaatccagtattcaattctacaacaaggttattagctccagaggctttccgttcgagaattcctcgtctagatgtagtcagacacaggaaaatactgagtgtaccgtgtgtttattcctcgtccagaaaaagcccctcatcttcctcggctgctgttttttttcaacactggtgctactcctgtctatcgctatcttccagcgtcagaagaggcgcaagttttggaaggccaagaacctgcaacatatcccacttaaaaaaggcaagcgggtggtctcg

SEQ ID NO: 251834 - DNA, 3132 bp, Artificial Sequence
  derived and/or modified sequence
atgaaaccaggctgtgctgctggatcacccggaaatgagtggatatttttctccacagatgaaattactacgcgttatcgcaacaccatgtctaacggaggccttcagcgcagcgtgatactctctgcccttatcctccttagagccgtgacggggttcagtggcgatggcagggcgatatggtccaagaaccctaattttactcccgtcaacgaatcccagctctttctttatgatacatttccgaaaaactttttctggggaatcgggacaggagctcttcaggtggaaggaagctggaagaaggacgggaaggggccttccatctgggatcattttattcacacgcaccttaaaaacgtgagcagtactaatggcagcagtgattcttacatcttccttgagaaagacctatctgctttggatttcataggagtgtcgttctaccaattctctatctcctggccacggctcttccccgatgggatagttaccgtcgctaatgccaaaggccttcagtattattccacactcttggacgcactagtgctgaggaatattgagcctattgtgacactgtaccactgggaccttcccctcgctctgcaggaaaagtacggcgggtggaagaatgatacaattatcgatatcttcaatgactacgccacatactgtttccagatgtttggagaccgggtcaagtattggattacaatacacaatccctacctggtggcctggcacggctatgggacaggcatgcacgcaccaggtgaaaagggtaacttggccgccgtttacacagtaggccacaatctgattaaggcccactcgaaggtgtggcacaattacaacactcatttcaggccacaccaaaagggttggctgtccattactcttgggtctcattggattgaaccaaatcgaagcgaaaatactatggacatcttcaaatgccagcagagcatggtcagcgtgctgggctggtttgccaacccaatccatggagatggtgattacccggaaggaatgcggaagaagctgttttccgtactgcctattttctcagaggccgaaaaacatgagatgcgggggacggccgactttttcgctttctcattcggccctaacaacttcaagccactgaacaccatggctaaaatgggccagaacgtgtctcttaatcttcgggaggccctcaattggatcaaattagaatacaataatccccgaattctcattgcagagaacgggtggttcacagatagccgggtgaagaccgaggataccacagccatttatatgatgaaaaactttctaagccaggtgctacaggccatccgcttggacgagattagggttttcgggtatacagcttggagccttctcgacgggttcgagtggcaggatgcctacaccatcaggcgggggttgttttacgtggatttcaactctaagcagaaggagcgcaagcccaaatctagtgcacactactataaacaaatcattcgggagaacggctttagtctcaaggagagtactcccgatgtgcagggccagtttccctgtgatttctcttggggcgtgaccgaaagtgtcctcaagccggaaagcgttgcatcttcaccacagttcagcgacccccatctgtacgtctggaacgctacaggtaaccggctgctgcaccgggtagaaggggtgagactgaagaccagaccggctcagtgtacggattttgtgaacatcaagaaacagctggagatgttggccagaatgaaagtcacgcattacaggttcgctctggactgggcatcagtgcttcctaccgggaatctatccgctgtgaaccgacaggcgttgcggtactaccggtgtgtggtgtcagaagggctgaaactgggaattagcgcaatggtaacgctgtactaccctacgcacgctcacttgggattacccgagcccttacttcacgcagacggctggctaaacccatcgactgccgaggcttttcaggcgtacgcggggctctgttttcaggaactcggggatctcgtgaaactatggatcacaatcaatgagcccaaccggcttagcgacatctataaccggtctggtaacgacacttacggagcagcccataaccttctggtggcgcacgctttggcctggcggctgtatgaccgacagttcaggccaagtcagagaggagctgtgtctctatccctgcacgccgactgggctgaacctgccaacccatatgcggattcacactggcgcgccgctgagcgctttctgcagttcgaaattgcttggtttgccgagcctctgttcaaaactggagactacccagcggccatgcgggagtacatcgcttccaaacaccggagggggttatcttcgagcgctctgccccggcttaccgaagcggagcgtaggctgcttaagggcacagtcgacttttgcgctctgaaccacttcaccacaagattcgtgatgcatgagcagttggctggttcaaggtacgacagtgatagagatattcagtttctccaggacattacccggctgtcaagtcctacccggctggccgttatcccatggggagtgagaaaactcttaagatgggtgcggcgtaattacggggatatggatatctacataactgcctccgggatagatgaccaggccctggaagatgaccgactgaggaagtactaccttggcaaatacttacaggaggtgctgaaggcttatcttattgacaaggttaggatcaaagggtactacgccttcaagctggccgaagagaagtcgaaaccacgctttggattcttcaccagtgacttcaaggccaaatcatccattcaattctacaataaagttatctctagtcggggctttccatttgagaatagctcatcaagatgctctcagactcaggagaatacggagtgcactgtttgcctctttctcgtccagaagaagcccctaatctttctaggctgctgtttctttagcaccctcgtgcttctgctctctattgcaatctttcaacgccagaagcggcgtaagttctggaaagccaaaaacctccaacacattcccctaaagaaaggcaagagggttgtgtcc

SEQ ID NO: 251835 - DNA, 3132 bp, Artificial Sequence
  derived and/or modified sequence
atgaagccgggttgcgcagccggatcaccaggaaatgaatggatattcttcagcacggatgaaattactacccgatacagaaacaccatgagcaacggaggtctgcagagatcagtcatcctctcagccctcattctgctgcgagcagtgactggtttttcgggggacgggcgggcaatttggtcaaagaacccgaacttcactccggtcaatgaatcccagctttttctttacgatacctttcctaagaactttttctggggcattggaaccggtgcgctccaggtggagggctcttggaagaaagacggcaaaggtccctccatttgggatcactttattcacacccatcttaagaacgtctcgtcgaccaacggatcctctgatagttacattttccttgaaaaggatctgtcggctcttgactttattggggtgtccttttatcaattttcgatctcctggccacgtctttttcctgacggaatcgtaactgtcgcgaatgcaaagggactccagtactactccacccttctcgacgcattggtgcttagaaatatcgagccaatagtgaccctgtaccactgggatctgcccctggctctgcaagaaaagtacggaggatggaaaaatgacacgatcatcgatatctttaatgattacgcaacgtactgtttccaaatgtttggggacagggtgaagtactggatcactattcataacccctatctcgtggcgtggcacggttacggcaccggaatgcatgcacccggcgagaagggaaacctggccgctgtgtataccgtcggacataacctcattaaggcccactcaaaggtgtggcataactacaacacccattttcgtccacatcaaaaaggatggctgagcataaccctcggttcccactggatcgaaccaaaccgcagcgagaacactatggacattttcaaatgccagcaatcgatggtcagcgtgttggggtggttcgcaaatcctatacatggagatggggattaccctgagggaatgaggaagaaacttttttcggtccttcctattttctccgaggcagaaaagcatgaaatgcggggaactgctgacttcttcgcattttcgtttggtcctaacaactttaagccattgaacaccatggcgaagatggggcaaaacgtatcccttaaccttcgcgaggccttgaactggatcaaacttgaatacaacaatcctagaatcttgatagccgaaaatggatggttcaccgactcgagagtaaagacggaggatactactgcgatctatatgatgaaaaacttcctgagccaagtgctccaggcaatcaggcttgatgagatccgggtgtttggttacaccgcctggtcgctgctggacggctttgagtggcaagatgcatacaccattcgtagaggcctgttctacgtggactttaactcgaagcaaaaggaaagaaagcctaagagctcggcgcattactacaagcagatcatccgggaaaatggattttcgcttaaagaatcgacccctgatgtgcaggggcaatttccctgcgacttctcatggggagtgactgaatctgtcctgaagccagaatccgtcgcctcgtcacctcaattttcagatcctcatctgtatgtgtggaatgcaacgggcaaccgtctgctccaccgggtggaaggagtgcgactgaaaactcgccctgcacagtgtaccgattttgtcaacataaagaaacaactcgagatgctcgccagaatgaaggtcactcattacagattcgctcttgattgggcttcagtgctgcccactggtaatctgtcggcagtgaatcggcaagcactgcggtactacagatgtgtcgtgtcagaaggccttaagctgggaatctcagcaatggtgacgctctactaccccacccatgcgcatctcggtctgccagaacctcttctgcacgcagatggatggctcaacccatcgactgcagaagcgtttcaagcatacgccggtctgtgcttccaggagttgggtgatcttgtgaagctctggattaccattaatgaacccaacaggctttcggacatctacaatagaagtggaaacgacacttacggagccgctcacaatctgctggtggcacacgcgctggcctggcgcctgtacgacaggcaatttaggccttcacaacggggagcagtttccctctcgcttcatgcagactgggctgaacctgcgaatccctacgcagactcccactggcgcgcggcagaaagatttcttcaatttgaaattgcttggtttgccgaaccacttttcaaaactggcgattacccagcagctatgcgggagtacatagcatccaagcatagacgtggcctgtccagttccgcacttccacgccttactgaagccgaaaggagactgttgaagggcactgtcgatttttgcgcacttaatcactttactactcgtttcgttatgcatgagcagctggcgggttcccggtacgattccgatcgcgatattcagttccttcaagatattactcgcctctcatcccctaccagacttgctgtcattccgtggggtgtcagaaaactcctgaggtgggtgcgacggaattacggagacatggacatctacattacggcgagcggaatagatgatcaggcactggaggatgatcgactgcgcaagtattatcttggtaaataccttcaggaggtgcttaaggcataccttattgataaagtgcggattaaagggtactacgccttcaaacttgcagaagaaaagtccaagccgagatttgggtttttcacctcagacttcaaggctaagtcctcgatacagttttacaataaggtaatttcaagcagaggttttccatttgagaactcctcgtcccgctgttcgcagacccaggagaacacggagtgtaccgtctgtctgtttctggttcagaagaaacctctgatcttcctgggctgttgttttttcagcaccctggtgttgttgctctccattgcgattttccagagacaaaaacggagaaagttctggaaggcaaaaaacttgcaacatatcccactcaagaagggaaaaagggtcgtgagc

SEQ ID NO: 251836 - DNA, 3132 bp, Artificial Sequence
  derived and/or modified sequence
atgaagcctggatgcgccgcaggaagcccaggaaatgagtggatcttcttctcgactgatgaaatcaccactcgctacagaaatactatgagcaatggcggtctgcagcgctccgtgatcctctcggcgcttatcctgctgagggcagtgactggattttcgggagacgggcgggccatctggtcgaagaaccccaacttcactcccgtgaacgagtcacaattgttcctgtacgacacctttccaaagaactttttctggggaatcggcaccggcgcactgcaagtggaaggctcgtggaaaaaggacggcaaaggacctagcatctgggaccactttatccacacccatttgaagaatgtcagctccactaatggatcaagcgacagctacatctttctggagaaagacctctcagcactggatttcatcggcgtgtccttttaccaattctcgatttcatggccacgcctgtttccagacggcatcgtcaccgtggctaacgccaaggggctgcagtactactccaccctgctggacgcacttgtcctgcgcaatattgaaccgattgtcacgttgtaccattgggacctgcctctggccctccaggagaaatacggaggatggaagaatgatactatcattgacatcttcaacgactacgcgacgtactgtttccaaatgttcggtgatcgggtgaagtactggataacgatccacaacccgtacctggttgcttggcacggctacggaacgggaatgcacgccccaggggaaaagggaaacctggctgccgtgtacaccgttgggcataacctcattaaggcccactcgaaagtttggcacaactacaacactcacttcagacctcatcagaagggatggctgtccatcactctggggtcgcattggatcgagccgaaccgcagtgagaacaccatggacattttcaagtgtcagcagtccatggtgtcggtgcttggctggtttgcgaacccaatccatggtgatggggattatccggagggaatgcggaaaaagctcttctccgtgcttccgatcttctcggaagctgagaaacacgaaatgcggggaaccgccgacttcttcgccttttcctttggacccaataactttaagccgcttaatacgatggccaaaatgggccagaacgttagcctcaacctccgcgaggcactgaactggatcaaactggaatacaataatcctcgcatccttatcgctgaaaacgggtggttcactgactcaagagtgaaaactgaggatactactgctatttacatgatgaaaaactttctgagtcaagtgctgcaggcaatccggttggacgaaatccgcgttttcgggtacactgcctggtcactgttggatgggtttgagtggcaggatgcgtacactatccggcggggactgttctacgtggactttaactccaagcagaaggagcgcaaaccgaagagctcagcccactactataaacagattattcgcgagaacgggttctccctgaaagagagcaccccggacgtgcaaggacagttcccgtgtgacttcagctggggagtgactgaaagcgtccttaagcctgaatcggtcgcaagctccccgcaattctcggatccacacctgtacgtctggaacgctaccggaaatcggctgctgcacagagtggagggcgtgaggttgaaaacgcgccctgcacaatgcaccgatttcgtcaacattaagaagcagctggaaatgctcgccaggatgaaggtcacccactacagatttgctctggactgggcttcagtgctccctactggcaatctttccgctgtgaataggcaggcgctccgctactaccggtgtgtcgtgtcggagggactcaagctggggatctccgccatggtcactctgtactacccgacccacgcgcatttgggactgccggaaccattgctgcacgcagacgggtggttgaatccttccacggccgaagcctttcaggcgtacgccgggctgtgcttccaagaactgggcgacctggtgaagttgtggatcaccattaacgagcctaataggctctccgacatctacaaccggagcggcaatgatacttacggagccgcccataacctgttggtggcacacgctctggcatggagactctacgatcgccagttcagaccgtcgcagcgtggagccgtctcgctgtcactgcatgctgactgggccgaaccggcaaatccgtacgctgattcgcactggcgcgcggctgagcgctttcttcagttcgaaatcgcctggttcgcggaaccgctgttcaagaccggagactacccagcagcgatgcgcgaatacatcgcatcgaagcatagacggggactctcgtcctccgcacttccacgccttactgaagccgagcgccgcttgctgaaaggtaccgtcgatttttgtgcgctgaaccactttactacgaggtttgtcatgcatgaacaactcgccggaagcaggtatgattcggatcgcgatatccagttcctccaagacatcactagattgagctcccccactcgcctcgctgtgatcccttggggggtgcggaagctgctccgctgggtcagaaggaattacggggacatggatatctacatcacggcatcaggaatcgacgatcaggctctggaggatgacagattgagaaagtactacttgggaaagtacctgcaagaggtgctcaaggcatacctgatcgacaaagttagaatcaagggctactatgctttcaagctcgccgaagaaaagtctaagccgagatttggattcttcacctcagacttcaaggcgaagtcgtcgatccagttttacaataaggtgatctcatcccggggattcccgtttgaaaacagctcgagccggtgctcccagacccaagaaaatactgagtgcaccgtgtgtctgttcctcgtccagaaaaaacccctcatcttccttggatgctgcttcttctcaaccctggtgttgctgctctccatcgccatctttcagcgccagaagcggaggaagttctggaaggcgaagaacctccaacacatccctctgaagaagggcaaacgggttgtctcg

SEQ ID NO: 251837 - DNA, 3132 bp, Artificial Sequence
  derived and/or modified sequence
atgaagcctgggtgtgcagcgggctctcccggtaatgagtggatctttttttcgactgacgaaataacgactcgataccgcaatacgatgtcgaacggaggactgcagcgctcagtaattctgtctgcgcttatattgctgagggcagtgacagggttctctggagacgggagggctatttggtccaaaaatcccaacttcacaccagtgaacgagtcacaactctttttgtatgacacttttcccaagaatttcttctggggcataggtacaggcgctttgcaggttgagggctcttggaagaaagacggaaaagggcccagcatttgggaccacttcattcacacgcatctgaagaacgtgtcatccacgaacggctcatccgattcttacattttccttgagaaggatctgtctgcgctggacttcattggtgtgtctttctaccagttcagcatttcatggccaagactgtttcccgacgggatcgtgactgtcgccaatgcgaagggcctacaatattattctaccctgctagatgcactggtcttgaggaatatcgagcccatcgtgactctctatcactgggacctcccattggctctccaggagaaatacggaggctggaaaaacgataccatcattgatatcttcaatgactatgctacctactgcttccagatgtttggggatcgagtgaaatattggatcaccattcataacccttacctggtggcttggcatgggtacggcacagggatgcatgcccctggcgaaaaggggaacctcgccgcagtatacaccgtgggccataacctgatcaaagcccactctaaggtgtggcacaattacaatacacacttcagaccccatcaaaaagggtggctgtccatcaccctaggttctcactggatagagccgaaccgttctgagaatacaatggatatattcaaatgccagcagtcaatggtgtcagttctcggctggttcgctaatccaatacacggagacggcgattatccagaggggatgcgaaaaaaattgttcagtgttttgcccatattctcggaagctgagaagcacgagatgagaggaacggcggatttcttcgcatttagttttggacctaacaacttcaagcctctgaataccatggcgaaaatgggacagaacgtgtcactgaacctccgtgaagccctgaattggatcaagctggagtacaataatccacgaatactgattgctgaaaatggctggttcactgactctagggtaaagactgaagatactaccgctatctatatgatgaagaacttcctgagccaggttcttcaggccatccggctggacgagattagggtcttcgggtataccgcctggagtttattggatgggttcgagtggcaggatgcttatacgattcggaggggcctcttctacgttgactttaacagtaagcagaaagaacgaaagcctaaatcgtctgcccattattataagcagatcatacgggagaacggctttagtttgaaagagtcaacccccgatgtgcaggggcagttcccatgtgacttctcatggggcgtgacggaaagtgttttgaaacccgagagtgtggcttcctctccccagttttccgacccacatctctacgtctggaacgccaccggtaatcggcttttgcaccgcgtggagggggtccgccttaagaccagacctgcccagtgtaccgactttgtaaatattaagaagcagctggagatgctggctaggatgaaagttactcactaccgcttcgccctcgactgggcatcggtgcttccaaccgggaacctcagcgccgtgaaccggcaggctttgcggtattaccggtgtgttgtgtccgagggcctaaagctcggcatctctgcaatggtgaccttgtactaccccacacacgcccatctgggccttcctgagccactcctccacgccgatggctggcttaacccctccaccgccgaggcctttcaggcttatgccggactgtgcttccaggagttgggtgaccttgtgaagctctggattaccataaacgagccaaatcggctctctgacatttataatcgaagcggaaatgatacttacggcgccgcccataacttactcgttgcccacgccctggcatggcgactatacgatcgtcagtttcggccgagccagagaggagcagtgtctttgagccttcacgccgactgggcagagcctgccaatccctatgctgacagccactggagagctgccgagcggtttctgcagttcgagattgcctggttcgctgagcctctgtttaaaactggcgattatcctgcagccatgcgagagtatatagcctcaaagcatcgcagaggccttagcagcagtgccctgcctcggcttactgaagccgagcgcaggctgttgaaaggcacagtggacttctgtgccttgaatcattttacaacccgctttgtgatgcacgagcagctcgcaggctctcggtatgattcagaccgtgacattcagttcctgcaagacattacacgcttgtcctcgccaacaagattagctgtaattccctggggagtgaggaagttattgaggtgggttcgcagaaattacggagatatggacatttacatcacagcttcagggattgatgatcaggctctggaggacgaccggctaaggaagtactacctcggtaaatatctccaagaggtcctcaaagcatacctcatcgataaggtgcgtattaagggctattacgctttcaaactggctgaagagaagagtaaaccaagattcggcttttttacaagcgacttcaaggcaaagtccagcatccagttttacaacaaagttatttcatcccgaggttttccgtttgaaaatagcagctctcgctgtagccaaacacaggagaataccgaatgcactgtgtgtctgtttctggtgcagaagaaacccctgattttcctggggtgctgctttttttcaacactcgtcttacttctttcaattgcaatcttccagcggcagaaacgccgaaagttctggaaagccaaaaatttacagcacatcccactgaagaaaggcaagagggttgtaagt

SEQ ID NO: 251838 - DNA, 3132 bp, Artificial Sequence
  derived and/or modified sequence
atgaagccaggatgtgcggcaggttctcctggaaacgaatggattttcttttctaccgatgagattaccacgaggtatagaaacactatgtcaaatggtgggcttcaaagatcagtgatacttagcgcactcatccttctcagggccgtgacgggattctccggggacggacgcgcaatatggtcgaagaatccaaactttacgcccgtcaacgaatcgcaactttttctgtacgatacctttcctaagaatttcttctggggtattgggactggagcgcttcaagtggaaggatcctggaaaaaagatggcaagggcccctcgatctgggatcatttcattcacacccaccttaagaacgtcagctcgacgaatggttcatcggattcgtacatatttctggagaaagacctttcagccctggatttcatcggagtgagcttttatcaattttccatttcatggccgcgtttgtttcccgatggtattgttaccgtggcaaacgcaaagggcctccagtactactccacccttttggacgcactcgtgctgcggaacatcgaacctattgtgactctgtaccattgggatcttcctctcgcactccaagagaaatatggcggatggaaaaacgacaccattattgatatcttcaatgattacgctacttactgtttccagatgttcggtgatcgggtgaagtattggattaccatccataatccttaccttgtggcctggcatggttacggcaccggaatgcatgcgcctggagaaaaaggcaacctggctgcagtctacaccgtcggacataatctgattaaagcacactccaaagtgtggcacaattacaatacgcattttagaccccatcaaaaggggtggttgagcatcacccttggatcacattggatagaaccaaacaggtccgagaacactatggacatctttaagtgtcagcagagcatggtgtcggtcctgggatggtttgccaacccaattcacggcgatggggattaccctgaaggtatgagaaagaaactgttctccgtgctgcccattttctcggaagcagaaaagcatgaaatgcggggaactgcagacttcttcgcattctcgtttggaccaaataactttaaaccacttaacaccatggctaagatggggcagaacgtctccctgaacctgagagaagcgctcaactggattaaactcgagtacaacaaccctcgcatcctcattgcagaaaacggatggtttaccgattcgcgggtcaagaccgaagataccactgccatctacatgatgaaaaactttctttcccaagtgctgcaagccatccggctggacgaaattcgggtgttcggttacaccgcgtggtcactgcttgacggtttcgagtggcaagatgcttacaccattcgtcgtggacttttctatgtggactttaactcgaagcagaaggaaagaaagcctaagagctcagcacattactacaagcagataatccgcgaaaacggattttcccttaaggagtccactcctgatgtgcaagggcagttcccatgtgacttctcatggggagtgaccgaatcggtgctgaaaccggaatcggtggcctcatccccacaattttctgacccccatctttacgtatggaacgcaactggaaatcgtctccttcaccgcgtggagggagtgagattgaaaactaggcctgcacagtgtactgattttgtcaacatcaaaaagcaactcgaaatgcttgcacgtatgaaggtgactcactaccgcttcgcgctcgattgggcatcagtgctcccgacggggaacctcagcgccgtgaatcgccaggcgctgcggtactaccgctgcgtggtgtcggaaggtcttaagctgggcatttcagcaatggtcacgctgtactaccctacccatgcccatctggggcttcctgagccccttctgcatgcggacggatggctgaatccgtctaccgcagaggcatttcaagcatacgcaggactctgctttcaggaacttggagatctggtgaagctgtggattaccattaacgaacctaaccggctgagcgacatttacaaccgctcgggaaacgatacctacggagccgcacataatctcctggtggcccatgctcttgcatggagactctacgataggcagttccgcccgagccaaaggggggcagtgagcctgtcgcttcacgcagattgggcagaaccggcaaatccttacgcagacagtcattggagggcagcagaaaggtttttgcaattcgaaattgcgtggttcgcagaaccattgttcaagaccggagactacccagcagctatgcgggaatacattgcaagcaagcaccgccgcggcttgagctcgtcagcactgcctagacttactgaggccgagcggcgcttgctgaaggggactgtcgatttttgcgcattgaaccactttactaccaggtttgtgatgcatgaacaacttgccggatcgcggtacgacagcgatcgcgatattcagttcctgcaggatattactcgcctgtcctcacctactcggctcgcggtgattccttggggtgtgagaaagctccttcgctgggtgcggcggaattacggcgatatggatatctacattactgcctcggggatagatgatcaagccctggaagatgatcgtctgcgcaaatactacttgggtaagtatctgcaggaagtcctgaaagcatatctgattgacaaggtccgaattaaggggtactacgcattcaaacttgcggaggagaagtcgaagcctagatttggtttcttcacctccgatttcaaggctaaatcctccatccagttttacaacaaggtgatttcctcacggggtttcccttttgaaaattcgtcctcccgctgttctcaaacccaagaaaacactgaatgtacggtctgtctttttcttgtgcagaaaaagcctcttatctttctgggatgttgtttcttctccacccttgtcctgctccttagcattgcaatctttcagaggcagaagcgccggaagttctggaaggccaagaacctgcaacatattccgttgaagaaaggtaagcgcgtggtttct

SEQ ID NO: 251839 - DNA, 3132 bp, Artificial Sequence
  derived and/or modified sequence
atgaagccgggatgcgccgcaggctcgccgggaaacgagtggatcttcttcagcacggacgagatcaccacccgttaccgtaacaccatgtcgaatggaggtctgcaacggtcagtgatcttgagcgccctgatcctcctccgcgctgtgacgggcttctctggagatggaagagccatctggtcaaagaacccgaactttaccccagtgaacgaatcacaactgtttctgtacgacacctttccgaagaacttcttctggggaatcggtaccggcgcactccaggttgaaggaagctggaagaaggacggtaaggggccatcgatctgggaccacttcatccacacccacctcaagaacgtgtcctcaaccaacggctcctctgatagctacatttttctcgagaaggatctctcggcgctggatttcatcggggtgtcattttaccaattctctatttcatggccccggctgttcccggacggaatcgtgaccgtggccaatgcgaaagggcttcagtattactccactttgctggatgccctcgtgctgaggaacatcgaaccgatagtgaccctgtatcactgggacctgccgctcgctcttcaagagaaatacggcgggtggaagaatgatacgatcatcgacattttcaatgactacgcaacctactgtttccagatgttcggagacagagttaagtactggattacgatccataacccttaccttgtcgcttggcatggatacggcaccggtatgcatgcaccgggagaaaaaggaaatcttgccgcagtctacaccgttggtcataacctcataaaggctcactccaaggtgtggcacaactataacacccatttccggccgcaccagaaagggtggctgtcgatcactttggggtcccattggatcgaacccaacagatcggagaatactatggatatcttcaagtgccagcagagcatggtgtcagtgttgggatggttcgccaatccgatccacggagacggcgactacccggaagggatgcgcaagaaactgttctcagtgctgcctatattcagcgaagcggaaaaacacgagatgagaggaactgctgatttctttgcgttctcgtttggacccaataactttaaacccctgaatacgatggctaagatggggcaaaatgtctccctgaatctgagagaggccctgaattggatcaagctcgagtacaacaacccaagaatactcatcgcagaaaacggttggttcaccgactcgagagtcaagactgaggacaccactgctatctacatgatgaagaatttcctcagccaggtccttcaagcaatccgcctggacgaaatcagagtgtttggttatacggcctggtccttgctcgatggttttgagtggcaggacgcctacactatccgaaggggactgttctacgtcgacttcaactccaaacagaaagagagaaagccaaaatcatcggcacattactacaagcaaatcattcgggagaacggcttcagccttaaggaatccacccctgatgttcagggacagttcccgtgcgattttagctggggggtgactgagagcgtcctgaaacctgaatcggtggcctcgtcgcctcagttctccgatcctcatctctacgtctggaatgctactggaaaccgcctgctccatcgggtggagggcgtgcggctcaagactagaccagctcaatgcactgattttgtgaacattaagaagcagctggagatgctggcgaggatgaaggtcacgcactatcgctttgccctcgattgggcatcggtgctgccgactgggaacctttcagccgtcaaccgacaagcactgcggtactacaggtgtgttgtgtcggagggcctgaaattgggaatctcggcgatggtcactctctactaccctacccatgcccatctgggactccccgaaccgttgctgcacgcagacggttggcttaacccgtcgaccgctgaggcgtttcaggcctatgccggactctgtttccaagaactgggagacttggttaagctgtggatcactattaacgaaccgaataggctcagcgacatatacaatcgctcaggcaacgacacctacggagcggcgcacaacctgctggtcgcgcacgcgttggcatggcggctgtacgaccgacagtttcgcccgtcccagcggggagccgtgtcgctgtcgcttcatgccgattgggcggaacccgcaaatccctacgcggactcccactggcgggcagccgaacgcttcctccagttcgaaatcgcatggtttgcggaaccccttttcaagactggagattacccggctgcgatgcgcgaatacatcgcatcaaagcaccggcgcggcctctcctccagcgcgctgccacggctcaccgaggccgagcgcagacttctgaaggggaccgtggacttttgcgcgctcaaccacttcaccactcgcttcgtgatgcacgaacaactggccggatccagatacgattcagacagggatattcagtttttgcaagacatcacccgcctgtcctccccaacgcgcctggcagtcatcccctggggcgtccggaagctcctgagatgggtgaggcggaattatggagatatggacatctacatcactgcctcaggtatcgatgaccaggctctggaggacgacaggctgagaaaatactacttgggcaagtaccttcaagaagtgcttaaggcgtacctgatcgataaggtccggatcaagggatactacgccttcaagctcgccgaagaaaaatcgaaaccacgctttggcttcttcacttcggactttaaggccaagtcgagcatccagttctacaacaaagtgatttcatcacgcggattcccattcgagaactcctccagcaggtgctcccaaactcaggaaaacactgagtgcactgtctgccttttcctggtgcagaagaagccactcatcttcctgggctgttgcttcttctcgaccctggtgctgctgttgagcattgctattttccaacggcagaagcgccgaaagttctggaaggctaagaatcttcagcatatccctttgaaaaaaggaaaacgagtggtgtcc

SEQ ID NO: 251840 - DNA, 3132 bp, Artificial Sequence
  derived and/or modified sequence
atgaagccgggatgtgcagccggatcacctggaaatgaatggatattcttttcgacggatgagattacgaccaggtacagaaatacgatgtccaacgggggtctgcaacgctcagtcattctttccgctctcatcttgctgagagctgttaccggattttctggagatggacgggccatttggtcgaaaaacccgaatttcactcctgtgaacgaaagccaactttttctgtatgacaccttcccgaagaatttcttttggggtattggtaccggtgccctgcaagtcgaaggtagctggaagaaagacggtaagggaccatccatctgggaccactttatccatacccatcttaagaacgtgtcatcaacgaacggatcgagcgattcgtacattttcctcgaaaaagatctgtcggcacttgatttcattggagtgtccttttaccagttttcgatctcctggcctaggctctttcccgatggtattgtgaccgtggcaaatgcaaagggtctgcagtactactcgaccctcctcgatgcccttgtcctccgtaacatcgaaccaatagtgactctttaccactgggaccttcctctggcacttcaggaaaagtacggcgggtggaagaatgataccatcattgatatcttcaacgattatgccacctattgcttccagatgtttggagatcgcgtgaagtactggattaccatccataacccgtacctggtggcgtggcatgggtacggtaccggaatgcacgcgccaggcgagaagggaaacctggcagcagtgtacaccgtcggccataacttgataaaagcacattccaaggtgtggcataactacaacactcatttccgcccgcaccagaaaggatggctttcaatcaccctgggttcgcattggattgagccgaatcgttccgagaacacgatggacattttcaagtgtcagcagagcatggtgtcggtgcttggatggttcgccaatcccattcacggcgatggagattaccctgaaggtatgaggaagaagctcttttcggtgctgccaatattctccgaagcagaaaaacacgaaatgagggggacggccgacttttttgcgttcagcttcggaccaaacaacttcaagccccttaatactatggctaaaatgggtcaaaacgtgtcacttaacctgagagaggcacttaattggataaagttggaatacaacaaccccaggattcttattgcagagaacggctggtttactgacagccgagttaagactgaggataccaccgcaatctacatgatgaagaactttctgagccaggtgctgcaggcgatcagactggacgaaatacgggtctttggttataccgcctggtcattgctggatgggtttgaatggcaggacgcgtacactattcgcagagggctcttttacgtcgactttaactctaagcaaaaggaacgtaagcctaagtcctccgcacattactacaagcagattatcagagaaaatggtttctcgctgaaggagagcaccccagatgtccaagggcaattcccatgtgatttcagctggggagtcactgaaagcgttctgaagccggaatccgtcgcatcatcacctcaattttcggacccccatctctacgtgtggaatgcgactggcaataggctgctgcacagagtcgagggagtccgccttaaaacccgccctgcccagtgtactgattttgtgaacattaagaaacagctggaaatgctggccagaatgaaagtcactcactaccgttttgcactggactgggcatcagtgctgcctaccggaaacttgtccgcagtgaatcggcaagcactgcggtactaccgctgcgtcgtctcagaaggactgaagttgggtatctcagcaatggtgaccctgtactaccctacgcatgcacacctcggtctgcctgagccgctgctgcacgcagatggctggctcaatccttccactgcggaggcgtttcaggcatacgcgggactttgctttcaagagctgggagatctggtgaagctctggatcaccatcaatgaacctaatcgcctttctgatatctacaatcgaagcggcaatgacacttacggagccgcccacaacctgctggtggcccatgcacttgcctggcggctgtacgacagacaatttcgcccgtcacagcggggtgcagtgtcacttagcctccatgcagattgggctgagccggccaacccatacgccgactcgcattggcgtgccgcagagaggtttctgcagtttgaaattgcatggttcgccgaaccactcttcaaaactggtgactaccccgcagcaatgcgagagtacattgcctcgaagcaccgacgtgggctcagctcctccgcactgcctaggctgaccgaagcagaacgaaggcttctcaagggaaccgtggatttctgcgcactcaaccattttaccactcgatttgtcatgcatgaacaactggcaggaagccgctacgatagtgatagagacatacagttcctgcaggacattactcgattgtcaagcccaacgagactggcagtgatcccctggggagtgaggaagctcctgcgatgggtccgacgaaactacggggatatggacatctatatcactgcttcagggattgacgatcaggctcttgaagatgatcgtcttagaaagtactacctgggaaagtatctccaggaagtcctgaaggcctacctcatagataaggtgagaattaaggggtactacgcctttaaactcgcagaggaaaaatccaaacctaggttcggcttctttacgtccgatttcaaagcaaagagctcaatccagttttacaataaagtaatttcgtcgcgtggatttccttttgagaactcctcctcgaggtgctcgcagactcaagaaaacactgaatgtaccgtgtgcctttttctggtgcagaagaagcctctgatatttcttggttgctgtttcttctcgactctcgtgctccttctgtcaattgccatttttcaaaggcagaagcggaggaagttctggaaggctaagaacctccaacatattccgctcaaaaagggcaagcgggtcgtgtcg

SEQ ID NO: 251841 - DNA, 3132 bp, Artificial Sequence
  derived and/or modified sequence
atgaagccaggttgtgcggcggggagccccgggaatgaatggatttttttctcaacagatgaaataacaacacggtaccgcaataccatgtccaatgggggcctgcagaggtccgtaatactgagcgcattgattctactgagggcggtgactgggttttcaggcgatgggagggccatttggagcaaaaacccgaatttcacgcctgtcaatgaatctcagcttttcctgtatgatacgtttcccaagaacttcttctggggaattggaaccggcgcgctgcaggtagaagggagttggaaaaaggacgggaaagggccatccatatgggatcactttattcatactcacctgaagaacgtcagctctacaaatgggtcgagtgactcctacatcttcttggagaaagatctaagtgcacttgactttataggcgttagcttctaccagttcagtatatcgtggccccggctgttccctgacggaattgttacagtcgcgaatgctaagggactgcaatactactccactcttctcgatgccctcgttctgaggaacatcgagccgatcgttacgctgtaccattgggacctgccactagccttacaggagaaatatgggggctggaagaatgacaccatcatcgatatttttaacgattacgccacatattgcttccagatgtttggcgacagagtcaagtattggattactatccacaacccttatctggtagcatggcatggttacggaaccggtatgcatgccccgggcgagaagggcaacctggccgccgtgtatactgtcggccacaacctcattaaggcacactccaaagtgtggcataattacaacacacacttcagaccgcaccagaaagggtggctgtccattacccttggaagtcactggatcgagcctaacaggagcgagaatacaatggacatcttcaagtgccagcagagcatggtctcggtgctcgggtggtttgccaacccaattcacggggacggcgactaccctgagggcatgcgcaaaaagctatttagcgtgctccctatcttcagcgaagccgagaagcatgagatgcgggggactgccgacttttttgctttttcttttggtccaaataacttcaaacccttgaatacaatggcgaaaatgggacaaaatgtgtcgcttaatcttagagaagccctgaactggataaaacttgagtacaataacccacgtatcttgatagccgagaacggctggttcaccgattcacgggtgaaaactgaggacaccacggcgatttatatgatgaagaacttcctttctcaggtgctgcaagcaatacgactggacgagattagggtctttggctacacagcctggtccctacttgatggttttgaatggcaagacgcctatactatccggagaggcctgttttatgtggatttcaattcaaagcaaaaagagcgtaaaccaaagtccagcgctcattattataagcagataattagagaaaatggtttctctttaaaagagtctacacctgatgtgcagggccagttcccttgcgactttagttggggagtgaccgagtcagtcctgaaaccggagtctgtcgctagcagtcctcagttctcggatccccatttgtacgtgtggaacgctacagggaatcgactgctgcacagggtagagggagtcagactgaagacccggcctgctcagtgtaccgactttgtaaatattaagaaacagctggagatgctcgccaggatgaaggtgacccactacaggtttgcactggactgggcatcagtgctgccgactgggaatctgtctgctgtcaacagacaggctctgcgctattacaggtgcgtggtgagcgaaggactcaaactggggatctccgcgatggtgactctgtattaccccacccacgctcacctgggcctcccagagccgctcctccacgccgatgggtggctcaacccttctaccgcagaggcgtttcaggcgtatgccgggctgtgtttccaggaacttggtgacctcgtgaagctgtggatcaccatcaatgaacccaacaggctgtccgacatctacaaccgttctggtaatgacacatacggagccgctcataatcttttggtggcacatgccctggcttggaggctgtatgacagacagttccggccttcacagcgtggcgcagtgtctctgagtctgcacgccgactgggcagaacccgctaatccgtacgccgatagccactggagagctgctgagcggtttctccagttcgaaatcgcatggttcgcagaacctctattcaaaactggcgactacccagctgcaatgcgcgaatacatcgcatccaagcaccggcgtggcctgagttcctccgccctcccacgactcaccgaagccgagagacgcttactcaagggcacggtggacttttgtgccttgaatcatttcacaaccagattcgtgatgcacgaacagcttgctgggagccggtatgactctgacagagacatacaatttttacaggatatcacgcgtctcagcagtccaacacggttggcagtcattccatggggtgtccggaagcttcttcggtgggtgaggagaaattacggggatatggatatctatataaccgcttcaggcatcgatgatcaagccttggaggacgacagactgcggaaatattatctgggcaagtacctgcaggaagttcttaaggcctatcttatcgacaaggtgaggattaagggatactacgcattcaaattagctgaggagaaatccaaaccgagatttggattctttacaagtgacttcaaggccaagtcttccattcaattttataacaaagtgattagctcaagaggattcccctttgagaactcctcttctcggtgttcccagacacaggagaataccgaatgcaccgtgtgtctctttttggttcagaagaagcccctgatatttctcggttgctgttttttcagtactctcgtgcttctcttgagcatcgccattttccagaggcaaaagagacggaagttctggaaggcaaaaaatctacaacatatccccctgaaaaaagggaaacgggttgtgagc

SEQ ID NO: 251842 - DNA, 3132 bp, Artificial Sequence
  derived and/or modified sequence
atgaagcccggttgcgcagcgggttcgcctggaaacgaatggatcttcttctcgactgacgagatcaccacgcgctacagaaacactatgtcaaatggcggtttgcagcgctccgtgattctttcggcacttattcttttgagggcagtgaccggttttagtggagacggacgcgcaatctggtccaaaaaccccaatttcacgccagtgaatgaatcacaactctttctttacgacactttccctaaaaacttcttttggggcatcggaaccggagctctgcaggtggaaggctcctggaagaaggacgggaagggccccagcatttgggatcactttatccatacccatcttaagaacgtgtcgagcactaacggatcatccgattcatacatcttcctggagaaggatttgagcgccctcgacttcattggcgtgtcattttaccagttctccattagctggcctcgcctttttccagacgggatagtgactgtggcaaacgccaaggggcttcaatactacagcaccctgctggacgctctcgtgcttagaaatatcgaacctattgtcaccctttatcactgggatctgccacttgcgctccaggaaaagtacggaggttggaagaatgatactatcattgatatcttcaatgattacgcaacttactgttttcaaatgtttggtgatagagtgaagtactggattactatacataacccctatctggtggcatggcacggatacgggaccggaatgcatgcacccggagaaaagggaaaccttgccgccgtttacactgtgggacataacctgatcaaggcacactcaaaggtgtggcataactacaacacccattttagaccccatcagaaaggttggctcagcataactcttggctcccactggattgagccaaataggtcggagaataccatggacattttcaagtgtcagcagtcaatggtgtccgtgcttggttggtttgccaaccctatccatggcgacggtgattatcctgagggaatgcggaaaaagctgttctcggtgcttccaatcttctccgaagcggaaaaacatgagatgagagggactgccgacttttttgcattcagctttggtccaaacaactttaagcccctcaacaccatggctaaaatggggcaaaacgtgtcgctgaatcttagagaggcgcttaactggattaagctcgaatacaataaccctcggatactcatcgcggaaaacggatggttcaccgattccagagtgaaaactgaagataccactgccatatacatgatgaaaaactttctttcccaggtacttcaagcaatcaggttggatgaaatccgggtctttggatacaccgcctggagcctcctggacggttttgagtggcaagatgcatacactattagacgaggcttgttttatgtagactttaactccaaacaaaaggaacgaaaacctaaatccagcgctcattactacaagcagattatccgtgagaacggtttttccctgaaggaatcgactccagatgtgcaaggccagttcccctgtgatttttcctggggagtgaccgaatcagtccttaaaccagaatcggtggcaagcagcccacaatttagcgacccacacctgtacgtctggaacgccactggcaaccggctgcttcatcgcgtggagggagtcagactcaagacccgtccagctcagtgtaccgatttcgtgaacatcaagaaacaactggaaatgttggcacgcatgaaggtgacccattaccggtttgccctggattgggcatcggttctgccaaccggtaatctgtccgcagtgaacagacaagctcttagatactacagatgtgtggtgtccgaaggtcttaaactcggtatttccgcgatggtgaccctgtactaccctacccacgcacatctgggactgcccgaaccacttcttcacgcagatggctggcttaacccttcaaccgcggaagcatttcaagcatacgcagggttgtgttttcaggagctgggggacctggtgaagctgtggattaccatcaatgaacccaaccggctgtcagacatatacaatcgatccggaaatgatacgtacggcgcggcacacaatcttttggtggcacacgcactggcatggcgactgtacgatcgacagtttcgtccttcgcagagaggagcagtctcgctgagcctgcatgcagattgggccgaaccggcaaacccttacgcagattcacattggcgggcggcggagcgtttcctgcagtttgaaattgcgtggtttgcagaaccacttttcaagacgggggattaccctgccgccatgcgtgagtatatagcaagcaagcatcggagagggctgagcagctcagcacttccccgccttactgaagcagaacgtagacttctcaagggtaccgtggatttctgtgcgctgaatcattttaccactcggttcgtgatgcatgagcaacttgcgggatcgcggtacgatagcgacagggatattcaatttcttcaggatattaccaggctttcttcccctacccgcttggcggtgataccttggggagtgcgcaagctgcttcgttgggtgagaaggaattacggagacatggacatatacattactgcctcaggaatcgatgaccaagccctcgaagatgatcggcttcgcaaatactacctgggtaaataccttcaggaagtgctgaaggcctacctcatcgacaaggtgcgtattaagggatactacgcattcaagctggcggaagagaagagcaagcccagatttggttttttcacttccgactttaaggcaaagagctcgattcagttctacaacaaagtgatctcatcacgtggattcccttttgagaacagctcgtccagatgctcccaaactcaagagaatactgaatgtaccgtgtgtttgtttctcgtgcagaagaagcccctgatatttctgggttgttgctttttctcgacgctggtgctgctgctgtccattgctatctttcagcgccagaagcggagaaagttctggaaagcaaagaatcttcaacacattccactgaagaaaggaaagcgcgtcgtgtcc

SEQ ID NO: 251843 - DNA, 3132 bp, Artificial Sequence
  derived and/or modified sequence
atgaagcctggttgcgcagcgggatccccgggaaacgaatggatcttcttctctaccgacgaaataactactcggtaccgcaataccatgtcgaacggtggtttgcagcgtagcgtgatcctcagcgcactgattctcctgcgggccgtcactggcttcagcggcgatggaagagccatctggtccaagaaccctaacttcacccctgtgaatgaatcccagctgttcctgtacgacaccttcccgaagaatttcttctggggaattggtacgggcgcactccaagtggagggaagctggaagaaggacggaaagggaccctcgatttgggaccacttcatccacacccacctcaagaacgtcagctcaaccaatggatcatcggatagctacatctttttggagaaggacctgtcagccctggactttatcggagtctcgttttaccagttctccatctcctggccaaggctctttccggatgggatcgtgaccgtcgcgaatgctaagggcctgcaatactactcgaccctgctggacgccctggtgctgcgcaatatcgagccaatcgtgactctgtaccactgggatcttccactggctctgcaagaaaagtacggaggttggaagaacgacactatcatcgacatcttcaacgactatgctacctactgtttccaaatgtttggggaccgcgtgaagtactggattaccatccacaatccgtacttggtcgcatggcatggatacgggacgggtatgcacgccccgggagaaaagggcaatctggccgctgtttacactgttggccacaacctcatcaaggcacattcgaaggtgtggcataactacaatactcattttagaccccatcagaagggatggctgtcgatcactctcggctcgcactggattgagcctaacaggagcgaaaacaccatggacatcttcaagtgccaacaaagcatggtcagcgtgttgggatggttcgccaatccgatccatggggacggagactaccccgagggtatgagaaagaagctgttctcggtgctgccgatcttttcagaggccgaaaagcacgagatgaggggaaccgcggacttttttgccttctcgttcggacctaacaacttcaagccattgaacaccatggcaaaaatgggccaaaacgtttccctgaacttgagagaggctctcaactggatcaaacttgaatacaacaatccacgcatcctgatcgctgaaaatggctggtttaccgatagcagagtcaaaaccgaggacactactgccatctacatgatgaagaacttcctctcccaggtgctgcaagccatcagactcgatgaaattagagtattcggatacactgcctggagcctgctggacggtttcgaatggcaagacgcctatactattaggcgcggactgttctacgtggacttcaactccaaacaaaaggaacgaaaacctaagtcgagcgcacattactataagcaaatcattcgcgaaaatggattcagcctgaaggagtcaactccagacgtccagggacagtttccttgcgatttcagctggggggtgaccgagtcggtcctcaagccagaatccgtggcgagctcaccacagttttcagaccctcacctgtacgtgtggaacgcgaccgggaaccgcctcctgcacagggtggaaggggtgcggctcaagaccagaccagcccagtgcaccgacttcgtcaacatcaagaagcaattggagatgcttgcgcggatgaaagtcacccactaccgctttgcactggattgggctagcgtgctccccacgggcaatctgtctgcggtgaatcggcaggcgctccgctactacagatgtgtggtatcagaaggcctcaagctgggaatctccgccatggtgaccctgtactaccctactcatgcacatttgggcctgccggagccacttctccacgcagatggatggctcaatccctcaactgccgaggccttccaggcctacgcgggcctttgcttccaggagctgggtgaccttgtcaagctgtggatcactatcaacgagcctaatcgccttagcgatatctataaccggtcgggtaacgacacctacggagcggcgcacaatctgctcgtggcgcatgccctcgcgtggcggctctacgatcggcagttccgcccgtcccagcggggcgccgtgagtctgtctctgcacgccgactgggcagaaccggcaaacccgtacgccgacagtcactggcgggccgcagaacgcttcctgcaattcgaaatcgcctggtttgcggaaccattgtttaagaccggagattacccagccgctatgcgggagtacattgcgtctaagcatagacggggactctcgtcctcagctctccctcgccttaccgaagccgaacgacggctgctcaaaggcacggtggacttctgcgccctgaaccattttacgacccgattcgtgatgcatgagcaacttgccggatcaaggtacgattcggatcgggacatccagtttctccaggatatcaccagactcagctcaccgacgcgccttgccgtcatcccgtggggcgtgcgcaaattgctccgctgggttaggcgtaactacggtgacatggatatctacatcacggccagcggaatagacgatcaggcgctggaggacgatcgcctgcggaagtactacctgggaaagtatctgcaggaggtcctgaaagcgtacttgatcgataaggtccgcatcaagggttattacgcattcaagctggccgaagaaaaaagtaagccacgcttcggattctttacgagcgatttcaaggcaaagtcatcgattcagttttacaacaaagtgattagttcgaggggattcccgttcgaaaattcttcttcacgctgcagccagactcaagaaaacaccgagtgtactgtctgcttgttcctcgtgcagaaaaaacccctgattttcttgggatgttgcttcttttcaactctcgtgctgctcctctcgatagccatcttccagcggcagaaacggagaaagttctggaaagcaaagaatctccagcacatcccgctgaaaaaaggaaaacgggtggtcagc

SEQ ID NO: 251844 - DNA, 3132 bp, Artificial Sequence
  derived and/or modified sequence
atgaaacctggctgcgctgcaggtagtcccggaaatgagtggatattcttttctactgacgagattacaacgagatacagaaacacaatgtcaaacggtggtttacaaagatccgtgattttatccgcactgatactcctgcgggcagtcacagggttcagcggggacgggagagctatctggagtaaaaatccaaactttacacccgtcaacgaaagtcaactcttcctttatgatactttccctaagaacttcttttggggaatcgggacaggggccctgcaggtcgaagggtcctggaaaaaagatggcaaagggccttcaatttgggatcatttcatccacacacatctgaagaacgtgagtagtactaacgggtcgtccgatagctacatctttttggagaaggacttgtccgccctcgatttcatcggcgtgagtttctaccagtttagtatctcttggccaagattattccccgacggcattgtgacggtggcaaacgcgaaaggcctgcaatactactccacattgcttgatgccttggttttgagaaacattgagccaatcgtgacgttataccattgggatttaccacttgctctgcaggagaaatacggaggttggaagaatgacactatcatagatatctttaacgactatgcaacttactgtttccagatgttcggtgatagggtaaagtattggattaccatacacaacccatacttagttgcctggcacggctacggcaccgggatgcacgcccccggcgagaagggaaatttagccgccgtttatacagtgggtcacaacctcattaaggctcattctaaggtgtggcacaactataatacacatttcaggccacaccaaaagggatggttatccatcacattgggctcacattggatcgagcctaataggagcgaaaacacaatggatatttttaagtgccagcagagcatggtaagtgtcctgggctggtttgctaaccctattcatggcgatggcgactatcccgaggggatgagaaagaagcttttcagcgtgttacccatcttcagtgaagctgagaaacatgaaatgcgagggaccgctgatttcttcgctttttcattcggccccaacaactttaaacctctcaacacaatggccaagatgggacagaatgtgtctctgaacctgcgtgaagccttgaactggatcaagctggaatacaacaatccaagaattcttatcgccgaaaacggatggttcacagattctcgagtcaaaacagaagatacgactgccatatatatgatgaaaaacttcctaagtcaggtgctgcaagccattagactggatgaaataagggtttttggatacacagcgtggagcctcttggatggtttcgaatggcaggacgcttatacgatccgaaggggactgttctatgtggatttcaattctaagcaaaaggagcgaaagccaaaaagttccgcccactactacaagcagattatccgtgaaaacgggttttctctgaaggagtccactcctgatgtgcagggccagttcccttgcgacttcagctggggagttactgagtcagtgctgaaacctgaaagtgtggctagtagccctcagttttcagacccccatctgtatgtgtggaatgccactggcaacaggctattgcatagggtggaaggtgtaaggctgaaaaccaggcccgcgcagtgcacagatttcgttaatattaagaaacagctggagatgctcgcaaggatgaaggtaacacactaccgttttgccctcgactgggccagcgtactgccaaccggcaatctctcagcagtgaataggcaagcgctgcgatattaccgatgtgtcgtgtcagaagggctcaaactgggaatcagtgccatggtgactctgtactatcctacgcacgctcaccttggactgcctgagccgctgctgcacgcagacgggtggctgaatccgagtactgctgaggcatttcaagcctatgccggcctgtgctttcaagaattaggcgatctggtaaaattatggatcaccatcaacgagcccaatagactaagtgatatctacaaccgctccggaaatgatacctatggcgcggctcacaatcttctagtcgcccatgctctagcttggagactttacgacaggcagttcagaccaagccaacgaggggcagtcagcctttcccttcacgccgactgggccgagcctgctaacccatatgccgactctcattggcgagcagccgagaggttccttcagttcgaaattgcctggttcgctgagcctctgttcaagaccggtgactatccggccgccatgcgagagtacatagcaagtaaacatcgacgaggcctttcatctagcgccctgccgagattgacagaggctgaacggagactactgaaagggacagtcgatttttgtgccctcaatcactttacaacacgtttcgtcatgcacgaacagctcgccggaagccgatatgacagtgaccgagatatccagttccttcaagacattacccgattatcttcacccacacgactggcggtgatcccatggggcgttcgaaagctcctgcgatgggtgcgcaggaactacggagacatggacatctacataacggcgtccggcatagatgaccaggcactcgaggacgatcgcctcagaaagtattacctaggcaaatatcttcaggaagtgctgaaggcatatctgatcgataaggtgagaatcaagggctattatgcctttaaattggcggaggaaaagagcaagccccgattcggcttctttaccagcgactttaaggccaaaagtagtattcagttctacaataaggtgatatccagtagagggttcccctttgagaattctagcagccggtgctctcagacccaggagaacaccgaatgcaccgtgtgcctatttctggtccagaagaagccactgatttttctcggttgctgtttttttagtaccctggtcctactgctcagcattgccatctttcaacggcagaagaggcgcaagttctggaaggccaaaaacctccaacacattccattgaagaaagggaaaagagtcgttagc

SEQ ID NO: 251845 - DNA, 3132 bp, Artificial Sequence
  derived and/or modified sequence
atgaaacctggatgtgctgcaggaagtcccggcaatgagtggatctttttcagtactgacgagatcacaactcgatatcgaaacacgatgtctaatggaggcctgcaaagatcagtgatcctttccgccctaatcctgctcagggccgtgacgggcttcagcggggacggacgagcgatatggagtaagaatcctaactttactccggtgaacgagagtcagcttttcctgtacgacacctttccaaaaaactttttctggggaattggaacaggggcattacaggttgaagggtcttggaaaaaggatggcaaggggcccagcatctgggaccatttcatacatacgcatctgaagaatgttagctctacaaacggctcctcagacagctacatcttcctggagaaagacctaagcgctctggacttcataggcgtgagtttttatcagttcagtattagttggcctcgtctgtttccagacggaatcgtgactgtggccaacgcgaaaggtctccaatactactctactttgctggatgcccttgtgctgcgcaacatagagccgatcgttacactctatcactgggaccttcccctggccctccaggagaaatacgggggttggaagaatgacacaatcatcgacatcttcaatgattatgccacctattgctttcaaatgttcggggatcgggtcaagtattggattacaatccacaacccttacctggtagcatggcacgggtacggtaccgggatgcacgctcccggtgagaagggcaatctcgccgcagtctacaccgtaggacacaatctaattaaggcgcactctaaagtttggcacaattacaacacacatttccggccccatcaaaaagggtggctgtctattacgctcggatcacactggattgagccgaataggtctgaaaatactatggacattttcaagtgccagcagtctatggtgtccgtgttgggatggttcgcgaatccaatccatggggatggggattatcccgaagggatgcgcaaaaaactgtttagtgtcttgccaatcttctccgaggccgagaaacatgaaatgagaggaacagcagactttttcgccttttcatttggacccaacaatttcaaaccccttaataccatggctaagatgggacagaatgtgtccctgaacctaagagaggctttgaactggataaagctggaatataataatccgcggatactcattgccgaaaacggttggttcaccgactccagagtgaagactgaagacactaccgcgatctacatgatgaagaactttttaagtcaggttctgcaagcgatcagattagacgagatccgtgtgttcggatatactgcttggagtctgctggatggcttcgaatggcaagacgcttacaccattcgccgcgggttgttctatgtggattttaacagcaagcagaaggagcgtaaacccaagagttctgcccactactacaaacaaatcattagagaaaacgggtttagcttgaaggagtctaccccggacgttcagggccaatttccttgtgacttctcatggggggttaccgaatcggtgctgaagcccgagagcgtggcaagttccccacaattctctgatccccatctgtacgtgtggaacgccacgggcaataggctgctgcatcgcgtcgagggtgtcagattgaagactcggccagcccagtgtactgattttgttaatatcaagaaacaactcgaaatgttagcacggatgaaggttacccattatcgctttgcgctcgactgggccagcgtgctaccaaccggaaatctgtccgccgtgaatagacaagcgctgcgctattatagatgcgtcgtatctgaagggctcaaactcgggatttccgcgatggtcacactatactatcccactcatgcccatctagggttgccagagccacttctgcacgcagatggatggctgaatccaagtacagccgaggcgtttcaggcctacgcggggttatgctttcaggagctgggcgacttggtaaagctgtggatcactatcaacgagcccaatagactgagcgatatatataacagaagtggcaacgacacgtacggggcggcgcacaatctgttagtggcccatgctctggcttggcgcttgtatgaccgacagttcaggccctcccagcgcggtgccgtctccctttctctgcacgccgattgggctgagcccgctaatccctatgcggactcacactggagagctgccgagcgatttcttcagtttgagatcgcctggtttgctgagccgctgttcaaaaccggcgactatcctgccgccatgcgcgaatatatagcatctaagcaccggcgcggcctgtcttcaagcgcccttccccgcctcaccgaagcagaaagaagattgctgaaggggaccgtggatttttgtgctttgaaccactttactaccagatttgttatgcacgagcagctggcaggaagtcgctatgattctgatagggatatccagttcttgcaggatattactcgtttgagtagtccgacgcggctagcagtgatcccttggggagttcggaagctgttgaggtgggtgcggcggaattacggagacatggacatttacattaccgcctccgggatcgacgatcaggcccttgaagacgatagattgcggaagtactatctggggaaatatctccaagaagttttaaaagcctatctaattgacaaggtgagaatcaaaggatactacgcctttaagcttgccgaggagaagagcaagcctcgatttggcttttttaccagcgacttcaaagccaaatcctcaatccagttctataataaagtcatatcttctaggggcttccctttcgagaacagttctagtagatgttcccagacccaggaaaacaccgagtgtacagtatgcctgttcctcgtgcaaaaaaaaccccttatctttctcggttgttgtttcttttccactctagtacttctcttgtccatcgccatattccaacggcagaagcgtagaaaattctggaaagctaagaatttgcagcacatccctctcaagaagggaaaaagggtggtgtct

SEQ ID NO: 251846 - DNA, 3132 bp, Artificial Sequence
  derived and/or modified sequence
atgaagcctgggtgtgccgccggctcccccggtaacgagtggatctttttctctaccgatgaaataaccactcgctacagaaacactatgtcgaacgggggactgcagcggagcgttattcttagcgccctgattctgctgcgcgccgtcactggattctcgggagatggcagggcaatatggtcgaagaatccaaatttcaccccagtgaacgaatcacagctgttcttgtacgatactttccccaagaatttcttttggggcatcggtaccggtgcactgcaagtggaaggatcgtggaaaaaggacggtaaagggccttccatatgggatcacttcatccacactcatctcaagaacgtgtcgagcactaacggttcgtcagattcgtacatattccttgaaaaggacctgtcggctttggatttcataggagtgtcgttttatcaatttagcatttcctggccgcggctgtttccagacggtattgtgactgtcgcaaatgcaaaggggctgcagtattactcgaccctgttggacgccctggtgctgcggaatatcgaaccaatcgtgacgctctatcactgggaccttcctctggcattgcaagagaagtacgggggctggaagaatgataccattatcgatatctttaacgattacgcaacctactgttttcagatgttcggggatagagtcaagtattggattactatccataatccctacctcgtggcctggcacggatacggaaccggcatgcatgcaccaggagaaaaaggtaaccttgcagcagtctacactgtcggacataacctgattaaagcccactccaaagtgtggcataactacaacactcattttcgccctcaccagaagggttggttgtcaattacgctgggcagccattggattgaacctaaccggtccgaaaacactatggatatcttcaagtgtcaacaatcaatggtgtcggtcctgggatggtttgcaaatccaatacatggcgacggagactatccggagggtatgcgtaagaagctgttttcagtgctgcctattttcagcgaagcggagaagcatgaaatgagaggtaccgcagactttttcgcattcagctttggacctaataactttaagccgctcaacactatggcgaagatgggacaaaacgtgtcgcttaatctccgtgaagccctcaattggattaaactcgagtacaacaaccctcgaatcctgattgcggaaaatggatggtttaccgattcgcgggtcaagaccgaagatacgactgccatatacatgatgaaaaacttcctgtcccaagtgctgcaggccattcgtcttgatgagatacgggtgttcggttatacggcctggagcttgctcgatggatttgaatggcaggatgcatacaccatacgtcgcgggctgttctacgtggatttcaatagcaagcagaaggagcgtaagccaaagtcgtccgcacactactacaaacagattatcagggaaaatggattttctctgaaggagtccacgccagatgttcaaggccagttcccatgcgacttctcgtggggagtgacggaaagcgtgctgaaacctgaatcagtggcatcgtcaccccagttcagcgacccacatctgtacgtctggaatgctaccggtaacagacttttgcatcgtgtcgaaggagtcagactcaaaactcgacccgcacagtgcaccgacttcgtgaacattaagaagcaactcgagatgcttgcgaggatgaaggtgactcattaccggtttgcacttgattgggcatcagtcctccccaccggtaaccttagcgcagtgaaccgccaggcacttcgatactaccgatgtgtcgtgtctgaggggcttaagctgggaatttcggcaatggtgaccttgtattaccctacccatgcccatcttggactgcccgagcctctccttcatgcagacggttggctcaacccttcaaccgcagaagcattccaagcgtacgcagggctctgttttcaagagctcggtgatcttgttaagctgtggatcactatcaacgaacccaataggttgtcggacatttacaacagatcaggaaacgacacctacggagctgcacacaacctgcttgtggcacacgcactggcatggaggctgtacgacagacagtttcgtcctagccaacggggagcagtttcgttgtcgctgcatgctgattgggcagaacccgccaacccttacgcggattcgcactggagagcggctgaaagatttttgcaattcgaaatcgcatggtttgctgaaccccttttcaaaacgggagactaccccgccgccatgcgggagtacatcgcaagcaagcatcgccggggcctcagctcatcggcgcttccaagactgactgaagctgagcgacgcctgctgaagggaactgtcgacttttgtgccctcaatcacttcaccactcgtttcgtcatgcatgagcaactggccggcagccgctacgattccgatagggacatccagtttctgcaagatatcactaggctgagctcacccacccgcctggccgtgatcccctggggcgtgagaaaacttcttaggtgggtgagaaggaattacggggatatggatatctacataaccgcctctggaatcgacgatcaggcactcgaggatgataggctgagaaaatactacctcggtaaataccttcaagaagtgcttaaggcgtaccttatcgacaaggtccgcataaaaggatactacgcatttaagctggcggaagagaagtcgaagccgagatttggcttctttacttcagactttaaagcaaaaagctcgatccaattctacaacaaggtgatctcgtcgaggggatttccttttgaaaattcctcgtcgcgatgctcccaaactcaagaaaacaccgaatgtaccgtgtgtcttttcctcgtgcagaaaaagccgttgatttttctcggatgctgcttctttagcaccctggtgctcctcctgtccattgcgatttttcaaaggcagaaacgccggaagttttggaaggccaaaaaccttcaacacattccactcaagaaggggaagcgggtggtgagc

SEQ ID NO: 251847 - DNA, 3132 bp, Artificial Sequence
  derived and/or modified sequence
atgaagccaggatgtgcagccggaagccccggcaatgaatggatctttttcagcactgatgaaattactacccgataccgcaacaccatgagcaacggaggattgcaacgttcggtgattctttcggcgctcatattgctgcgagcagttacgggtttttcaggggatggtagggcaatttggtcgaaaaacccgaatttcacgcctgttaacgagagccagctctttctgtacgacacctttcctaaaaactttttctggggaatcggaaccggcgcattgcaggtggaaggatcgtggaaaaaggatggtaaggggccttcgatttgggatcactttatccatacccacctgaagaacgtaagctccacgaatggctcgtccgacagctacatttttctggaaaaagatctgtccgcacttgacttcataggtgtgagcttctatcaatttagtatttcgtggccgcgcctgttccccgacggaattgtgacggtcgcaaatgcaaagggcctgcaatactattcaactcttctcgatgcactggttctccgaaacattgagccaattgtcactctgtaccactgggatctgccattggccctccaagaaaagtatggaggatggaagaacgatacgatcatagacatctttaacgattacgccacctactgtttccagatgtttggagatagagtcaagtactggatcactatacacaacccctacctcgtggcatggcatggatacggaaccggcatgcacgcacccggcgagaagggtaacctcgctgctgtatacaccgtgggacacaatctgattaaagcgcactccaaagtgtggcacaactacaatactcattttcgcccccatcagaagggatggctgtctattactctgggttcccattggatagagccaaatcggtccgagaataccatggacatctttaagtgccagcagtcaatggtatcggtgctgggttggttcgctaaccctattcatggtgatggtgactaccctgaggggatgaggaaaaaacttttttcggtgcttcccattttctcggaagccgaaaaacatgaaatgcgtggtactgcggatttcttcgccttctcctttggtccaaacaactttaagcctctgaatactatggcaaagatggggcagaatgtgtcattgaatctccgggaggccctgaattggataaaactggaatacaataaccctcggattttgatagcagaaaatggttggtttactgatagccgagtaaagacggaggataccaccgccatttacatgatgaagaactttctcagccaggtccttcaggccatacgcctcgatgagatcagggtgttcggctacacggcatggtcgcttcttgatggatttgaatggcaagacgcgtacaccattcgcagaggactgttttacgtcgacttcaactccaagcagaaggagagaaaacctaagagctcggcacactactataagcagatcatcagagaaaacggtttctcccttaaggaatcgacccccgatgtccagggccaatttccttgtgatttctcatggggcgtgactgagagtgtcctgaaaccagaatcagtggcatcttcgccgcaattctccgatccccatctgtacgtgtggaacgctaccggaaacagactgctgcatcgtgtggaaggagtgaggctcaagacccggcccgcacaatgcactgactttgtgaacatcaagaagcaactggagatgttggcccgaatgaaagtgactcattaccggtttgcacttgactgggcgtcggtgctgccaaccggaaacctttccgcagtgaacagacaagcacttaggtattaccgatgtgttgtgtctgaaggtctgaagctggggattagcgcgatggtgaccctctactacccaacgcatgcccatcttgggcttccagagcctctcctgcatgccgatggttggcttaacccttcgaccgcagaagcatttcaagcgtacgctggtctgtgttttcaggaactcggagacttggtcaaactgtggattactatcaacgagcctaacaggctgtcagatatctacaaccgtagcggtaacgatacttacggcgctgcccacaatctgttggtcgctcatgctctcgcatggagactttacgatagacaatttcgcccaagccaacgtggggcagtgtccctctcactccatgccgattgggcagaacctgctaatccttacgcagactcacactggagagctgcagagcggtttcttcagttcgaaatcgcctggttcgcagaacccctctttaagactggtgattacccggcagcaatgcgtgaatacatcgcatccaagcatcgccgaggactgtcgagctcggcgcttccgcgtcttactgaagcggaacgcagacttctgaagggtacggttgatttctgcgcgcttaaccattttaccaccagattcgtgatgcatgagcagctggctgggagtagatacgactccgatcgggatattcagtttctgcaagacattactcgcctctcgtccccaactcgacttgctgtcatcccttggggagtgagaaaacttctcaggtgggtgcggcggaactatggtgatatggacatatacattaccgcatccggaatcgacgaccaagcactcgaagatgatcggcttagaaaatactacctgggcaagtacctgcaagaggtcctgaaagcgtaccttattgataaggtgagaataaagggctactacgcattcaagctcgccgaagaaaagtcgaagccaaggttcgggttctttaccagcgactttaaggcaaagtcgtcaattcagttctacaacaaggtcatttccagccgaggatttccgtttgaaaattcgtcctccagatgttcgcaaacccaagagaataccgaatgcactgtgtgtctgtttctcgtccagaagaagccgctcatctttcttggctgttgcttcttttcaacccttgtcctcttgctgtcaatcgcaatctttcaacgccaaaaacgccggaagttttggaaggcaaaaaaccttcagcacatcccccttaagaagggaaagcgcgtggtgtcg

SEQ ID NO: 251848 - DNA, 3132 bp, Artificial Sequence
  derived and/or modified sequence
atgaaacccggatgcgcagcaggttcgccagggaatgagtggatttttttctcgacagatgagattacaacgcgctaccgcaatacgatgagcaatggcgggctccaacgttctgtgattctctcagcactcatcctccttcgtgcagttacaggattctcgggcgacggccgtgccatatggtctaagaacccgaattttacaccagtcaatgaaagccagttgttcctatatgatacattccccaagaacttcttttgggggattgggacaggagcccttcaagttgagggctcgtggaagaaggatggcaagggaccctctatatgggatcattttattcatactcacttgaaaaacgtctcatctactaacggtagttcggacagttacatatttctcgagaaagatctttcagcgctcgattttattggagtgagcttctaccagttcagtatctcgtggcctcggctctttcccgatgggatcgtaacggtagccaatgctaaaggcttgcagtattactccactcttttagacgcactcgtattgcggaacattgagcctatcgtgaccctctaccattgggatttgcctctggcattacaagagaagtatggcggctggaaaaacgataccatcattgatatcttcaacgattacgcgacctactgttttcagatgttcggcgacagagtcaagtactggatcacgattcacaatccctatctcgttgcttggcatgggtacggcactgggatgcacgctcctggtgaaaagggtaatctcgctgctgtgtacacggtgggccacaaccttatcaaggctcactcgaaggtctggcataactataacacacacttccggcctcatcagaaaggttggttgtcaattactctcggcagccactggatcgagccgaaccgctccgaaaacactatggatattttcaaatgccaacaatcaatggtatctgtgcttggctggttcgctaaccccattcacggcgatggtgactatcctgaaggaatgaggaagaagttgttttccgtattgccgatcttctccgaagcagaaaaacatgagatgcgcggaaccgctgacttcttcgctttcagttttggccccaacaacttcaaaccccttaacaccatggcgaagatgggccagaacgtctccctaaacttgcgagaagccctgaactggatcaagttagagtataataatcctagaattttgatcgcagaaaatggttggtttactgattcccgtgttaagacagaagatacgactgcgatatatatgatgaaaaactttcttagccaggtattgcaagcgatccgactcgatgagattcgggtattcggatacactgcatggagccttctggacggctttgagtggcaggacgcttatacaattcgacgcggacttttctatgtggactttaactccaagcagaaggaaaggaagcccaagtcatccgctcactattacaaacagatcattagggagaacggcttctccctgaaggagtcgactcccgatgtccaaggtcaatttccctgtgatttctcatggggagtgaccgaatccgtcttgaagccagagtccgtggccagcagccctcagttctcggacccacacctgtacgtctggaatgctacgggtaaccgtctcctccatagagtcgaaggcgttcgattgaaaacccgaccggctcagtgcaccgacttcgtaaacatcaagaagcaactagagatgctagccagaatgaaagtaacgcattatcggttcgctttggattgggcaagtgtccttccgaccggaaacttgtctgctgttaatcggcaagctctacgttactaccgatgtgttgtttctgaaggtcttaagctcggcatcagcgcgatggttaccttgtactatcctactcacgcacatctcgggcttccggaacctctgttgcatgcagatggctggctgaatccttctactgcggaggcgttccaggcttacgcaggcctttgttttcaagagctcggggatctcgtaaagttgtggattacaatcaacgagccaaacagattgtcagatatttataatcggtcgggcaatgatacctacggtgccgcacataatttattggtcgcccacgctcttgcctggcgattatacgaccgccaattccgtcccagtcagcgcggtgctgtctctctgagcttacacgccgattgggccgagcctgccaacccttatgccgatagccattggcgggccgctgaaagattcttgcagttcgaaattgcctggttcgcagaaccgttattcaaaaccggagattatccggccgcaatgcgggagtatatcgccagcaagcatcggcgagggctgtcgagctcagcgctgccacggcttaccgaagctgaacggcggctgctgaagggtaccgttgacttctgcgcacttaatcattttacaactcgttttgtcatgcacgagcaacttgcaggtagtcgatatgatagcgatagggatatccaatttttacaggatatcacccgcctgtcctcgcccactagacttgcagtcatcccatggggggtgagaaagttgcttcgctgggttcgacgtaactatggtgacatggatatatacattacggccagtggtatcgacgaccaggcgctggaagatgatcgcctcaggaagtactacctcggaaagtatctccaagaggtgctgaaggcatatctcattgacaaagtgaggatcaaggggtattacgcctttaagctcgccgaagagaaaagcaagcctagattcggttttttcacgtctgactttaaggctaagagctccattcagttctacaataaggtcatttcctctcgtgggttcccgtttgaaaacagcagcagtcgttgtagtcagactcaagagaacactgaatgcacagtttgtctctttttagtccagaaaaagccactaatatttctaggttgctgcttctttagcacgcttgtcttattgctctcgatcgctatcttccagcgacaaaagcgtcgcaagttctggaaggcgaaaaacttacaacatattccgttaaagaagggcaaacgggtggtaagt

SEQ ID NO: 251849 - DNA, 3132 bp, Artificial Sequence
  derived and/or modified sequence
atgaaaccgggctgcgcagcaggaagcccgggaaacgaatggatctttttctctaccgatgagatcaccaccaggtaccgcaacaccatgagcaacgggggtctgcaacggtccgtgattctgtccgcgctgatcctgctcagggcggtgacggggttctcgggagacgggcgcgcgatctggtcgaaaaacccgaacttcactccagtcaacgaaagccaactgttcctgtacgacaccttccctaagaacttcttctgggggatcggaactggagccctgcaagtcgaaggatcgtggaagaaggacggaaaagggccgtccatctgggaccatttcattcacactcatctgaagaacgtgtcgtccaccaacggatcgtccgattcatatatcttcctggagaaggatctctcagccctcgactttatcggcgtgtcgttttaccaattctcaatcagctggccgcggctgtttccggacggaatcgtgactgtggcgaacgccaagggcctgcagtactactcaacccttctggatgctctggtgctgcggaacattgaacctatagtcaccctctaccattgggacctccctttggctctgcaggagaagtacggaggatggaaaaacgataccatcatcgatatctttaacgactacgcgacgtactgctttcagatgtttggggatcgggtgaaatactggatcaccattcacaacccttacctggtggcctggcacggctacggcactggaatgcatgctcctggagagaagggaaacctggcagctgtgtacaccgtgggccacaatctgatcaaagctcactcgaaggtgtggcacaactacaatactcacttcagaccccaccaaaaggggtggttgtccatcaccctgggctcgcattggatcgaaccgaaccggtccgagaatactatggatatcttcaaatgtcaacaaagcatggtgtccgtgctcggctggtttgcaaatcccatccatggagacggtgattaccccgaagggatgcgcaagaagctgttttcggtgctgccgatcttctcggaggcggagaagcatgaaatgcggggtactgccgacttctttgccttttcattcgggccgaacaatttcaaaccgctgaacactatggctaagatgggtcaaaacgtgtccctgaacctgagggaagctctcaactggatcaagctcgaatacaataatccgcgcatcctgatcgccgaaaatggctggttcaccgactcacgagtgaaaactgaagataccaccgccatctacatgatgaagaatttcctctcccaggtgctgcaggctatcagacttgatgaaatccgggtgttcggctacactgcatggagcctgctcgacggattcgagtggcaagacgcgtacaccatccgcagaggacttttctacgtcgacttcaacagcaagcagaaagaaaggaagccaaagtcctcggcgcactactacaaacagattatccgggaaaacggattctcactcaaagaatcgactccggatgtgcaaggacagttcccgtgcgatttctcctggggagtcactgaaagcgtgcttaagcctgagtccgtggcttcctccccacagttctcggatccgcacctgtacgtgtggaacgcaactggtaacagactgcttcatagagtggaaggagtgcggctcaagacccgcccagcccagtgcacggattttgtcaatatcaagaagcaactggaaatgctcgcaaggatgaaggtgacccactacaggttcgccctggattgggccagcgtcctccccactggaaacctctctgccgtgaaccgacaggcactccgctactaccgctgcgtggtgtcagaaggactgaaactgggcatctccgcgatggtgactctctactaccctactcatgcccatcttggtctgccagagccattgctgcacgccgatgggtggcttaatccctcaaccgccgaggccttccaggcttatgccggcctctgcttccaggagctcggggatctggtgaagctgtggattacgatcaacgagccaaatagactctcggacatctacaaccgctccggcaatgacacctacggggccgcgcacaatttgctggtcgcccacgctctcgcctggcggctctacgatcgccaattccgcccttcgcagagaggtgcggtttcactgtcattgcatgcagattgggcagagccggcaaacccgtatgcggactcccattggcgcgctgccgaacgctttctccagtttgagatcgcctggttcgcggaaccgctgttcaagaccggggactatccggcagctatgcgggagtacatcgcatcgaagcatcggcgcgggctttcctcgagcgcgctgcctaggctcactgaggcagagcggaggctcctgaagggtactgtggacttctgtgcgttgaaccacttcactaccagattcgtcatgcacgaacaattggcggggtcacggtacgactccgatagagatatccaattccttcaggacatcacccggctcagctcgccgactcggctcgcagtcattccttggggggtccgcaagctgctgaggtgggtccgcagaaactacggagacatggacatctacatcactgcttcaggcatcgacgaccaggcactggaagatgatcggctgaggaagtactacttggggaagtaccttcaggaggtgctgaaagcctacctgatcgacaaggtgcgcattaagggttactacgctttcaagctggcggaggagaagtcgaagcctagattcggtttctttacctcagatttcaaggcgaaatccagcatccagttctacaacaaagtgatcagctccagggggttcccgtttgagaattcatcatcccggtgcagccaaactcaggaaaacactgaatgcacggtgtgcctgttccttgtgcaaaagaaaccgctgattttcctgggatgctgcttcttctcaactctggtgttgctgctgtcgattgcaatcttccaacggcagaagcgccggaagttctggaaagccaagaacctgcaacatatccctctcaagaagggaaaacgcgtggtgtct

SEQ ID NO: 251850 - DNA, 3132 bp, Artificial Sequence
  derived and/or modified sequence
atgaaaccgggttgtgcagcgggctcgcccggcaatgagtggatcttcttcagtacggacgaaattactacccgctatcggaataccatgagcaatggagggctgcagagatccgtgatcttgagcgccctcatcctgctccgggctgtcaccggattctcgggcgacggaagggccatctggtccaagaaccctaacttcaccccggtaaacgagtcacaattgttcctgtacgacacgtttccgaaaaacttcttctggggaatcggcaccggagcgttgcaggtcgagggttcgtggaagaaagatgggaaggggccgtccatctgggaccacttcattcacactcatctcaagaacgtctcgtcgacgaacggttccagcgacagctacatcttcctggaaaaggacctgtcggcactggacttcatcggcgtctctttctaccagttctccatcagctggccaaggctcttccctgacggaatcgtgaccgtggcaaacgcaaagggactgcaatactactcgaccctcctggatgccctggtactccgcaacattgaaccaatcgtcaccctgtaccactgggatctcccactcgcgctgcaggagaagtacgggggatggaagaacgatacgattatcgatatcttcaacgactacgctacttattgtttccagatgtttggggacagagtgaagtattggattactatccacaacccttacctcgtcgcatggcatggctacggcacgggcatgcatgctcccggcgagaagggtaacctcgcagctgtctacactgtcgggcataacctgatcaaggcgcacagcaaagtgtggcataactacaacacccacttcagaccacaccaaaaaggctggctgtccataacgctgggatcgcactggatagagccgaacagatctgagaacaccatggatatcttcaaatgccagcagtcgatggtgtccgtgttgggctggtttgcaaatccgatccacggagatggcgattacccggagggaatgagaaagaagctgttcagcgtgctcccgatcttctcggaagccgaaaaacacgaaatgcgcggcactgccgactttttcgcattttcattcggaccaaataacttcaagccgctgaataccatggccaagatgggtcaaaatgtgtcgctgaaccttcgggaggccctgaactggatcaaactggaatacaacaacccaagaatcctgatcgcggagaacggctggtttaccgactcgagagtcaagacggaggacactactgctatctacatgatgaagaatttcttgtcgcaggtgctgcaagcgatccgcctggacgaaatcagagtgttcggatacactgcttggtcgttgctggatggattcgaatggcaagatgcctacactattcgccgggggctcttctatgtggatttcaattccaagcagaaagaaagaaagccaaaatcctccgcacactactacaagcaaatcatcagggagaacgggttcagcctgaaggagtccaccccagacgtgcagggacagttcccgtgcgatttctcatggggagtgactgagtcggttcttaagcctgagtcggtggcttcctcaccgcagttttcagaccctcacttgtacgtctggaatgccaccgggaatcggctgctgcatagagtcgaaggtgtccgtctgaaaacccggccggcccagtgtactgactttgttaacatcaagaaacaactggaaatgctggcccgaatgaaggtcacccactaccgattcgccctggattgggcttcggtgctcccaactgggaatctctcagctgtgaaccgccaggccctccgctactaccgctgcgttgtgtccgagggactgaagttgggcatctccgctatggtgactctgtactacccgactcacgcacatttgggactgccagagccgctgctgcacgccgacggttggctgaacccctcgaccgctgaagcattccaggcatacgcgggactgtgttttcaagaactcggggacctcgtgaagctgtggatcactatcaatgagccgaaccgcctctccgacatctacaaccggtcgggaaatgatacttacggtgccgcgcataacttgttggtggcgcacgccctggcgtggagactgtatgatcgccagtttagaccgtctcagcggggagccgtgtccctgtcactccatgccgactgggcagagcccgcgaacccatacgccgactcccattggcgcgccgccgagagattcctgcaattcgaaatcgcgtggttcgccgaaccgctcttcaagaccggagactaccccgccgccatgcgggaatacatcgcctcgaagcatcggcgcggactctcatcgtcggccctgccaagattgaccgaggcggaacggagactgcttaaaggtaccgtcgatttttgtgccctgaatcacttcactactcggttcgtgatgcacgagcagcttgcaggatcgagatacgattccgacagagatattcagtttctgcaggatatcacgcgcttgtcctctcccacccgcctcgcggtgatcccgtggggagtcaggaagctgctgagatgggtgagacgtaattacggagatatggacatttacataacggcctcaggaattgatgaccaggcgcttgaagatgataggcttcggaagtactacctgggaaaatacctgcaagaagtgcttaaggcgtacctgattgacaaagtgcggatcaaggggtactatgcctttaaacttgcggaagaaaagagcaagcctcggttcgggtttttcacgagcgacttcaaagcaaagtcatccatccagttttacaacaaggtgattagctcaagaggattcccgtttgaaaattcctcgtcccgctgttcgcagacccaggaaaacaccgaatgcaccgtgtgtctgtttctggtgcaaaagaagccgctgatctttctgggttgctgcttcttctcgactctggttcttctgctcagcatcgcgatcttccagaggcaaaagcgcagaaagttctggaaagccaaaaacttgcagcacatccctctcaagaaaggcaagcgtgtggtttcc

SEQ ID NO: 251851 - DNA, 3132 bp, Artificial Sequence
  derived and/or modified sequence
atgaaaccaggctgcgcagctggctctcccggcaacgaatggatcttctttagcacggatgaaatcactactcgttatcgcaacaccatgtccaacggagggctgcagagatcagtgatactatctgccttaatcctcctgcgcgctgtaaccggcttcagcggcgatggcagggctatttggagtaaaaaccccaatttcacaccggtaaatgagtcccagctcttcctgtacgatacgttcccgaagaacttcttctgggggattggtactggcgcgctccaagtcgaaggcagttggaagaaagacggtaaaggcccatctatatgggatcatttcatccacacacatctaaaaaatgtgagttctacaaatggcagttccgattcttacatcttcctggaaaaggatctgtcggccctggactttatcggcgtctctttctatcagttttcaattagctggcctaggctattccctgacggaatcgtgacagttgccaatgccaaagggcttcaatactactctactcttttagacgcgctcgtgcttagaaacattgaaccaatcgtgactctctaccactgggatctgccactcgcattacaagaaaaatacggcggatggaaaaacgacaccatcattgacatcttcaatgattacgcaacctactgttttcagatgttcggagacagagtgaagtactggataactatccataatccttatttggtcgcttggcacggctatggaactgggatgcatgcccccggcgagaagggcaacctcgcagccgtctacaccgtgggtcataatctgatcaaagctcactcaaaggtgtggcataactataacacccacttccggccccaccagaagggctggctttccatcactttaggcagtcattggattgagccaaatcgttccgagaacaccatggatattttcaaatgccaacaatccatggtttccgtcctgggttggtttgccaacccaatccatggcgacggtgactatccggaagggatgcgaaagaaactgttttccgtgctacccattttctccgaggctgagaaacatgagatgcgcggaacggccgatttttttgctttctctttcggacctaacaatttcaagcccctgaacaccatggccaaaatgggccaaaacgtgtcactcaatttgcgagaagctctcaattggatcaaattagagtacaataaccccagaatactaatcgccgagaatggatggttcacagattctagagtcaagactgaggacactacagcgatctatatgatgaagaatttcttatcacaagtcctgcaggccattaggctcgatgagataagggtctttggatatactgcctggagtctgctcgacgggtttgaatggcaggatgcctatacaattagacgcggcctcttttatgtcgatttcaattctaaacaaaaggagaggaaaccaaaatctagtgcccattattataagcagatcatcagggaaaatggtttcagccttaaagagtccacaccggatgtgcagggccagttcccgtgcgattttagctggggcgtgactgaaagcgtgctgaagccggaatccgttgcctcaagcccacagttctctgatccacacctgtacgtgtggaacgctactggcaaccgcctgctccacagagttgagggggtaaggctgaagactcgtccagctcaatgcactgacttcgttaacataaaaaagcaacttgagatgctggcccgcatgaaggttacacattatcgattcgcccttgattgggcatccgtccttcccaccgggaatttgtcagcagtgaaccgtcaggctctccgttactatcgatgtgtcgtgtcggagggattaaagctcgggatctctgcaatggtcacactatattacccaactcatgctcatttaggcttacctgaaccacttcttcatgcagatggatggctgaatccttcaactgccgaagcgtttcaggcctacgccgggttgtgctttcaagaattgggtgatctggtgaagctatggatcacaatcaacgagcccaaccgactgtctgacatatataatcgcagtggcaacgacacctatggcgctgcccataacctgctggtggcacacgccctggcctggagactgtatgacagacagttccgaccgagtcagaggggtgcagtgagcctatcgttacatgccgactgggccgaaccagcgaatccatatgccgactctcattggagagccgcagagcgatttcttcaattcgaaattgcgtggttcgctgagccactgtttaagacaggcgattacccagcagcaatgagggaatatatcgcaagcaaacatcgacgcggattgtcctcaagcgccctgccccggctgactgaagctgagcggagattgctgaaaggcaccgtcgacttctgcgccctgaaccactttacaactagatttgttatgcatgaacagctcgcgggcagtagatatgactccgaccgcgatattcagtttttgcaggatatcacacggctgtcttctccaaccagactggccgttatcccgtggggggtgcgcaagttattgaggtgggtaagacggaattatggcgatatggacatatacatcacagcctcaggcatagacgaccaggcgctggaagatgacagactcagaaaatactacctcggaaagtacctgcaagaggttttgaaagcctatctgatcgacaaagtgcgcatcaagggctattatgcgttcaagctggcagaagagaaatccaaacctaggttcggcttcttcacgtctgatttcaaagcaaagagctccatccagttctacaacaaggtcatctccagccgcggttttcccttcgaaaatagcagttcaaggtgcagccagacccaagaaaacacagagtgtacagtctgcttattcctggtgcagaaaaagcccctgatattcctcgggtgctgtttcttctccaccctggtgctgctcctgtctatcgctatattccaaaggcaaaagaggcgcaaattctggaaagctaagaacctccagcacattccattgaagaaaggcaagcgagtggtcagt

SEQ ID NO: 251852 - DNA, 3132 bp, Artificial Sequence
  derived and/or modified sequence
atgaaacccggctgcgctgccgggagccccggcaacgagtggatttttttctccacggatgaaataactactcggtaccgcaatacgatgtccaatggtggcctgcagcggagcgtgattctgagtgcccttatactgttaagggccgtcactggatttagcggagacgggcgtgccatttggtcgaagaaccctaacttcacgccagttaacgagtcacagttgttcctatatgatacctttcccaagaatttcttctggggcattggaaccggggccttgcaggtagaggggagttggaagaaggatgggaagggtccgagtatatgggaccactttattcatacccacttgaaaaacgtcagctccacaaatggatccagtgactcttacattttcctggaaaaagatctgtccgccctagacttcatcggcgtctccttctaccagttttcgatttcttggccccggttgttcccagatgggatcgtgacagttgccaatgcaaaaggcctccagtactattctaccctgctcgatgctcttgttcttcgcaacattgagcctatcgttaccctataccattgggacctccctttagctttgcaggagaagtacgggggatggaagaatgatactattatagacatatttaacgattacgccacttattgttttcagatgttcggagaccgagtgaaatactggatcaccatccataatccctaccttgtggcttggcatggttacggtaccggtatgcatgcccccggggagaaggggaacctcgccgccgtgtacactgtggggcacaaccttataaaggcccactccaaggtgtggcataattacaatactcactttcgaccacatcagaaaggctggctttcgatcacgctgggcagccactggattgagccaaaccggtctgagaataccatggatatctttaagtgtcagcaaagtatggtgagcgtactgggctggttcgccaaccccatccacggggacggagactaccccgaaggaatgcgcaaaaagttgttctctgtgctccctattttctcagaggctgaaaagcacgaaatgagaggaacagcggacttttttgcgtttagtttcggcccgaataactttaaaccccttaacactatggctaaaatgggacaaaacgtctcactgaatctgcgcgaggccctgaactggatcaagctggaatacaataacccccggatcctaattgccgagaatggctggtttactgattctcgggtgaaaactgaggatacgaccgccatttacatgatgaagaacttcctctcccaggtcctgcaagctatcagactagatgagattagggtgttcggctataccgcctggagccttttagacggattcgaatggcaagacgcctacacaatacgacgcgggttattctacgtcgacttcaacagtaagcagaaggaaaggaaacccaaatccagcgcccactactacaagcagatcatcagagagaacggattttccctaaaagaatcaactccagacgtgcaaggacagtttccgtgcgacttctcatggggcgtcactgagtctgttctcaagccagagtccgtcgcctctagcccacagttctccgaccctcacctgtacgtgtggaacgctactggcaatagactgctgcacagagtggagggcgtccggctgaagacgaggcctgctcaatgtaccgacttcgtgaacattaagaagcagttggaaatgttggcacggatgaaggtcacacattaccgctttgccctggattgggcttcagtgctccccacagggaatctctcagctgttaatagacaagctctacgctactaccgctgcgtggtgtccgaagggcttaaacttgggatttccgccatggtgacgctgtattatccaacacacgcccacctgggcctcccagagcccttgctgcatgcggacgggtggttgaacccgagcacggccgaggcctttcaggcatacgcgggtctctgctttcaggagttgggagacttagttaagctctggatcaccattaatgagcccaataggctgagtgatatctataatcgttctggcaacgatacatatggcgccgcacataacctgctcgtggcccacgccctagcctggcggctttatgacaggcagttcagaccatcacagaggggtgctgtttcgcttagcctccatgcagattgggctgagcccgcaaatccatatgctgattcccactggcgcgcagccgagcgctttctgcaatttgagatcgcctggttcgctgagcctctctttaaaaccggcgactacccagcggctatgagggaatatatagcctctaagcaccgcagaggtctaagcagttccgctctaccccgcctgactgaagcggagagacggttgctgaagggcacagtggatttttgcgcactcaaccactttaccactagatttgtgatgcatgagcagctggccggaagccggtacgatagcgaccgcgacatacagtttttgcaagacattaccaggctgagtagccccactcgtctagccgtgatcccttggggcgtccggaaactgctcaggtgggtacggcgcaactatggcgatatggatatctatatcaccgccagcggaattgatgaccaggccctggaagatgaccgattgcgcaagtattacctggggaaataccttcaggaagtgctgaaggcatacctgatcgacaaggtccggattaaaggatactatgcttttaagctggctgaggaaaaatctaaacccaggttcggcttcttcacctccgacttcaaggcaaagagctcaatccagttttataataaagtcatctcctcgcgcgggttcccctttgaaaacagctccagcaggtgcagccaaacacaggagaataccgagtgcactgtctgccttttcctggttcagaaaaagcctctgatcttcttaggatgttgcttcttttctaccctcgtcctgctgctgtctatcgccattttccagcgccaaaaaaggagaaaattttggaaagccaagaatctacaacatatacccctaaaaaaggggaaacgagtagtgtcc

SEQ ID NO: 251853 - DNA, 3132 bp, Artificial Sequence
  derived and/or modified sequence
atgaagcccggatgcgcagctggaagccctggtaacgaatggatcttcttcagcactgacgaaataaccaccagatatagaaacacgatgagcaacggaggcctgcaaaggtcagtcatacttagcgcgcttattctcctgagggctgttactgggttctcgggagacggtagggcgatttggtcgaagaaccctaactttacccctgtcaatgaatcgcagctcttcctctatgacacgttccctaaaaacttcttttggggaatcgggaccggagcacttcaggtggaaggatcgtggaagaaggatgggaaaggcccatcgatctgggaccacttcatccacactcatctcaagaacgtgtcatcgaccaacggttcttccgattcatacatctttcttgaaaaggatctctccgccctcgatttcatcggtgtgtccttttatcagttttccatttcgtggcctagactgtttcccgacggtattgtgacggtggctaatgcaaagggtctgcaatactactctactctccttgacgccctggtcctcagaaacatagaaccgatagtgacgctgtaccattgggaccttccactggcacttcaagagaagtacggaggttggaagaacgatacgattattgacatattcaacgattacgctacttactgttttcaaatgtttggcgatcgcgtgaaatactggatcaccatccataatccttatctcgtagcatggcatggttacggaactggcatgcatgcgcctggcgaaaagggaaaccttgcggcagtctacaccgtcggacacaacctcataaaggcccactccaaggtctggcacaattacaacacgcattttcgccctcatcaaaaggggtggctttcaattaccctcggttcgcactggattgaacccaatcgttcagagaacaccatggacattttcaaatgtcagcagtcgatggtttcggttctgggctggtttgccaacccaattcacggggacggagactaccctgaaggtatgagaaaaaagctctttagcgtattgcctattttctccgaagcagaaaaacacgaaatgcggggaaccgcggactttttcgccttttcgtttggtccgaacaatttcaagccgctgaacaccatggcaaagatgggtcagaatgtgtcgctgaatctgcgcgaggcactgaactggataaagctggagtataacaatcctaggatactgattgccgagaacggatggtttactgattcaagagtgaaaaccgaagataccactgccatttacatgatgaagaattttctttcacaggtcctgcaagcaatcaggcttgatgagattcgcgtgtttgggtacaccgcctggagccttttggatggatttgaatggcaagatgcttacactatcagacgggggcttttctacgtggactttaactcaaagcaaaaggaaagaaagcccaagtcctcggcgcactactacaagcaaatcattcgtgaaaatggttttagcctgaaggagagtactccagatgtgcaaggccagtttccgtgtgatttttcgtggggggtgactgaatcagtgctgaaaccagaatccgttgcgtcgtcgccacagtttagtgatccccacctgtacgtgtggaacgcaaccggcaaccggctcctgcatcgtgtggaaggagtgagactcaagacccgcccagcacaatgtaccgattttgtcaacatcaagaagcagctggaaatgcttgcacggatgaaagtgacccattacagattcgcactggactgggctagcgtgttgcctaccggaaatctctctgcggtgaaccgtcaggcgctgagatactaccgctgtgtggtgagcgaagggcttaagctgggtatctccgcaatggtgactctgtactacccgactcatgcacatcttggcctgccagagcctcttttgcatgccgatggttggctgaatccaagcactgctgaagcgttccaggcatacgcaggactctgttttcaagaactgggcgacctcgtgaagttgtggattaccatcaacgagcctaataggctgtccgacatttacaatcgatcgggaaacgatacctacggagcagcccacaacctgctggtggcacatgcactcgcatggaggctttatgatcgccaattccggccatcccagagaggagcagtgtccctctcattgcacgcagattgggcggaacctgcaaacccctacgccgactcacactggcgtgcagcagaacgttttctgcaatttgaaattgcctggttcgcggaacccctgtttaagaccggtgattaccccgcagcaatgagggaatacatcgcgtctaaacatcgacggggtctttcctcttcggcactcccgagactgactgaagccgaacgacgtttgctgaaggggactgtggacttctgcgcactgaaccacttcaccactaggtttgtgatgcatgaacaactcgctggatctcgctacgattcagacagagacatacagttcctgcaagatattactcgtctttcatccccgactcgactggcagtcatcccatggggtgtgcgcaaacttcttcgctgggtccgccgcaattatggagacatggacatttacatcactgcttccgggattgatgatcaggcacttgaggacgaccggcttagaaagtattacctcgggaagtacctccaagaggtgctgaaagcatacttgattgacaaagtgcgaatcaagggttactacgcctttaagctcgcagaggaaaagtccaaaccacggtttggctttttcacgtccgatttcaaagcaaagtcctcgatccagttctacaataaggtaatatcatcccggggtttcccctttgagaattcatcgtcgcgctgtagccaaacccaggaaaacaccgagtgcacggtgtgcctgtttctcgttcagaagaaaccacttatctttctgggatgttgctttttctccactttggtgctcctgctctcgattgcgatattccaaagacaaaaaagacggaagttttggaaggccaagaacctgcagcatattccactgaaaaagggaaaacgcgtcgtgagc

SEQ ID NO: 251854 - DNA, 3132 bp, Artificial Sequence
  derived and/or modified sequence
atgaagcccggatgcgcagcaggcagccctggaaatgagtggatatttttctctacagatgaaataaccactcgatatcgcaacacaatgtctaatggggggcttcagcgctctgtcattctgtctgctctgatcctgctgcgggccgtcaccggtttcagcggggatgggcgagccatatggtcaaagaacccaaattttacacctgtcaatgaatctcagctcttcctttatgatactttcccaaagaacttcttctggggaatagggacgggcgccctgcaggtcgagggctcctggaaaaaagacggaaaagggccatcgatttgggatcacttcatccatacacacctcaagaacgtttcctctaccaatggcagttccgacagctatatttttctcgagaaagacctgtccgccctcgactttattggtgtgagtttttatcagtttagtattagttggccccgactcttcccggatggtatagtgaccgtcgctaacgcaaagggactgcagtactactccactctgctcgatgctctagtgctgagaaacatcgagcccatagtcactctttatcactgggatcttcccctggcgctgcaggagaaatacggtggttggaagaatgacacgattatcgatatttttaatgactacgccacttattgctttcagatgtttggtgacagggttaaatactggatcaccattcacaatccctacttggtggcgtggcatgggtacgggactggcatgcacgcaccaggtgagaagggcaacttggccgctgtttacacggtcgggcataacctaattaaagcacactccaaggtttggcataactataatactcattttagaccccaccagaagggatggttgagcataacccttgggagccactggattgagccgaaccgcagtgagaacacaatggatatcttcaaatgccagcagtccatggtatctgttctaggttggttcgctaaccccattcacggagatggcgactatcccgagggaatgagaaagaaactgttttctgttctcccaattttttccgaagcagagaagcacgagatgagggggaccgctgatttcttcgccttcagcttcggtcctaacaatttcaagcccttgaacacaatggctaagatggggcaaaatgtgagtctgaatctgagagaggctttaaactggatcaagctggagtataacaacccaagaatactgatcgctgaaaacgggtggttcactgatagtcgtgtaaagaccgaggacactaccgccatctatatgatgaaaaactttctgtctcaggtattgcaggcaattcgcctagatgagatccgggtgttcggctacacagcttggagcctgctggatggatttgaatggcaggatgcgtataccatccggcgcgggcttttctacgtggattttaattccaagcagaaggagcgcaagcccaagagctcggcccattattacaagcagataatccgggagaacggcttttcactgaaggagagcaccccagatgtccagggtcagttcccctgcgacttctcctggggcgtgacagaaagtgttctgaaaccggagagtgtcgcctcgagcccccagttctccgatccccacctgtatgtgtggaacgctactgggaatcgccttctgcaccgcgtggagggagtcaggttgaagactcggcctgcacagtgtaccgacttcgtaaatatcaagaagcaactggaaatgctggcccggatgaaagtcacccactacaggttcgccctggactgggctagcgtactgccaacagggaacctcagtgctgtgaacaggcaggcgctgcgctactacaggtgtgttgtaagcgaggggcttaaactagggatttccgcaatggtgactctatactatccaactcacgctcaccttggcttacctgagccactgcttcatgctgatggatggctcaatccgagtaccgctgaggccttccaggcctatgccggcctttgctttcaggagctgggggatctcgtgaagctatggattactattaacgagcctaacaggctgagtgacatctacaacaggagcgggaacgatacttatggtgccgcacataacctgctagtggcacacgcgttggcttggcgtctctacgataggcagttcaggccctcgcagagaggcgccgtgagtctgtccctgcacgcagactgggccgagccagccaacccttacgccgattctcactggcgggcggctgagaggtttttgcaattcgagattgcgtggtttgctgagcccctgttcaagaccggcgattaccccgccgcgatgagagagtatatcgccagcaaacaccgcaggggcctgtctagctccgctctgcctaggctcaccgaggccgaacgccgtctcctgaaaggcaccgtagacttttgcgccctcaaccactttacaaccagattcgtcatgcatgaacaattggcaggttctcgatacgacagcgatagagacattcaattcctgcaggacataactcgcctgagttctccaactagactcgcggtgattccctggggcgtaaggaagttgctgaggtgggtgcggagaaactatggtgacatggatatttacataacggcaagcggcatagatgatcaggcgctggaagatgatcgactgcggaagtattatctcggcaagtatctgcaggaagtcctgaaagcctatctgatagacaaagtccggattaaaggatactacgcctttaaactcgcagaagagaagagcaaacctcggttcgggttcttcacctccgattttaaggctaagagtagtatacagttctataataaggtgatctcatccaggggatttccctttgagaattcgagttctagatgtagccagacccaggaaaataccgaatgtaccgtgtgtctcttcctggtccaaaaaaagcccctgatattcctgggttgctgttttttttctactctggtgctgctactcagcatcgccatctttcaaagacagaagcgacggaagttttggaaggcgaagaacctgcagcacatcccgctcaaaaagggcaaaagggttgtgagc

SEQ ID NO: 251855 - DNA, 3132 bp, Artificial Sequence
  derived and/or modified sequence
atgaaacctggctgtgccgctggtagccctggcaatgaatggatattctttagcaccgacgaaattaccactcgatacaggaatactatgtctaacggtggtttgcagcgctcagtgatcctgagcgcacttattctgctgcgggcggtgaccggattctcgggagatgggagagcaatctggtcaaagaacccaaactttaccccggtgaacgagtcgcaactgttcctttacgacactttccctaagaatttcttttggggcatcggcacgggtgctctgcaagtggaaggatcctggaagaaggacgggaagggaccttcgatatgggatcatttcattcatacccaccttaagaacgtgtcgagcactaacggatcgtcagattcgtacatttttcttgaaaaggatctgtccgcacttgatttcatcggtgtctcgttttaccagtttagtataagctggcctagactgtttcctgatgggattgtgactgtggcaaacgcgaaggggctccagtactattcgaccctgctcgatgccctggtgttgaggaacattgaacccatcgtcactctctaccattgggatctgccattggcccttcaggagaaatacggaggatggaagaatgataccatcattgacattttcaatgattacgcaacttattgtttccaaatgtttggagatcgtgtcaagtattggatcaccattcataatccctaccttgtggcgtggcacggctacggtactgggatgcatgctccaggggaaaagggaaatctggcagcagtttacactgtgggacataatctgataaaggcgcattccaaggtttggcataactacaacacccattttaggccacatcaaaagggctggctgagcattaccctcggatcccactggattgaaccaaacaggtcggagaacactatggatatctttaagtgtcaacagtctatggtttcggtgctcggatggtttgccaatcctatccatggtgatggggactacccagaagggatgcgcaagaaacttttttcagtgctgcctatcttttcagaggcagaaaaacacgaaatgcggggcactgccgacttttttgcgttcagctttgggcccaacaatttcaaaccactgaataccatggcgaagatgggacagaatgtgtcactcaacctgagggaggcactgaactggattaagctggaatacaataatccccgaatcttgatcgctgaaaatggctggttcactgattcacgtgtaaagactgaggacactaccgccatttacatgatgaagaacttcctttcccaagtcttgcaagccatacgactggacgagattagagtgttcggatacacggcgtggtcacttctggatggttttgagtggcaggatgcatacactattcgccgcggactgttctatgtggactttaactccaagcaaaaggagcgcaaaccaaagtcatcagcacactactataagcagattattcgcgaaaacgggttctccctcaaagagagcacgccagatgtgcaggggcaatttccctgcgacttttcatggggagtgaccgaatccgtcctgaagcccgaatctgttgcatcatcgcctcaattttctgatccccatctctacgtgtggaatgccactgggaaccggcttctgcatagagtggagggtgtgcgtcttaagactagacccgcacagtgtaccgactttgtgaacataaagaagcagctggagatgctggcgagaatgaaggtgacgcactaccgcttcgcacttgattgggcatcagtgctgcccaccgggaacctgtcagcagtgaaccgccaggcactgagatactaccgttgcgtagtctcagagggattgaaactcgggatttcagcaatggtgaccctgtactaccccactcatgcacatctgggccttccagaacctcttctgcatgcggatggatggctgaacccgtccacggctgaggcctttcaggcctacgcaggcctgtgttttcaggaacttggcgacctcgtgaaactttggataaccattaacgaacccaacaggctctccgatatctataatcgctcagggaatgacacttatggagcggcacacaacttgctggtggctcacgcacttgcatggcgactttacgaccggcagttccggccttcgcaacgtggagcagtgagcctgagcctccatgcagactgggcagaaccagccaacccttacgcagactcacattggcgggcagcggaacgcttcctccagtttgaaattgcatggtttgcagaaccccttttcaagaccggtgactaccctgcagcaatgcgtgaatacatcgcgtccaaacatagaagaggacttagcagctccgccttgcctagactgaccgaagcggaacgcagactcctgaaaggaactgtggatttttgcgcccttaaccatttcactaccaggttcgttatgcatgaacagcttgcggggagcagatacgattcggatcgggatatccagtttcttcaggatattactagactctcgtcgcctactcgccttgcagtgatcccttggggggtgcggaagctcctgcgctgggtccgccgaaactatggtgatatggacatctacataaccgccagcggtattgatgaccaagcactggaggacgatagattgcggaagtactacctgggaaagtatctgcaagaagtcctgaaagcatacctgatcgacaaggtgcgtattaagggttactacgcatttaagctggcggaggaaaagtcaaaacctcggtttggttttttcaccagcgactttaaagcaaagtcgtcgatccagttttacaataaggtcatttccagccgcggttttccctttgagaactcgtcgtcccggtgttcacaaactcaagaaaataccgagtgcaccgtgtgtctgtttcttgtccaaaagaagcctctgatctttctcggatgttgctttttctccacgctggtccttctgctttcgatcgccatatttcaacgccaaaagagaaggaaattctggaaagccaagaatcttcaacacatcccattgaagaaagggaagagagtcgttagc

SEQ ID NO: 251856 - DNA, 3132 bp, Artificial Sequence
  derived and/or modified sequence
atgaagccgggttgcgccgcagggagcccggggaacgagtggatctttttctcgaccgacgagattaccaccagataccgcaataccatgtccaatggaggattgcaacggagcgtcatcctgtcagcgcttattctgctccgcgcagtgactggcttctcgggagatgggcgcgcgatctggtccaagaatcccaacttcacccccgtgaatgagagccagctgttcctctacgatacctttccgaagaactttttctggggcatcggaacgggggccttgcaggtggaggggtcgtggaagaaggacgggaaaggcccatcgatttgggaccacttcatccacactcatctgaagaacgtgtcatcaactaacggaagtagcgattcatacatcttcctcgaaaaggatttgagcgccctggacttcattggagtgtccttttaccagttttccatctcgtggccacgcctgtttccagatggcatcgtgactgtcgccaatgctaagggcctccagtactacagcaccctcttggacgcccttgtgctgcggaacatcgaacccattgttactctttaccactgggacctgccgctggccttgcaagagaaatacgggggatggaaaaatgatactatcatagacatcttcaacgattacgctacctactgcttccaaatgtttggagatagagtgaagtattggatcaccatccacaatccgtacctggtggcctggcatggctacgggactggaatgcacgcgcccggcgagaagggaaacctcgcggcggtgtatacggttggacacaatctgatcaaggcccattcaaaagtgtggcacaactataacactcacttcagaccgcatcaaaaaggctggctctccatcacccttggctcacattggatcgagcccaacagatccgaaaacaccatggatatcttcaagtgccaacagagcatggtgtccgtgctgggatggttcgccaacccgatccatggagacggagactaccctgaaggcatgaggaagaagctgttcagcgtccttccgatcttctctgaggccgaaaagcacgagatgcggggcaccgctgatttctttgcattttcgtttggaccgaataactttaagccgctgaacactatggctaaaatgggtcagaatgtctcgcttaacctgcgcgaggcactgaactggattaagctggaatacaacaaccctcggatcctgatcgctgagaatggatggtttactgactcgcgcgttaagaccgaggacacgaccgccatctatatgatgaagaatttcctgagccaggtgctgcaggcaatacggcttgatgaaatccgcgtctttggatacactgcctggtcgctccttgatggattcgaatggcaggatgcatacaccatcaggagaggactgttctatgtggactttaactcgaagcaaaaggagcggaaaccgaaatcctcagcccactactacaagcaaatcatccgagagaacgggttcagcctcaaggaatcgactccggatgtgcaaggacagttcccatgcgacttctcctggggggtgactgagtcggtgctgaagccagaatcagtggcatccagccctcagttctccgatccacatctgtacgtctggaacgccaccggaaacagactgctgcaccgggtggagggagtgagactgaaaacccggccggcgcaatgcacggacttcgtgaacatcaagaagcaactcgagatgcttgctcgcatgaaagtcacccattacaggttcgcactggactgggcttcggtgctgccgactggcaacctctccgccgtgaatcggcaggcgcttagatactaccgctgtgttgtgtcggaggggctgaaactgggaatcagcgccatggttaccttgtactaccccacccacgcacacctgggattgcctgaacctctgctccatgccgacggatggcttaacccttcgactgctgaagccttccaagcatatgctgggttgtgctttcaagagctgggcgacctcgtgaaactctggatcacgatcaatgaaccgaatcgattgtcggacatctacaatagatcggggaatgacacttatggagccgcccacaacctcctggtggcgcatgcgctggcctggaggctgtatgacaggcaattccggccgtcacagcggggagcagtgtcactgagcctgcacgccgactgggcggagccggccaatccatacgctgactcccactggcgcgcagcggagagattccttcagtttgagatcgcttggttcgcagagccgctgttcaaaacgggcgactacccggctgcgatgagggagtacattgcctcgaagcaccgccgaggcctctcctcctccgctctcccacggctgactgaggctgagagacgcctgctcaagggaactgtggatttctgcgcactgaaccactttaccactcgcttcgtcatgcacgagcagctggctggaagccgatacgactctgatagagacatccagttcctgcaggacatcactcggttgtcctcgccaactcgcctcgcggtgatcccgtggggcgtgagaaagctgttgcgttgggtgcggaggaactacggtgatatggacatttacatcactgcctcaggaatcgatgatcaagctctcgaagatgaccgcctgcggaagtactacctcggaaagtacctgcaggaggtgttgaaggcttatctgatcgacaaggtcaggatcaagggatactacgccttcaaactggccgaagaaaagagcaagccgcgattcggatttttcaccagcgactttaaggctaaatcctcgattcagttctacaataaggtgatcagcagccgcggcttccctttcgaaaactcgtcgtcgcgctgctctcaaactcaagagaacactgaatgcactgtctgcctgttcctcgtgcagaagaagccactgatcttcctgggctgttgcttcttctcgaccctggtgttgctgctgtcgatcgcgatcttccagcggcagaagagacggaagttctggaaggctaagaatctgcagcacatccctctgaagaagggcaagagggtggtgtcg

SEQ ID NO: 251857 - DNA, 3132 bp, Artificial Sequence
  derived and/or modified sequence
atgaagcccggttgcgcagctggtagtcctggcaatgaatggattttttttagtactgacgagatcacaaccaggtacagaaatactatgagcaacggtggactgcaaaggtcagtaatcctcagtgctctgatccttcttcgcgcagtcaccggcttcagcggagatggccgcgcaatttggagcaagaatcccaatttcacccctgttaacgaaagccagcttttcttgtacgatacattccccaaaaacttcttctggggtatcggaaccggtgccctccaagtggaaggttcatggaagaaggacggtaagggcccttcaatctgggatcatttcatccacacacaccttaagaacgtatcttccactaacggtagctctgattcttacattttccttgagaaggatctgagcgcactggacttcatcggagtttccttctatcagttcagtatctcttggccccgcctgttccctgacggtatcgtgaccgtggcaaatgccaaaggcctgcaatattactctactctgttggacgctctcgtgttgcgcaacatcgaacctattgtgaccctgtatcactgggacctgcctctggccctgcaagaaaaatacggcggctggaaaaacgacacaattattgacatcttcaacgactacgctacttactgcttccagatgtttggagatcgtgtgaaatactggatcaccatccataacccttaccttgtggcttggcatggctatggaacaggcatgcatgcccctggagagaaaggcaacctcgcagctgtctacactgttggtcacaatttgatcaaagcccacagtaaggtctggcataattacaatactcacttcagacctcaccagaaaggttggcttagcattacactgggcagccactggattgaacctaatcgtagtgagaacactatggacatctttaagtgccagcagagtatggttagcgtcctgggttggtttgccaaccctattcacggagacggtgactatcctgagggcatgaggaagaaattgttctccgtcctgcctattttctcagaagccgagaagcacgagatgcgtggtacagccgatttctttgcttttagcttcggacctaacaattttaaaccccttaacactatggccaagatgggacaaaacgtctccttgaatctcagagaggccttgaattggatcaagctggagtataacaatccccgcattttgatcgcagagaacggatggttcaccgactccagagtcaagacagaagacacaactgccatatatatgatgaaaaatttcttgagtcaggtactgcaagccatccgccttgacgaaattagggtattcggatatactgcatggtccctgctggacggttttgagtggcaggacgcttacaccatcaggcgtggcttgttttacgtcgactttaactccaagcagaaagaaaggaaacccaagtccagcgcccactattacaaacagatcattagggagaacggtttctctctcaaggagtcaacaccagatgtgcagggccagttcccttgcgactttagctggggagtgaccgagtccgtgctgaaacccgagtccgttgcctcatctcctcaattttctgatccccatctttacgtctggaacgccactggtaaccgtctgttgcacagggtggagggcgtaagattgaagactagacctgcacaatgtacagactttgtcaatatcaagaaacagctcgaaatgctcgctcgcatgaaggtcactcactacaggttcgccttggattgggcctctgttctccctactggtaaccttagcgctgtaaacaggcaggccctccgttattaccgctgcgtggtctcagaaggcctgaagctgggcatctctgccatggtgacactgtactatccaacacatgctcacctcggactgcctgagcctcttttgcatgctgatggctggctgaatccttctaccgctgaagctttccaagcctatgctggtctgtgcttccaggagctcggtgatcttgttaagctctggattaccatcaatgagccaaacaggctgtccgacatctataaccgcagcggtaacgacacttacggtgcagcccataatctgttggttgctcatgcacttgcatggcgtttgtatgaccgccagttcaggcccagccagaggggcgccgtatccttgtctttgcacgctgattgggccgagccagctaacccctacgccgactcccactggcgcgctgccgagcgtttcctccaattcgagatcgcatggttcgctgagcccttgtttaagacaggtgactatcctgcagccatgagggaatacatagcttccaagcacaggcgtggcctttcatcttctgctcttccaagactcaccgaggctgaacgtcgccttctgaagggtacagtggatttttgcgccctgaaccatttcaccacaagatttgtgatgcatgagcagctcgctggatctcgttatgacagcgatagagacatccagttcctgcaagatatcaccagactctcctctcccactcgcttggctgtgatcccttggggcgttaggaagttgctccgctgggtcaggcgtaactatggtgatatggatatatacataaccgcctcaggtatcgatgaccaagccctggaggatgacaggctgcgtaaatactacttgggtaaatacctccaagaggtgttgaaggcctatctcattgacaaggtgaggataaagggctactacgcattcaagttggccgaggagaagagcaagcctaggttcggcttttttacctcagacttcaaagcaaagtcatccatccagttctataacaaggtgatctccagtaggggattccccttcgaaaacagctcttctcgttgctcacaaacccaggaaaacacagagtgtactgtatgtctctttcttgtgcaaaagaagcctctcatcttcttgggctgttgcttcttctctacactggtcctcctcctctccatcgctatttttcagcgtcaaaagcgtcgcaagttctggaaggcaaagaaccttcagcacatccctctgaagaaaggaaaacgtgtggtcagc

SEQ ID NO: 251858 - DNA, 3132 bp, Artificial Sequence
  derived and/or modified sequence
atgaagcctggatgcgctgcggggagccccggtaatgagtggatatttttttcgaccgacgagataacaacaaggtaccggaataccatgtccaatggaggcctgcagcgttccgtgatcctttcggccctgattctgctccgagcggttactggcttctcaggtgacgggcgcgccatttggagcaagaacccaaatttcactccggtcaacgagtcacagctgttcctgtatgacaccttcccgaagaattttttctggggcattggcacgggagccctgcaagtggagggcagttggaagaaagacggcaagggccccagtatatgggaccatttcatccacacacatctcaagaatgtgtcctcaaccaacggttcgagcgactcttacatattccttgagaaggacctgtcagccctggactttatcggcgtgagtttctatcaatttagcatctcgtggccgcgactgtttccggatggcatagtgaccgtcgccaatgcgaagggccttcagtattactcgaccctgcttgacgcactggttctgcgcaacatcgagccaatcgtgacgttgtatcattgggatctgcctctggccttgcaggagaaatacggagggtggaagaacgacacgattattgatatatttaacgattacgctacttattgttttcagatgtttggggatcgggttaagtactggattacgattcacaacccgtaccttgtcgcctggcacggttacggcacgggaatgcatgccccaggggagaaaggcaacttagcggcggtttacaccgtcgggcacaacctcattaaagcacatagcaaggtgtggcacaactacaacacccattttaggccgcaccagaaggggtggctttccataactttgggttcccactggattgagccaaatcgatctgagaacacgatggacatcttcaagtgtcaacaatccatggtgagcgttctgggttggtttgccaaccctatccatggagatggcgattacccagaggggatgcgtaagaagctgttctctgtactccccatcttctccgaggctgagaagcatgagatgagggggacagccgatttttttgcatttagtttcggaccaaacaatttcaagcctctcaatacaatggcgaagatgggccagaatgtctctctgaacctccgcgaggcactgaattggataaagctggagtacaacaacccccgaatattgatagctgagaacggctggtttaccgatagccgggtgaaaaccgaggatacgaccgccatctacatgatgaagaatttcctgtcccaagtactgcaggccattcgcctggatgaaattagggtgttcggatatacggcctggtcgctactcgacggctttgagtggcaggatgcatacacgatccggcgtggactgttttatgtggatttcaatagtaagcaaaaagagcggaagcccaaatcttcagcccattactacaagcagataatcagagagaacggtttctcccttaaggagagcaccccagatgtccaaggtcagttcccctgtgatttttcgtggggggtgactgagtccgtgttgaagcccgagagcgtcgcgtcaagtcctcaattttccgatccacatctgtacgtgtggaacgcgaccggcaatcgactgctgcatcgagtggaaggggtgaggcttaagacgcgtccagcgcagtgcacagatttcgtcaacatcaagaagcaactcgagatgctggccaggatgaaagtcacccactaccgctttgcacttgactgggcctctgtcctgcccacaggtaacttaagcgccgtcaatcgccaagcactgcgctactaccgttgcgtcgtaagtgaaggcttgaagctaggaattagcgcgatggtcacattgtactatcccactcacgctcatttgggcttgcccgagccactgctgcatgccgacggttggctgaacccgagtactgccgaggcgtttcaggcctacgctggcttgtgcttccaagagctgggagacctcgtgaaattgtggataactatcaacgagccaaatcgcctgtcagacatatacaacaggtcaggaaacgacacgtatggagctgctcacaacttacttgtggcccatgccttggcctggcgcctgtacgacaggcagttccgcccctcgcaacgcggagcagtaagtttgtccctgcacgctgattgggcggaaccggccaacccatatgccgattcgcactggcgggccgccgagcggttcctccagttcgagattgcgtggttcgcagagcccctattcaagacaggagattatccagcagctatgcgcgagtacatcgcatccaaacaccgtagaggcctgtcgagttcggcactaccgagactgaccgaggcggagcggcgtctgttgaagggcacggttgatttttgtgccctgaatcattttactacaaggtttgtgatgcatgagcagctggcaggcagtcgctatgatagtgaccgcgacatccagttcctccaggacatcacgcgactgagctcgcctacgaggctggccgtgattccctggggcgtccgtaagttgctgcggtgggtgcgtcggaattatggcgacatggatatttacatcaccgcctctggcatcgatgatcaggccctcgaagacgatcgtctccggaaatactatctgggaaagtacctacaggaggtgttaaaagcctacctgatcgacaaagttcgaatcaaaggttactacgccttcaagctggccgaagagaagtcgaagcctcgctttggcttcttcacttccgactttaaggcgaaaagcagcatccaattctataacaaggtgatctcctcgcgaggcttcccgtttgagaactcatcctcgcggtgctcgcagacacaagagaacaccgagtgcacggtgtgcctgtttctggtccaaaagaagcccctgatcttcttgggctgctgcttttttagcacgctagtgttgctcctatctatcgcaatctttcaacgacagaagcggagaaaattctggaaagccaagaatctgcagcacatcccgctcaagaaaggcaaaagggtggtctcg

SEQ ID NO: 251859 - DNA, 3132 bp, Artificial Sequence
  derived and/or modified sequence
atgaagccgggatgcgcggccggatcaccaggcaacgaatggatattcttctctacagacgaaattaccacccgatatcggaatacaatgagtaacggcgggctccagcgctctgtcatcctgagcgctctgatcctgctcagagccgttacagggttcagcggcgacggccgagctatctggagcaaaaaccccaacttcacccccgttaacgaaagccagttgtttctgtatgacacattccccaagaacttcttttggggcattgggactggtgcactacaggtcgaaggcagctggaagaaggacggaaagggcccttcaatctgggatcatttcattcatactcacctgaagaatgtttcttccaccaacggatcctcagattcatacatattccttgagaaagacttatcagctttagactttattggggtcagtttctaccagttcagcatttcttggccacgcctcttcccagatggaatcgtgacagtggccaacgcaaaggggctccaatactactctactttactggatgccctggttttgcgcaatatagagccgattgtgactctgtaccattgggatctgcccttagcactgcaggaaaagtatggtgggtggaagaacgacacgatcatcgatattttcaatgactatgccacttattgtttccagatgttcggcgatcgggtaaagtactggatcaccatccacaatccatatctggtggcatggcacggctacggcaccggcatgcacgcacccggcgaaaagggaaacctggccgccgtgtatacagtagggcataacctgataaaggcgcacagcaaggtctggcataattataacacacactttcggcctcaccagaagggttggctttctatcaccctgggctctcactggatagagcccaataggtcagaaaatactatggacatctttaagtgccagcagagcatggtcagtgtactgggctggttcgcaaatccaattcacggtgatggggactacccggaaggtatgcgtaagaagctcttttcagtgctgcctattttttcagaggccgagaaacacgagatgcgaggaaccgcagatttctttgctttttcatttggccctaataactttaagccgcttaacactatggccaaaatgggacagaacgtgtctttgaatctgcgtgaagctctaaactggattaaactagaatacaacaacccgcggatacttatcgctgagaacggatggttcactgactccagagtcaaaactgaagacaccacagcaatctatatgatgaagaacttcctctctcaggtcctgcaagcaatccggctggacgagatccgcgtgtttgggtacacagcatggtcacttctggacggctttgaatggcaggacgcctatactatacgacgagggctattttacgtggattttaactctaaacagaaagagagaaaaccgaagtcttccgcccactattacaaacaaattatcagggagaatggattcagtctcaaggaatccaccccagacgtacagggccaattcccctgcgatttttcctggggagtcaccgaaagcgtattgaagcctgagtcagtcgcctcatcaccgcagttctctgatccacacctgtatgtatggaacgcaacgggaaatcggctactccatagagtggagggcgtgcgcttgaagacacggccggctcagtgtacggattttgttaatattaagaaacagctggaaatgctggcgagaatgaaggtgacccactatcgctttgccctcgactgggccagtgtcctccccacaggtaacctgagtgccgtcaatcggcaggcactgcggtactataggtgcgtagttagcgaaggcctgaagctaggtatcagcgccatggtaaccctgtactatcccacccatgcccatctgggactgcctgaaccgcttctccacgcagatggctggctcaatcctagcactgcagaagcatttcaggcatatgcaggcctgtgcttccaggaactaggcgatctggttaagctttggattacgatcaacgaacctaaccgcctgtctgacatctacaatcggagcggcaacgatacttatggagcagctcataacctgctcgtcgcacatgcactcgcttggcggttgtacgataggcaatttagaccatcgcagcgcggcgctgtgagtttaagcctccatgcagactgggccgagccagctaacccgtatgccgattcccactggcgcgctgctgaaaggttccttcagttcgagatcgcctggtttgcggaacctctgtttaaaaccggcgattaccccgcagctatgcgggaatatattgcctccaaacaccggagaggactaagtagttcagcactgcccaggctcacagaggcggaacgacgtcttctgaagggaactgtggatttctgtgctctgaaccacttcaccacccgcttcgtcatgcatgaacagctggctgggagcagatatgactctgacagagacatacagtttctgcaagacatcacccgacttagctcaccaaccaggctagctgttatcccatggggcgtgcgcaagctcctgaggtgggttcgcagaaattacggcgacatggacatctacatcactgcatccggaatcgacgatcaggccctggaagatgacaggcttcggaagtactatctgggtaaatacctgcaggaggtcttgaaagcgtaccttattgacaaagttagaatcaaggggtactatgcgtttaagcttgccgaggagaagagcaaaccgagatttggattttttaccagtgattttaaggcaaagtcgtccattcagttctataacaaggtgatcagttctcgaggcttcccttttgagaacagctctagtaggtgctcccaaacccaagagaacaccgagtgcaccgtgtgtctgttcctcgtccagaagaagcctctgatcttcctgggttgctgcttcttttccacacttgtgctgctcttgtcaattgctatctttcagagacagaaacgccgaaagttctggaaggcaaaaaacctgcagcacattcctttgaagaaggggaaacgagtggtttcc

SEQ ID NO: 251860 - DNA, 3132 bp, Artificial Sequence
  derived and/or modified sequence
atgaagcctggatgcgctgcgggctcaccgggcaacgaatggatcttcttctcgacggacgaaatcaccacgcggtaccgcaacactatgtcgaacggcggactgcagcgctcagtgatcctttcggctttgatcctgctgagagcggtgactggtttcagcggagacgggagagccatctggtccaagaaccccaactttacccccgtaaacgaatcgcaactcttcctgtacgacacctttccaaagaacttcttctggggaatcggaaccggcgccctccaggtggagggaagctggaagaaggatggaaaggggccgtcgatttgggaccacttcatccatactcacctcaaaaatgtgagctctacgaacggaagctcggattcgtacatcttcctcgagaaggacttgtcggcgctcgatttcatcggagttagcttctatcagttttccatctcgtggcctaggctgttccccgacggcatcgtgactgtcgctaacgccaagggactgcagtactattcaactctgctcgatgcactcgtgcttagaaacatagaaccgatcgtgacgttgtaccattgggacctcccgctggcgctgcaggaaaagtatggaggttggaagaatgacacgatcatcgacatcttcaacgactacgcgacgtactgtttccaaatgttcggagatagagttaagtactggattactatccacaatccatacctcgtggcctggcacggatacggcacggggatgcatgcacccggagagaaaggaaatctggcagccgtttacacggtaggacataacttgatcaaggctcattccaaggtgtggcacaattacaacacccatttcaggcctcaccagaaggggtggctgtccatcaccctgggatcccactggatagaaccaaaccggtcggagaatactatggatatctttaagtgtcagcagtcgatggtgtctgtgctgggatggtttgcgaatcctattcatggagatggtgactaccctgaggggatgcggaagaaacttttttctgtgctgccgatcttctctgaggccgaaaagcacgagatgcggggcactgcggacttctttgccttctcatttggcccaaacaacttcaaacccttgaacaccatggctaagatgggacagaacgtcagccttaacttgagagaagcactgaattggatcaaacttgagtataacaatccgaggatcctgatcgcagagaacggttggttcaccgatagtagagtgaaaactgaggacactactgccatctacatgatgaagaattttctgtcccaagtcctccaagcaatcagactggacgaaatccgcgttttcgggtacaccgcatggtccctcctcgatgggttcgagtggcaagacgcctacaccatccggaggggactgttttacgtggacttcaactcaaagcaaaaagaacgcaagccgaagagctcggcgcactactataagcagatcatccgggaaaacggcttctcactgaaagaatcgaccccggacgtccaaggtcagttcccatgcgatttcagctggggcgtgaccgaatcggtgctcaagccggaatccgttgcgtcatcccctcagttttctgatccgcacctgtacgtgtggaacgccaccggcaaccgactcctgcaccgggtggagggcgtgcgactcaaaaccagaccagctcaatgcaccgacttcgtgaacatcaaaaaacaactggagatgctggcgcgcatgaaggtaactcactaccgcttcgccctggactgggcctccgtgttgcccaccggaaacttgtccgcggtgaacaggcaagctcttcgctactaccggtgcgtcgtgtcggaaggactcaagctggggatttccgccatggtgactctttactaccctacgcatgcgcatctcgggctgcccgagcctctgctccatgccgatggttggctgaatccgtcaaccgccgaagccttccaggcatacgctggactgtgcttccaggaactgggagatctcgtgaaactgtggatcaccatcaacgaaccgaaccggctgtccgacatctacaaccgatcaggaaatgacacttacggagcagcacataatctgctggtggcgcacgccctggcatggcgcttgtacgacagacaattccgcccatctcaacggggagcggtgtcactttccctgcacgcagattgggctgaaccggctaacccgtacgccgacagccattggagggcagcagaaagattcctgcagttcgagatcgcatggttcgccgaacctctgttcaaaactggtgattacccagcggccatgagagagtacatcgcatccaagcacagacgcggccttagctcttcagccctcccccgcctgactgaggctgaacgccggctgctgaaagggacggtcgatttttgcgccctcaatcacttcaccacccggttcgtgatgcacgagcagttggctggatcgcgctacgacagcgatcgagacatccaattcctgcaggacatcacccgactctcctcacccaccaggttggccgtgatcccgtggggcgtccggaagctgctgagatgggtgcgccggaattacggagatatggacatctacataaccgccagcgggatcgatgaccaggccctggaggatgacaggctgcgtaaatactaccttggcaagtacctccaggaagtgctgaaagcctaccttattgacaaggtccggatcaagggttactacgcgtttaagctcgccgaagaaaagtcgaagccgcgctttggtttcttcacttccgactttaaggcaaaatcgtcgattcagttctacaataaggttattagctcacgcggatttcctttcgagaattcatccagccgctgctcgcaaactcaggaaaatactgagtgtactgtctgtctttttctggtgcagaagaagcctctcatcttccttggctgctgctttttctcaacccttgtgctgctgctgtccatcgccatcttccaacgccagaaacggcggaagttttggaaggcgaaaaaccttcagcacattccgctcaagaaaggcaagagggtcgtttcc

SEQ ID NO: 251861 - DNA, 3132 bp, Artificial Sequence
  derived and/or modified sequence
atgaagccaggatgcgcagccggctccccgggcaacgagtggatcttcttctccaccgacgagatcacgacccgatacagaaacactatgtcaaacgggggccttcagagaagcgtgatcctgtccgccttgatcctgttgcgcgccgtgaccgggtttagcggggacggaagagcaatctggtcaaagaatccgaacttcactccggtgaacgagtcccagctgttcctgtacgacaccttccctaagaacttcttctggggaatcggaactggggcattgcaagtggaaggctcatggaaaaaggacggaaaaggaccatcgatctgggatcacttcatccatactcatctgaagaatgtgtcgagcacgaacggatcctccgattcgtacattttcctcgagaaggacttgagcgctctcgactttatcggagtgtcattctaccagttttctataagctggccgcgcctcttccctgatggcatcgtgaccgtggcaaacgccaagggactgcagtactactcgaccctgctcgatgctctcgtgctgcggaacatcgagcctatcgtgaccttgtaccattgggacctcccgctggccctgcaagagaaatatggtggatggaagaacgataccatcattgacatcttcaacgattacgctacctactgctttcagatgttcggcgatcgtgtgaagtactggatcactatacacaacccgtaccttgtggcatggcacggttacggcaccggcatgcacgcccccggagaaaaggggaatctggccgccgtgtacaccgtgggacacaacctgatcaaagcccacagcaaggtctggcataactacaacacccacttccgcccgcaccagaagggttggctcagcatcaccctcggttcacattggatcgaacctaacagatcggaaaatacgatggatatcttcaagtgtcaacaatcaatggtgagcgtgctcgggtggttcgcaaatccaatccacggtgacggcgactacccggagggaatgaggaagaaactgttctccgtgctccccatcttttcggaagcagaaaaacacgaaatgcgggggactgccgacttcttcgccttctccttcgggccgaacaacttcaaacccctcaatactatggcgaaaatgggccagaatgtctcactgaacttgcgggaggctctgaactggatcaagttggaatacaacaatccgcggatcctgatagcggaaaacggctggtttacggacagccgcgtaaagactgaggacactacggcaatttacatgatgaagaatttcctctcgcaagtgctgcaggcgatcagattggatgagatccgggtgttcggatataccgcgtggagcttgctggacggatttgaatggcaagacgcctacactatccggcgggggctcttctacgtggatttcaatagtaagcaaaaggaacggaagccgaaatcatctgcgcattactacaagcagattatccgcgagaacggattctccctgaaggagtcaactccagatgtccagggacaattcccatgcgacttttcgtggggagtcactgagtcggtgctgaagcctgaaagcgtggcaagctcgccacagtttagcgacccgcacctctacgtctggaacgccaccggcaatagactgctgcacagagtggagggcgtgaggctgaaaactcggcctgcccaatgcaccgatttcgtgaacatcaaaaagcagctggaaatgctcgctcgcatgaaagtgacgcactataggttcgcattggactgggcatcggtgttgccgaccggaaatctttccgctgtaaacaggcaggctctgcgatactaccgatgtgtcgtctctgagggcctgaagctgggtatctcagcgatggtcaccctgtactacccaactcatgcgcatctgggtctgccggaacctctgctccatgccgatggatggctgaatcccagcacggccgaagcatttcaagcctatgcgggcctgtgctttcaggaattgggagatcttgtgaagctctggattaccattaatgagccgaaccggctgtccgacatctacaataggtccgggaatgatacttacggcgccgcacacaacctgctggtggcacatgcccttgcatggcgcttgtacgatcggcagttccggccctcacaaagaggagccgttagcctttccctgcatgcggactgggctgaacctgcgaacccatacgcggactcccactggcgcgccgctgagcggttcctgcagttcgagattgcttggttcgcggaacctctgttcaagaccggagattacccagcggccatgagggaatacatcgcttccaaacaccgccgcggactctccagttcggcgctgccaagactgactgaagcagaacggaggttgctgaaagggactgtcgatttttgcgcactgaatcactttaccactagattcgtgatgcacgaacagctggcgggatccagatacgactcggaccgggacattcaatttctgcaggatattactagactctcgtcgccgactagattggccgtaatcccgtggggtgtgcgcaaattgcttcgctgggtgcggagaaactacggagacatggacatctatatcactgcctcgggaatcgacgatcaggcattggaggacgaccgcctcaggaagtactaccttggtaagtatctgcaggaggtcctgaaagcctacctcatcgataaggtgcgcatcaagggatactacgcattcaagctggcagaagagaagtccaagccgcgctttggtttcttcacttccgatttcaaggcaaagtcatccatccagttctacaataaggtcattagctcccgtggattcccattcgagaattcgagcagccggtgctctcagacccaggaaaataccgagtgcaccgtgtgcctcttcctggtgcaaaagaagccactcatctttctgggatgttgtttcttttccactctcgtcttgttgctctcgatcgctatctttcaacgtcagaagaggcggaagttctggaaagcgaagaatctccagcatatcccactcaaaaaggggaaaagagttgtgtcc

SEQ ID NO: 251862 - DNA, 3132 bp, Artificial Sequence
  derived and/or modified sequence
atgaaaccgggatgcgctgcaggcagcccaggcaatgaatggatctttttttccactgatgaaatcactaccagatatagaaataccatgtctaacgggggacttcaacggagcgtgattctgtctgctctcattctgctcagggcggtcacggggttttctggcgatggccgggccatctggtcaaagaatcctaattttactcctgttaacgaaagtcagttgttcttgtatgatacctttccaaagaactttttttggggtattggaaccggcgcgctgcaagtggaaggctcttggaagaaagatggaaaaggcccttctatttgggatcacttcatccatacgcatctcaagaacgtaagttctaccaatgggagctccgatagctatatattcttggagaaggatctttctgcactggactttatcggcgtgtccttctatcagttcagcatatcatggccgagattgtttccagatggtatagtgaccgtggctaacgccaaaggactgcagtactactctaccctcctcgatgctcttgtgctgcggaacatcgagcccattgttactctctaccattgggacctgcccctggcccttcaagaaaaatatggaggctggaaaaacgatactataatcgatatctttaacgactacgccacgtactgctttcagatgttcggagaccgggtgaaatattggatcactatccacaatccatatctggtagcctggcatggctatggcacagggatgcatgctccaggtgagaaaggaaacctggccgctgtttacacagtgggccacaacctgatcaaagcccactctaaagtttggcacaattacaacacccactttagacctcaccagaaaggctggttgtcaatcaccctcggatcccattggatcgagcctaatcggagcgaaaacaccatggacatctttaaatgccaacagtccatggtttccgtactcggttggttcgccaatcccatacacggcgacggcgattaccctgaaggcatgcggaaaaaactcttcagtgtactgccaattttctccgaggcagagaagcatgaaatgcggggcactgccgacttcttcgcgttttccttcgggccaaataattttaaaccgctgaacactatggcgaagatgggacagaatgtgtccctcaatttgagggaggcactgaactggattaagctcgagtataataacccgaggatcctgatcgcagaaaatggctggttcactgacagcagagtcaagacagaagataccactgccatatatatgatgaagaacttcctgagccaggttcttcaggctatccgactcgatgagatccgggtgttcggctatactgcatggtcactgctcgacggtttcgaatggcaagacgcctacaccattcgaaggggcctgttttatgtggatttcaacagtaaacagaaggagagaaagcctaagagctccgcccactattacaaacaaattatacgagagaacggctttagcctgaaggaaagtacccctgacgttcaggggcagtttccatgcgacttctcatggggtgtcaccgagtcagtgctgaagccggaatccgtggctagcagtcctcagttttctgatccccacctgtatgtgtggaatgccaccggcaaccgactgctgcatcgagttgagggcgtgagactcaagacacggccagcacaatgcacagacttcgtgaacatcaagaaacaactggagatgctggcgagaatgaaagtgactcattataggttcgcactcgattgggcgagcgttctgccaactggcaatctgagtgcagtgaaccgacaggcccttaggtattatcggtgtgtggtatctgaaggcttgaagctgggtatttccgctatggtcaccttgtactaccccacacacgcccacctgggcttgcctgagcccctgctgcacgctgacggttggctgaacccctcaactgcagaggctttccaggcctacgcagggctgtgcttccaggagctgggcgatctggttaagctgtggatcacaattaatgagcctaacaggttgtcagatatctataaccgctccgggaatgacacatatggtgccgcccataatctgttggttgcccacgctttggcctggcgcttgtacgatcgccagttccgccccagccaacgcggtgccgtatcactgtcacttcacgctgactgggctgagcctgccaatccatacgccgactcccattggagagccgccgagagattcctccagtttgaaatcgcgtggttcgccgagcctctgttcaagaccggcgattatcctgccgctatgcgggaatacattgcaagtaaacaccgccggggccttagctcaagcgcactcccaaggttgaccgaagctgagaggcgcctgttgaagggtacggtggatttctgcgcactgaatcattttacaaccaggttcgtgatgcacgagcagctcgccggttccagatacgactccgaccgcgacatacaattcctgcaggacataaccaggctgagcagcccgaccagactcgctgtcattccctggggcgttcggaagctgctgcgctgggttcggaggaattatggtgatatggacatttatataaccgcgtccgggattgacgaccaagcactcgaggatgacagacttaggaagtattaccttgggaaatatttgcaggaggtgctcaaggcttacctgatcgataaggtcagaattaagggctactacgctttcaagctggctgaagaaaagagtaaaccccgcttcggcttcttcacgagcgacttcaaagcaaagtccagcatacaattttataacaaagtaatcagtagtcgggggtttcctttcgagaacagcagttcaagatgctctcagacccaagaaaacactgaatgcacagtatgccttttcctggtgcaaaaaaagcccctgatctttctcggctgctgtttcttctctactcttgtcctgttgctgtccatcgccatcttccagcgccagaagaggagaaagttctggaaggccaagaatctgcagcacatccctctgaagaaaggaaagagggtggtttct

SEQ ID NO: 251863 - DNA, 3132 bp, Artificial Sequence
  derived and/or modified sequence
atgaaaccaggatgtgcagcaggcagcccggggaatgaatggattttcttctccaccgatgaaatcaccactcgttaccgaaacacgatgtcgaatggtggtctgcaacggtccgtgatactgagcgcactgattcttttgagggctgtcaccggattctcgggagatggcagagcaatatggtcgaagaaccctaactttactcccgtcaatgaaagccagctgttcctctatgacacgttccccaagaatttcttctggggaatcggtaccggagctctgcaagtggaaggttcctggaagaaggacggcaaggggccctccatttgggaccactttatccacacgcatcttaagaacgtctcctcgaccaacggatctagcgatagctacattttcctggagaaggatctgagcgcacttgatttcattggcgtgtccttttaccagttttccatcagttggcccagactcttcccagacggaatcgtcactgtcgcaaacgcaaaaggccttcaatactactcgactttgcttgatgcactggtgctgagaaacatcgaaccgattgtcactctgtaccactgggatttgccccttgcgctccaagagaaatacggcggttggaagaacgatacgattattgacatctttaacgactacgcaacctactgttttcagatgtttggtgaccgagtcaagtactggattaccatccataacccttacctggtggcctggcatggatatggcaccggtatgcatgcgcctggcgaaaaaggaaacctggcagccgtgtacactgtgggacataacctgatcaaggcacattcaaaggtgtggcacaattacaatacccattttagaccacaccaaaaaggttggctctccattaccctgggatctcattggattgaacctaacagatcggaaaataccatggatatctttaagtgtcagcagtcgatggtgtccgtcctcggctggtttgctaacccaatccatggggatggcgactaccccgaaggaatgaggaaaaaactcttctccgtgcttcccattttcagcgaagccgaaaagcatgagatgcgggggaccgctgatttctttgcgtttagttttggccctaataactttaaaccacttaacacgatggcaaagatgggacaaaacgtcagccttaaccttcgtgaagccctcaattggatcaagctggaatacaacaatcctagaatccttattgcagaaaacggatggttcaccgattccagagttaagactgaagataccacggcaatctacatgatgaagaattttctctcgcaagtgctgcaagctattcggttggacgaaataagagtgtttggatacaccgcatggtcgcttctcgatggattcgaatggcaagatgcttacactataaggcggggtttgttctacgtggatttcaattctaagcaaaaggagcgtaagcctaagagctccgcacattactacaagcaaatcatcagagaaaatggtttctcccttaaggaatcgaccccagatgtgcagggacaattcccatgcgacttctcctggggagtcaccgagagcgtgcttaagccggaatcggtcgcctcatcgccacaatttagcgatccgcatctttacgtttggaatgctacgggaaaccggcttcttcatcgcgtggaaggcgtgcgcctcaagactcgccccgcccagtgtaccgattttgtcaacattaagaagcagctggagatgttggcacgcatgaaagtcacgcactaccggtttgcgcttgattgggccagcgtccttcctaccggaaacctttcggcagtgaaccgccaagcacttcggtactacagatgcgtggtgtccgaggggcttaagctgggtatctccgcaatggtgactctttactaccctacccacgcgcatctgggactgcctgagccgcttctgcacgccgatggttggctgaacccaagcaccgccgaagcatttcaggcctacgcaggcctgtgtttccaagaacttggggaccttgtgaagctgtggatcaccattaatgaacctaatcgcctgtccgatatctacaatcggtcgggaaatgatacctacggggcagctcacaacttgctggttgcacatgcgctggcatggaggttgtacgatcgacaatttcgcccctcacagcgcggagccgtttccctgtcgttgcacgcggattgggccgagcctgcaaacccgtacgcagattcccattggcgcgcagcagagcgcttcctgcaatttgagatagcatggttcgcagagcctcttttcaagaccggggactaccccgcagcaatgcgggaatacatcgcaagcaaacatagacgagggctgtcgtcgtcagcactccctcgacttaccgaggcagaaagacgactcctgaagggcaccgttgatttctgtgcgctgaaccactttactactagatttgtcatgcacgagcagcttgcaggatcccgttacgatagcgatagagatatccagttccttcaagatattactcgtctgtcgtcccctactcggctggcagtgatcccttggggagtcaggaagttgctgcgctgggtgcggagaaactacggggacatggatatctatatcaccgcgagcggtattgacgatcaagcacttgaagatgaccggttgagaaagtactaccttggaaagtaccttcaagaagtcctgaaggcatacctgattgacaaggtgaggattaaagggtactacgcattcaaactggcagaggaaaaatcgaagccgcgatttggatttttcacttcagactttaaggcaaagtccagcatccaattctacaataaagtcatctcctcaagaggtttcccatttgaaaacagcagcagcagatgctcgcagacgcaggaaaacacggagtgcactgtgtgtctgtttctggtgcagaaaaaacccctgatttttctcggttgctgcttctttagcaccttggtactgctgctctcgatagcaattttccagcgccagaaaagacggaagttttggaaggccaaaaaccttcaacatattcctctcaagaaaggaaaacgggttgtctcg

SEQ ID NO: 251864 - DNA, 3132 bp, Artificial Sequence
  derived and/or modified sequence
atgaaacccggctgtgccgcgggatcccccggcaatgagtggatttttttttctacagacgaaattacgacccggtatagaaataccatgtccaacggtgggttgcagagatccgtaattctgtccgctcttattctgttgcgcgctgttacaggcttttccggcgatggcagagcgatttggtctaaaaacccaaacttcactcctgtcaacgagtctcaactcttcctgtacgacacatttccaaaaaacttcttctggggcattgggacaggagcgcttcaagtcgaaggatcctggaagaaagacggcaagggcccctctatatgggaccactttatccacacacatttgaaaaacgttagtagcaccaatggtagcagcgacagttatatcttcctggagaaagacctttctgctttggactttatcggcgtttcgttttaccaattctctatcagctggcctcgcctgtttccagacggtatcgtgactgtagcaaacgctaaaggcctccagtattactccacacttctggacgccctggtgcttcgcaacattgagcctattgtgacgctttatcattgggatctcccactcgccctgcaggaaaaatatgggggctggaagaacgacacaatcatcgatattttcaatgattatgccacctactgtttccagatgtttggcgaccgagtgaaatactggattactattcataacccatacctagtggcgtggcacggatatgggactggaatgcatgcccctggagaaaaaggcaacctagccgccgtgtataccgttggacacaatctgattaaggcacatagtaaagtgtggcacaactacaacactcacttcagacctcaccaaaaaggctggctgtcaatcaccctcggttcgcattggattgagcccaatcgcagtgaaaacacaatggatatcttcaaatgccagcagtctatggtgtcggtcttgggctggttcgccaacccaatacatggagatggcgattaccccgagggtatgcgcaaaaagctgttcagcgtgctgcctattttttctgaagcagagaagcatgagatgagagggacagccgatttttttgcattttcttttggacccaacaactttaaaccattgaataccatggccaagatggggcagaatgtatccctgaacctccgggaagctcttaattggatcaagctcgagtataataatccccgcattctcatcgctgagaatggatggttcacagattcccgcgtgaaaactgaggatactactgccatatacatgatgaaaaactttctcagtcaggtgctccaggcaatccgtttggacgaaattcgcgtattcgggtacaccgcctggtccctccttgatggtttcgagtggcaggacgcgtacaccatacggcgaggcctcttctatgtagattttaattcaaagcagaaagagcggaagcccaaatctagtgcacattactataagcagattattcgagaaaacgggttttccttgaaggagagcacccctgacgtccagggacagtttccttgtgacttttcttggggcgtaaccgaaagcgtgctgaagccggagagtgtggcctcaagcccacagttctctgatcctcatctctatgtttggaacgctaccggcaaccgactgttacacagggtggagggtgtgcgtcttaagacccggcctgcgcagtgcacggacttcgttaacattaagaagcagctcgagatgctcgcgcgaatgaaagtgacacattaccggtttgcactggattgggcgtcagtactccctacgggaaatttgtcggcagtaaaccgacaagccctccggtactaccggtgcgtcgtcagcgaaggtctaaaactgggcattagcgccatggtgaccttatattaccccactcacgctcatcttggacttcctgaaccgctactgcacgctgacggctggctcaatccgtctactgcagaggcctttcaagcctatgcgggcctttgttttcaagagctgggggatctcgtgaagctgtggatcactataaacgaacccaaccgattgagtgacatttacaacaggtcaggcaatgacacctacggggccgcgcacaatctcttagtggcccacgccctggcatggagactttatgaccggcagttccgcccctctcaacgtggtgccgtgtcactaagtttgcacgcagactgggccgaaccagcaaacccctacgcagatagccattggagggcagcagaacgctttctgcaattcgaaattgcctggttcgccgagccactgtttaaaactggggattatcccgcagcaatgagggagtatattgcctccaaacacaggcggggtctgtcgtcctccgccctgccaaggctaaccgaagcagagcgacgactcttaaaagggacagtagacttctgtgctctcaatcactttaccacccgatttgtcatgcacgagcaactggccggctctcgatacgactccgaccgcgacatccaatttctgcaagacattaccaggctgagctctccaactaggctggcagtgataccatggggcgtacgtaagcttctacggtgggtgcggagaaattacggggatatggatatttacattaccgcgtccggcatagatgaccaggctctagaagacgatcgcctgagaaagtactacctcggaaagtacctgcaggaagtactgaaagcatatctcatagataaggtcagaataaaaggctactatgcattcaaactagctgaggaaaagtccaagcctagattcgggtttttcaccagtgacttcaaagctaagtcatctattcagttctataataaagtgatatcctccaggggatttcctttcgagaacagcagttcccgctgttcacagacgcaggaaaataccgaatgcactgtctgtttattcctggtgcagaaaaagccactcatctttctgggatgttgtttcttttccaccctggtgttactgctgtcaatcgcgattttccagcgtcaaaagcgtagaaaattctggaaggctaaaaaccttcagcacattcctctaaagaaagggaagcgtgttgtgagc

SEQ ID NO: 251865 - DNA, 3132 bp, Artificial Sequence
  derived and/or modified sequence
atgaagcccggatgtgcagctgggtccccagggaatgagtggattttcttctctacagatgagataactacacggtataggaacactatgagtaatggaggtctacaaaggtctgtcatactgtctgctctgatattgctgagggctgtgacaggctttagcggagatgggcgagctatctggtctaagaaccctaattttacgcctgttaatgagtcacagctttttctgtatgacacttttcccaaaaatttcttctggggcatcggcacgggggccctccaagtggaaggttcttggaaaaaggacggcaaaggcccatcaatttgggaccattttatacatactcacctgaagaacgtctcctctactaacggttcttctgactcctacattttcctcgagaaggacctgtccgccctggatttcatcggcgtttctttctatcaattctctatttcttggcctcggctcttccctgatggcattgtgacagttgctaatgctaaagggctccagtactacagcacactgctggatgccttggtgttgcgtaatattgagccgatcgtgaccctgtatcactgggatctgcccttggcactccaggagaaatatggtggatggaaaaacgacacgattatcgacatttttaacgactacgcaacctactgcttccagatgtttggtgacagggttaagtattggattactattcacaacccatatctggtcgcttggcatggttacgggacggggatgcacgcccctggagaaaaaggaaacttggcggcagtgtatacagtcggccataatctgattaaggctcatagcaaggtgtggcacaactacaacactcactttcgcccacatcagaaaggctggctttctatcaccctgggttcccattggattgaaccaaaccgatcggagaacaccatggacatctttaaatgccaacaaagtatggtgagcgtcctagggtggttcgccaatccgattcacggagatggggattacccagagggaatgcgcaaaaagctcttttcagtgctccctatcttctccgaggcagaaaagcatgagatgagagggactgctgacttctttgccttttcatttggtcctaataacttcaaaccactgaacacgatggccaagatggggcagaatgtgtccttgaacctgagggaggccctcaattggataaaactagagtacaataacccacggatcttgattgcagaaaatggttggtttaccgatagcagggtgaagactgaagacaccacagccatttacatgatgaaaaatttcctgtctcaggttctacaggctatacgtctggacgagatacgcgttttcggatacactgcatggtcgctccttgacggcttcgagtggcaagatgcttatacgattagaaggggcctgttctatgtggactttaattcaaagcagaaggagaggaagcctaagtcctctgcgcactactataagcagattattagggagaatggcttctccctcaaagagtctacacccgacgtgcagggccagtttccctgtgatttctcctggggggttaccgagtctgtactcaagcccgaatctgtggcttcctccccccaattctctgacccccatttgtacgtgtggaatgctacagggaatcgacttttgcatagagtggagggcgttagattgaagactagaccagctcagtgcacagattttgtcaacatcaagaaacagctcgagatgctagctcggatgaaggtcactcattaccggtttgcactggattgggcaagtgtgcttcccacaggtaatctctcagctgtgaacaggcaggccttgcgatactacagatgcgtagtgtcagagggtctgaagctcggaattagtgcaatggtgacgctctactatcctacccacgcacacctaggtttgcccgaacccctgctgcacgccgacggctggctgaacccaagcaccgcagaggcctttcaggcgtatgccggtctctgcttccaggagctgggcgatctagtgaagctctggatcaccattaacgaacccaaccgactcagtgacatctataaccgcagcgggaatgacacgtatggagcggcccacaatctcctggtcgcccatgccctcgcttggcggctgtacgatcggcagttcaggccttctcaaaggggtgcggtcagcctgtcattgcacgcggattgggccgagcccgctaacccctacgcagattctcactggcgggccgccgagcggtttctgcagtttgagattgcttggttcgcagaacctttgtttaagaccggtgattatcctgcagctatgcgagagtatattgcttccaagcaccggagggggctgagttcctctgcactgccacggttaacagaagcagaacgccgtttgttaaaaggtaccgtggatttctgcgcgctaaatcattttactacccgttttgtcatgcatgagcaattggcgggatctagatacgacagcgatagggatatccagttcctgcaggacattacgcgactgtctagccccacacggttagcagtgattccctggggtgttcgcaaactcctgagatgggtgagacggaactacggagacatggacatttatataacagcttccgggattgatgaccaggcgttagaggacgaccgtcttcgtaaatattatttgggtaaatatctacaggaggttctgaaggcatatctcattgacaaagtacgcattaaaggatattatgccttcaagttggcggaggaaaaatcaaagcccagatttgggttttttacatctgactttaaagctaaaagctcaattcagttttacaacaaggtaatatcgagccgcgggtttcccttcgagaactcctcttccaggtgttcgcagactcaagaaaacacagaatgtacagtgtgtttgtttcttgttcagaaaaagcccctgatcttcctggggtgttgctttttctctactctagtcctcttactgtccatcgcgatctttcagcgtcagaaacggaggaaattctggaaagcaaagaacctgcagcacattcccctgaagaagggcaagcgcgttgtatca

SEQ ID NO: 251866 - DNA, 3132 bp, Artificial Sequence
  derived and/or modified sequence
atgaagcctggatgcgccgccggaagcccgggtaacgaatggattttcttctccaccgacgagattactacccgttaccgcaacacgatgtcgaatggagggctgcagcgctcagtgatcctgagcgcacttattctgctccgcgcggttaccgggttctctggagacggcagggcaatctggtccaagaatccgaacttcactccggtgaacgagtcacagctctttctgtacgatacctttcccaagaatttcttctggggaatcggaaccggagccctccaggtcgaagggtcgtggaagaaagatggcaagggtccgtcaatctgggatcatttcatccatactcacctcaagaacgtctcgtccaccaacggatcgtcggattcgtacattttcctcgaaaaggacctgtcagcactcgacttcatcggagtgtcgttttaccaattctccatttcttggccgcgcctgtttcctgatggaattgtgaccgtcgctaatgcaaaaggactgcaatactactcgactcttcttgacgccctcgtgctcaggaacatcgaacctatcgtcaccctgtaccactgggacctgcctttggccctgcaagaaaagtacggcggatggaagaacgatactatcatcgatatctttaacgactacgcaacttactgcttccaaatgttcggggaccgcgtcaagtactggatcaccatccacaatccgtacctcgtggcctggcacggctacggtaccggaatgcatgcccctggagagaagggaaacctggccgccgtctacactgtaggccataatttgatcaaggcgcatagcaaagtgtggcacaattacaacacccactttcgcccacaccaaaagggctggctgtcaatcacccttggttcccactggatcgagccgaatcgatcggagaacactatggacatctttaagtgccagcagtcaatggtgtcggtgttgggctggttcgctaatccgattcatggagacggtgattacccggagggaatgaggaagaagttgttctccgtgctcccgatcttctcggaggcggagaaacacgagatgcggggaactgcagacttttttgctttctcctttgggccgaacaatttcaagcctctgaatactatggccaagatgggacaaaacgtgtctcttaacctgcgggaagcgctgaattggatcaagctggaatacaacaatccgaggatcctgatagcagaaaatggctggttcaccgattctcgggtgaaaacggaggacactactgctatttacatgatgaagaacttcctgtcccaggtgctgcaggccatccggctggacgagatccgcgtgttcggctacaccgcatggtcgctgctcgatggctttgaatggcaggacgcatacaccatcagacgtggactgttctacgtggactttaactcgaaacagaaggaaagaaaaccgaagagctccgcccactactacaagcagatcatccgggaaaatggattcagtctgaaggaatcaacgccagatgtgcaaggacagtttccgtgtgatttctcgtggggggtgactgaaagcgtgctgaagcccgaatccgtggcgtcctccccccagttttcagacccccatctttacgtttggaacgcaaccggaaatcggttgctgcatcgggtggaaggagtcagactcaagacgaggccggcccagtgtactgatttcgtgaacatcaaaaagcagctcgaaatgcttgcgagaatgaaggtcacccattatcggttcgctctggattgggccagcgtgctgcccaccggaaacctgagcgccgtgaatagacaagcactccggtactaccggtgcgttgtttccgaagggctgaaactgggaattagcgcgatggtgactctctactacccgacgcacgcccacctgggtttgccagaaccactgctccacgcggacgggtggctgaacccatcgaccgcggaagccttccaggcttatgccggattgtgcttccaagaactcggtgacttggtgaagctgtggattactatcaacgagccaaaccgcctgagcgacatctacaaccgctcaggcaacgacacttacggagcggctcataacctgctggtcgcgcacgcgcttgcttggcgcctctacgatagacagttcagaccatcccagcggggagctgtcagcctcagccttcatgcagattgggccgagcctgctaacccctacgccgatagccactggagagcagccgagcgcttcctgcagttcgagatcgcctggtttgcggaaccactgttcaaaactggcgactacccagccgcgatgcgcgaatacatcgcctccaagcaccgacgcgggctgtcatcctcagctctgccgcggctcaccgaggcggaaagacgactcctgaagggaactgtcgacttctgcgcactgaaccacttcactaccagatttgtcatgcacgaacagctggccggttcccggtacgattcggatcgcgacatccagttcctgcaagacatcacccggctcagtagcccgacccgcctggcggtgatcccttggggcgtccggaaactcctgcgctgggtgaggagaaactacggagacatggatatctacataacggcttcaggcatcgacgaccaggccctcgaggacgaccggctgcggaagtattacttgggaaaatatcttcaggaggtgctcaaggcctacctcatcgacaaggtcagaatcaaaggctattatgcctttaaactggccgaagagaagtccaaaccacgctttggattcttcacctcagacttcaaggcgaagtcgtcgattcaattctacaataaggtgatctcaagccgcgggttcccgttcgagaactcgtcctcgcgctgctcccaaacccaagaaaatactgagtgcaccgtctgcctcttccttgtgcagaagaagccattgatcttcctgggttgttgtttcttctcgactctggtgctcctgttgagcatcgcaatcttccaaagacagaagaggcgcaaattctggaaagctaagaacctgcagcatatccctctcaaaaaaggcaagcgggtggtcagc

SEQ ID NO: 251867 - DNA, 3132 bp, Artificial Sequence
  derived and/or modified sequence
atgaagcctggttgtgccgccggatcaccaggaaatgagtggatctttttctcaactgatgaaattacgactagatatcgcaacacaatgtcaaacggcggtcttcagagaagcgttatcctcagtgctttgatccttctgcgggccgtcacagggttttcgggagatgggcgggctatctggtccaaaaacccaaattttactccagtgaacgagagccaactgtttttgtatgacacctttccaaagaactttttctggggaattggaactggggccctgcaggtcgaggggagctggaagaaggatgggaaaggaccatctatttgggatcacttcatccacacgcacctaaagaacgtgtccagcactaatggatcgtccgatagctacatattcttggaaaaggacctgagcgccctggactttatcggtgtctcgttttaccagtttagcatcagctggcctcggctctttcctgatggcatcgttacagtggctaatgcaaagggcctgcagtattacagtactttgctggatgcactagtactgagaaacatcgagccaatagttaccctgtatcattgggatctgcccttagctttacaagagaagtatggagggtggaagaatgatactatcattgacatctttaatgattatgccacttattgttttcagatgtttggtgatagagtcaagtattggatcaccatccacaatccatacctagtcgcttggcacggttacggcacagggatgcatgctccaggcgagaaagggaatcttgccgcggtatataccgtagggcataatctgatcaaagcccacagcaaggtgtggcataactacaacacacactttagaccacatcagaaggggtggctcagtatcaccctcggcagtcattggattgaaccgaaccgctccgagaatacaatggatattttcaagtgccagcaatctatggtctccgtgctcggctggttcgccaatcctattcatggggacggcgactaccccgaagggatgcgaaaaaagctgttttccgtgctgccgatcttcagcgaggcagaaaaacacgagatgagaggtacagcggacttcttcgccttctctttcggcccaaacaactttaaacccctgaatactatggccaagatgggacagaatgtctctctgaacctgcgggaagcactgaattggattaaactagagtacaacaacccccggatcctgatcgcggagaatggctggtttaccgattcaagagtgaaaaccgaagacaccacggcgatatacatgatgaaaaattttctgtcacaggtactgcaggccattcggctagatgagattagggtctttggttacaccgcgtggtcgctcctcgacggctttgagtggcaggatgcgtacactatccgaaggggtcttttctatgtggacttcaattctaagcagaaagagaggaagccaaagtcgtccgctcattactataaacagataattagggagaacggattctcactgaaggaaagcacaccggatgtgcaaggccaatttccttgtgatttcagctggggcgttactgaatcagtgcttaagcccgagtcagtggcctcaagtcctcagttttccgaccctcacctctacgtgtggaacgcaaccggcaacaggctactgcacagggttgagggggtgaggttgaagacaaggccagcccagtgcacagatttcgtgaatattaagaaacagttggagatgctggcgcgaatgaaggtgacccactatcgcttcgcccttgattgggcaagcgtgctgcccacaggaaacctcagcgcagtcaatcgccaagcactgcggtattacaggtgcgtggtgtctgaaggcctgaaactgggaatcagcgctatggtgaccttgtactacccaacccacgcacacctgggcttgcccgaacccctcctgcacgctgacggatggctgaatccaagcacggcggaggccttccaagcctacgccgggctgtgtttccaggaactaggcgacctagtgaaactatggatcacgattaatgagcccaaccgacttagcgacatctacaatagatccggcaacgatacctacggagccgctcacaatttgttggttgctcacgctttagcctggcggctgtatgatagacaattccgcccatcacagcgcggagcagtgtcattgagccttcacgcggactgggccgagccggcaaacccttatgcggactctcactggcgcgcagcggaaaggttcctgcagttcgaaatcgcttggtttgcagaaccactgttcaagacaggtgactaccctgctgccatgagagagtatattgcctccaaacacaggcgaggcttatcctctagcgcacttccacggctcacagaggcagagagacggctcttaaaaggaacagtggatttctgcgcgttgaaccactttaccacacgctttgtgatgcacgagcagctggccggatcccgctacgactcagaccgcgacattcagttcctccaggacatcacacggttgtcttcacctacccggctcgcggtaattccatggggggtccggaagcttttacgatgggtccggaggaactatggtgatatggatatctacatcactgcaagtgggatagacgatcaggcccttgaggacgaccgcctgcgcaaatattatctaggaaaatatctgcaggaggttctcaaagcatacctgatcgataaagtgcgtataaaaggttattatgcttttaaactggctgaggagaagagcaagcccagattcggcttttttacaagcgacttcaaggccaaaagctccatccagttttataataaggtgatcagttcacgtgggtttcccttcgagaattcgtcctcaagatgtagtcagactcaagaaaacaccgagtgcaccgtgtgtctctttctggtacagaaaaaaccgctcatcttcttgggctgttgctttttctccacccttgtattgcttctgagcatcgcaattttccagagacagaagagacggaagttctggaaggctaaaaacctgcagcatattccgttgaaaaagggcaaacgagtggtgtct

SEQ ID NO: 251868 - DNA, 3132 bp, Artificial Sequence
  derived and/or modified sequence
atgaagccgggatgcgcagctgggagtccggggaacgagtggatcttcttttcgaccgacgaaatcaccactagataccgcaacactatgtcaaatggaggcctgcagagatcggtgatcctgtccgcactcattttgctgagagccgttactggattttcgggcgacggccgcgcaatctggtccaaaaatcccaatttcacgccagtgaacgaatcacaactgttcctgtacgatacctttccaaagaatttcttttggggcatcggtaccggtgctcttcaagtcgagggatcatggaagaaggacggcaaagggccctcgatctgggaccatttcatccacacccacctgaagaacgtctccagcaccaacggaagctcagactcctacatcttcctcgagaaggacctgtcggctctggacttcatcggcgtctccttttaccagttctcaatctcctggccaaggctctttcctgacggaatcgtgaccgtggcgaacgcaaagggattgcagtactactccactctgctggatgcgctcgtgctgcggaatatcgaacctatcgtgactctctaccactgggaccttccactcgctctgcaggagaagtatggcggatggaaaaatgacaccatcattgatatcttcaacgactacgccacttactgcttccaaatgttcggcgatagagtcaagtactggatcaccatccacaatccttacctggtggcctggcatggctatggtactggaatgcacgcacccggggaaaagggcaacctggccgcagtgtacacggtgggacacaatcttatcaaagctcactcgaaagtgtggcataactataacacccatttcagacctcatcagaagggctggttgtcaatcactttgggctcccattggatcgagccgaatcgttcagaaaacactatggacatcttcaagtgccaacaatccatggtgagcgtgcttggatggtttgctaacccgatccacggagacggagattatccagaagggatgagaaaaaagttgttctcagtcctcccaatcttctcggaagcggaaaaacacgaaatgagaggcaccgccgacttcttcgccttcagcttcggacctaataacttcaagccacttaacactatggccaagatgggacagaacgtctccctgaacctgagagaagcattgaactggatcaagctggagtacaacaatccgcgcatcctcatcgccgagaacggatggtttaccgattcccgggtgaaaaccgaggacacgaccgccatctacatgatgaagaacttcctgtcgcaagtgttgcaggcaatccgcctggatgagatccgggtgtttggatacacggcgtggtcactgctggacggtttcgagtggcaggacgcgtacaccattcggcgcggactgttctatgtggacttcaactcgaagcagaaggagcgtaagccgaaatcctcagcccattactacaaacagattatcagagaaaacgggttttcgctcaaggagtccacccccgacgtgcagggccaatttccttgtgatttttcctggggcgtgactgaatccgtgctgaaaccagaatcagtcgccagctcgccacagttctcggatccgcatctgtacgtgtggaacgcaaccgggaaccggttgctccaccgggtggaaggagtgagactgaaaacgcggccggcacagtgcaccgacttcgtgaacattaagaagcagctggagatgcttgcccggatgaaggtgactcattaccgcttcgctctggattgggcatcggtgctgccgactggaaatctctccgccgtgaaccggcaggccctgcgctactaccgctgcgtcgtgagcgaaggactcaagttgggcatctcggcaatggtgacgctctattacccaactcacgcacatctcggcctgccggagccactgctccacgcggacggttggctcaatccttcgactgcggaagccttccaggcatacgccgggctctgcttccaggagttgggtgacctcgtgaagctgtggatcactattaacgaaccaaaccggctgtcggatatctacaatagatcgggaaacgacacttacggagctgcccacaacctgctggtggcccacgctctggcctggcggttgtacgatcgccagttccgaccctcccagagaggtgctgtgtccctttcgttgcacgccgactgggcggaaccggccaacccatacgccgacagccattggcgggccgcggagaggttcctccaatttgagatcgcctggtttgcggaaccactgtttaagactggagattaccctgccgcaatgcgcgaatacattgcctcgaagcatcggcggggactgtcatcgtccgcattgccccggttgactgaagcagaacgcaggctccttaagggaactgtggacttctgcgccctgaaccactttaccacgagattcgtgatgcatgagcagctcgctggatcacgctacgactccgatagagatatccagttcctgcaggatatcactagactctcgtcccctacccggctggcggtgatcccttggggagtccgcaaactgctgaggtgggttcggcggaactacggagacatggatatctacatcactgccagcggaatcgatgaccaggctctcgaagatgaccgcctgagaaagtactacctcggaaagtacctgcaggaagtcctcaaagcctacctgatcgacaaagtgcgtatcaaaggatactatgccttcaagctcgccgaagaaaaatcaaagccccgctttgggtttttcactagcgacttcaaagctaagtcctccattcaattctacaataaggtgatctcatcgaggggattcccgttcgaaaactcctcctcacgctgctcccaaacccaggagaacaccgaatgtacggtctgtctcttccttgtccaaaagaagcctctgatcttcttgggatgctgctttttctcgactctggtgctgctcctgagcatcgcgatcttccagcggcaaaagagacggaagttctggaaagccaagaatctgcagcacattcccttgaaaaagggcaaacgcgtggtgtca

SEQ ID NO: 251869 - DNA, 3132 bp, Artificial Sequence
  derived and/or modified sequence
atgaagccagggtgcgccgctggctctccgggaaatgaatggatctttttctccacggacgaaatcaccaccagataccgcaacaccatgtctaatggtgggctgcaacggtcagtaatcctgtccgccctgatactcctcagggcagtgaccggtttctccggagacgggcgggctatctggtccaagaacccgaactttacgcctgtgaatgagagccagcttttcctgtacgatacttttccaaaaaacttcttttggggcattggaaccggagcgctccaggtcgaggggagctggaaaaaggatggaaaaggcccatcgatttgggaccatttcatccatacccatctcaagaatgtttcgagcaccaacggcagctcagactcgtacattttcttggaaaaagacctttccgcactggactttatcggcgtgagcttctaccaatttagcatcagctggccgaggctgttcccggatggcatcgtgaccgtggcaaacgcaaagggactgcaatactatagcactttgctggatgcgctcgtgctgcgcaacattgagccaattgtcactctgtaccattgggacctccccctggcactccaagaaaagtatggaggatggaagaacgacaccatcatagacatcttcaacgattacgccacttactgcttccagatgttcggtgaccgggtgaagtactggattaccatacataatccgtacttggtggcatggcacggatacggcaccgggatgcacgctccgggcgaaaagggaaacctggcggccgtctacactgtcgggcacaatctcatcaaggcacacagcaaggtgtggcacaattacaacacgcacttccggccgcaccaaaagggatggctttcgatcacgttgggatcgcattggatcgagccgaaccggtctgagaacaccatggacatctttaagtgccagcagtcgatggtgtccgtgctgggctggttcgcaaaccctatccacggtgacggagactacccggaggggatgcgcaaaaagctgttttcggtgctgccaattttctcggaagccgaaaaacacgagatgcggggcactgccgatttcttcgccttttcgtttggccctaacaatttcaagcctctcaacactatggcgaagatgggacagaacgtgtcactgaatttgagagaagcgctcaactggatcaaacttgaatacaataacccccgaatcctgatcgcggaaaatggatggttcactgacagcagagtcaagactgaggacaccactgccatctacatgatgaagaatttcctctcgcaggtgctgcaggcaatccgcctcgatgaaatccgggtgttcggctacaccgcctggtccctgctcgatgggttcgaatggcaggacgcctacactatcagacgcggcctcttctacgtggatttcaattccaaacagaaagaacggaaaccgaagtcgagcgcccattactataagcagatcatacgggagaacgggttctccctgaaggagtcgaccccggatgtgcaaggacagttcccctgcgatttctcatggggtgtgaccgagtctgtgcttaaaccggagtcagtcgcatcttccccccaattctcggaccctcacctgtacgtctggaacgcaactgggaatcggctccttcaccgggtcgaaggggtcagactgaaaacgcgacctgcgcaatgtacggacttcgtgaacatcaaaaaacaactcgaaatgctggctcggatgaaagtgacccattaccgcttcgctctcgattgggcgtccgtgctccctacggggaacttgtccgccgtgaacagacaggcattgcgctattacagatgtgtggtcagtgagggtctgaagctgggtatctccgcgatggttaccctctactacccaacgcatgcgcacctgggactccctgagccactcctccatgccgacggatggctcaacccgtccaccgccgaggcttttcaagcgtacgccggtctgtgcttccaggagctcggggatctcgtgaagctgtggatcaccatcaacgaaccgaatcgcctgtcggacatctacaatagatcgggcaatgatacttatggggcggcccacaacctgttggtcgctcacgcccttgcgtggcggctgtatgacaggcagttccgcccgtcccaaagaggagcagtgtccctgtcactgcatgctgattgggccgagccagctaatccgtacgcggatagtcattggcgagcggctgaacggtttctgcagttcgaaatcgcctggttcgccgaaccacttttcaagaccggcgactacccggccgccatgagggagtacatcgcttccaagcaccgcaggggactgtcctcaagcgcactgcctcggctgaccgaagccgagaggcgcctgttgaagggtaccgtggacttttgcgcgctcaaccacttcactaccagatttgtgatgcacgaacagctcgctggctccaggtacgatagcgatagggacatccagttcctccaagacatcacccggctctcgtcgccgacccggctggcagtgattccttggggagttcggaagctgctgcgctgggtccgcagaaattacggagacatggacatctacatcactgcatccggaatcgacgatcaggcgctggaagatgaccgcctgagaaaatactacctgggaaagtacctccaagaagtgctcaaggcgtatttgatagacaaggtgcgcatcaagggatactacgcctttaagctggccgaagaaaagtcgaagcctcgttttggattcttcacttcggacttcaaggccaaatcctcaatccagttctacaacaaggtcatttcctctcgtggattcccgtttgaaaactcgtcctcacgctgcagtcaaacccaggaaaacactgaatgtaccgtttgtctcttcctggtccagaagaaacctctgattttcctcggatgctgcttcttttccactttggtgttgctgctgtcaatcgccatcttccaacgacagaaacggcgcaagttctggaaggcgaagaatctccagcacatcccgctgaaaaagggcaaacgtgtcgtctcc

SEQ ID NO: 251870 - DNA, 3135 bp, Artificial Sequence
  derived and/or modified sequence
atgaagcccggctgcgccgccggcagccccggcaacgagtggatcttcttcagcaccgacgagatcaccaccagatacagaaacaccatgagcaacggcggcctgcagagaagcgtgatcctgagcgccctgatcctgctgagagccgtgaccggcttcagcggcgacggcagagccatctggagcaagaaccccaacttcacccccgtgaacgagagccagctgttcctgtacgacaccttccccaagaacttcttctggggcatcggcaccggcgccctgcaggtggagggcagctggaagaaggacggcaagggccccagcatctgggaccacttcatccacacccacctgaagaacgtgagcagcaccaacggcagcagcgacagctacatcttcctggagaaggacctgagcgccctggacttcatcggcgtgagcttctaccagttcagcatcagctggcccagactgttccccgacggcatcgtgaccgtggccaacgccaagggcctgcagtactacagcaccctgctggacgccctggtgctgagaaacatcgagcccatcgtgaccctgtaccactgggacctgcccctggccctgcaggagaagtacggcggctggaagaacgacaccatcatcgacatcttcaacgactacgccacctactgcttccagatgttcggcgacagagtgaagtactggatcaccatccacaacccctacctggtggcctggcacggctacggcaccggcatgcacgcccccggcgagaagggcaacctggccgccgtgtacaccgtgggccacaacctgatcaaggcccacagcaaggtgtggcacaactacaacacccacttcagaccccaccagaagggctggctgagcatcaccctgggcagccactggatcgagcccaacagaagcgagaacaccatggacatcttcaagtgccagcagagcatggtgagcgtgctgggctggttcgccaaccccatccacggcgacggcgactaccccgagggcatgagaaagaagctgttcagcgtgctgcccatcttcagcgaggccgagaagcacgagatgagaggcaccgccgacttcttcgccttcagcttcggccccaacaacttcaagcccctgaacaccatggccaagatgggccagaacgtgagcctgaacctgagagaggccctgaactggatcaagctggagtacaacaaccccagaatcctgatcgccgagaacggctggttcaccgacagcagagtgaagaccgaggacaccaccgccatctacatgatgaagaacttcctgagccaggtgctgcaggccatcagactggacgagatcagagtgttcggctacaccgcctggagcctgctggacggcttcgagtggcaggacgcctacaccatcagaagaggcctgttctacgtggacttcaacagcaagcagaaggagagaaagcccaagagcagcgcccactactacaagcagatcatcagagagaacggcttcagcctgaaggagagcacccccgacgtgcagggccagttcccctgcgacttcagctggggcgtgaccgagagcgtgctgaagcccgagagcgtggccagcagcccccagttcagcgacccccacctgtacgtgtggaacgccaccggcaacagactgctgcacagagtggagggcgtgagactgaagaccagacccgcccagtgcaccgacttcgtgaacatcaagaagcagctggagatgctggccagaatgaaggtgacccactacagattcgccctggactgggccagcgtgctgcccaccggcaacctgagcgccgtgaacagacaggccctgagatactacagatgcgtggtgagcgagggcctgaagctgggcatcagcgccatggtgaccctgtactaccccacccacgcccacctgggcctgcccgagcccctgctgcacgccgacggctggctgaaccccagcaccgccgaggccttccaggcctacgccggcctgtgcttccaggagctgggcgacctggtgaagctgtggatcaccatcaacgagcccaacagactgagcgacatctacaacagaagcggcaacgacacctacggcgccgcccacaacctgctggtggcccacgccctggcctggagactgtacgacagacagttcagacccagccagagaggcgccgtgagcctgagcctgcacgccgactgggccgagcccgccaacccctacgccgacagccactggagagccgccgagagattcctgcagttcgagatcgcctggttcgccgagcccctgttcaagaccggcgactaccccgccgccatgagagagtacatcgccagcaagcacagaagaggcctgagcagcagcgccctgcccagactgaccgaggccgagagaagactgctgaagggcaccgtggacttctgcgccctgaaccacttcaccaccagattcgtgatgcacgagcagctggccggcagcagatacgacagcgacagagacatccagttcctgcaggacatcaccagactgagcagccccaccagactggccgtgatcccctggggcgtgagaaagctgctgagatgggtgagaagaaactacggcgacatggacatctacatcaccgccagcggcatcgacgaccaggccctggaggacgacagactgagaaagtactacctgggcaagtacctgcaggaggtgctgaaggcctacctgatcgacaaggtgagaatcaagggctactacgccttcaagctggccgaggagaagagcaagcccagattcggcttcttcaccagcgacttcaaggccaagagcagcatccagttctacaacaaggtgatcagcagcagaggcttccccttcgagaacagcagcagcagatgcagccagacccaggagaacaccgagtgcaccgtgtgcctgttcctggtgcagaagaagcccctgatcttcctgggctgctgcttcttcagcaccctggtgctgctgctgagcatcgccatcttccagagacagaagagaagaaagttctggaaggccaagaacctgcagcacatccccctgaagaagggcaagagagtggtgagctag

SEQ ID NO: 251871 - protein, 182 aa, Artificial Sequence
  derived and/or modified sequence
MDLQRPDSYQGGAGPDFNDHVLHKTILVGDSGVGKTSLLVQFDQGKFIPGSFSATVGIGFTNKVVTVDGVRVKLQIWDTAGQERFRSVTHAYYRDAQALLLLYDITNKSSFDNIRAWLTEIHEYAQRDVVIMLLGNKADMSSERVIRSEDGETLAREYGVPFLETSAKTGMNVELAFLAIAK

SEQ ID NO: 251872 - protein, 169 aa, Artificial Sequence
  derived and/or modified sequence
MDLQRPDSYQGGAGPDFNDHVLHKTILVGDSGVGKTSLLVQFDQGKFIPGSFSATVGIGFTNKVVTVDGVRVKLQIWDTAGQERFRSVTHAYYRDAQALLLLYDITNKSSFDNIRAWLTEIHEYAQRDVVIMLLGNKVSGSGAGSAQPCTSSALAGPITTQEQLSRHPS

SEQ ID NO: 251873 - protein, 216 aa, Artificial Sequence
  derived and/or modified sequence
MDLQRPDSYQGGAGPDFNDHVLHKTILVGDSGVGKTSLLVQFDQGKFIPGSFSATVGIGFTNKVVTVDGVRVKLQIWDTAGQERFRSVTHAYYRDAQALLLLYDITNKSSFDNIRAWLTEIHEYAQRDVVIMLLGNKADMSSERVIRSEDGETLAREYGVPFLETSAKTGMNVELAFLAIAKELKYRAGHQADEPSFQIRDYVESQKKRSSCCSFM

SEQ ID NO: 251874 - DNA, 549 bp, Artificial Sequence
  derived and/or modified sequence
atggacctgcaaagacctgattcctatcagggcggcgccggaccagacttcaacgatcatgtactacataaaacgatcctggtgggagatagtggcgtaggcaaaacatctctgttagtgcaattcgatcaaggaaaattcatacctggcagctttagcgctactgtgggaattggtttcacaaacaaagtggtcactgttgatggcgttagggtgaagctccaaatatgggacacggcgggtcaagaacgcttccgatccgtgacacatgcttattaccgcgacgcccaggcactgctcctgctgtatgatatcaccaacaagagttcctttgacaacattagggcctggctcacagagattcatgagtatgcacagcgggacgtggtaataatgctgctgggcaataaggctgatatgtccagcgaacgggtcatccgcagcgaggacggggagacattggcccgggagtacggcgtcccattcctggagacctccgccaagaccgggatgaacgtagagctggcgtttcttgcgatcgctaaatag

SEQ ID NO: 251875 - DNA, 510 bp, Artificial Sequence
  derived and/or modified sequence
atggatttgcagcgtccagatagctatcaaggaggtgcagggcctgatttcaacgaccatgtgctgcataaaaccattctagtgggggactccggagtgggcaaaacctctctgttagtgcagtttgatcagggaaagttcattccaggatctttctcggccacagttggaatagggttcaccaacaaggtggtgacagtggacggcgttagggtgaagcttcaaatttgggacactgccggtcaggagagattcaggagtgtcacccacgcttattatagggacgcccaggcactgctcctgctttatgacataacaaataagtcttcctttgataatatccgggcatggctgaccgagatccacgagtacgcgcagagggacgttgtgatcatgctcctcggcaacaaggtatctggtagtggagctggcagcgcacagccttgtacgtctagcgccctggcagggcccattacgacccaggagcagctgagtagacacccctcctag

SEQ ID NO: 251876 - DNA, 651 bp, Artificial Sequence
  derived and/or modified sequence
atggacctccagcgacccgacagttaccagggcggcgcaggaccggattttaatgaccacgttctgcataagaccattctcgtcggggactctggcgtcggcaaaaccagcctgctggttcagttcgatcagggtaagtttatccctgggtcattctcggcaaccgtgggcatcggcttcacgaataaggttgttaccgtcgatggcgtgagggtgaagctgcagatttgggataccgccggccaagagcgttttcgctcagtcacccatgcctactatcgcgatgcccaggccctcctgctactctacgatatcactaacaagtcttctttcgacaacatccgcgcctggctgaccgagatccacgagtacgcccagagagatgtggtcattatgctgcttggcaacaaggcagacatgagctcagagagggtgattcgctctgaagatggcgagacactggctcgggagtatggtgttccttttctggagacgtccgccaaaacgggcatgaacgtggaactagctttcctcgcaatcgcgaaggagctcaagtatcgtgcagggcaccaggctgacgagccttccttccagattcgagattacgtggagtcccaaaaaaaaaggtctagttgctgctctttcatgtag

SEQ ID NO: 251877 - DNA, 651 bp, Artificial Sequence
  derived and/or modified sequence
atggatcttcaacggccggactcctatcagggcggcgcaggccccgattttaatgatcatgtgcttcataaaacaatcctggtgggcgattcaggtgtcggcaaaacaagcttgttggtgcagttcgatcagggtaagtttataccaggctccttcagcgcaaccgtaggtatcggatttactaataaagtggtgaccgtggacggcgtccgggtcaagctgcagatttgggacaccgcaggtcaagagagattccgcagtgtcacacatgcctattaccgagacgcacaggcgctattgctactctacgacataactaacaagtccagctttgacaacatccgggcttggctgaccgaaattcacgaatacgcccagagagacgtcgtgattatgttattaggaaataaagcagacatgtcatcagagagggtgatacgttctgaggacggagagactcttgcacgcgagtacggcgtgcctttcctggagaccagcgctaaaactgggatgaacgtggagctggcatttttggcaatcgcaaaagagctaaaatatcgggctgggcaccaggccgacgaaccttccttccagattagggactatgtggagtctcagaagaaacgtagctcatgctgctcttttatgtag

SEQ ID NO: 251878 - DNA, 549 bp, Artificial Sequence
  derived and/or modified sequence
atggacctgcagaggccagacagctaccagggcggggccggccctgacttcaatgaccacgtgctgcacaagaccatcctggtgggggacagcggcgtgggcaagaccagcctgctggtgcagtttgaccagggcaagttcatccctggcagcttcagcgccaccgtgggcatcggcttcaccaacaaggtggtgacagtggatggagtgcgggtgaagctgcagatctgggacacagctggccaggagcgcttccgctctgtgacccacgcctactacagagatgcccaggccctgctgctgctgtatgacatcaccaacaagagcagctttgacaacatccgggcctggctgacagagatccacgagtatgcccagagagatgtggtgatcatgctgctgggcaacaaggctgacatgagcagcgagagggtcatccgctcagaagatggagagaccctggcccgggagtatggagtgcccttcctggagaccagcgccaagacaggcatgaatgtggagctggccttcctggccatcgccaagtag

SEQ ID NO: 251879 - DNA, 510 bp, Artificial Sequence
  derived and/or modified sequence
atggacctgcagaggccagacagctaccagggcggggccggccctgacttcaatgaccacgtgctgcacaagaccatcctggtgggggacagcggcgtgggcaagaccagcctgctggtgcagtttgaccagggcaagttcatccctggcagcttcagcgccaccgtgggcatcggcttcaccaacaaggtggtgacagtggatggagtgcgggtgaagctgcagatctgggacacagctggccaggagcgcttccgctctgtgacccacgcctactacagagatgcccaggccctgctgctgctgtatgacatcaccaacaagagcagctttgacaacatccgggcctggctgacagagatccacgagtatgcccagagagatgtggtgatcatgctgctgggcaacaaggtgtctggcagcggggccggcagcgcccagccctgcaccagcagcgccctggccggccccatcaccacccaggagcagctgagccgccaccccagctag

SEQ ID NO: 251880 - DNA, 651 bp, Artificial Sequence
  derived and/or modified sequence
atggacctgcagaggccagacagctaccagggcggggccggccctgacttcaatgaccacgtgctgcacaagaccatcctggtgggggacagcggcgtgggcaagaccagcctgctggtgcagtttgaccagggcaagttcatccctggcagcttcagcgccaccgtgggcatcggcttcaccaacaaggtggtgacagtggatggagtgcgggtgaagctgcagatctgggacacagctggccaggagcgcttccgctctgtgacccacgcctactacagagatgcccaggccctgctgctgctgtatgacatcaccaacaagagcagctttgacaacatccgggcctggctgacagagatccacgagtatgcccagagagatgtggtgatcatgctgctgggcaacaaggctgacatgagcagcgagagggtcatccgctcagaagatggagagaccctggcccgggagtatggagtgcccttcctggagaccagcgccaagacaggcatgaatgtggagctggccttcctggccatcgccaaggagctgaagtaccgggccggccaccaggctgatgagcccagcttccagatccgggactatgtggagagccagaagaagaggagcagctgctgcagcttcatgtag

SEQ ID NO: 251881 - DNA, 549 bp, Artificial Sequence
  derived and/or modified sequence
atggacctgcagcggcccgacagctaccagggcggcgccggccccgacttcaacgatcatgtgctgcacaaaactattctggtaggagattctggcgtcggaaagacctccctgctcgtgcagttcgatcagggaaaattcatccccgggtctttcagcgctaccgttggtatcggattcactaacaaagtagtgactgttgatggagtcagagtgaagctccaaatatgggacactgccgggcaggagcggttccggtccgtcacacatgcttattatcgggacgcacaggccctgctcctcctgtatgacatcactaacaaaagcagcttcgacaacatcagggcctggctaactgagattcatgaatacgcccagcgtgatgtagtcattatgctgctggggaataaggctgatatgtcctccgaacgggtcatacgcagtgaggatggggagactctggcacgcgagtatggggtcccatttctggagacttctgccaagacggggatgaatgttgagctcgccttccttgccattgcgaaatag

SEQ ID NO: 251882 - DNA, 510 bp, Artificial Sequence
  derived and/or modified sequence
atggacctgcagcggcccgacagctaccagggcggcgccggccccgattttaacgatcacgtgctgcacaagaccatcttagtgggcgatagcggtgtgggaaaaaccagccttttagttcagttcgatcaaggaaagttcataccaggctccttctccgctacagtggggataggcttcactaataaagtagttacagtggatggcgtgcgagtcaagcttcaaatttgggatacggccggtcaggagagatttagaagtgtcacacatgcttattaccgagacgctcaagccctgcttctgctgtacgacatcaccaacaagagctctttcgacaacatccgagcctggctgactgaaatacacgagtacgcccagagggacgtggtcataatgctacttggaaataaggtgtctggtagcggagccggaagcgctcaaccgtgcacgtcttccgctcttgcagggcccataactactcaggagcagttaagcagacatcctagctag

SEQ ID NO: 251883 - DNA, 651 bp, Artificial Sequence
  derived and/or modified sequence
atggacctgcagcggcccgacagctaccagggcggcgccggccccgacttcaacgaccacgtcctccacaaaaccatcctcgtgggggactccggtgtggggaaaacatctctgttggtccagtttgatcaaggcaagtttattccaggaagtttttccgccactgttgggattggtttcactaacaaggtcgtgactgttgacggagtgagagtgaagcttcagatctgggacactgccggtcaggagaggttcagaagtgtcacccatgcttattaccgcgacgcccaagctctcctactactctatgacattactaataaatcttccttcgataatatcagggcctggctgactgagatccacgagtacgcccagcgcgacgtcgttattatgctgctggggaacaaggcagacatgagtagtgaacgtgttattaggagcgaggacggagaaacacttgcccgagagtacggcgttccatttctggagacatccgcgaaaaccggaatgaacgtcgaactggccttcctggcaatcgctaaggagctgaaatatagggctggccaccaagcagacgaaccatcttttcagatccgcgattacgtggagtcccaaaaaaagcggtctagctgctgtagctttatgtag

SEQ ID NO: 251884 - DNA, 651 bp, Artificial Sequence
  derived and/or modified sequence
atggacctgcagcggcccgacagctaccagggcggcgccggccccgacttcaacgatcacgttttgcacaaaaccatcttggtgggcgacagtggagttggaaagacatccttactggtgcagttcgaccaaggcaagttcatccccggctctttttctgctacagtcggaatcggctttacaaacaaagtagtcacggtcgacggagttagagtgaaactgcagatatgggacactgccggccaggagagatttcgatcagtgacccacgcctactaccgggatgcgcaagctctgttgttgctgtacgacatcaccaataagtcaagcttcgataatatccgcgcatggctcacggaaattcacgagtatgcacagcgtgacgtagtgatcatgctgttaggcaacaaggccgacatgtcttccgaaagggtcatacggtccgaggacggcgaaacccttgctcgggagtacggcgttccttttttagaaacttccgctaaaaccggaatgaatgtggaattggcatttctggcgatcgctaaggagcttaagtacagagccggccatcaggcagatgagccaagcttccaaattagagactacgtggagtcccagaaaaaacgctctagctgttgttcatttatgtag

SEQ ID NO: 251885 - DNA, 549 bp, Artificial Sequence
  derived and/or modified sequence
atggacctgcagcgacctgactcttaccagggaggagctggtcccgatttcaacgaccacgtactccataagactatcctggtcggggactctggggtggggaaaactagcctcctagtccagtttgaccagggtaagtttattcccggtagcttcagtgcgacagtaggtatcggcttcacaaacaaggtggtgactgttgacggcgtccgcgtgaagctgcagatctgggacaccgctggccaagagcgcttcagatccgtaacacacgcctattatcgggatgcccaggcgctactgcttctgtatgacattacaaataagtcaagttttgataacatcagggcttggttaaccgaaattcatgagtatgctcagcgtgatgtcgttatcatgttgcttggcaataaggcagacatgtcctctgaaagggtgatcaggtcagaggatggggagactctggcacgagaatatggggtgccatttctggagacaagtgcaaagacggggatgaacgttgagctcgcctttctcgctatcgccaaatag

SEQ ID NO: 251886 - DNA, 510 bp, Artificial Sequence
  derived and/or modified sequence
atggatctgcagcggccagacagttatcagggcggagccggtcccgactttaacgaccacgtgctgcacaaaaccattttagtcggagatagtggggtggggaagactagcctgctcgtccagttcgatcagggcaaatttattcctgggagtttctccgccaccgttggcataggttttacgaataaagttgttactgtggatggagttcgggtgaagcttcagatctgggacactgcaggtcaggagagattccggagcgtcacccatgcatattaccgggacgcccaggcgcttttgttgttgtatgatataactaacaaatcatcgtttgacaatattcgcgcttggcttacagaaatacacgagtacgcgcagagagatgtggtaattatgcttctcgggaacaaggtctccgggagtggcgcagggtccgcccagccctgcacttcctcagccctcgctggaccgataacaactcaagagcaactgtctaggcacccttcttag

SEQ ID NO: 251887 - DNA, 651 bp, Artificial Sequence
  derived and/or modified sequence
atggacttgcaaaggccggactcttaccagggaggcgctgggccagactttaacgaccatgttctgcataaaactatcctggttggggactctggagtgggaaagacgtccctcttggttcagtttgaccagggcaaatttatcccgggatctttcagcgcaactgtagggatcgggtttactaacaaggtagtgacagtagacggtgttcgggtcaaactgcaaatttgggataccgccggtcaggagcgtttcaggagcgtgacccacgcctactatcgcgatgcccaagccctgctcctgctgtacgacattacaaataagagttcctttgacaacattagagcgtggttgacggagatccacgagtatgctcagcgcgatgtggtgatcatgttgcttgggaataaagccgacatgtcctcggaacgggtgatcaggagcgaggatggggagactctggctcgggaatacggggtgccattccttgaaacaagtgcaaagacagggatgaatgtggagttggcgttcttagctattgctaaagagctaaagtatcgggctggccatcaggcggatgagccatccttccagatacgtgattatgtggagtcacagaagaaacgctcttcgtgttgttcattcatgtag

SEQ ID NO: 251888 - DNA, 651 bp, Artificial Sequence
  derived and/or modified sequence
atggatctccagcggcctgactcatatcaaggaggagctggacccgattttaacgatcatgtgcttcacaaaactattttagtgggcgatagtggggttgggaagacttcactgcttgtgcagtttgatcagggcaagttcattcctggatcatttagtgcgacagtggggatcgggtttacaaataaagtcgtcactgtggacggagtgcgagtgaagcttcagatctgggatacggccggacaggaacggtttagaagtgtcacacatgcatactacagagatgcacaggccctcttactcctttacgacatcaccaacaagtccagcttcgataacatcagagcttggttgaccgagatacatgagtacgcccaaagagatgttgtgattatgctcctggggaataaggccgatatgagtagcgaaagagtgatccgaagcgaggatggcgaaaccctggcacgagagtatggcgtacctttcctggaaaccagtgccaagaccggaatgaacgtggaactggcttttctggctatcgcgaaggaactcaagtatagagctggtcaccaagcagacgagccttccttccagattagagactatgtcgaaagccagaagaaaagatcctcatgctgttcatttatgtag

SEQ ID NO: 251889 - DNA, 3805 bp, Artificial Sequence
  derived and/or modified sequence
ttcatcccctgccaggagagcatagtagctcacatttattgagttcttagtacacgctgggcactgttctaggctttttacatgaattaactcattaaatactcagaacaaaaccatgaggcaggtactattataatattatctccattttgtggacacttaggaaagattaatttgcccgagtttgcacgactaataattttcagaatcgagatttgaatcctggagcctgtgctcctaaccaaaccaccatctgcctctcctgagcccattgtccttaacttcttgcggtcatgtgtgctggagagaatgtgatcaaagccctggaccttctccctaggaaaacgcaggtaaacagaattttgcatatttcagggactttggggacacctaagacccatctactgtcgacctcagacttagaagctctatttatctcatacatcctggagagaattgtccagggacaaaaacagaagcgccgccagcgccgcaggacttcgcctctgcaaacgtgtgaggagagctgcgctgcgctgagctgcgtggtgacggagatgcccgttcgctcgggatcaggaacggtgagctcctgggaccgcaatgccctgagaacgcagccgggtgctgagcctccggagtccggtagctgaatgaaatacgcagggatcaccagccggacccaaatcttgcgtccctgccagcatcctggagtcctaagaggcagggattggagcggacaggatctcagaactctggtcccgggcgcacaacggcggagtcgctgttcctggtgctgaaacgctcagtcctggaagaacgtggccgcctgcccgcctggtaccgcgccgcggccgctgcggggaactgtccagtgctgaaaacggatgcggcccggcccgcagagctcagacccaagcctgccgcacccagcggagctcgaaccgagctcctggaagcgctgacgcagagcgcagggagagccggagcggcgagctccaagcctggcatggacctgcagagacccgattcctaccagggaggagctggccctgacttcaacgaccacgtcctgcataagaccatcctggtgggtgacagtggtgtgggaaagacgtctctgctggttcagttcgatcagggcaagttcatccccggctccttctcggccactgtgggcatcggattcacgaacaaggtggtgactgtggatggcgtgagagtgaagctgcagatctgggacaccgctgggcaggaacggttccgaagcgtcacccatgcttattacagagatgctcaggccttgcttctgctgtatgacatcaccaacaaatcttctttcgacaacatcagggcctggctcactgagattcatgagtatgcccagagggacgtggtgatcatgctgctaggcaacaaggcggatatgagcagcgaaagagtgatccgttccgaagacggagagaccttggccagggagtacggtgttcccttcctggagaccagcgccaagactggcatgaatgtggagttagcctttctggccatcgccaagtgagagctgggcagggaagggaagtgtgcggggcagggcggcacactccaggaatccagtagggcccggcccctggcccagcccctggacacacctgcattctgcaggctgaggtccatttgctctgggagcactgggccactgggagaggggagggggcggctcagctcctcaccccagcccagcccagcccagcccagcccattgtctcttcttcaagggaactgaaataccgggccgggcatcaggcggatgagcccagcttccagatccgagactatgtagagtcccagaagaagcgctccagctgctgctccttcatgtgaatcccagggggcagagaggaggctctggaggcacacaggatgcagccttccccctcccaggcctggcttattccaagaggctgagccaatggggagaaagatggaggactcactgcacagccgcttcctagcagggagctatactccaactcctacttgagttcctgcggtctccccgcatccacagggagggtaaaacacttagcttttattttaatagtacataatttaataccaaaaaaggcgcctggatccccaaaaaaccgaggctgggagctagtggcccttttgctttctaggacttggggggccggccctccctcctaagcataacaaaggtggtgttgctccagctcagccccaggggacacagatgcactttgggggtgagggcaggtaatgactccatcgcaccctcagttcagctggacagaggctcaggtgaccccagccttcactgtctcccgctctccaggagcttatcttcgccccatctcccaaataagtgggcccttgtgctgtgaggaagaccaaagcctcagggaagataagagatatggagatgggagggggaggacaaggggcagagagtagggtctagctggctatctctggccttactaacacccccctggaggcatgccccttttctccagcacacaagcacattggggcacctggaaatattggttccaggctcctgttctctggacttcagatcctgggggagcccctcccccccctgaatccctggcttagctaccttcctgcctgtgcacctaaaaacctcaggtcagaactaggaaaagagttttgtttttatttttttgaaatggagtctcgttctgtcgcccaggctgaggtgcagtagtgcaatctccgctcactacaacctccactccctggggctcaagcgatcctcccacctcagccgccgaagtagctgggactataggtgtgtaccatcacacctggctaatttttgtattttttgtagacacagggtttcgccatgttgcccaggctggtcttgaattcctgagctcaagcaacctgccggcctcggcctcccaaagtactgggattacacgcagaaggcaccatgcccaggctagatgtgtcttatcccaatcctttggcaggcatgcagctccacaggcgatttcttcaagcagctgaagtgtttagccctcctgggttaagagccagataaggagaaatccctttcctaggtttggaatgtgttgtgaaaaaaaagagaaatccctggctcctggagctggtgggagacaagattaagcaaacctcccctgacatgtatccctttgaccccaagctctgcctcctccctgaccacccatgccctttcctttaacttctcaaacagataccagggcctaaactgctttacctcccctcctactgagtcaggttaggtggtgggaggtcacccatttccgagttaaaccaatgcaatatgagtaaaacaaagtcatgtgggtatgtctggggtagagagaggggtagcaagttcatgtgtcctccttggtcacatatctcccaaagctccgatccctgccatgggaagtggacaggaaacatgaggtcatgacctgcaggcatctttactgcagctctgccggcctggagggggagagggggaggaagaagtatgcgctgcacatttctgaggctactgcatttgctttcaaggcagaaatcttgctctgagcagtcagcggctccagtttgggcccgataaggaagttctccgtggcctccctcaggcagagcagggaggaggctgacattgccagtctcttctggggcccaaggcaggttgcaggagatccaatcccatagacagctctgggcctcttgcatttgagtttttcagaattaaactgcagtattttggaaagca

SEQ ID NO: 251890 - DNA, 3780 bp, Artificial Sequence
  derived and/or modified sequence
aatgccctgagaacgcagccgggtgctgagcctccggagtccggtagctgaatgaaatacgcagggatcaccagccggacccaaatcttgcgtccctgccagcatcctggagtcctaagaggcagggattggagcggacaggatctcagaactctggtcccgggcgcacaacggcggagtcgctgttcctggtgctgaaacgctcagtcctggaagaacgtggccgcctgcccgcctggtaccgcgccgcggccgctgcggggaactgtccagtgctgaaaacggatgcggcccggcccgcagagctcagacccaagcctgccgcacccagcggagctcgaaccgagctcctggaagcgctgacgcagagcgcagggagagccggagcggcgagctccaagcctggcatggacctgcagagacccgattcctaccagggaggagctggccctgacttcaacgaccacgtcctgcataagaccatcctggtgggtgacagtggtgtgggaaagacgtctctgctggttcagttcgatcagggcaagttcatccccggctccttctcggccactgtgggcatcggattcacgaacaaggtggtgactgtggatggcgtgagagtgaagctgcagatctgggacaccgctgggcaggaacggttccgaagcgtcacccatgcttattacagagatgctcaggccttgcttctgctgtatgacatcaccaacaaatcttctttcgacaacatcagggcctggctcactgagattcatgagtatgcccagagggacgtggtgatcatgctgctaggcaacaaggtgagtggctccggggcagggtcagcccagccctgcacttcctcagccctagccggccccataaccacccaagaacagttatctaggcatccttcctgaaaaggactctgcagcctccagctcaggggtcagacatatctggaggcttctgcccatcccatctgccccttccagggaaagtccaagttgttgcctgagaaatcaaggggtgcccagttctcagcccccattagagcagagtgaacagggtcccaggtcaggggctaagagtgcaaagggttagccccaactgctgtcctattccaagaccctttaccaaaggtgagatcccagagctgggagctacactgggcagaaaccctggccccaggccaatcacacctgcctgcagtcccttgggccaccagcagagggcaggcaacgcctgcttctggggcaaaatatgggcccgctggggcggaggcctccttccccagagtgacccatttgggcttgacaggcggatatgagcagcgaaagagtgatccgttccgaagacggagagaccttggccagggtaagtgattgtctgtgggacagggtgaagggtgggggcaacccgacgctggccctgaggacactctctcccgggcaggagtacggtgttcccttcctggagaccagcgccaagactggcatgaatgtggagttagcctttctggccatcgccaagtgagagctgggcagggaagggaagtgtgcggggcagggcggcacactccaggaatccagtagggcccggcccctggcccagcccctggacacacctgcattctgcaggctgaggtccatttgctctgggagcactgggccactgggagaggggagggggcggctcagctcctcaccccagcccagcccagcccagcccagcccattgtctcttcttcaagggaactgaaataccgggccgggcatcaggcggatgagcccagcttccagatccgagactatgtagagtcccagaagaagcgctccagctgctgctccttcatgtgaatcccagggggcagagaggaggctctggaggcacacaggatgcagccttccccctcccaggcctggcttattccaagaggctgagccaatggggagaaagatggaggactcactgcacagccgcttcctagcagggagctatactccaactcctacttgagttcctgcggtctccccgcatccacagggagggtaaaacacttagcttttattttaatagtacataatttaataccaaaaaaggcgcctggatccccaaaaaaccgaggctgggagctagtggcccttttgctttctaggacttggggggccggccctccctcctaagcataacaaaggtggtgttgctccagctcagccccaggggacacagatgcactttgggggtgagggcaggtaatgactccatcgcaccctcagttcagctggacagaggctcaggtgaccccagccttcactgtctcccgctctccaggagcttatcttcgccccatctcccaaataagtgggcccttgtgctgtgaggaagaccaaagcctcagggaagataagagatatggagatgggagggggaggacaaggggcagagagtagggtctagctggctatctctggccttactaacacccccctggaggcatgccccttttctccagcacacaagcacattggggcacctggaaatattggttccaggctcctgttctctggacttcagatcctgggggagcccctcccccccctgaatccctggcttagctaccttcctgcctgtgcacctaaaaacctcaggtcagaactaggaaaagagttttgtttttatttttttgaaatggagtctcgttctgtcgcccaggctgaggtgcagtagtgcaatctccgctcactacaacctccactccctggggctcaagcgatcctcccacctcagccgccgaagtagctgggactataggtgtgtaccatcacacctggctaatttttgtattttttgtagacacagggtttcgccatgttgcccaggctggtcttgaattcctgagctcaagcaacctgccggcctcggcctcccaaagtactgggattacacgcagaaggcaccatgcccaggctagatgtgtcttatcccaatcctttggcaggcatgcagctccacaggcgatttcttcaagcagctgaagtgtttagccctcctgggttaagagccagataaggagaaatccctttcctaggtttggaatgtgttgtgaaaaaaaagagaaatccctggctcctggagctggtgggagacaagattaagcaaacctcccctgacatgtatccctttgaccccaagctctgcctcctccctgaccacccatgccctttcctttaacttctcaaacagataccagggcctaaactgctttacctcccctcctactgagtcaggttaggtggtgggaggtcacccatttccgagttaaaccaatgcaatatgagtaaaacaaagtcatgtgggtatgtctggggtagagagaggggtagcaagttcatgtgtcctccttggtcacatatctcccaaagctccgatccctgccatgggaagtggacaggaaacatgaggtcatgacctgcaggcatctttactgcagctctgccggcctggagggggagagggggaggaagaagtatgcgctgcacatttctgaggctactgcatttgctttcaaggcagaaatcttgctctgagcagtcagcggctccagtttgggcccgataaggaagttctccgtggcctccctcaggcagagcagggaggaggctgacattgccagtctcttctggggcccaaggcaggttgcaggagatccaatcccatagacagctctgggcctcttgcatttgagtttttcagaattaaactgcagtattttggaaagca

SEQ ID NO: 251891 - DNA, 3044 bp, Artificial Sequence
  derived and/or modified sequence
agctgcgtggtgacggagatgcccgttcgctcgggatcaggaacggtgagctcctgggaccgcaatgccctgagaacgcagccgggtgctgagcctccggagtccggtagctgaatgaaatacgcagggatcaccagccggacccaaatcttgcgtccctgccagcatcctggagtcctaagaggcagggattggagcggacaggatctcagaactctggtcccgggcgcacaacggcggagtcgctgttcctggtgctgaaacgctcagtcctggaagaacgtggccgcctgcccgcctggtaccgcgccgcggccgctgcggggaactgtccagtgctgaaaacggatgcggcccggcccgcagagctcagacccaagcctgccgcacccagcggagctcgaaccgagctcctggaagcgctgacgcagagcgcagggagagccggagcggcgagctccaagcctggcatggacctgcagagacccgattcctaccagggaggagctggccctgacttcaacgaccacgtcctgcataagaccatcctggtgggtgacagtggtgtgggaaagacgtctctgctggttcagttcgatcagggcaagttcatccccggctccttctcggccactgtgggcatcggattcacgaacaaggtggtgactgtggatggcgtgagagtgaagctgcagatctgggacaccgctgggcaggaacggttccgaagcgtcacccatgcttattacagagatgctcaggccttgcttctgctgtatgacatcaccaacaaatcttctttcgacaacatcagggcctggctcactgagattcatgagtatgcccagagggacgtggtgatcatgctgctaggcaacaaggcggatatgagcagcgaaagagtgatccgttccgaagacggagagaccttggccagggagtacggtgttcccttcctggagaccagcgccaagactggcatgaatgtggagttagcctttctggccatcgccaaggaactgaaataccgggccgggcatcaggcggatgagcccagcttccagatccgagactatgtagagtcccagaagaagcgctccagctgctgctccttcatgtgaatcccagggggcagagaggaggctctggaggcacacaggatgcagccttccccctcccaggcctggcttattccaagaggctgagccaatggggagaaagatggaggactcactgcacagccgcttcctagcagggagctatactccaactcctacttgagttcctgcggtctccccgcatccacagggagggtaaaacacttagcttttattttaatagtacataatttaataccaaaaaaggcgcctggatccccaaaaaaccgaggctgggagctagtggcccttttgctttctaggacttggggggccggccctccctcctaagcataacaaaggtggtgttgctccagctcagccccaggggacacagatgcactttgggggtgagggcaggtaatgactccatcgcaccctcagttcagctggacagaggctcaggtgaccccagccttcactgtctcccgctctccaggagcttatcttcgccccatctcccaaataagtgggcccttgtgctgtgaggaagaccaaagcctcagggaagataagagatatggagatgggagggggaggacaaggggcagagagtagggtctagctggctatctctggccttactaacacccccctggaggcatgccccttttctccagcacacaagcacattggggcacctggaaatattggttccaggctcctgttctctggacttcagatcctgggggagcccctcccccccctgaatccctggcttagctaccttcctgcctgtgcacctaaaaacctcaggtcagaactaggaaaagagttttgtttttatttttttgaaatggagtctcgttctgtcgcccaggctgaggtgcagtagtgcaatctccgctcactacaacctccactccctggggctcaagcgatcctcccacctcagccgccgaagtagctgggactataggtgtgtaccatcacacctggctaatttttgtattttttgtagacacagggtttcgccatgttgcccaggctggtcttgaattcctgagctcaagcaacctgccggcctcggcctcccaaagtactgggattacacgcagaaggcaccatgcccaggctagatgtgtcttatcccaatcctttggcaggcatgcagctccacaggcgatttcttcaagcagctgaagtgtttagccctcctgggttaagagccagataaggagaaatccctttcctaggtttggaatgtgttgtgaaaaaaaagagaaatccctggctcctggagctggtgggagacaagattaagcaaacctcccctgacatgtatccctttgaccccaagctctgcctcctccctgaccacccatgccctttcctttaacttctcaaacagataccagggcctaaactgctttacctcccctcctactgagtcaggttaggtggtgggaggtcacccatttccgagttaaaccaatgcaatatgagtaaaacaaagtcatgtgggtatgtctggggtagagagaggggtagcaagttcatgtgtcctccttggtcacatatctcccaaagctccgatccctgccatgggaagtggacaggaaacatgaggtcatgacctgcaggcatctttactgcagctctgccggcctggagggggagagggggaggaagaagtatgcgctgcacatttctgaggctactgcatttgctttcaaggcagaaatcttgctctgagcagtcagcggctccagtttgggcccgataaggaagttctccgtggcctccctcaggcagagcagggaggaggctgacattgccagtctcttctggggcccaaggcaggttgcaggagatccaatcccatagacagctctgggcctcttgcatttgagtttttcagaattaaactgcagtattttggaaagc

SEQ ID NO: 251892 - DNA, 1730 bp, Artificial Sequence
  derived and/or modified sequence
ggagatgcccgttcgctcgggatcaggaacggtgagctcctgggaccgcaatgccctgagaacgcagccgggtgctgagcctccggagtccggtagctgaatgaaatacgcagggatcaccagccggacccaaatcttgcgtccctgccagcatcctggagtcctaagaggcagggattggagcggacaggatctcagaactctggtcccgggcgcacaacggcggagtcgctgttcctggtgctgaaacgctcagtcctggaagaacgtggccgcctgcccgcctggtaccgcgccgcggccgctgcggggaactgtccagtgctgaaaacggatgcggcccggcccgcagagctcagacccaagcctgccgcacccagcggagctcgaaccgagctcctggaagcgctgacgcagagcgcagggagagccggagcggcgagctccaagcctggcatggacctgcagagacccgattcctaccagggaggagctggccctgacttcaacgaccacgtcctgcataagaccatcctggtgggtgacagtggtgtgggaaagacgtctctgctggttcagttcgatcagggcaagttcatccccggctccttctcggccactgtgggcatcggattcacgaacaaggtggtgactgtggatggcgtgagagtgaagctgcagatctgggacaccgctgggcaggaacggttccgaagcgtcacccatgcttattacagagatgctcaggccttgcttctgctgtatgacatcaccaacaaatcttctttcgacaacatcagggcctggctcactgagattcatgagtatgcccagagggacgtggtgatcatgctgctaggcaacaaggcggatatgagcagcgaaagagtgatccgttccgaagacggagagaccttggccagggagtacggtgttcccttcctggagaccagcgccaagactggcatgaatgtggagttagcctttctggccatcgccaaggaactgaaataccgggccgggcatcaggcggatgagcccagcttccagatccgagactatgtagagtcccagaagaagcgctccagctgctgctccttcatgtgaatcccagggggcagagaggaggctctggaggcacacaggatgcagccttcccccacccatgccctttcctttaacttctcaaacagataccagggcctaaactgctttacctcccctcctactgagtcaggttaggtggtgggaggtcacccatttccgagttaaaccaatgcaatatgagtaaaacaaagtcatgtgggtatgtctggggtagagagaggggtagcaagttcatgtgtcctccttggtcacatatctcccaaagctccgatccctgccatgggaagtggacaggaaacatgaggtcatgacctgcaggcatctttactgcagctctgccggcctggagggggagagggggaggaagaagtatgcgctgcacatttctgaggctactgcatttgctttcaaggcagaaatcttgctctgagcagtcagcggctccagtttgggcccgataaggaagttctccgtggcctccctcaggcagagcagggaggaggctgacattgccagtctcttctggggcccaaggcaggttgcaggagatccaatcccatagacagctctgggcctcttgcatttgagtttttcagaattaaactgcagtattttggaaagca

SEQ ID NO: 251893 - DNA, 549 bp, Artificial Sequence
  derived and/or modified sequence
atggacctgcagagacccgacagctaccagggcggcgccggccccgacttcaacgaccacgtgctgcacaagaccatcctggtgggcgacagcggcgtgggcaagaccagcctgctggtgcagttcgaccagggcaagttcatccccggcagcttcagcgccaccgtgggcatcggcttcaccaacaaggtggtgaccgtggacggcgtgagagtgaagctgcagatctgggacaccgccggccaggagagattcagaagcgtgacccacgcctactacagagacgcccaggccctgctgctgctgtacgacatcaccaacaagagcagcttcgacaacatcagagcctggctgaccgagatccacgagtacgcccagagagacgtggtgatcatgctgctgggcaacaaggccgacatgagcagcgagagagtgatcagaagcgaggacggcgagaccctggccagagagtacggcgtgcccttcctggagaccagcgccaagaccggcatgaacgtggagctggccttcctggccatcgccaagtag

SEQ ID NO: 251894 - DNA, 510 bp, Artificial Sequence
  derived and/or modified sequence
atggacctgcagagacccgacagctaccagggcggcgccggccccgacttcaacgaccacgtgctgcacaagaccatcctggtgggcgacagcggcgtgggcaagaccagcctgctggtgcagttcgaccagggcaagttcatccccggcagcttcagcgccaccgtgggcatcggcttcaccaacaaggtggtgaccgtggacggcgtgagagtgaagctgcagatctgggacaccgccggccaggagagattcagaagcgtgacccacgcctactacagagacgcccaggccctgctgctgctgtacgacatcaccaacaagagcagcttcgacaacatcagagcctggctgaccgagatccacgagtacgcccagagagacgtggtgatcatgctgctgggcaacaaggtgagcggcagcggcgccggcagcgcccagccctgcaccagcagcgccctggccggccccatcaccacccaggagcagctgagcagacaccccagctag

SEQ ID NO: 251895 - DNA, 651 bp, Artificial Sequence
  derived and/or modified sequence
atggacctgcagagacccgacagctaccagggcggcgccggccccgacttcaacgaccacgtgctgcacaagaccatcctggtgggcgacagcggcgtgggcaagaccagcctgctggtgcagttcgaccagggcaagttcatccccggcagcttcagcgccaccgtgggcatcggcttcaccaacaaggtggtgaccgtggacggcgtgagagtgaagctgcagatctgggacaccgccggccaggagagattcagaagcgtgacccacgcctactacagagacgcccaggccctgctgctgctgtacgacatcaccaacaagagcagcttcgacaacatcagagcctggctgaccgagatccacgagtacgcccagagagacgtggtgatcatgctgctgggcaacaaggccgacatgagcagcgagagagtgatcagaagcgaggacggcgagaccctggccagagagtacggcgtgcccttcctggagaccagcgccaagaccggcatgaacgtggagctggccttcctggccatcgccaaggagctgaagtacagagccggccaccaggccgacgagcccagcttccagatcagagactacgtggagagccagaagaagagaagcagctgctgcagcttcatgtag

SEQ ID NO: 251896 - protein, 435 aa, Artificial Sequence
  derived and/or modified sequence
MQGQGRRRGTCKDIFCSKMASYLYGVLFAVGLCAPIYCVSPANAPSAYPRPSSTKSTPASQVYSLNTDFAFRLYRRLVLETPSQNIFFSPVSVSTSLAMLSLGAHSVTKTQILQGLGFNLTHTPESAIHQGFQHLVHSLTVPSKDLTLKMGSALFVKKELQLQANFLGNVKRLYEAEVFSTDFSNPSIAQARINSHVKKKTQGKVVDIIQGLDLLTAMVLVNHIFFKAKWEKPFHPEYTRKNFPFLVGEQVTVHVPMMHQKEQFAFGVDTELNCFVLQMDYKGDAVAFFVLPSKGKMRQLEQALSARTLRKWSHSLQKRWIEVFIPRFSISASYNLETILPKMGIQNVFDKNADFSGIAKRDSLQVSKATHKAVLDVSEEGTEATAATTTKFIVRSKDGPSYFTVSFNRTFLMMITNKATDGILFLGKVENPTKS

SEQ ID NO: 251897 - DNA, 1308 bp, Artificial Sequence
  derived and/or modified sequence
atgcagggacagggcaggcgcagagggacctgcaaggatattttctgcagtaagatggcgtcatatctttacggagtgttgttcgcagtgggattgtgcgcccctatctattgcgtctcacccgcaaacgctccatctgcctatcccagaccctcctcaaccaagagtactccagcgtcccaagtgtactccctcaatactgatttcgcctttagactctacagaagattggttttagagactccttcccagaatatctttttcagcccagttagcgtctccacctccctcgccatgctgtcactcggcgctcattctgtgactaaaacgcagattctccagggcctggggttcaacctgacacacacacccgagtctgctattcatcaggggtttcagcatctggtccattctctgactgtgccttcaaaagatctcaccctcaagatgggatcagctcttttcgttaagaaggaactgcaactgcaggccaatttccttggaaatgttaagagactgtacgaagccgaggtgtttagtaccgattttagtaacccaagtatagcccaggctcgcattaatagtcacgtgaaaaaaaaaactcaaggcaaagtggtcgacattatccaaggccttgatctgcttacagccatggtgctcgtgaaccacatcttttttaaggcgaagtgggagaaaccatttcatccagagtacacaaggaagaattttccttttcttgtcggggagcaggtaactgtgcacgtcccgatgatgcatcagaaggagcagttcgcattcggggtcgacaccgagctcaactgtttcgtgcttcaaatggattataaaggggacgccgtggctttttttgttctcccaagcaaaggcaaaatgagacagttggagcaggccctgtcagccagaaccttgcgaaaatggagtcattctcttcagaagagatggatcgaggtcttcattcccagattcagtatttctgcatcctataacctggagaccattctccccaaaatgggaatccaaaacgtgtttgacaagaatgctgacttcagcggaattgccaagcgggactccctgcaagtaagcaaagccacccataaggccgtgctggatgttagcgaggaaggtactgaggccaccgctgctaccacaaccaaatttatcgtgcgctccaaggacgggccttcttacttcacagtcagtttcaacaggacctttctgatgatgattacaaataaggccacagatggtatcctatttcttggcaaagttgaaaaccctacaaaatcctag

SEQ ID NO: 251898 - DNA, 1308 bp, Artificial Sequence
  derived and/or modified sequence
atgcagggtcaggggaggagaagaggtacatgcaaagatatcttctgctctaagatggcttcttacttgtatggagtcctgttcgctgtaggactctgcgcacctatctactgtgtcagccccgccaatgcccccagcgcttatccacggccctcttcaacaaaaagcacgccagctagccaagtctactctctgaacacagattttgcttttcgtctgtaccgtagactcgttctggaaactccctcacagaacattttcttttctccggtgtccgtgtcaacatctctggccatgctctccttgggagctcacagtgtaacgaaaacccaaattctacagggcctcggatttaacttaacccatacacccgaaagtgctattcaccagggatttcagcacctcgtccattcgctcacggttcctagcaaggatctgacattgaaaatgggtagcgccttgtttgtcaaaaaagaactccagctgcaggctaattttctaggcaacgtgaaacgactttatgaggcagaggtgttctctactgattttagcaaccctagtatcgcccaggcaaggattaactcacatgtcaagaagaaaacccagggaaaggtggtggatattattcaggggctggatctgctcactgccatggtgcttgtcaaccacatcttttttaaagcgaaatgggagaagccattccacccagaatacacaagaaagaacttcccctttctagttggagagcaggtgactgtccacgtgcctatgatgcatcagaaagagcaattcgccttcggggtggataccgaactgaattgtttcgtgctgcaaatggactacaaaggcgacgctgtcgctttttttgtgctgccaagtaaaggcaagatgaggcagcttgagcaggctctgagcgctcggaccctgagaaagtggagtcactcgctgcagaagcgatggatcgaagttttcatccccagattcagcattagtgccagttacaacttggaaacaatccttcccaaaatgggcattcagaatgtgttcgataaaaacgcagatttttccggcatcgcaaagagggactctctgcaggtgtccaaggccacacacaaagccgtactcgacgtgagtgaggagggaaccgaagccactgcagcaactaccaccaaatttattgtgcgatctaaagatggcccctcttatttcactgtgagctttaaccgcaccttcttaatgatgatcacgaacaaagcaacagatggcattctgttcctggggaaggttgaaaatcctactaagagctag

SEQ ID NO: 251899 - DNA, 1308 bp, Artificial Sequence
  derived and/or modified sequence
atgcaaggccagggtagacgaaggggcacttgcaaagatattttctgcagtaaaatggccagttacttatacggagtgctattcgctgtcggcttgtgtgcccccatctactgtgtttcacctgctaacgctcccagcgcttacccgcgaccatccagcacaaaatccacccctgcatcccaagtctacagcctgaacacagatttcgcattccgcctgtatcgcagacttgttctagaaaccccatctcagaatattttcttctctcccgtgagcgttagcacttctttggcaatgttaagtctcggggcccacagcgtaacaaaaacacagattctgcagggtttaggctttaacctcacacacacaccagaatccgctatccaccaaggatttcaacatctagttcactcgctaacagtaccatctaaggacctgacgctgaaaatgggatccgccttgtttgtgaagaaggaactgcagcttcaggctaattttctgggaaatgtcaagcgcctgtatgaggccgaagtgttttctactgacttttccaacccaagcattgcccaggcgaggattaattcccatgttaaaaagaagactcagggaaaagttgtggacattattcagggtttggaccttcttacagccatggtgctggtcaatcacattttctttaaagcgaaatgggagaaacctttccatcccgaatacaccaggaaaaattttccttttcttgtgggtgagcaggtaactgtgcatgtcccaatgatgcaccagaaggaacagttcgcatttggtgtggatacagaactaaactgttttgttctgcagatggactataagggtgacgccgttgcattttttgtgttgccttcaaaagggaagatgcgacaactggaacaagcgttgtctgccagaactttgcgaaaatggtcccatagccttcagaagagatggatagaagtgtttatcccaagattttccatatcagcctcctacaatttagaaactattcttccaaaaatgggtatccagaatgtttttgacaagaacgccgatttctcagggattgccaagagagacagtctccaagtctccaaagccacacacaaagcagtgctcgatgtttctgaggaaggaactgaggcaacggccgccaccacaacaaagttcatcgtgcgatctaaagatgggccctcctattttactgtgtcctttaatcgcaccttcttgatgatgatcacaaacaaagcaacagacggcattctatttctcggcaaagttgagaacccaacaaagtcctag

SEQ ID NO: 251900 - DNA, 1308 bp, Artificial Sequence
  derived and/or modified sequence
atgcagggccagggcagaagaagaggcacctgcaaggacatcttctgcagcaagatggccagctacctgtacggcgtgctgttcgccgtgggcctgtgcgcccccatctactgcgtgagccccgccaacgcccccagcgcctaccccagacccagcagcaccaagagcacccccgccagccaggtgtacagcctgaacaccgacttcgccttcagactgtacagaagactggtgctggagacccccagccagaacatcttcttcagccccgtgagcgtgagcaccagcctggccatgctgagcctgggcgcccacagcgtgaccaagacccagatcctgcagggcctgggcttcaacctgacccacacccccgagagcgccatccaccagggcttccagcacctggtgcacagcctgaccgtgcccagcaaggacctgaccctgaagatgggcagcgccctgttcgtgaagaaggagctgcagctgcaggccaacttcctgggcaacgtgaagagactgtacgaggccgaggtgttcagcaccgacttcagcaaccccagcatcgcccaggccagaatcaacagccacgtgaagaagaagacccagggcaaggtggtggacatcatccagggcctggacctgctgaccgccatggtgctggtgaaccacatcttcttcaaggccaagtgggagaagcccttccaccccgagtacaccagaaagaacttccccttcctggtgggcgagcaggtgaccgtgcacgtgcccatgatgcaccagaaggagcagttcgccttcggcgtggacaccgagctgaactgcttcgtgctgcagatggactacaagggcgacgccgtggccttcttcgtgctgcccagcaagggcaagatgagacagctggagcaggccctgagcgccagaaccctgagaaagtggagccacagcctgcagaagagatggatcgaggtgttcatccccagattcagcatcagcgccagctacaacctggagaccatcctgcccaagatgggcatccagaacgtgttcgacaagaacgccgacttcagcggcatcgccaagagagacagcctgcaggtgagcaaggccacccacaaggccgtgctggacgtgagcgaggagggcaccgaggccaccgccgccaccaccaccaagttcatcgtgagaagcaaggacggccccagctacttcaccgtgagcttcaacagaaccttcctgatgatgatcaccaacaaggccaccgacggcatcctgttcctgggcaaggtggagaaccccaccaagagctag

SEQ ID NO: 251901 - DNA, 1755 bp, Artificial Sequence
  derived and/or modified sequence
cagctggagggagaggagagattaaagtgaggagagagctacaaccaagtaagcaagtgtcagggctcaccaaccatgcaaggacagggcaggagaagaggaacctgcaaagacatattttgttccaaaatggcatcttacctttatggagtactctttgctgttggcctctgtgctccaatctactgtgtgtccccggccaatgcccccagtgcatacccccgcccttcctccacaaagagcacccctgcctcacaggtgtattccctcaacaccgactttgccttccgcctataccgcaggctggttttggagaccccgagtcagaacatcttcttctcccctgtgagtgtctccacttccctggccatgctctcccttggggcccactcagtcaccaagacccagattctccagggcctgggcttcaacctcacacacacaccagagtctgccatccaccagggcttccagcacctggttcactcactgactgttcccagcaaagacctgaccttgaagatgggaagtgccctcttcgtcaagaaggagctgcagctgcaggcaaatttcttgggcaatgtcaagaggctgtatgaagcagaagtcttttctacagatttctccaacccctccattgcccaggcgaggatcaacagccatgtgaaaaagaagacccaagggaaggttgtagacataatccaaggccttgaccttctgacggccatggttctggtgaaccacattttctttaaagccaagtgggagaagccctttcaccctgaatatacaagaaagaacttcccattcctggtgggcgagcaggtcactgtgcatgtccccatgatgcaccagaaagagcagttcgcttttggggtggatacagagctgaactgctttgtgctgcagatggattacaagggagatgccgtggccttctttgtcctccctagcaagggcaagatgaggcaactggaacaggccttgtcagccagaacactgagaaagtggagccactcactccagaaaaggtggatagaggtgttcatccccagattttccatttctgcctcctacaatctggaaaccatcctcccgaagatgggcatccaaaatgtctttgacaaaaatgctgatttttctggaattgcaaagagagactccctgcaggtttctaaagcaacccacaaggctgtgctggatgtcagtgaagagggcactgaggccacagcagctaccaccaccaagttcatagtccgatcgaaggatggcccctcttacttcactgtctccttcaataggaccttcctgatgatgattacaaataaagccacagacggtattctctttctagggaaagtggaaaatcccactaaatcctaggtgggaaatggcctgttaactgatggcacattgctaatgcacaagaaataacaaaccacatccctctttctgttctgagggtgcatttgaccccagtggagctggattcgctggcagggatgccacttccaaggctcaatcaccaaaccatcaacagggaccccagtcacaagccaacacccattaaccccagtcagtgcccttttccacaaattctcccaggtaactagcttcatgggatgttgctgggttaccatatttccattccttggggctcccaggaatggaaatacgccaacccaggttaggcacctctattgcagaattacaataacacattcaataaaactaaaatatgaattcatctgtcaa

SEQ ID NO: 251902 - DNA, 1308 bp, Artificial Sequence
  derived and/or modified sequence
atgcagggacaagggagaagaaggggaacttgcaaggacatattttgctccaagatggctagctacttgtatggtgtactctttgccgttggactctgtgcccctatatactgtgtctccccagcgaatgctccttcagcttaccctcgccctagctctactaaatctacccctgcctcccaagtctattccctaaataccgactttgcatttcgcctgtatcgcaggttggtgctggaaaccccatctcagaatatcttcttctccccagtttcggtgtccacttctctggcgatgctctccttgggcgctcattccgtgacgaaaactcagattctccagggattgggctttaacctgactcatactcctgagtcagctattcatcagggatttcaacaccttgtgcattcactcaccgtcccgagcaaggacctgaccctcaagatgggcagtgctctgttcgtgaaaaaggagttgcagctgcaagcaaattttctcggaaatgttaaacgtctgtacgaggcagaggtgttctccacagatttcagcaacccctctatagcacaggccagaattaactctcacgtaaaaaagaagacccaggggaaagtcgtggacatcatacagggcttggacctgctcactgcaatggtgctggttaatcacattttctttaaggctaaatgggagaaaccatttcacccagaatacaccagaaagaattttccattcttggttggcgagcaagtgacagtgcacgtccctatgatgcatcaaaaagagcagtttgctttcggggtggacactgagctcaactgctttgtactgcaaatggattataaaggcgatgctgtagcctttttcgtcctgcctagtaaaggtaagatgcgccaattggaacaggctctcagtgcgcggaccttgaggaagtggagccatagtctgcagaaacgctggatcgaagtctttatccctaggttttccataagtgccagctacaacctggagacaatactccccaaaatggggatacaaaacgtgtttgataaaaacgcagacttttctggcattgctaaaagagattcactgcaggtgtccaaggcaactcacaaggcagtgttggatgtcagcgaggaggggaccgaggccacagccgctactactactaagttcatagtaaggagcaaagatgggccgtcatattttaccgtcagtttcaatcgcaccttcttaatgatgattactaacaaggctactgacggcatcttgttcctgggcaaggtagagaaccccactaaatcatag

SEQ ID NO: 251903 - DNA, 1308 bp, Artificial Sequence
  derived and/or modified sequence
atgcagggccagggcagaagaagaggcacctgcaaggacatcttctgcagcaagatggccagctacctgtatggagtgctgtttgctgtgggcctgtgtgcccccatctactgtgtgtccccagccaatgcccccagcgcctacccccggcccagcagcaccaagagcaccccagccagccaggtgtacagcctgaacacagactttgccttccggctgtacagaaggctggtgctggagacccccagccagaacatcttcttcagccctgtgtctgtgtccaccagcctggccatgctgagcctgggcgcccacagcgtgaccaagacccagatcctgcagggcctgggcttcaacctgacccacaccccagagagcgccatccaccagggcttccagcacctggtgcacagcctgactgtgcccagcaaggacctgaccctgaagatgggcagcgccctgtttgtgaagaaggagctgcagctgcaggccaacttcctgggcaatgtgaagaggctgtatgaggccgaggtgttcagcacagacttcagcaaccccagcatcgcccaggcccgcatcaacagccacgtgaagaagaagacccagggcaaggtggtggacatcatccagggcctggacctgctgacagccatggtgctggtgaaccacatcttcttcaaggccaagtgggagaagcccttccaccctgagtacaccaggaagaacttccccttcctggtgggggagcaggtgacagtgcacgtgcccatgatgcaccagaaggagcagtttgccttcggcgtggacacagagctgaactgctttgtgctgcagatggactacaagggagatgctgtggccttctttgtgctgcccagcaagggcaagatgaggcagctggagcaggccctgagcgcccggaccctgaggaagtggagccacagcctgcagaagcgctggattgaggtgttcatcccccgcttcagcatcagcgccagctacaacctggagaccatcctgcccaagatgggcatccagaatgtgtttgacaagaatgctgacttcagcggcatcgccaagagggacagcctgcaggtgtccaaggccacccacaaggctgtgctggatgtgtctgaggagggcacagaggccacagctgccaccaccaccaagttcatcgtgcgcagcaaggatggccccagctacttcaccgtgtccttcaacagaaccttcctgatgatgatcaccaacaaggccacagatggcatcctcttcctgggcaaggtggagaaccccaccaagagctag

SEQ ID NO: 251904 - DNA, 1308 bp, Artificial Sequence
  derived and/or modified sequence
atgcagggccagggccggcggcggggcacctgcaaggacatcttctgttccaaaatggccagctatctgtatggagtcctctttgcggtaggactgtgtgctccaatctactgcgtcagtcccgccaacgcaccctcagcatatcctcgaccctccagtacaaaatctaccccggcatcacaggtgtattccctgaatacggatttcgcgtttcgcctctatagacggctggtgctggaaaccccctcccagaacatatttttttcccccgtcagtgtgtctaccagtttagccatgctgagcttgggagctcatagcgttaccaaaacacagattctgcaaggcttaggatttaatcttacacatacaccagaaagtgctattcaccagggattccagcatttagtgcatagtttgacagttccttctaaggatttgacgctgaaaatgggcagtgccctgttcgttaagaaagagttacaactgcaggctaatttcctgggcaacgtgaagcgtttgtacgaggccgaggttttctccactgacttcagcaatccatccatcgcccaagcccgcatcaattctcacgttaagaagaaaacccaaggaaaagtcgtggacatcattcagggcctggacctcctcacagccatggtattggtgaatcatattttctttaaagctaaatgggagaagccttttcacccagaatataccaggaaaaacttcccttttctcgttggtgagcaggtaaccgtccacgtgcccatgatgcatcaaaaggaacagttcgccttcggagtcgatacagagctgaactgtttcgtcttgcagatggattacaagggagacgcggtggctttctttgtcctgcctagcaagggaaaaatgcgtcaattggaacaggctctgtcagcccgcaccctccggaaatggtcacacagtctgcagaagcgctggattgaagtgtttatccccaggttctctatctccgcatcctataatttggagacaattctgcctaagatgggcattcagaatgtctttgataagaacgcggatttttcaggcatcgccaaaagggattctctgcaagtctccaaagccacccataaggctgtactggatgtgagtgaagaaggcaccgaggccaccgctgctactaccacaaaatttattgtgagatccaaagatggacccagctacttcaccgtgtcgtttaacaggaccttcctaatgatgattactaacaaggcaactgacgggatcttgtttctcggcaaagtagagaatccaacaaaatcatag

SEQ ID NO: 251905 - DNA, 1333 bp, Artificial Sequence
  derived and/or modified sequence
tctgggtcacatttttgtggatacagaagccaggctggagtggaccagtgagtgagttggagacatattttgttccaaaatggcatcttacctttatggagtactctttgctgttggcctctgtgctccaatctactgtgtgtccccggccaatgcccccagtgcatacccccgcccttcctccacaaagagcacccctgcctcacaggtgtattccctcaacaccgactttgccttccgcctataccgcaggctggttttggagaccccgagtcagaacatcttcttctcccctgtgagtgtctccacttccctggccatgctctcccttggggcccactcagtcaccaagacccagattctccagggcctgggcttcaacctcacacacacaccagagtctgccatccaccagggcttccagcacctggttcactcactgactgttcccagcaaagacctgaccttgaagatgggaagtgccctcttcgtcaagaaggagctgcagctgcaggcaaatttcttgggcaatgtcaagaggctgtatgaagcagaagtcttttctacagatttctccaacccctccattgcccaggcgaggatcaacagccatgtgaaaaagaagacccaagggaaggttgtagacataatccaaggccttgaccttctgacggccatggttctggtgaaccacattttctttaaagccaagtgggagaagccctttcaccctgaatatacaagaaagaacttcccattcctggtgggcgagcaggtcactgtgcatgtccccatgatgcaccagaaagagcagttcgcttttggggtggatacagagctgaactgctttgtgctgcagatggattacaagggagatgccgtggccttctttgtcctccctagcaagggcaagatgaggcaactggaacaggccttgtcagccagaacactgagaaagtggagccactcactccagaaaaggtggatagaggtgttcatccccagattttccatttctgcctcctacaatctggaaaccatcctcccgaagatgggcatccaaaatgtctttgacaaaaatgctgatttttctggaattgcaaagagagactccctgcaggtttctaaagcaacccacaaggctgtgctggatgtcagtgaagagggcactgaggccacagcagctaccaccaccaagttcatagtccgatcgaaggatggcccctcttacttcactgtctccttcaataggaccttcctgatgatgattacaaataaagccacagacggtattctctttctagggaaagtggaaaatcccactaaatcctag

SEQ ID NO: 251906 - RNA, 1308 nt, Artificial Sequence
  derived and/or modified sequence
augcagggucaggggaggagaagagguacaugcaaagauaucuucugcucuaagauggcuucuuacuuguauggaguccuguucgcuguaggacucugcgcaccuaucuacugugucagccccgccaaugcccccagcgcuuauccacggcccucuucaacaaaaagcacgccagcuagccaagucuacucucugaacacagauuuugcuuuucgucuguaccguagacucguucuggaaacucccucacagaacauuuucuuuucuccgguguccgugucaacaucucuggccaugcucuccuugggagcucacaguguaacgaaaacccaaauucuacagggccucggauuuaacuuaacccauacacccgaaagugcuauucaccagggauuucagcaccucguccauucgcucacgguuccuagcaaggaucugacauugaaaauggguagcgccuuguuugucaaaaaagaacuccagcugcaggcuaauuuucuaggcaacgugaaacgacuuuaugaggcagagguguucucuacugauuuuagcaacccuaguaucgcccaggcaaggauuaacucacaugucaagaagaaaacccagggaaaggugguggauauuauucaggggcuggaucugcucacugccauggugcuugucaaccacaucuuuuuuaaagcgaaaugggagaagccauuccacccagaauacacaagaaagaacuuccccuuucuaguuggagagcaggugacuguccacgugccuaugaugcaucagaaagagcaauucgccuucgggguggauaccgaacugaauuguuucgugcugcaaauggacuacaaaggcgacgcugucgcuuuuuuugugcugccaaguaaaggcaagaugaggcagcuugagcaggcucugagcgcucggacccugagaaaguggagucacucgcugcagaagcgauggaucgaaguuuucauccccagauucagcauuagugccaguuacaacuuggaaacaauccuucccaaaaugggcauucagaauguguucgauaaaaacgcagauuuuuccggcaucgcaaagagggacucucugcagguguccaaggccacacacaaagccguacucgacgugagugaggagggaaccgaagccacugcagcaacuaccaccaaauuuauugugcgaucuaaagauggccccucuuauuucacugugagcuuuaaccgcaccuucuuaaugaugaucacgaacaaagcaacagauggcauucuguuccuggggaagguugaaaauccuacuaagagcuag

SEQ ID NO: 251907 - RNA, 1308 nt, Artificial Sequence
  derived and/or modified sequence
augcaaggccaggguagacgaaggggcacuugcaaagauauuuucugcaguaaaauggccaguuacuuauacggagugcuauucgcugucggcuugugugcccccaucuacuguguuucaccugcuaacgcucccagcgcuuacccgcgaccauccagcacaaaauccaccccugcaucccaagucuacagccugaacacagauuucgcauuccgccuguaucgcagacuuguucuagaaaccccaucucagaauauuuucuucucucccgugagcguuagcacuucuuuggcaauguuaagucucggggcccacagcguaacaaaaacacagauucugcaggguuuaggcuuuaaccucacacacacaccagaauccgcuauccaccaaggauuucaacaucuaguucacucgcuaacaguaccaucuaaggaccugacgcugaaaaugggauccgccuuguuugugaagaaggaacugcagcuucaggcuaauuuucugggaaaugucaagcgccuguaugaggccgaaguguuuucuacugacuuuuccaacccaagcauugcccaggcgaggauuaauucccauguuaaaaagaagacucagggaaaaguuguggacauuauucaggguuuggaccuucuuacagccauggugcuggucaaucacauuuucuuuaaagcgaaaugggagaaaccuuuccaucccgaauacaccaggaaaaauuuuccuuuucuugugggugagcagguaacugugcaugucccaaugaugcaccagaaggaacaguucgcauuugguguggauacagaacuaaacuguuuuguucugcagauggacuauaagggugacgccguugcauuuuuuguguugccuucaaaagggaagaugcgacaacuggaacaagcguugucugccagaacuuugcgaaaauggucccauagccuucagaagagauggauagaaguguuuaucccaagauuuuccauaucagccuccuacaauuuagaaacuauucuuccaaaaauggguauccagaauguuuuugacaagaacgccgauuucucagggauugccaagagagacagucuccaagucuccaaagccacacacaaagcagugcucgauguuucugaggaaggaacugaggcaacggccgccaccacaacaaaguucaucgugcgaucuaaagaugggcccuccuauuuuacuguguccuuuaaucgcaccuucuugaugaugaucacaaacaaagcaacagacggcauucuauuucucggcaaaguugagaacccaacaaaguccuag

SEQ ID NO: 251908 - protein, 442 aa, Artificial Sequence
  derived and/or modified sequence
MASDGASALPGPDMSMKPSAAPSPSPALPFLPPTSDPPDHPPREPPPQPIMPSVFSPDNPLMLSAFPSSLLVTGDGGPCLSGAGAGKVIVKVKTEGGSAEPSQTQNFILTQTALNSTAPGTPCGGLEGPAPPFVTASNVKTILPSKAVGVSQEGPPGLPPQPPPPVAQLVPIVPLEKAWPGPHGTTGEGGPVATLSKPSLGDRSKISKDVYENFRQWQRYKALARRHLSQSPDTEAVKEYVDIMEWLVGTHLATGESDGKQEEEGQQQEEEGMYPDPGLLSYINELCSQKVFVSKVEAVIHPQFLADLLSPEKQRDPLALIEELEQEEGLTLAQLVQKRLMALEEEEDAEAPPSFSGAQLDSSPSGSVEDEDGDGRLRPSPGLQGAGGAACLGKVSSSGKRAREVHGGQEQALDSPRGMHRDGNTLPSPSSWDLPTNGESQC

SEQ ID NO: 251909 - protein, 272 aa, Artificial Sequence
  derived and/or modified sequence
MNSDSSSVSSRASSPDMDEMYLRDHHHRHHHHQESRLNSVSSTQGDMMQKMPGESLSRAGAKAAGESSKYKIKKQLSEQDLQQLRLKINGRERKRMHDLNLAMDGLREVMPYAHGPSVRKLSKIATLLLARNYILMLTSSLEEMKRLVGEIYGGHHSAFHCGTVGHSAGHPAHAANSVHPVHPILGGALSSGNASSPLSAASLPAIGTIRPPHSLLKAPSTPPALQLGSGFQHWAGLPCPCTICQMPPPPHLSALSTANMARLSAESKDLLK

SEQ ID NO: 251910 - DNA, 2196 bp, Artificial Sequence
  derived and/or modified sequence
agttcaagcacacaccaactagctgtccaggaagcagcctaaccagagagaggggcgtgggagggagagaggcggggaaaagcagcgtctccgcttttcttctcacgtcttgccgcggagaagtgggttcctgggcagtgcagattttttttttttaattcaagattttctttaatttcccgcctaaagcctccccacggtagggccgcatcccctgtaataaaatgaattctgattcgagctctgtctccagcagagcttcatctccggacatggatgagatgtacctgagggaccaccaccaccgccaccaccaccaccaggagagccgtctcaactcggtctcgtccacgcagggcgatatgatgcagaagatgcccggggaaagcctctcgcgggctggcgccaaggccgcgggagagagcagcaagtacaaaatcaagaagcagctgtcggagcaggacctacagcagttgaggctgaagatcaacggacgcgaacgcaagcggatgcacgacctgaacctagccatggacgggctgcgcgaagtcatgccctacgcgcatgggccgtcggtgcgcaagctctccaagatcgccacactcctgctcgccagaaactacatcctcatgctcaccagctccctggaggagatgaagaggctggttggcgagatctatgggggccaccactcggcctttcactgcgggaccgtgggccactcggccggccaccccgcgcacgcggccaactccgtgcacccggtgcaccccatcttgggcggcgcgctctcatctggcaacgcctcgtcaccgctgtccgccgcctcacttcccgccatcggcaccatccggcctccccactcgctactcaaggcgccctccacgccgcccgcgctgcagctgggcagcggcttccagcactgggctggtctgccctgcccctgcaccatctgccagatgccgccgccgccgcacctgtccgctctctccacagccaacatggcccggctgtcggccgagtccaaggacttgctcaagtgagcagcgggcgggcccggctgccaaggaggagggagagcggcgggaggggccgcggtgccgggccgggagggaagagggaggctgcacgctcggcccacgggagggcaggctccggggcccgcagcctcccacgctgtctgagagatctcagactccacttgacccccggagggaaaggaccaaaatcaaaccgcaatttctaggtggtagcaaagggggactcgaaccagatgtcgtgtgttttgcatgcatgcttcttttccccatgccgcgccagtatttttcactgccatatgctcttgtcaaaactgcatttgttgtataaagatgggatcggtgtagttaaaaacttgcgaagggacttttgagttggctttctctgactctgtgttctcgctttggaaaaagacggccatcccttttgtgcaaaacaaatgtaaatattttcttgagatggatgcgattatgattgtctctgtccttgccacagtttttctagagacaatggagagagaaagagagagagagcgcgagagagatcaagacccaagttttgaatctcaaccgaggtccagggcatgacacctcctatgtgggttttcctttcgacgcagtgtaggtcaaaagaatgcatgcacgcttctaaatgaatcttgtctgaatatgtcgtgcaggctgtggtgccgttttccttgtaacaaggatttattagtgaattatcccaagtactccatatatctgtctgtggttgtatgaaatgaaaaaaggggcagagtgcaaagacccacactcacgcacacgcgcttcttctcccacccccacccccttcaaactttattcggaaccttcctttgctgttctggggccgctattgtaaaagcctgggctccctctagtagcttgcgccaccccccctcgctcagttattctgcatgcggggttggctctctctattatcagctttgaaaacttatcctggttttgggaggggtgccgtttttattttcctgaacatttgcttgaaatattttgttagggcctcaaagacgatacctgtctttattttttatatattcttgataactatgatatatttattaataaccagtgtttctggatgagatttcaaataaaaaagaacctttaaatcgtg

SEQ ID NO: 251911 - DNA, 819 bp, Artificial Sequence
  derived and/or modified sequence
atgaactctgacagctccagcgtgagttctagagcctcatctcccgacatggatgagatgtatttgcgcgaccaccaccaccggcatcaccaccatcaagagtcccgcctgaactctgtgtcgtcaactcagggagatatgatgcaaaagatgcctggcgaatcattgagcagagcaggagctaaagccgccggcgagtcttctaaatacaagatcaagaagcagttgtctgaacaagacctccagcagctccggctgaagattaacggtcgggagaggaaaaggatgcacgacttgaatctcgcaatggatggcctgagggaggtcatgccctacgcccacggcccatcagttagaaaactgtcgaagattgctacattgttactggctagaaattacattcttatgctcacttcctccctggaggagatgaaacggcttgtgggagaaatttatggcggccaccattctgcctttcattgcggtaccgtggggcacagtgccggccaccccgcgcatgccgccaattcagtacaccctgttcaccctattcttggcggagccttaagctcaggcaacgcaagctctccgctaagtgctgcctctctgcctgcgatcggcacaattcgacccccccattcactgctgaaagctccctcaaccccacctgcgctgcagctcggatcagggttccagcactgggcgggactcccttgtccttgtactatttgtcagatgcctcctccaccgcacttgtctgctctttccacagctaacatggccagactctccgcagagtcaaaagacctcctgaaatag

SEQ ID NO: 251912 - DNA, 819 bp, Artificial Sequence
  derived and/or modified sequence
atgaacagcgacagcagctctgtgagcagccgggccagcagcccagacatggatgagatgtacctgcgggaccaccaccaccgccaccaccaccaccaggagagccggctgaacagcgtgagcagcacccagggcgacatgatgcagaagatgcctggagagagcctgagcagagctggggccaaggccgccggggagagcagcaagtacaagatcaagaagcagctgtctgagcaggacctgcagcagctgcggctgaagatcaatggccgggagaggaagaggatgcatgacctgaacctggccatggatggcctgcgggaggtgatgccctatgcccacggccccagcgtgaggaagctgagcaagatcgccaccctgctgctggccaggaactacatcctgatgctgaccagcagcctggaggagatgaagaggctggtgggggagatctacggcggccaccacagcgccttccactgcggcaccgtgggccacagcgctggccacccagcccacgccgccaacagcgtgcaccctgtgcaccccatcctgggcggggccctgagcagtggaaatgccagcagccccctgtctgctgccagcctgcctgccatcggcaccatccggcccccccacagcctgctgaaggcccccagcaccccaccagccctgcagctgggcagcggcttccagcactgggccggcctgccctgcccctgcaccatctgccagatgcctcctccaccccacctgagcgccctgagcacagccaacatggcccggctgtctgctgagagcaaggacctgctgaagtag

SEQ ID NO: 251913 - DNA, 819 bp, Artificial Sequence
  derived and/or modified sequence
atgaacagcgacagcagcagcgtgagcagccgggccagcagccccgatatggatgagatgtatctgagagaccaccatcacagacaccaccaccaccaagaatcgcgactcaattctgtgtcctctacacagggagacatgatgcagaagatgcccggcgaatcactctctagagcaggcgcaaaggccgccggtgagtcttcaaagtataagatcaaaaagcaactctcagagcaggacttgcagcaactgcgcctgaaaatcaatgggagggaacgcaaacgcatgcatgatttgaacttggccatggacggtttgcgcgaagtgatgccatatgcacacggcccatccgtgcggaagctgagcaaaatcgcaaccctcctccttgccagaaactatatccttatgttaacttcttcactagaggagatgaagagactggtcggagagatatatggagggcaccactctgcttttcattgcggcactgtgggccactctgccggtcatcccgcgcatgctgctaacagcgtgcacccagtccatccaattctggggggcgctctgtcttcagggaatgcttctagccccctaagcgctgccagtctccctgccatcggcactataaggcctcctcactccctgttaaaggctccaagcacacccccagcgctacagttaggcagcggattccaacactgggctggactcccgtgcccttgtaccatatgccaaatgcccccacctccacacctgagtgcattgtccacagctaatatggcccggctctcagccgagtcaaaagacttgctcaagtag

SEQ ID NO: 251914 - DNA, 819 bp, Artificial Sequence
  derived and/or modified sequence
atgaatagcgattcatcctctgtaagtagcagagcgtctagtcctgatatggacgagatgtatcttagagaccatcatcataggcaccaccatcatcaggagagtcgcttgaatagcgtgagttctacccaaggcgatatgatgcagaagatgcctggagaatcgctctctcgagctggggcaaaggcggctggcgagtccagcaaatacaagattaaaaaacagttgagcgagcaagatctccagcagctcaggttaaaaatcaatggacgggagcgaaagcgcatgcatgatctcaacctagccatggatgggttgcgggaggtgatgccctacgctcatggcccatctgtccgcaagctgtccaaaattgccactctcttgctggcgcgtaactacatcctgatgctcaccagtagcttagaagaaatgaaacgtctggtgggagagatatacggtggccaccacagtgccttccactgtgggaccgtaggacactctgccggacaccccgcacacgcggctaatagtgttcacccagtccaccccatcctgggaggcgctttatccagtggtaacgcaagttctcctttaagtgccgctagcttgcccgcaatcggtacgatcagaccaccacacagtcttctcaaggctccttctacccctcccgctctccagctcggttcaggtttccagcattgggcaggactgccttgcccctgcacaatttgtcagatgccaccccctccccatctctccgctttgtcgaccgccaatatggccagattatccgccgaaagtaaggatctcctaaaatag

SEQ ID NO: 251915 - DNA, 819 bp, Artificial Sequence
  derived and/or modified sequence
atgaacagcgacagcagcagcgtgagcagcagagccagcagccccgacatggacgagatgtacctgagagaccaccaccacagacaccaccaccaccaggagagcagactgaacagcgtgagcagcacccagggcgacatgatgcagaagatgcccggcgagagcctgagcagagccggcgccaaggccgccggcgagagcagcaagtacaagatcaagaagcagctgagcgagcaggacctgcagcagctgagactgaagatcaacggcagagagagaaagagaatgcacgacctgaacctggccatggacggcctgagagaggtgatgccctacgcccacggccccagcgtgagaaagctgagcaagatcgccaccctgctgctggccagaaactacatcctgatgctgaccagcagcctggaggagatgaagagactggtgggcgagatctacggcggccaccacagcgccttccactgcggcaccgtgggccacagcgccggccaccccgcccacgccgccaacagcgtgcaccccgtgcaccccatcctgggcggcgccctgagcagcggcaacgccagcagccccctgagcgccgccagcctgcccgccatcggcaccatcagacccccccacagcctgctgaaggcccccagcaccccccccgccctgcagctgggcagcggcttccagcactgggccggcctgccctgcccctgcaccatctgccagatgcccccccccccccacctgagcgccctgagcaccgccaacatggccagactgagcgccgagagcaaggacctgctgaagtag

SEQ ID NO: 251916 - protein, 425 aa, Artificial Sequence
  derived and/or modified sequence
MAGAEGAAGRQSELEPVVSLVDVLEEDEELENEACAVLGGSDSEKCSYSQGSVKRQALYACSTCTPEGEEPAGICLACSYECHGSHKLFELYTKRNFRCDCGNSKFKNLECKLLPDKAKVNSGNKYNDNFFGLYCICKRPYPDPEDEIPDEMIQCVVCEDWFHGRHLGAIPPESGDFQEMVCQACMKRCSFLWAYAAQLAVTKISTEDDGLVRNIDGIGDQEVIKPENGEHQDSTLKEDVPEQGKDDVREVKVEQNSEPCAGSSSESDLQTVFKNESLNAESKSGCKLQELKAKQLIKKDTATYWPLNWRSKLCTCQDCMKMYGDLDVLFLTDEYDTVLAYENKGKIAQATDRSDPLMDTLSSMNRVQQVELICEYNDLKTELKDYLKRFADEGTVVKREDIQQFFEEFQSKKRRRVDGMQYYCS

SEQ ID NO: 251917 - protein, 349 aa, Artificial Sequence
  derived and/or modified sequence
MRRALSWAAATPRSAPTLRNFRCDCGNSKFKNLECKLLPDKAKVNSGNKYNDNFFGLYCICKRPYPDPEDEIPDEMIQCVVCEDWFHGRHLGAIPPESGDFQEMVCQACMKRCSFLWAYAAQLAVTKISTEDDGLVRNIDGIGDQEVIKPENGEHQDSTLKEDVPEQGKDDVREVKVEQNSEPCAGSSSESDLQTVFKNESLNAESKSGCKLQELKAKQLIKKDTATYWPLNWRSKLCTCQDCMKMYGDLDVLFLTDEYDTVLAYENKGKIAQATDRSDPLMDTLSSMNRVQQVELICEYNDLKTELKDYLKRFADEGTVVKREDIQQFFEEFQSKKRRRVDGMQYYCS

SEQ ID NO: 251918 - protein, 360 aa, Artificial Sequence
  derived and/or modified sequence
MRRALSWAAATPRSAPTLRNFRCDCGNSKFKNLECKLLPDKAKVNSGNKYNDNFFGLYCICKRPYPDPEDEIPDEMIQCVVCEDWFHGRHLGAIPPESGDFQEMVCQACMKRCSFLWAYAAQLAVTKISTEDDGLVRNIDGIGDQEVIKPENGEHQDSTLKEDVPEQGKDDVREVKVEQNSEPCAGSSSESDLQTVFKNESLNAESKSGCKLQELKAKQLIKKDTATYWPLNWRSKLCTCQDCMKMYGDLDVLFLTDEYDTVLAYENKGKIAQATDRSDPLMDTLSSMNRVQQVELICEYNDLKTELKDYLKRFADEGTVVKREDIQQFFEEFQKKEKKSGWDAVLLQLEWSMKLSHSSQ

SEQ ID NO: 251919 - DNA, 1278 bp, Artificial Sequence
  derived and/or modified sequence
atggccggcgccgagggcgccgccggcagacagagcgagctggagcccgtggtgagcctggtggacgtgctggaggaggacgaggagctggagaacgaggcctgcgccgtgctgggcggcagcgacagcgagaagtgcagctacagccagggcagcgtgaagagacaggccctgtacgcctgcagcacctgcacccccgagggcgaggagcccgccggcatctgcctggcctgcagctacgagtgccacggcagccacaagctgttcgagctgtacaccaagagaaacttcagatgcgactgcggcaacagcaagttcaagaacctggagtgcaagctgctgcccgacaaggccaaggtgaacagcggcaacaagtacaacgacaacttcttcggcctgtactgcatctgcaagagaccctaccccgaccccgaggacgagatccccgacgagatgatccagtgcgtggtgtgcgaggactggttccacggcagacacctgggcgccatcccccccgagagcggcgacttccaggagatggtgtgccaggcctgcatgaagagatgcagcttcctgtgggcctacgccgcccagctggccgtgaccaagatcagcaccgaggacgacggcctggtgagaaacatcgacggcatcggcgaccaggaggtgatcaagcccgagaacggcgagcaccaggacagcaccctgaaggaggacgtgcccgagcagggcaaggacgacgtgagagaggtgaaggtggagcagaacagcgagccctgcgccggcagcagcagcgagagcgacctgcagaccgtgttcaagaacgagagcctgaacgccgagagcaagagcggctgcaagctgcaggagctgaaggccaagcagctgatcaagaaggacaccgccacctactggcccctgaactggagaagcaagctgtgcacctgccaggactgcatgaagatgtacggcgacctggacgtgctgttcctgaccgacgagtacgacaccgtgctggcctacgagaacaagggcaagatcgcccaggccaccgacagaagcgaccccctgatggacaccctgagcagcatgaacagagtgcagcaggtggagctgatctgcgagtacaacgacctgaagaccgagctgaaggactacctgaagagattcgccgacgagggcaccgtggtgaagagagaggacatccagcagttcttcgaggagttccagagcaagaagagaagaagagtggacggcatgcagtactactgcagctag

SEQ ID NO: 251920 - DNA, 1050 bp, Artificial Sequence
  derived and/or modified sequence
atgagaagagccctgagctgggccgccgccacccccagaagcgcccccaccctgagaaacttcagatgcgactgcggcaacagcaagttcaagaacctggagtgcaagctgctgcccgacaaggccaaggtgaacagcggcaacaagtacaacgacaacttcttcggcctgtactgcatctgcaagagaccctaccccgaccccgaggacgagatccccgacgagatgatccagtgcgtggtgtgcgaggactggttccacggcagacacctgggcgccatcccccccgagagcggcgacttccaggagatggtgtgccaggcctgcatgaagagatgcagcttcctgtgggcctacgccgcccagctggccgtgaccaagatcagcaccgaggacgacggcctggtgagaaacatcgacggcatcggcgaccaggaggtgatcaagcccgagaacggcgagcaccaggacagcaccctgaaggaggacgtgcccgagcagggcaaggacgacgtgagagaggtgaaggtggagcagaacagcgagccctgcgccggcagcagcagcgagagcgacctgcagaccgtgttcaagaacgagagcctgaacgccgagagcaagagcggctgcaagctgcaggagctgaaggccaagcagctgatcaagaaggacaccgccacctactggcccctgaactggagaagcaagctgtgcacctgccaggactgcatgaagatgtacggcgacctggacgtgctgttcctgaccgacgagtacgacaccgtgctggcctacgagaacaagggcaagatcgcccaggccaccgacagaagcgaccccctgatggacaccctgagcagcatgaacagagtgcagcaggtggagctgatctgcgagtacaacgacctgaagaccgagctgaaggactacctgaagagattcgccgacgagggcaccgtggtgaagagagaggacatccagcagttcttcgaggagttccagagcaagaagagaagaagagtggacggcatgcagtactactgcagctag

SEQ ID NO: 251921 - DNA, 1083 bp, Artificial Sequence
  derived and/or modified sequence
atgagaagagccctgagctgggccgccgccacccccagaagcgcccccaccctgagaaacttcagatgcgactgcggcaacagcaagttcaagaacctggagtgcaagctgctgcccgacaaggccaaggtgaacagcggcaacaagtacaacgacaacttcttcggcctgtactgcatctgcaagagaccctaccccgaccccgaggacgagatccccgacgagatgatccagtgcgtggtgtgcgaggactggttccacggcagacacctgggcgccatcccccccgagagcggcgacttccaggagatggtgtgccaggcctgcatgaagagatgcagcttcctgtgggcctacgccgcccagctggccgtgaccaagatcagcaccgaggacgacggcctggtgagaaacatcgacggcatcggcgaccaggaggtgatcaagcccgagaacggcgagcaccaggacagcaccctgaaggaggacgtgcccgagcagggcaaggacgacgtgagagaggtgaaggtggagcagaacagcgagccctgcgccggcagcagcagcgagagcgacctgcagaccgtgttcaagaacgagagcctgaacgccgagagcaagagcggctgcaagctgcaggagctgaaggccaagcagctgatcaagaaggacaccgccacctactggcccctgaactggagaagcaagctgtgcacctgccaggactgcatgaagatgtacggcgacctggacgtgctgttcctgaccgacgagtacgacaccgtgctggcctacgagaacaagggcaagatcgcccaggccaccgacagaagcgaccccctgatggacaccctgagcagcatgaacagagtgcagcaggtggagctgatctgcgagtacaacgacctgaagaccgagctgaaggactacctgaagagattcgccgacgagggcaccgtggtgaagagagaggacatccagcagttcttcgaggagttccagaagaaggagaagaagagcggctgggacgccgtgctgctgcagctggagtggagcatgaagctgagccacagcagccagtag

SEQ ID NO: 251922 - DNA, 1278 bp, Artificial Sequence
  derived and/or modified sequence
atggcgggcgccgagggagctgcaggtcgtcagtcagagctggaacctgtcgtatcacttgtggacgtgttagaggaagacgaagagttggagaacgaagcctgcgctgttctgggcggcagcgattctgaaaagtgctcttatagccagggcagtgtgaaaagacaggctctgtatgcctgttcaacctgcacaccggagggcgaagaacctgccggcatctgcctggcctgttcatacgaatgtcatggcagccataagctattcgagttgtacactaaacgcaattttagatgcgattgcggtaatagtaagttcaagaatttagaatgcaagctgctgcctgacaaggccaaagtcaacagtggaaacaagtacaacgataacttcttcggcctgtactgcatttgtaaaaggccttatcctgaccctgaggacgaaattccagatgagatgatccagtgtgtcgtttgtgaggattggtttcacggaaggcacctgggagccatccctccggaatcaggtgactttcaggaaatggtatgccaggcttgcatgaaacgatgctcattcctgtgggcttacgctgctcagctggcagtaacaaaaatcagcacagaagacgacggcctggtgcggaatatcgacggcatcggagatcaagaggtaataaaaccagaaaacggcgagcatcaggattctacactgaaggaggatgtgccggagcagggcaaagatgatgtgcgcgaagtcaaggtggaacaaaattctgagccctgtgctggcagttcatctgaatccgacctgcaaacagtgtttaagaacgagtccctgaacgccgagagcaagtcgggatgtaaacttcaggagctgaaagctaagcagctgataaaaaaagacacggccacctactggcccttgaactggcgtagcaaactatgcacctgtcaagactgtatgaaaatgtacggggatcttgacgtgctttttctgaccgacgagtatgacacagtccttgcctatgagaataaggggaaaatcgcccaagccacagaccgctcagatcctctcatggacactctgtctagcatgaatcgcgtacagcaggtggaactgatatgcgagtacaatgacctcaagacagaacttaaggactatctgaagcgcttcgcagatgagggaacagtggttaagcgggaggacatccagcagttttttgaggagttccagtcaaaaaagcgcagaagggtagacggcatgcagtattactgcagttag

SEQ ID NO: 251923 - DNA, 1050 bp, Artificial Sequence
  derived and/or modified sequence
atgcgtcgcgctctctcatgggcggctgcaaccccacgatccgctcctacactaaggaactttcggtgcgactgtgggaacagcaaatttaagaatcttgagtgtaaactgttgcctgacaaggcaaaagtgaacagtggtaacaagtataatgataattttttcggcctgtactgtatttgcaagagaccttaccccgacccagaagacgaaattcccgatgagatgatccagtgtgtggtgtgcgaagactggttccacggccgccacttgggtgctatcccccccgagagcggtgacttccaagagatggtgtgccaagcttgtatgaaaagatgttcctttttatgggcatacgccgcgcagctggctgtgaccaagatcagcaccgaggatgacgggctggtaagaaacattgatggtattggggaccaagaggttatcaagccggagaatggggagcatcaggatagtaccctgaaggaggacgttccagaacaaggcaaagatgatgtccgagaagtgaaagtcgagcagaactccgagccatgcgccggatcttcttctgagtcagacctccagacggtgtttaagaacgaatctctgaacgcagagtcgaaaagtggctgcaaactccaggagctgaaggcaaaacagctgatcaagaaggacacagccacatactggccgcttaattggcgctccaagctgtgtacctgtcaggactgcatgaagatgtacggagacctggatgtattgtttttaaccgatgagtacgacaccgtcctcgcgtacgagaacaaaggaaaaatcgctcaggctaccgatagatccgatcctcttatggacacattatccagtatgaatcgagtgcaacaggttgagttgatctgcgagtacaacgatctgaagactgagctcaaggattatcttaagcgtttcgccgatgaaggcaccgtggtaaaacgcgaggacatccagcaattctttgaggagttccagtcaaaaaagagacgtcgagtggatggaatgcagtattattgttcctag

SEQ ID NO: 251924 - DNA, 1083 bp, Artificial Sequence
  derived and/or modified sequence
atgcggagggccctttcctgggcagccgcgaccccacggagcgcccctactctgcgaaactttcgatgcgattgcggaaattctaagttcaagaatttagagtgtaagttgctgcctgataaggcaaaggtgaattccggaaataagtacaacgacaacttctttgggctatactgcatttgtaaaaggccttacccggaccccgaagacgagattcctgacgagatgatccagtgtgtggtttgtgaagattggtttcatggtagacatctcggagctataccacccgaatcgggtgactttcaggaaatggtgtgccaggcatgcatgaaaagatgcagcttcctatgggcctatgcagcccagttagccgtgacgaaaataagtaccgaagacgacgggttggtgcgaaatatagacggcatcggagatcaggaggtgattaagcctgaaaacggagaacatcaagacagcaccctgaaggaagacgtgcccgaacagggtaaggacgatgtgagagaggtcaaggtggaacaaaactctgagccctgcgcgggatcatcttccgagtctgacctgcagaccgtgttcaaaaatgaatccctgaacgccgagtccaaaagcggttgtaaattacaagagcttaaggctaagcagctgatcaaaaaagacacagctacctactggcccctcaactggcgcagtaagctgtgtacctgtcaggactgtatgaaaatgtatggcgatttggacgttctgttccttaccgatgagtatgacacagtgctggcttacgagaataaggggaaaatcgctcaggctaccgacaggagtgatccgctaatggacaccctctctagcatgaaccgcgtccagcaggtcgaactcatctgcgagtataatgatctgaagacagagctgaaagactacctgaagcgtttcgccgacgaagggacagtcgttaaacgggaagatatacagcagttctttgaggaattccagaagaaagaaaaaaagtcgggctgggacgccgtattgctgcaattggaatggagcatgaagctcagccatagctcacagtag

SEQ ID NO: 251925 - DNA, 1278 bp, Artificial Sequence
  derived and/or modified sequence
atggccggggctgagggcgccgccggccggcagagcgagctggagcctgtggtgtccctggtggatgtgctggaggaggatgaggagctggagaatgaggcctgtgctgtgctgggcggcagtgacagcgagaagtgcagctacagccagggctctgtgaagaggcaggccctgtatgcctgcagcacctgcaccccagagggggaggagcccgccggcatctgcctggcctgcagctatgaatgtcatggcagccacaagctgtttgagctgtacaccaagaggaacttccgctgtgactgtggcaacagcaagttcaagaacctggagtgcaagctgctgcctgacaaggccaaggtgaacagcggcaacaagtacaatgacaacttcttcggcctgtactgcatctgcaagaggccctacccagaccctgaagatgagatcccagatgagatgatccagtgtgtggtgtgtgaggactggttccacggccgccacctgggcgccatccccccagagagcggggacttccaggagatggtgtgccaggcctgcatgaagcgctgcagcttcctgtgggcctatgctgcccagctggccgtgaccaagatcagcacagaagatgatggcctggtgagaaatattgatggcatcggggaccaggaggtgatcaagccagaaaatggagagcaccaggacagcaccctgaaggaggatgtgcctgagcagggcaaggatgatgtgcgggaggtgaaggtggagcagaacagcgagccctgtgccggcagcagcagcgagagtgacctgcagacagtgttcaagaatgaaagcctgaatgctgagagcaagagcggctgcaagctgcaggagctgaaggccaagcagctgatcaagaaggacacagccacctactggcccctgaactggaggagcaagctgtgcacctgccaggactgcatgaagatgtatggagacctggatgtgctcttcctgacagatgaatatgacacagtgctggcctatgagaacaagggcaagatcgcccaggccacagacagaagtgaccccctgatggacaccctgagctccatgaacagagtgcagcaggtggagctgatctgtgagtacaatgacctgaagacagagctgaaggactacctgaagagatttgctgatgagggcaccgtggtgaagcgggaggacatccagcagttctttgaggagttccagagcaagaagagaagaagagtggatggcatgcagtactactgcagctag

SEQ ID NO: 251926 - DNA, 1050 bp, Artificial Sequence
  derived and/or modified sequence
atgaggcgggccctgtcctgggccgccgccacccccaggtctgcccccaccctgaggaacttccgctgtgactgtggcaacagcaagttcaagaacctggagtgcaagctgctgcctgacaaggccaaggtgaacagcggcaacaagtacaatgacaacttcttcggcctgtactgcatctgcaagaggccctacccagaccctgaagatgagatcccagatgagatgatccagtgtgtggtgtgtgaggactggttccacggccgccacctgggcgccatccccccagagagcggggacttccaggagatggtgtgccaggcctgcatgaagcgctgcagcttcctgtgggcctatgctgcccagctggccgtgaccaagatcagcacagaagatgatggcctggtgagaaatattgatggcatcggggaccaggaggtgatcaagccagaaaatggagagcaccaggacagcaccctgaaggaggatgtgcctgagcagggcaaggatgatgtgcgggaggtgaaggtggagcagaacagcgagccctgtgccggcagcagcagcgagagtgacctgcagacagtgttcaagaatgaaagcctgaatgctgagagcaagagcggctgcaagctgcaggagctgaaggccaagcagctgatcaagaaggacacagccacctactggcccctgaactggaggagcaagctgtgcacctgccaggactgcatgaagatgtatggagacctggatgtgctcttcctgacagatgaatatgacacagtgctggcctatgagaacaagggcaagatcgcccaggccacagacagaagtgaccccctgatggacaccctgagctccatgaacagagtgcagcaggtggagctgatctgtgagtacaatgacctgaagacagagctgaaggactacctgaagagatttgctgatgagggcaccgtggtgaagcgggaggacatccagcagttctttgaggagttccagagcaagaagagaagaagagtggatggcatgcagtactactgcagctag

SEQ ID NO: 251927 - DNA, 1083 bp, Artificial Sequence
  derived and/or modified sequence
atgaggcgggccctgtcctgggccgccgccacccccaggtctgcccccaccctgaggaacttccgctgtgactgtggcaacagcaagttcaagaacctggagtgcaagctgctgcctgacaaggccaaggtgaacagcggcaacaagtacaatgacaacttcttcggcctgtactgcatctgcaagaggccctacccagaccctgaagatgagatcccagatgagatgatccagtgtgtggtgtgtgaggactggttccacggccgccacctgggcgccatccccccagagagcggggacttccaggagatggtgtgccaggcctgcatgaagcgctgcagcttcctgtgggcctatgctgcccagctggccgtgaccaagatcagcacagaagatgatggcctggtgagaaatattgatggcatcggggaccaggaggtgatcaagccagaaaatggagagcaccaggacagcaccctgaaggaggatgtgcctgagcagggcaaggatgatgtgcgggaggtgaaggtggagcagaacagcgagccctgtgccggcagcagcagcgagagtgacctgcagacagtgttcaagaatgaaagcctgaatgctgagagcaagagcggctgcaagctgcaggagctgaaggccaagcagctgatcaagaaggacacagccacctactggcccctgaactggaggagcaagctgtgcacctgccaggactgcatgaagatgtatggagacctggatgtgctcttcctgacagatgaatatgacacagtgctggcctatgagaacaagggcaagatcgcccaggccacagacagaagtgaccccctgatggacaccctgagctccatgaacagagtgcagcaggtggagctgatctgtgagtacaatgacctgaagacagagctgaaggactacctgaagagatttgctgatgagggcaccgtggtgaagcgggaggacatccagcagttctttgaggagttccagaagaaggagaagaagagcggctgggatgctgtgctgctgcagctggagtggagcatgaagctgagccacagcagccagtag

SEQ ID NO: 251928 - DNA, 1278 bp, Artificial Sequence
  derived and/or modified sequence
atggccggcgccgagggcgccgccggccggcagagcgagctggagcctgtagtttctctcgttgacgtgctggaagaggacgaagaactggagaacgaggcctgtgctgtgcttgggggatccgacagcgagaaatgctcatattcccaagggagcgtaaaacgccaggccctctacgcttgctctacctgcacgcctgagggagaagagcccgctggaatatgcctggcctgctcctatgagtgccatgggtcccacaagttgtttgaactctatacaaagaggaactttagatgtgattgtggcaattcgaaattcaagaatcttgagtgtaagctactaccggataaggctaaggtgaattccgggaacaagtacaacgacaacttctttggattatattgcatatgtaaacgtccgtatcctgacccagaagatgagataccagacgagatgattcaatgcgtggtgtgcgaggactggtttcatggacgtcacttaggtgccatacctccagaatccggggactttcaggaaatggtgtgccaagcttgtatgaagcgttgctctttcttgtgggcctacgccgctcagctcgcggtgaccaaaatctctaccgaagatgacggacttgtccgcaacatcgacggtatcggagaccaggaggtgattaagccagagaacggagagcaccaggacagcaccttaaaggaggacgtaccagagcaggggaaagacgatgtgcgggaagtgaaggtggaacagaacagtgagccatgtgcaggatcaagctccgagagtgacctgcagacagtgttcaaaaatgaatccctgaacgcggagtccaagtcaggatgcaagctacaggaactgaaggctaagcagttaatcaagaaagacactgccacatactggcccttaaactggcggagcaaactttgcacatgccaggattgtatgaagatgtatggtgacctggatgttctgtttctcacagacgagtatgataccgtgctcgcctacgagaataagggcaaaatcgcgcaagccacagaccggtcggatcccctgatggatactcttagtagcatgaacagagtgcagcaggttgaattgatttgcgagtacaatgatctaaagacagaactgaaggactatttgaaacggttcgccgacgaaggtactgtggttaaaagggaggacatccagcagttcttcgaggagttccagagcaagaagcgtcgccgggtggacggcatgcagtactattgtagctag

SEQ ID NO: 251929 - DNA, 1050 bp, Artificial Sequence
  derived and/or modified sequence
atgcggcgggccctgagctgggccgccgccaccccccggagcgcccctaccctgcggaacttcagatgtgattgcggaaatagcaaatttaaaaacctggagtgtaaactgttgcctgacaaggccaaggtcaacagcggtaacaaatataacgataatttcttcggattgtattgcatctgcaagcgaccctatccagatcccgaggatgagatcccagatgagatgatccaatgcgtggtctgcgaggactggttccacggacgccacctcggagcgatcccacctgagagtggggactttcaggaaatggtctgccaagcctgtatgaaaaggtgttcattcctctgggcctatgcagcccagctcgctgtgaccaagatttcgaccgaggacgatgggcttgtccggaacatcgacggcattggggatcaggaagtaataaaacccgagaacggggaacatcaggacagtaccctcaaagaagacgtgcccgagcagggcaaggacgatgtgagggaggtgaaggtcgagcagaacagcgaaccctgtgcgggctcctcctcagagtcagacctgcaaacagtcttcaagaacgaatcacttaatgccgagtccaagtccgggtgtaagctgcaggaactgaaagcgaagcagcttatcaagaaagacacagccacctactggcctctgaactggagatctaaactgtgtacttgccaagactgtatgaaaatgtacggtgatctggacgtgctgttcctgaccgatgagtatgacacagtgctggcatacgagaacaagggcaagatcgcccaggccaccgatcggagcgaccctttgatggatacactgtcttcaatgaacagggtgcaacaggtcgagctgatatgcgagtacaatgatctgaagactgaactcaaagactacctgaaacggtttgccgatgaaggaacagtagtgaagcgggaggacatccaacagtttttcgaagagttccagtccaagaaacggaggcgggtagacggaatgcagtactactgcagctag

SEQ ID NO: 251930 - DNA, 1083 bp, Artificial Sequence
  derived and/or modified sequence
atgcggcgggccctgagctgggccgccgccaccccccggagcgcccccaccctcagaaattttcgctgtgactgcgggaactccaaattcaagaatcttgagtgcaaattactccccgataaggccaaggtgaactcaggcaacaaatataatgataacttctttggcctgtattgtatttgtaaaaggccttacccagatccagaagatgaaatccctgatgaaatgattcagtgtgtggtgtgtgaggattggttccatgggcgacacctgggcgcgattccgccagagtccggggactttcaggagatggtgtgccaggcctgcatgaagcgctgttcatttctgtgggcctacgctgctcaacttgcagttacaaagattagtaccgaggacgacgggcttgtgcgaaacatcgacggaattggcgaccaggaagtgataaagcctgaaaacggtgagcaccaggattccactcttaaggaggatgtgcccgagcaaggaaaggatgacgtgcgggaggttaaggtggagcagaattccgaaccttgtgctgggtctagttccgaatccgacttacagaccgtgtttaaaaacgagagtctgaatgcggaatccaagtccgggtgcaagctgcaggaactcaaagcaaagcagctgataaaaaaggatactgcaacttattggccgctgaattggcggagcaagctctgtacatgccaagactgcatgaaaatgtatggagacctagatgttcttttcttgacggatgaatacgacacagtgctggcctacgaaaacaaaggcaaaatagctcaggctactgatagaagcgatccgctcatggacactctgtcttccatgaacagggtgcagcaggtcgagctgatctgcgaatataatgatcttaaaacagagttaaaggattacctaaagagattcgccgacgaagggactgtagtgaagcgcgaggatatccaacagttttttgaggaatttcagaagaaggagaagaaaagtggctgggatgccgtgctgctccaattagagtggtctatgaaattaagtcattcctcacagtag

SEQ ID NO: 251931 - DNA, 1278 bp, Artificial Sequence
  derived and/or modified sequence
atggccggagctgaaggagcagccggaaggcagtcagaactggagccagtcgtctcactggtcgacgtgctagaggaggatgaagagcttgaaaacgaggcgtgcgccgttctgggaggcagcgattccgaaaaatgttcgtacagccagggctccgttaaacgccaggctctctatgcttgcagcacttgtacccccgagggtgaagagccagcgggaatttgcttggcctgcagctatgagtgccacggcagtcacaagctcttcgaactgtataccaagagaaatttccgatgcgactgtgggaattctaaattcaaaaacctcgagtgcaagctactgcccgacaaggctaaggtgaactccggtaataaatacaatgataacttctttgggctgtattgtatctgtaaacgaccgtaccctgatcctgaggacgagatacccgacgagatgatacagtgcgtggtgtgcgaggattggtttcacgggaggcatctaggtgccatacccccagaaagtggcgactttcaggagatggtctgccaggcctgtatgaagaggtgttcattcctgtgggcatatgctgcccagctggctgtgaccaaaatatccacagaggatgatggccttgtccgtaatatcgacgggatcggggaccaggaggtgataaaaccagagaacggagaacatcaggacagcacgcttaaagaggatgtaccagaacaaggaaaggatgatgtgcgcgaggtgaaggtagagcagaactccgaaccatgcgccggatccagttccgaatctgatttgcagaccgtgtttaagaatgaaagtctcaacgctgaatccaaatcgggttgcaaacttcaagaacttaaagcaaagcagcttattaaaaaggacaccgcgacttattggccgcttaactggcggagtaaactctgtacttgccaggattgcatgaagatgtacggagaccttgacgtgcttttcctgactgatgaatatgatacagtcctcgcctatgagaacaagggtaagattgctcaggccacggataggtctgaccctttgatggacactctttcttctatgaacagggtccagcaagtcgaactcatttgcgagtacaacgacctgaaaacggagctaaaagactacctgaaacgctttgccgacgaagggacagttgtgaagcgcgaagacattcagcagttcttcgaggaattccaatcaaaaaaacgtaggcgcgtagacggaatgcagtactactgctcctag

SEQ ID NO: 251932 - DNA, 1050 bp, Artificial Sequence
  derived and/or modified sequence
atgcgaagagctctcagctgggcagccgcaacacccagaagtgcgccaaccctccggaactttagatgtgactgtgggaattcgaagtttaagaatctggagtgcaagttactgcctgataaagccaaggtgaatagcgggaacaaatacaatgataatttcttcgggctgtactgcatttgtaagaggccctatcccgatcccgaagatgagatccccgatgagatgatccagtgcgtcgtgtgtgaagactggtttcatggcagacacttgggggcaatccctccagagagtggtgacttccaggagatggtctgccaggcttgtatgaaaaggtgcagctttctgtgggcctacgctgctcagctggctgtgacaaaaattagcactgaggacgatggtctggtgaggaatatagacgggataggcgatcaggaggttatcaagcccgaaaacggcgagcaccaagatagtaccttgaaggaagacgtaccagagcaaggaaaggacgacgtgcgcgaggtcaaggtcgagcagaactcagagccatgtgccggatcatcatctgagagcgatctgcagacagtattcaagaacgagtcccttaatgccgagtctaagtctggctgtaagctacaggagctgaaggcaaaacaactgatcaaaaaggacaccgcaacttattggcccctcaactggcgcagcaagctatgcacctgccaggactgcatgaaaatgtatggtgacctcgacgtgctgtttctgacggatgaatacgacactgtgttggcatacgaaaataaaggcaaaatcgctcaggctaccgaccgttcagatcctctgatggataccctctccagtatgaatagggtgcaacaagtggagctgatatgtgaatacaatgacctgaaaaccgaactgaaggactatctgaagagattcgccgacgagggcactgtcgttaagcgggaagatattcagcagtttttcgaagaatttcagtctaaaaagcggagacgagtcgacggtatgcaatactattgttcttag

SEQ ID NO: 251933 - DNA, 1083 bp, Artificial Sequence
  derived and/or modified sequence
atgcgacgcgctttatcctgggccgctgccacacccaggagcgcaccgacactgagaaacttcagatgtgactgcggcaactcaaagttcaaaaacttggagtgtaaactgttgccagataaagctaaagtgaactccgggaataagtacaacgacaacttctttggcctgtattgtatctgcaagcggccatatccggaccccgaggatgaaatccctgacgaaatgatccagtgcgtggtctgtgaagactggtttcacggccgacacctaggcgctattccacctgaatcaggcgatttccaggaaatggtctgtcaggcctgtatgaaacgctgcagctttctctgggcatatgctgcccagcttgccgtaaccaaaataagtactgaagatgatgggttggttcggaatattgacggtataggcgatcaagaagtgatcaagcccgaaaatggcgaacaccaggacagcacactcaaagaggacgtgcccgagcaaggcaaagatgacgtgcgcgaggttaaagtggagcagaattctgagccttgcgctggctcttcctctgagagcgatctgcagacagtattcaagaacgaatcattaaacgccgaatcaaagtctggatgtaagctccaggagctgaaggctaaacagttaatcaaaaaagatactgctacttattggcctttaaattggagatccaaactgtgcacatgccaggattgtatgaagatgtatggagaccttgatgtgctctttctgaccgacgagtatgatacggtgctcgcctacgagaacaagggaaagattgcacaagccacagatagatccgaccctcttatggataccctgtccagcatgaatcgcgtgcagcaggttgagctgatatgcgagtataacgacctgaagacagagttaaaagactacctgaaacgattcgccgacgaaggtaccgttgtcaagcgcgaggatattcagcagttcttcgaagaattccagaagaaggaaaaaaaatcagggtgggatgctgttctgctgcagctggagtggtccatgaaactgtcccacagctcccagtag

SEQ ID NO: 251934 - DNA, 1278 bp, Artificial Sequence
  derived and/or modified sequence
atggcaggtgccgaaggagctgccggtcgtcagagtgagttggaacctgtggtctcactcgtcgatgtcctcgaggaggatgaagagctcgagaacgaggcctgcgctgttctgggaggctccgatagtgaaaaatgcagttactctcagggttccgtgaagagacaagcactctatgcctgtagtacttgcacccctgaaggcgaagagcctgccggcatatgtctagcctgttcctacgaatgccacggatcacacaagctgtttgaattgtatactaaacggaacttcaggtgcgattgcgggaacagcaaattcaagaacctggaatgcaagttactacctgacaaggccaaagtgaatagtggaaataagtataatgataattttttcggactgtattgtatctgtaagcgaccttatcccgacccggaagacgagatccccgatgagatgatacagtgtgtagtatgcgaagattggtttcacggaaggcatctgggggctatcccacccgaaagcggagacttccaggaaatggtgtgccaagcatgtatgaagaggtgctctttcctgtgggcctatgccgcccaactggcagtgactaagatttcaacagaggacgacggtctcgtgcggaacattgacggcataggtgaccaagaggtcatcaaacctgaaaacggcgaacatcaggactctaccctaaaggaagacgtacctgaacagggaaaggacgatgtgcgcgaagttaaggtcgagcaaaactccgaaccctgcgctggctctagcagcgaaagtgatctccagacagtctttaagaacgaatccttgaacgctgaaagtaaaagcggttgcaagctacaagaactgaaagccaaacaactgattaaaaaggataccgccacgtactggccccttaattggaggtccaaattgtgcacctgtcaagactgtatgaaaatgtacggagatcttgatgtgctctttctcaccgatgagtacgacacggtcctggcctacgagaataagggtaaaatcgctcaggcaacggatcgcagtgatcccctgatggatacacttagctcaatgaatcgggtacagcaggtggaactgatttgtgaatacaatgatctgaaaaccgagctaaaagattatctgaagcgatttgccgatgagggtaccgtggtgaagcgagaagatatccaacaattctttgaggaatttcagtcgaagaagagacgaagggtcgatgggatgcagtactactgctcgtag

SEQ ID NO: 251935 - DNA, 1278 bp, Artificial Sequence
  derived and/or modified sequence
atggcaggtgccgaaggagctgccggtcgtcagagtgagttggaacctgtggtctcactcgtcgatgtcctcgaggaggatgaagagctcgagaacgaggcctgcgctgttctgggaggctccgatagtgaaaaatgcagttactctcagggttccgtgaagagacaagcactctatgcctgtagtacttgcacccctgaaggcgaagagcctgccggcatatgtctagcctgttcctacgaatgccacggatcacacaagctgtttgaattgtatactaaacggaacttcaggtgcgattgcgggaacagcaaattcaagaacctggaatgcaagttactacctgacaaggccaaagtgaatagtggaaataagtataatgataattttttcggactgtattgtatctgtaagcgaccttatcccgacccggaagacgagatccccgatgagatgatacagtgtgtagtatgcgaagattggtttcacggaaggcatctgggggctatcccacccgaaagcggagacttccaggaaatggtgtgccaagcatgtatgaagaggtgctctttcctgtgggcctatgccgcccaactggcagtaactaaaattagtacggaagatgacgggctggtccggaatatcgatggcattggtgaccaggaagtgattaagcctgagaatggcgaacaccaggactccactcttaaggaagacgtccctgaacagggtaaagatgacgtgagggaagttaaagtggaacaaaacagcgaaccgtgcgcaggtagttctagcgaatccgatctccagactgtctttaaaaacgagtccctcaatgctgaaagtaagtctggttgtaagctccaggaactcaaagcaaagcagctgattaaaaaggacacagccacgtattggccactgaactggagatccaaattgtgcacatgccaggactgtatgaagatgtacggagatctagacgttctgttcctgaccgatgaatacgatacagtactggcttatgaaaacaaagggaagattgcacaggcaacggatcgcagtgacccgttgatggacactttaagcagcatgaacagagtccaacaggtagagttgatatgtgagtataatgatctgaaaactgagcttaaggactacctcaagagatttgctgacgagggaaccgttgttaaaagagaagatatccagcagtttttcgaagaatttcagagcaaaaagagaaggcgcgtcgatggtatgcagtactactgtagttag

SEQ ID NO: 251936 - DNA, 3694 bp, Artificial Sequence
  derived and/or modified sequence
agaacacgacaccgggaagcgccacccggaggcggaaatcagcccgcgtccggcgcaggcgggagaagggagaggagtgacatccgtttgtcggaagtcgctcctcccccttccttcgctttttttccttgtcattggttcctggcactcgggccccacctcctccggctacgcccctcacggccgcttttcccgcctccgccggggccgagccgctgttcggctgacagttgaggatggccggagccgagggcgccgctgggcggcagtcggagctggagcccgtggtatcgttggtcgacgtccttgaggaggacgaggagctggagaatgaggcgtgcgctgtcctgggcggcagcgactccgagaagtgctcctactctcagggctcagtaaagagacaagcactatatgcctgtagtacctgcaccccagagggagaagaaccagcaggaatttgtttagcttgcagttatgaatgtcatggaagtcacaaactatttgagctatacacaaaaagaaattttcgttgtgattgtggaaacagcaagtttaaaaatttggaatgcaaattacttcctgacaaagcaaaggtaaattctggcaataagtacaatgacaacttttttggattgtactgcatttgcaagagaccttatcctgatcctgaagacgagattccagatgagatgatccagtgcgtagtctgtgaagactggttccatggaaggcatcttggtgccattccccctgagagtggggattttcaggagatggtatgccaggcctgcatgaaacgttgttcttttttgtgggcttatgctgcacaattggcagtaaccaaaatatccactgaggatgatggattggtgcggaacattgatggaataggtgatcaggaagttatcaaacctgaaaatggagagcatcaagatagtaccctcaaagaggatgttccagaacagggaaaggatgatgtccgggaggttaaagtagagcagaacagtgaaccatgtgccggctctagttctgaatctgatctccagacagtgtttaagaatgaaagcctcaacgcagaatcaaaatctggctgcaaacttcaggagcttaaagctaagcagcttataaagaaagacactgccacctattggcccctgaactggcgtagcaagttgtgtacctgccaagactgtatgaaaatgtatggagatctagatgtcttattcctgacagatgaatacgacacagttctggcttatgaaaacaaagggaagattgcccaggccactgacaggagcgatcccctaatggatacccttagcagcatgaatagagtccagcaagtggaactcatttgtgaatacaatgatttgaagactgaacttaaagactatctcaagagatttgctgatgaaggcacggttgttaagagagaggacattcagcagttctttgaagagtttcagtcaaaaaagagaagaagagtggatgggatgcagtattactgcagctagagtggagtatgaagctttctcattcaagccaatgaaaatgcgcttcccattcttggaataaaagaggtgtggttcacatttggccccctttccgtcctcctctgtttggagaggcctcgcgctcccttcattctctttagctgcagtagccaccgtgtggatgctgacttcacagccagcgtcctctgtgactcagctgatgcagctcattccacagacttctccagtgtactcctactccagtgcacccagggttatttgcatagtttttaagtttgattttgttttgagaaagcaaattggtgtcttgtttaatgatctgttatttcactcccagatgtgtgtgttttgccacagagctgttgccttccagaacctcctccgcaggcatcacggaaggctctcttcccgtcacctagaacctctacaggtcccctcgcccctatgatcgtggtgccttgggtcaaagcttcctcaagcctggtctgctccttctttcacgtccctgttttctgaggtttggtcatagcttagaaaggatcttggggcttgttttctctaggcccaacctccagagtagccaggactgatggttttctggtctggatgtctgtcacaggcggagagattaacagatgacagggttgaggaagcaagcctttgttatgaattttactaatacagttcaagtgaaattttcgttcatgattctattggcactagaattagaatttcagtactgtagtgctcacagggcttcctggagaacatttgcccgtatactagtcccttctctgctgcctagaaaacagaccgggtctcacccctgtgaaatcttggtggtttacgaagtcctctggatttcttgatattatcagggatattcataagcatatatcaaaaatggacctattttgatattctgttatgaaaatgttattagaaccccaataaattattatttttcccccttgaatctgctaaagaaaacagatcctgacttagcttacttgaaataagcagggcagggagccctgttttggaagagacagactgtggaagagattacaaacaaggcccgaggctgcacgaatgatgagttttgtgtatataatgttaatgtccaccgccacttccctaacgactatgagatcttttttttgaagatcctcatggaaggttgtacagagccccacatttgaggggaagtcctttcagttgatatgagatctctttaacacccctcagtctatgtaggaaatgccttgtgatacatagagaaccctcagcttctctctgcctctggaggaccaaggtctttcctgacagtcggagacacaccttgatgtatgttaataaaagcatttcaggctgtggggccaccatgtatattaatactccttatgtgtccagcatctgtgtattcattcgagtgcccaatccctggatgagatgaactaggccttataaaaagtcaaagcctcaaagaaatggcacaaccatgttcttcggcactcaggctcctaattgcagatcctcacgaagggtggtatgtggagctggaaggtcttgtggccacaggacatgctggtgagccctgagctggccttgtgcagagggctccgttcaaaggctcggggtgtctttgaggttgtttatcaagctggggaactcttccaagtctgacaatgtttcgaaccctttttgcaaggttgcactattagtataccatcatgtccggaaaacttttaatcttctcaaatatctgatgtaactaccagaaagtcccttacttcctatgaccaatcaggaccaagtcttggaggtgatgtgttacattacgtgcagcacaatagtaccgatcagttaactcagcgctgaagggcttgttttatgaaaggtactattccttctttcacattaactggaaacctctttttttacctgttgttcacaactagttttcttattgactgtattggactgtctcttcttgtagagactgattttggccaacatattaatgcatgttttatgcaaaacacaaatatgatattagttgcttttaaggagttctggcattgtatgtgcatttttgtagaaattgttactggacttataattacatacttaactctgatcaggtttctgtaaaatttaaataaaaccaatacaaaata

SEQ ID NO: 251937 - DNA, 3552 bp, Artificial Sequence
  derived and/or modified sequence
agaacacgacaccgggaagcgccacccggaggcggaaatcagcccgcgtccggcgcaggcgggagaagggagaggagtgacatccgtttgtcggaagtcgctcctcccccttccttcgctttttttccttgtcattggttcctggcactcgggccccacctcctccggctacgcccctcacggccgcttttcccgcctccgccggggccgagccgctgttcggctgacagttgaggatggccggagccgagggcgccgctgggcggcagtcggagctggagcccgtggtatcgttggtcgacgtccttgaggaggacgaggagctggagaatgaggcgtgcgctgtcctgggcggcagcgactccgagaagtgctcctactctcagaaattttcgttgtgattgtggaaacagcaagtttaaaaatttggaatgcaaattacttcctgacaaagcaaaggtaaattctggcaataagtacaatgacaacttttttggattgtactgcatttgcaagagaccttatcctgatcctgaagacgagattccagatgagatgatccagtgcgtagtctgtgaagactggttccatggaaggcatcttggtgccattccccctgagagtggggattttcaggagatggtatgccaggcctgcatgaaacgttgttcttttttgtgggcttatgctgcacaattggcagtaaccaaaatatccactgaggatgatggattggtgcggaacattgatggaataggtgatcaggaagttatcaaacctgaaaatggagagcatcaagatagtaccctcaaagaggatgttccagaacagggaaaggatgatgtccgggaggttaaagtagagcagaacagtgaaccatgtgccggctctagttctgaatctgatctccagacagtgtttaagaatgaaagcctcaacgcagaatcaaaatctggctgcaaacttcaggagcttaaagctaagcagcttataaagaaagacactgccacctattggcccctgaactggcgtagcaagttgtgtacctgccaagactgtatgaaaatgtatggagatctagatgtcttattcctgacagatgaatacgacacagttctggcttatgaaaacaaagggaagattgcccaggccactgacaggagcgatcccctaatggatacccttagcagcatgaatagagtccagcaagtggaactcatttgtgaatacaatgatttgaagactgaacttaaagactatctcaagagatttgctgatgaaggcacggttgttaagagagaggacattcagcagttctttgaagagtttcagtcaaaaaagagaagaagagtggatgggatgcagtattactgcagctagagtggagtatgaagctttctcattcaagccaatgaaaatgcgcttcccattcttggaataaaagaggtgtggttcacatttggccccctttccgtcctcctctgtttggagaggcctcgcgctcccttcattctctttagctgcagtagccaccgtgtggatgctgacttcacagccagcgtcctctgtgactcagctgatgcagctcattccacagacttctccagtgtactcctactccagtgcacccagggttatttgcatagtttttaagtttgattttgttttgagaaagcaaattggtgtcttgtttaatgatctgttatttcactcccagatgtgtgtgttttgccacagagctgttgccttccagaacctcctccgcaggcatcacggaaggctctcttcccgtcacctagaacctctacaggtcccctcgcccctatgatcgtggtgccttgggtcaaagcttcctcaagcctggtctgctccttctttcacgtccctgttttctgaggtttggtcatagcttagaaaggatcttggggcttgttttctctaggcccaacctccagagtagccaggactgatggttttctggtctggatgtctgtcacaggcggagagattaacagatgacagggttgaggaagcaagcctttgttatgaattttactaatacagttcaagtgaaattttcgttcatgattctattggcactagaattagaatttcagtactgtagtgctcacagggcttcctggagaacatttgcccgtatactagtcccttctctgctgcctagaaaacagaccgggtctcacccctgtgaaatcttggtggtttacgaagtcctctggatttcttgatattatcagggatattcataagcatatatcaaaaatggacctattttgatattctgttatgaaaatgttattagaaccccaataaattattatttttcccccttgaatctgctaaagaaaacagatcctgacttagcttacttgaaataagcagggcagggagccctgttttggaagagacagactgtggaagagattacaaacaaggcccgaggctgcacgaatgatgagttttgtgtatataatgttaatgtccaccgccacttccctaacgactatgagatcttttttttgaagatcctcatggaaggttgtacagagccccacatttgaggggaagtcctttcagttgatatgagatctctttaacacccctcagtctatgtaggaaatgccttgtgatacatagagaaccctcagcttctctctgcctctggaggaccaaggtctttcctgacagtcggagacacaccttgatgtatgttaataaaagcatttcaggctgtggggccaccatgtatattaatactccttatgtgtccagcatctgtgtattcattcgagtgcccaatccctggatgagatgaactaggccttataaaaagtcaaagcctcaaagaaatggcacaaccatgttcttcggcactcaggctcctaattgcagatcctcacgaagggtggtatgtggagctggaaggtcttgtggccacaggacatgctggtgagccctgagctggccttgtgcagagggctccgttcaaaggctcggggtgtctttgaggttgtttatcaagctggggaactcttccaagtctgacaatgtttcgaaccctttttgcaaggttgcactattagtataccatcatgtccggaaaacttttaatcttctcaaatatctgatgtaactaccagaaagtcccttacttcctatgaccaatcaggaccaagtcttggaggtgatgtgttacattacgtgcagcacaatagtaccgatcagttaactcagcgctgaagggcttgttttatgaaaggtactattccttctttcacattaactggaaacctctttttttacctgttgttcacaactagttttcttattgactgtattggactgtctcttcttgtagagactgattttggccaacatattaatgcatgttttatgcaaaacacaaatatgatattagttgcttttaaggagttctggcattgtatgtgcatttttgtagaaattgttactggacttataattacatacttaactctgatcaggtttctgtaaaatttaaataaaaccaat

SEQ ID NO: 251938 - DNA, 3550 bp, Artificial Sequence
  derived and/or modified sequence
agaacacgacaccgggaagcgccacccggaggcggaaatcagcccgcgtccggcgcaggcgggagaagggagaggagtgacatccgtttgtcggaagtcgctcctcccccttccttcgctttttttccttgtcattggttcctggcactcgggccccacctcctccggctacgcccctcacggccgcttttcccgcctccgccggggccgagccgctgttcggctgacagttgaggatggccggagccgagggcgccgctgggcggcagtcggagctggagcccgtggtatcgttggtcgacgtccttgaggaggacgaggagctggagaatgaggcgtgcgctgtcctgggcggcagcgactccgagaagtgctcctactctcagaaattttcgttgtgattgtggaaacagcaagtttaaaaatttggaatgcaaattacttcctgacaaagcaaaggtaaattctggcaataagtacaatgacaacttttttggattgtactgcatttgcaagagaccttatcctgatcctgaagacgagattccagatgagatgatccagtgcgtagtctgtgaagactggttccatggaaggcatcttggtgccattccccctgagagtggggattttcaggagatggtatgccaggcctgcatgaaacgttgttcttttttgtgggcttatgctgcacaattggcagtaaccaaaatatccactgaggatgatggattggtgcggaacattgatggaataggtgatcaggaagttatcaaacctgaaaatggagagcatcaagatagtaccctcaaagaggatgttccagaacagggaaaggatgatgtccgggaggttaaagtagagcagaacagtgaaccatgtgccggctctagttctgaatctgatctccagacagtgtttaagaatgaaagcctcaacgcagaatcaaaatctggctgcaaacttcaggagcttaaagctaagcagcttataaagaaagacactgccacctattggcccctgaactggcgtagcaagttgtgtacctgccaagactgtatgaaaatgtatggagatctagatgtcttattcctgacagatgaatacgacacagttctggcttatgaaaacaaagggaagattgcccaggccactgacaggagcgatcccctaatggatacccttagcagcatgaatagagtccagcaagtggaactcatttgtgaatacaatgatttgaagactgaacttaaagactatctcaagagatttgctgatgaaggcacggttgttaagagagaggacattcagcagttctttgaagagtttcagaaaaaagagaagaagagtggatgggatgcagtattactgcagctagagtggagtatgaagctttctcattcaagccaatgaaaatgcgcttcccattcttggaataaaagaggtgtggttcacatttggccccctttccgtcctcctctgtttggagaggcctcgcgctcccttcattctctttagctgcagtagccaccgtgtggatgctgacttcacagccagcgtcctctgtgactcagctgatgcagctcattccacagacttctccagtgtactcctactccagtgcacccagggttatttgcatagtttttaagtttgattttgttttgagaaagcaaattggtgtcttgtttaatgatctgttatttcactcccagatgtgtgtgttttgccacagagctgttgccttccagaacctcctccgcaggcatcacggaaggctctcttcccgtcacctagaacctctacaggtcccctcgcccctatgatcgtggtgccttgggtcaaagcttcctcaagcctggtctgctccttctttcacgtccctgttttctgaggtttggtcatagcttagaaaggatcttggggcttgttttctctaggcccaacctccagagtagccaggactgatggttttctggtctggatgtctgtcacaggcggagagattaacagatgacagggttgaggaagcaagcctttgttatgaattttactaatacagttcaagtgaaattttcgttcatgattctattggcactagaattagaatttcagtactgtagtgctcacagggcttcctggagaacatttgcccgtatactagtcccttctctgctgcctagaaaacagaccgggtctcacccctgtgaaatcttggtggtttacgaagtcctctggatttcttgatattatcagggatattcataagcatatatcaaaaatggacctattttgatattctgttatgaaaatgttattagaaccccaataaattattatttttcccccttgaatctgctaaagaaaacagatcctgacttagcttacttgaaataagcagggcagggagccctgttttggaagagacagactgtggaagagattacaaacaaggcccgaggctgcacgaatgatgagttttgtgtatataatgttaatgtccaccgccacttccctaacgactatgagatcttttttttgaagatcctcatggaaggttgtacagagccccacatttgaggggaagtcctttcagttgatatgagatctctttaacacccctcagtctatgtaggaaatgccttgtgatacatagagaaccctcagcttctctctgcctctggaggaccaaggtctttcctgacagtcggagacacaccttgatgtatgttaataaaagcatttcaggctgtggggccaccatgtatattaatactccttatgtgtccagcatctgtgtattcattcgagtgcccaatccctggatgagatgaactaggccttataaaaagtcaaagcctcaaagaaatggcacaaccatgttcttcggcactcaggctcctaattgcagatcctcacgaagggtggtatgtggagctggaaggtcttgtggccacaggacatgctggtgagccctgagctggccttgtgcagagggctccgttcaaaggctcggggtgtctttgaggttgtttatcaagctggggaactcttccaagtctgacaatgtttcgaaccctttttgcaaggttgcactattagtataccatcatgtccggaaaacttttaatcttctcaaatatctgatgtaactaccagaaagtcccttacttcctatgaccaatcaggaccaagtcttggaggtgatgtgttacattacgtgcagcacaatagtaccgatcagttaactcagcgctgaagggcttgttttatgaaaggtactattccttctttcacattaactggaaacctctttttttacctgttgttcacaactagttttcttattgactgtattggactgtctcttcttgtagagactgattttggccaacatattaatgcatgttttatgcaaaacacaaatatgatattagttgcttttaaggagttctggcattgtatgtgcatttttgtagaaattgttactggacttataattacatacttaactctgatcaggtttctgtaaaatttaaataaaaccaat

SEQ ID NO: 251939 - protein, 329 aa, Artificial Sequence
  derived and/or modified sequence
MLTLQTWLVQALFIFLTTESTGELLDPCGYISPESPVVQLHSNFTAVCVLKEKCMDYFHVNANYIVWKTNHFTIPKEQYTIINRTASSVTFTDIASLNIQLTCNILTFGQLEQNVYGITIISGLPPEKPKNLSCIVNEGKKMRCEWDGGRETHLETNFTLKSEWATHKFADCKAKRDTPTSCTVDYSTVYFVNIEVWVEAENALGKVTSDHINFDPVYKVKPNPPHNLSVINSEELSSILKLTWTNPSIKSVIILKYNIQYRTKDASTWSQIPPEDTASTRSSFTVQDLKPFTEYVFRIRCMKEDGKGYWSDWSEEASGITYEDNIASF

SEQ ID NO: 251940 - DNA, 990 bp, Artificial Sequence
  derived and/or modified sequence
atgctgactctccagacctggctggtgcaggcactctttatcttccttacaaccgagagcactggtgaactacttgatccctgcggttatattagcccagaaagcccggtggtacagttgcatagcaactttaccgcggtctgcgtccttaaggaaaagtgcatggattactttcacgttaacgcaaactatatcgtctggaaaaccaatcactttaccattccgaaagaacagtacacaataataaaccgcactgcctccagcgtgacgtttacggatattgcctccctcaatattcagctgacctgtaatatcctcacgttcggacagttagagcagaacgtgtatgggattacgattattagcggtctgccaccagagaaacctaagaacctgtcctgtatagttaatgaggggaagaaaatgaggtgtgaatgggatggcggtcgggaaactcatcttgaaactaattttaccttgaagtccgagtgggctacccacaaattcgccgactgtaaggcaaagagagacacacccacgtcctgtaccgtagactatagcactgtctatttcgttaacattgaggtttgggtcgaggcggagaatgcgcttgggaaagtgacctccgatcacatcaactttgatcctgtatacaaagtcaaacctaatccacctcataatcttagcgtaattaacagcgaagagcttagttcaattcttaaactcacttggactaatccaagtattaagagcgtgatcatccttaagtacaacattcagtaccgcactaaagatgcttccacctggagtcagattcctccggaggacaccgccagtacacgatctagcttcactgttcaggaccttaagcctttcacagaatacgttttccgaattcgctgtatgaaggaggacgggaaggggtattggtcagattggtccgaggaagcctcaggaattacctatgaggataacatcgcctccttttag

SEQ ID NO: 251941 - DNA, 990 bp, Artificial Sequence
  derived and/or modified sequence
atgttaacactgcagacctggctggttcaggccctattcatattcctgaccacggaaagcaccggagaactcctggacccatgtggatatatttcacctgaatccccggtggtccagttgcatagtaattttaccgccgtctgcgtattgaaggaaaaatgcatggattatttccatgtaaatgctaactacattgtttggaaaacaaatcacttcacgatcccaaaagaacaatacactataattaatcggaccgcatcatccgtgactttcaccgatattgcctccctgaatattcaattgacctgtaacattctgaccttcggccagttggaacagaacgtgtacgggattacgattatttcagggctgcctcccgagaaacctaagaatctgtcttgtatcgtaaacgagggcaagaaaatgcggtgcgagtgggatggtggccgggagactcatctcgagacaaattttaccctgaagagcgagtgggcaacccacaagttcgctgattgtaaagcaaaacgggacacacccacctcatgtacagtggactatagtactgtctatttcgttaatattgaggtatgggtggaagcagagaacgcacttgggaaggtgacatcggaccatattaatttcgatcctgtgtacaaggtgaagcctaatccacctcataacttatctgtgatcaattccgaggagctttcatctattctcaagctgacctggaccaacccaagtattaaaagtgtgatcatacttaagtacaacatccagtacagaaccaaggacgcttctacctggtctcagattcctccagaagacacagctagtaccaggagcagcttcacagttcaggatctcaaaccatttacagaatacgtctttagaatccgctgcatgaaggaggatgggaagggatattggagtgattggtccgaggaagcatctggcatcacctacgaggacaatatcgcctccttttag

SEQ ID NO: 251942 - DNA, 990 bp, Artificial Sequence
  derived and/or modified sequence
atgctgactctgcaaacctggcttgtgcaagccctgttcatattcctaactactgagtcgacaggggagttactcgacccttgcggctacattagccctgaatcccctgtggtgcagcttcactctaatttcaccgctgtctgcgtattgaaggagaaatgcatggattattttcacgtgaacgctaactatattgtgtggaagactaaccactttaccattccgaaagagcagtatacgataataaaccggacagcaagttctgtcaccttcaccgatattgcaagcctcaacattcagctcacctgtaacatccttaccttcggccaactggaacagaatgtgtatggaatcacaataataagcggactgccgccagaaaaaccaaagaatctctcgtgtatcgtcaatgagggaaaaaagatgaggtgcgagtgggatggcggacgcgaaacccacttggaaacaaatttcacccttaagagcgagtgggccacacacaagttcgctgattgtaaagccaaaagagacacaccgacaagctgtactgtcgactactctaccgtctactttgtgaatatcgaggtctgggtcgaggccgagaatgcactggggaaggtgaccagcgaccacataaactttgacccagtgtacaaggtgaagccgaacccaccccataatctctccgtcatcaactcagaggagcttagtagcatactgaagctgacatggaccaaccctagcatcaaatcagttatcatcttgaagtataatatccaatacagaaccaaggacgcatccacttggtcacagatccctcccgaggataccgcaagcaccaggtcatcctttaccgtgcaggacctcaaacctttcacagaatatgtcttcagaataaggtgtatgaaggaggatgggaaagggtattggtccgactggtctgaagaagcgtctggaataacgtatgaagacaatattgcttctttctag

SEQ ID NO: 251943 - DNA, 990 bp, Artificial Sequence
  derived and/or modified sequence
atgctgacattgcagacctggctcgtccaggcactgtttatctttctcacgactgagagtacaggcgaactgctcgatccttgcggctatataagtcccgaaagtcctgttgtgcaattgcatagcaactttactgctgtatgcgtgctcaaggaaaaatgtatggactactttcacgtcaatgcgaactacattgtttggaagacaaatcactttaccatcccaaaggaacagtacacgattattaaccgcactgcttcctcagtcacatttacggatattgcctctttgaacattcagcttacttgcaatattctcactttcggacagctggaacagaatgtttacggaattactatcattagtggcctgccccctgaaaagcccaagaacttgtcgtgtatcgtaaacgaaggaaaaaaaatgagatgcgagtgggacggaggacgtgaaacccaccttgaaaccaattttactcttaaatccgagtgggccacccacaaattcgcagattgtaaggcaaagagagatacccctacaagttgcacagtagattactcgaccgtttatttcgttaacattgaagtttgggttgaggcagagaatgccctcggcaaggtgacatctgatcacattaacttcgatccagtttacaaagtcaaacctaaccctccacataatcttagcgtgatcaactctgaggagctgtcttccatcctgaagttgacttggactaatccttcgatcaagtccgtcattatcctgaagtataatatacaataccgcaccaaggacgcatccacatggtcacagatcccaccggaggacactgcgagcacgcggtcatcctttacggtccaggacctgaaaccctttaccgagtatgtgtttcgcattagatgtatgaaagaggacggaaaggggtactggtccgattggtcagaagaggcgtccgggattacatatgaggacacgatctttagtttctag

SEQ ID NO: 251944 - DNA, 987 bp, Artificial Sequence
  derived and/or modified sequence
atgttgacgttgcagacttggctagtgcaagccttgtttattttcctcaccactgaatctacaggtgaacttctagatccatgtggttatatcagtcctgaatctccagttgtacaacttcattctaatttcactgcagtttgtgtgctaaaggaaaaatgtatggattattttcatgtaaatgctaattacattgtctggaaaacaaaccattttactattcctaaggagcaatatactatcataaacagaacagcatccagtgtcacctttacagatatagcttcattaaatattcagctcacttgcaacattcttacattcggacagcttgaacagaatgtttatggaatcacaataatttcaggcttgcctccagaaaaacctaaaaatttgagttgcattgtgaacgaggggaagaaaatgaggtgtgagtgggatggtggaagggaaacacacttggagacaaacttcactttaaaatctgaatgggcaacacacaagtttgctgattgcaaagcaaaacgtgacacccccacctcatgcactgttgattattctactgtgtattttgtcaacattgaagtctgggtagaagcagagaatgcccttgggaaggttacatcagatcatatcaattttgatcctgtatataaagtgaagcccaatccgccacataatttatcagtgatcaactcagaggaactgtctagtatcttaaaattgacatggaccaacccaagtattaagagtgttataatactaaaatataacattcaatataggaccaaagatgcctcaacttggagccagattcctcctgaagacacagcatccacccgatcttcattcactgtccaagaccttaaaccttttacagaatatgtgtttaggattcgctgtatgaaggaagatggtaagggatactggagtgactggagtgaagaagcaagtgggatcacctatgaagataccatcttctctttc

SEQ ID NO: 251945 - DNA, 990 bp, Artificial Sequence
  derived and/or modified sequence
atgctgaccctgcagacctggctggtgcaggccctcttcatcttcctgaccacagagagcactggagagctgctggacccctgtggctacatcagccctgagagccctgtggtgcagctgcacagcaacttcaccgctgtgtgtgtgctgaaggagaagtgcatggactacttccacgtgaatgccaactacatcgtgtggaagaccaaccacttcaccatccccaaggagcagtacaccatcatcaacagaacagccagctctgtgaccttcacagacatcgccagcctgaacatccagctgacctgcaacatcctgaccttcggccagctggagcagaatgtgtatggcatcaccatcatcagcggcctgcccccagagaagcccaagaacctgagctgcatcgtgaatgaaggcaagaagatgagatgtgagtgggatggcggccgggagacccacctggagaccaacttcaccctgaagtctgagtgggccacccacaagtttgctgactgcaaggccaagagggacacccccaccagctgcaccgtggactacagcacagtgtactttgtgaacatcgaggtgtgggtggaggctgaaaatgccctgggcaaggtgaccagtgaccacatcaactttgatcctgtgtacaaggtgaagcccaaccccccccacaacctgagcgtcatcaacagcgaggagctgagcagcatcctgaagctgacctggaccaaccccagcatcaagagcgtcatcatcctgaagtacaacatccagtaccgcaccaaggatgccagcacctggagccagatccccccagaggacacagccagcaccaggagcagcttcaccgtgcaggacctgaagcccttcacagaatatgtgttccgcatccgctgcatgaaggaggatggcaagggctactggagcgactggagcgaggaggccagcggcatcacctatgaggacaacatcgccagcttctag

SEQ ID NO: 251946 - DNA, 990 bp, Artificial Sequence
  derived and/or modified sequence
atgctgaccctgcagacctggctggtgcaggccctcttcatcttcctgaccacagagagcactggagagctgctggacccctgtggctacatcagccctgagagccctgtggtgcagctgcacagcaacttcaccgctgtgtgtgtgctgaaggagaagtgcatggactacttccacgtgaatgccaactacatcgtgtggaagaccaaccacttcaccatccccaaggagcagtacaccatcatcaacagaacagccagctctgtgaccttcacagacatcgccagcctgaacatccagctgacctgcaacatcctgaccttcggccagctggagcagaatgtgtatggcatcaccatcatcagcggcctgcccccagagaagcccaagaacctgagctgcatcgtgaatgaaggcaagaagatgagatgtgagtgggatggcggccgggagacccacctggagaccaacttcaccctgaagtctgagtgggccacccacaagtttgctgactgcaaggccaagagggacacccccaccagctgcaccgtggactacagcacagtgtactttgtgaacatcgaggtgtgggtggaggctgaaaatgccctgggcaaggtgaccagtgaccacatcaactttgatcctgtgtacaaggtgaagcccaaccccccccacaacctgagcgtcatcaacagcgaggagctgagcagcatcctgaagctgacctggaccaaccccagcatcaagagcgtcatcatcctgaagtacaacatccagtaccgcaccaaggatgccagcacctggagccagatccccccagaggacacagccagcaccaggagcagcttcaccgtgcaggacctgaagcccttcacagaatatgtgttccgcatccgctgcatgaaggaggatggcaagggctactggagcgactggagcgaggaggccagcggcatcacctatgaggacaccatcttctccttctag

SEQ ID NO: 251947 - DNA, 990 bp, Artificial Sequence
  derived and/or modified sequence
atgctgaccctgcagacctggctggtgcaggccctgttcatcttcctaaccacggagagcacaggcgagctgctggatccctgcggctacatttcccccgagagcccagtggttcagctacatagcaactttacggccgtctgcgtgctgaaagaaaaatgtatggattatttccacgtcaacgcaaattacatagtctggaaaactaatcatttcaccatacccaaagaacagtacaccattattaatcgcacggcctctagcgtcaccttcactgacatagccagtctgaatatacaactgacatgtaacatcctgacctttggacaattagaacagaatgtctacgggataacaattatttctgggctgccccctgaaaaacccaaaaatctctcatgcatcgtaaacgaaggaaagaaaatgcgttgtgaatgggacggaggacgtgaaacccacttggagactaattttaccctgaagtcagagtgggccacgcataaatttgccgattgtaaggccaagagggacactcccacgtcttgcaccgtggattattccacagtgtattttgttaacatagaagtgtgggtggaagctgaaaatgctctgggtaaagtgactagcgaccatattaatttcgatcccgtgtataaagtgaaaccaaatcctccccacaatctcagtgtgatcaatagcgaagaactgagtagcattctgaagcttacttggaccaatccaagtatcaagtcagtgatcatactgaaatacaacattcagtatcgcactaaggatgcatctacatggtcccagatacctccagaggatacggcttctactaggtccagttttacagtgcaggatctgaagcccttcacggaatatgtattcagaattcgatgcatgaaggaggacgggaagggatactggtcggactggagcgaggaggcgtcgggtataacatacgaggataatatcgcctcattttag

SEQ ID NO: 251948 - DNA, 990 bp, Artificial Sequence
  derived and/or modified sequence
atgctgaccctgcagacctggctggtgcaggccctgttcatcttcctgactacggagagtaccggggagctactcgacccgtgcggttatattagccccgagtctcccgtagtccagctccactcaaacttcacagccgtgtgtgttcttaaggaaaagtgcatggactacttccatgtcaacgcaaactatatcgtttggaagaccaatcattttaccattccgaaagaacagtacacaataatcaaccgaaccgcttcctccgtgacattcactgatatcgcctctttgaacatacaactcacatgcaatatcctgacttttgggcagctagagcagaatgtctacggtattaccatcattagtggactaccacccgagaagcctaaaaacctgtcctgcatcgtgaatgagggaaaaaagatgcgctgtgaatgggacggtggcagggagacccacttagagactaattttactctcaagtccgaatgggctacacataagtttgcggactgtaaggctaagagggatacaccaactagttgtactgtggactacagcaccgtttattttgtgaatattgaggtgtgggtcgaggcggaaaacgcgttagggaaggtgacctctgatcacataaactttgaccccgtgtacaaagtaaaaccaaatccgccacacaacctgtctgtcatcaactcagaggagttaagtagtattctcaaactgacttggacaaatccttctatcaagagcgtgattatcctaaaatacaatattcaataccggacaaaagatgcctccacgtggagtcagatcccacccgaagatacggcttcaaccagaagttcctttactgttcaagacctaaagccctttaccgagtacgtattccggatccgctgcatgaaggaagatggcaagggatattggtccgattggagcgaggaggccagcggtatcacttatgaggataacatcgccagcttctag

SEQ ID NO: 251949 - DNA, 990 bp, Artificial Sequence
  derived and/or modified sequence
atgctgaccctgcagacctggctggtgcaggccctgttcatcttcttgacgacggagagcacgggggaattgctggatccctgcggttacatcagccccgagagtcccgtcgtgcagctccatagcaattttaccgcggtgtgcgtgcttaaagagaaatgcatggactacttccacgttaacgccaactacattgtatggaaaacaaaccatttcaccattccaaaggaacagtacactattatcaatagaaccgcctcaagcgttaccttcactgatatcgccagcctaaacattcaattaacgtgtaatatcttaaccttcggtcagttggagcagaatgtgtacgggattaccatcatttccgggctgccacccgagaagccaaagaacttgagctgtatagtaaatgagggcaagaagatgaggtgcgaatgggatggggggcgggagactcaccttgaaaccaactttactttgaagtcagagtgggctacacacaagtttgccgactgcaaggccaagagggacacccccacatcatgtactgtggattactccactgtgtatttcgtgaacattgaggtttgggtcgaggccgaaaacgcactgggaaaagtaactagcgaccacatcaacttcgacccagtgtacaaagtgaaacccaaccctccccataatctgagcgtgatcaacagtgaggaactgtctagcatcctgaagttaacttggaccaatcctagtatcaaaagtgtgatcatactgaaatacaacatacagtatagaacaaaggatgcgtctacctggagtcaaatcccgccagaggatactgcaagcaccaggtcgtcattcactgttcaggacctgaagccctttaccgaatatgtctttcgaatcaggtgtatgaaagaggacggtaagggatactggtctgactggtccgaggaagcatcaggcataacatacgaagacaacatcgctagtttctag

SEQ ID NO: 251950 - DNA, 990 bp, Artificial Sequence
  derived and/or modified sequence
atgctgaccctgcagacctggctggtgcaggccctgttcatcttcctcacaacagaatccactggcgaattactggacccgtgtggatacatcagcccagaaagtcccgttgtgcagttgcactcgaatttcactgctgtgtgcgtgttaaaggaaaagtgcatggactactttcacgtcaacgccaattacatcgtatggaaaactaaccacttcacaatacctaaagagcagtatacgatcatcaatagaacggcgagcagtgtcacgtttacagatatcgcgagcctaaacatccagctaacatgtaacatactgacattcggacagctggaacagaacgtatacggtattaccataatctccggactgcctcctgagaagccaaagaatctgtcttgcatcgttaacgagggtaagaagatgcggtgcgagtgggacggcggacgggaaacgcatctggagacaaattttaccctaaagagtgagtgggccacacacaagtttgccgattgcaaggccaagcgggacactccaacttcttgcacagttgattatagcacagtgtattttgttaatattgaggtatgggtcgaggccgagaatgctctcgggaaagtgacctccgaccacatcaatttcgacccggtatataaggtaaagcccaaccccccccacaatctgagcgttattaatagtgaggagctgtcctctattctgaagcttacatggactaatccctctattaagtcggtaattattctgaagtacaatattcagtatagaaccaaggatgcctctacctggtctcagattccacctgaagacaccgcctcaaccaggagcagcttcaccgtacaggatttgaaaccctttaccgaatacgtttttcggatacgctgcatgaaggaagacggcaaaggatactggtcagactggtccgaggaggcttcagggattacctacgaagacaccatttttagtttttag

SEQ ID NO: 251951 - DNA, 990 bp, Artificial Sequence
  derived and/or modified sequence
atgctaacgctccagacttggttagtgcaggcgctcttcatatttcttacaacagagagtacaggcgaactgctcgatccatgtggatatatcagtccagagtccccagtcgtccagcttcacagcaactttacagcggtgtgcgtgctgaaggagaaatgtatggactacttccacgtgaatgccaactacatagtctggaagacaaaccattttaccattcccaaggaacagtatacaatcattaaccggaccgcctcatcagtgacgttcaccgacattgcctccctcaacattcaattaacctgcaatatcttgacttttgggcagctcgagcagaatgtctatgggattacaataatttccggtctcccgccagagaagcccaaaaatctcagctgtatcgtgaatgaaggaaagaaaatgcgttgcgaatgggacggaggaagggagacacaccttgagacaaacttcactctgaagagcgagtgggccacccacaagttcgccgattgtaaggcaaagcgggatacacccacaagttgtactgtggattacagcaccgtttacttcgtgaacattgaggtgtgggtggaagctgaaaacgcactcgggaaagtcacaagtgaccacatcaacttcgatcccgtgtacaaggtaaaaccaaacccgccacataatctgtccgtgatcaattcagaggagctcagcagtatactgaagctcacatggactaatccttctatcaagtctgtgataatccttaaatacaatattcagtatcgtaccaaagacgccagcacctggtcacaaattccaccggaggatactgccagcacgcgttcctcatttacagtccaagacctgaaaccatttacagaatacgtttttcgcatacgctgtatgaaggaagatggtaagggctattggtcagactggtcagaggaggcgagcggcattacgtacgaggacaatatcgcctctttctag

SEQ ID NO: 251952 - DNA, 990 bp, Artificial Sequence
  derived and/or modified sequence
atgctaactttacagacttggttagtgcaggccttgtttatttttctaacgaccgagagcaccggggagctactggatccttgcggctacatatcccctgaaagtcctgtcgtgcagctgcatagcaacttcactgctgtgtgtgtgctgaaggaaaagtgtatggactacttccacgtgaatgctaattatattgtgtggaagactaaccacttcacaattcctaaggagcagtacaccattatcaataggactgccagttcagtcaccttcacagacattgcctcccttaatattcagctgacctgcaacatcctgaccttcgggcagcttgaacaaaacgtctacggcattaccattatcagcggtttacccccagaaaaacccaagaacctaagctgcatcgtgaatgagggcaaaaagatgcgatgcgaatgggacggagggagagagacccaccttgaaaccaattttacattgaaatcagagtgggccactcataagtttgcagactgcaaagccaaacgggatacgcctacttcgtgcacagtcgactactctaccgtgtatttcgtgaacattgaggtgtgggtcgaggcagaaaacgcactgggaaaggtcaccagtgatcacatcaattttgatccagtctataaagtcaagcctaatccaccacataatttatctgtaatcaattcagaagagctcagtagtattttaaagttgacatggactaatccctctattaagtccgtgatcatcttaaaatacaatattcaatatcggacaaaggatgcctccacctggtcacaaataccccctgaggataccgcatccacaagatcttccttcactgtgcaagatctaaaaccctttaccgaatatgtgtttcggataaggtgtatgaaagaggatgggaaagggtactggtccgattggtctgaggaggcgagcggaatcacctacgaggacaacattgcatctttttag

SEQ ID NO: 251953 - DNA, 990 bp, Artificial Sequence
  derived and/or modified sequence
atgttaaccttgcagacttggcttgttcaggctctgtttatatttctgaccactgagtctacaggtgagttactcgacccctgcggctacatttcacctgaatcccctgtggtccagctgcactctaactttactgccgtctgcgtgttaaaggaaaagtgtatggactattttcacgtcaacgccaattatattgtgtggaaaaccaatcattttaccattcccaaagaacagtacactattataaacaggactgccagtagcgttaccttcactgacatcgcctctctgaacatccaactgacctgcaacatccttaccttcggccaacttgagcagaatgtgtatggcattacgattatatccggcttgccacctgagaagccaaagaacctgtcctgtatcgtgaatgaggggaagaagatgcgatgcgaatgggatgggggaagggaaacccacctcgagacaaatttcacgttgaagagtgagtgggccacccacaaatttgccgactgtaaggctaaacgggacacaccaacaagctgcacagttgattactctacagtgtacttcgtcaatatcgaagtatgggtggaggctgaaaatgctctcgggaaagtcacttcagaccatatcaatttcgaccccgtgtacaaagtgaagcccaaccctcctcacaatctaagtgtaattaactcagaagaactgagttcaatcctgaagctaacatggacaaatccctctattaaaagcgttattatcctcaagtacaatatccagtaccggaccaaggatgccagtacctggagccaaataccccctgaagatacagccagtacacgctcatccttcaccgttcaggacctcaaaccatttacagaatacgttttcaggatcagatgcatgaaagaagatggcaaggggtactggagtgattggtccgaagaagcgtccggcataacttacgaggacaatattgctagcttctag

SEQ ID NO: 251954 - DNA, 990 bp, Artificial Sequence
  derived and/or modified sequence
atgcttacactgcagacttggctagtgcaggccctcttcatctttttgaccacagagagcacaggcgagttgctggacccctgtgggtatataagtcctgagtcccctgtggttcaactacattctaacttcaccgccgtctgcgtcctcaaggaaaaatgcatggactactttcacgtgaacgccaactatattgtgtggaaaaccaatcactttaccatccctaaagagcagtacactattattaacaggaccgctagctcagtgacatttacagacattgctagcttgaacatccaactaacttgcaacatcctcaccttcggacagctggagcagaacgtttacggtattactataattagcggattgccacctgaaaagcctaagaatctgtcatgtatcgtcaatgaaggaaagaaaatgagatgcgagtgggatggcggacgcgaaacacatttggaaactaacttcacgctcaagtctgaatgggcaacacacaagtttgctgattgtaaggctaagcgggatacaccaacatcatgcaccgtggactactcaactgtgtatttcgtgaacattgaggtctgggtggaggcagaaaatgcattgggtaaagtcacgagtgaccacattaacttcgacccagtatacaaagtcaagcccaaccctccccacaatctctccgtgataaattctgaagagctgagctctatcctcaagctgacatggacaaacccgagtataaagtctgtcatcatcctgaaatacaacattcaatataggaccaaagatgcctcaacttggtcacagatcccgccagaagataccgcgtctaccagaagtagtttcacagtgcaagacttgaaaccatttactgagtatgtcttcaggatcagatgtatgaaggaggacggtaagggctattggtctgattggtccgaggaggcgagcggaatcacgtacgaggatactatcttcagcttttag

SEQ ID NO: 251955 - DNA, 990 bp, Artificial Sequence
  derived and/or modified sequence
atgctgaccctgcagacctggctggtgcaggccctgttcatcttcctgaccaccgagagcaccggcgagctgctggacccctgcggctacatcagccccgagagccccgtggtgcagctgcacagcaacttcaccgccgtgtgcgtgctgaaggagaagtgcatggactacttccacgtgaacgccaactacatcgtgtggaagaccaaccacttcaccatccccaaggagcagtacaccatcatcaacagaaccgccagcagcgtgaccttcaccgacatcgccagcctgaacatccagctgacctgcaacatcctgaccttcggccagctggagcagaacgtgtacggcatcaccatcatcagcggcctgccccccgagaagcccaagaacctgagctgcatcgtgaacgagggcaagaagatgagatgcgagtgggacggcggcagagagacccacctggagaccaacttcaccctgaagagcgagtgggccacccacaagttcgccgactgcaaggccaagagagacacccccaccagctgcaccgtggactacagcaccgtgtacttcgtgaacatcgaggtgtgggtggaggccgagaacgccctgggcaaggtgaccagcgaccacatcaacttcgaccccgtgtacaaggtgaagcccaaccccccccacaacctgagcgtgatcaacagcgaggagctgagcagcatcctgaagctgacctggaccaaccccagcatcaagagcgtgatcatcctgaagtacaacatccagtacagaaccaaggacgccagcacctggagccagatcccccccgaggacaccgccagcaccagaagcagcttcaccgtgcaggacctgaagcccttcaccgagtacgtgttcagaatcagatgcatgaaggaggacggcaagggctactggagcgactggagcgaggaggccagcggcatcacctacgaggacaacatcgccagcttctag

SEQ ID NO: 251956 - DNA, 990 bp, Artificial Sequence
  derived and/or modified sequence
atgctgaccctgcagacctggctggtgcaggccctgttcatcttcctgaccaccgagagcaccggcgagctgctggacccctgcggctacatcagccccgagagccccgtggtgcagctgcacagcaacttcaccgccgtgtgcgtgctgaaggagaagtgcatggactacttccacgtgaacgccaactacatcgtgtggaagaccaaccacttcaccatccccaaggagcagtacaccatcatcaacagaaccgccagcagcgtgaccttcaccgacatcgccagcctgaacatccagctgacctgcaacatcctgaccttcggccagctggagcagaacgtgtacggcatcaccatcatcagcggcctgccccccgagaagcccaagaacctgagctgcatcgtgaacgagggcaagaagatgagatgcgagtgggacggcggcagagagacccacctggagaccaacttcaccctgaagagcgagtgggccacccacaagttcgccgactgcaaggccaagagagacacccccaccagctgcaccgtggactacagcaccgtgtacttcgtgaacatcgaggtgtgggtggaggccgagaacgccctgggcaaggtgaccagcgaccacatcaacttcgaccccgtgtacaaggtgaagcccaaccccccccacaacctgagcgtgatcaacagcgaggagctgagcagcatcctgaagctgacctggaccaaccccagcatcaagagcgtgatcatcctgaagtacaacatccagtacagaaccaaggacgccagcacctggagccagatcccccccgaggacaccgccagcaccagaagcagcttcaccgtgcaggacctgaagcccttcaccgagtacgtgttcagaatcagatgcatgaaggaggacggcaagggctactggagcgactggagcgaggaggccagcggcatcacctacgaggacaccatcttcagcttctag

SEQ ID NO: 251957 - protein, 555 aa, Artificial Sequence
  derived and/or modified sequence
MQSCESSGDSADDPLSRGLRRRGQPRVVVIGAGLAGLAAAKALLEQGFTDVTVLEASSHIGGRVQSVKLGHATFELGATWIHGSHGNPIYHLAEANGLLEETTDGERSVGRISLYSKNGVACYLTNHGRRIPKDVVEEFSDLYNEVYNLTQEFFRHDKPVNAESQNSVGVFTREEVRNRIRNDPDDPEATKRLKLAMIQQYLKVESCESSSHSMDEVSLSAFGEWTEIPGAHHIIPSGFMRVVELLAEGIPAHVIQLGKPVRCIHWDQASARPRGPEIEPRGEGDHNHDTGEGGQGGEEPRGGRWDEDEQWSVVVECEDCELIPADHVIVTVSLGVLKRQYTSFFRPGLPTEKVAAIHRLGIGTTDKIFLEFEEPFWGPECNSLQFVWEDEAESHTLTYPPELWYRKICGFDVLYPPERYGHVLSGWICGEEALVMEKCDDEAVAEICTEMLRQFTGNPNIPKPRRILRSAWGSNPYFRGSYSYTQVGSSGADVEKLAKPLPYTESSKTAPMQVLFSGEATHRKYYSTTHGALLSGQREAARLIEMYRDLFQQGT

SEQ ID NO: 251958 - DNA, 1668 bp, Artificial Sequence
  derived and/or modified sequence
atgcagagctgcgagagtagcggcgactccgctgatgacccacttagcagaggcttgcggaggcgcggacagccaagggtggtggtcataggcgctgggctggccggcctcgccgcggccaaggctcttctggagcaggggttcacagacgtgaccgtgctggaggcctcatcacacataggggggcgcgttcagagcgtgaaattagggcacgcaacttttgagctcggcgctacctggatccacggcagccatgggaaccctatttaccacttggccgaagcaaacggactgttggaagaaactactgatggggagaggagtgtggggaggatctccctctactcaaagaacggggttgcttgctatctcaccaaccacggcaggagaattcccaaagacgtggtggaggagttcagtgacctgtataatgaagtgtataatctgacacaggagttttttaggcatgataagccagtgaacgctgagtcgcaaaacagtgtgggggtgtttactagagaagaggtccgaaaccgaatcaggaatgacccggatgatcctgaggccactaagcggctgaaactggctatgattcagcagtacctcaaggtggagtcttgcgagtcaagctcacacagcatggatgaggtgagcctgtccgcgtttggtgagtggactgagatccccggcgcgcaccatattatccctagcggattcatgcgagtggttgagctgctggcagaaggaattccagcacacgttatccaactcggaaagcccgtgcgctgcattcactgggaccaggcatccgctagaccccgagggccagaaatcgagccgagaggggagggggatcataatcacgataccggtgagggtggacaggggggtgaagaacccagaggcgggaggtgggacgaagacgagcagtggagcgtcgtggtagagtgtgaggattgtgagctgattccagctgatcatgtcatcgtcacagtaagcctgggcgtgttgaagagacaatatacgagctttttccgccctgggcttcccactgaaaaggtggccgccatccatcgcctggggatcggtactaccgataagatattcctggaatttgaggagcctttttggggccccgagtgtaattcactgcagttcgtctgggaggacgaagccgagtcacacacactaacctatcctcctgagctgtggtatcgcaaaatctgtggatttgatgtcctttatccccctgaaagatacggtcacgttttgtcggggtggatttgtggggaggaggcactcgtaatggagaagtgtgacgatgaagcggtggccgaaatctgtacagaaatgctaaggcagtttactggtaatccaaacatccctaaaccccggcgcatactccgatccgcatggggcagtaacccatacttccggggctcttactcttacacacaggtgggctctagcggtgctgacgtcgagaaactggcgaagccactgccttatacggagagctccaagactgcacccatgcaagtccttttctccggcgaagctactcatcgcaaatattactccaccacacacggcgctctcttgagtggacagagagaagcggcgagactgatcgaaatgtatcgcgatttatttcagcaggggacatag

SEQ ID NO: 251959 - DNA, 1668 bp, Artificial Sequence
  derived and/or modified sequence
atgcagtcctgcgaaagctctggcgactctgccgatgatccgctgtctcgtggactgcgcagacgaggccagccccgagtagtcgtgattggggcagggctggcagggctcgctgcagccaaagccctcttggaacaagggttcacagatgtgacagttttggaagcaagcagtcatattggtggacgcgtgcaaagcgttaagttgggccacgccacttttgagctgggggcgacatggatccacggttcacatgggaacccaatctatcatctagctgaagccaacggcctcctggaggagactacagatggagaaaggtctgtaggacgcatctcgttgtatagcaaaaacggtgtggcatgttacttgactaaccacggccgcagaattcctaaggacgtcgtcgaagagtttagtgacttgtataatgaggtgtataatttgacccaggaattcttccgccacgacaaacccgtgaacgccgaaagccagaattcagtgggcgtgttcacacgcgaggaagtgcggaaccgaataaggaacgaccccgatgatccggaggcgaccaagaggcttaaactggctatgatccagcaatatctgaaagtggaaagttgtgagtctagctcccattctatggacgaggtgtcactgagcgcttttggggaatggactgaaatacctggagctcaccatataatccccagtggtttcatgagggtggtagagctacttgcagaggggatcccagctcacgtgattcagctgggaaagccagttcgctgtatccactgggaccaggcctcggcgcgacccagagggcccgaaatcgaaccacggggtgagggcgaccacaaccatgacactggcgagggcgggcagggcggggaagaaccaaggggcggaaggtgggacgaagatgagcagtggtcagtcgtggttgagtgtgaagattgcgagctgatccctgccgatcacgtgatcgtaacagtatctttgggagtcttgaagagacagtacacatccttctttaggccaggactgcccactgaaaaagtagcggccattcataggttgggcatagggaccacagataagattttccttgaatttgaggaaccgttttggggcccggaatgcaacagcctccagtttgtgtgggaggacgaggccgagtcccacaccctgacctatcccccagaactgtggtacaggaaaatctgtgggtttgacgtgttgtacccccctgagagatacgggcatgtgctctcaggttggatctgcggggaagaggcccttgtgatggaaaagtgcgacgatgaggcagttgctgaaatttgtaccgagatgttaaggcaattcaccgggaacccgaacattccaaaacctagacggatcctgagatcagcctgggggtcaaatccatactttagggggagttactcttacactcaagtcgggagctctggcgccgatgtagaaaagcttgccaaaccactgccatacacagagagttccaaaaccgcgcccatgcaagtgcttttttctggagaggccacccacagaaagtactattcaacaacccatggggcccttctcagcggccagagagaagcggccaggttaattgagatgtacagagacctcttccagcaaggcacttag

SEQ ID NO: 251960 - DNA, 1668 bp, Artificial Sequence
  derived and/or modified sequence
atgcagagctgtgagagcagcggggacagcgcagatgaccccctgagccggggcctgcggcggcggggccagccccgggtggtggtgattggagctggcctggccggcctggccgccgccaaggccctgctggagcagggcttcacagatgtgacagtgctggaggccagcagccacatcggcggccgggtgcagagcgtgaagctgggccacgccacctttgagctgggcgccacctggatccacggcagccacggcaaccccatctaccacctggccgaggccaacggcctgctggaggagaccacagatggagagaggtctgtgggccgcatcagcctgtacagcaagaatggagtggcctgctacctgaccaaccacggccgccgcatccccaaggatgtggtggaggagttcagtgacctgtacaatgaggtgtacaacctgacccaggagttcttcagacatgacaagcctgtgaatgctgagagccagaacagcgtgggcgtcttcacccgggaggaggtgaggaaccgcatcagaaatgaccctgatgatcctgaggccaccaagaggctgaagctggccatgatccagcagtacctgaaggtggagagctgtgagagcagcagccacagcatggatgaggtgtccctgagcgccttcggggagtggacagagatccctggggcccaccacatcatccccagcggcttcatgagggtggtggagctgctggccgagggcatcccagcccacgtgatccagctgggcaagcctgtgcgctgcatccactgggaccaggccagcgcccggccccggggccctgagattgagcccagaggagagggggaccacaaccacgacaccggggagggcggccagggcggggaggagccccggggcggccgctgggatgaagatgagcagtggagcgtggtggtggagtgtgaggactgtgagctgatcccagctgaccacgtgattgtgacagtgtccctgggcgtgctgaagaggcagtacaccagcttcttccggcccggcctgcccacagagaaggtggccgccatccaccggctgggcatcggcaccacagacaagatcttcctggagtttgaggagcccttctggggccctgagtgcaacagcctgcagtttgtgtgggaggatgaggccgagagccacaccctgacctacccacctgagctgtggtacaggaagatctgtggctttgatgtgctgtacccacctgagagatatggccacgtgctgagcggctggatctgtggggaggaggccctggtgatggagaagtgtgatgatgaagctgtggccgagatctgcacagagatgctgcggcagttcaccggcaaccccaacatccccaagccccggcgcatcctgcggagcgcctggggcagcaacccctacttccggggcagctacagctacacccaggtgggcagcagcggggctgatgtggagaagctggccaagcccctgccctacacagagagcagcaagacagcccccatgcaggtgctcttctctggagaggccacccacaggaagtactacagcaccacccacggggccctgctgagcggccagcgggaggccgcccggctcatcgagatgtacagagacctcttccagcagggcacctag

SEQ ID NO: 251961 - DNA, 2230 bp, Artificial Sequence
  derived and/or modified sequence
ctttctgtgctgatcttggaggcagagtggctgcctgcattcattccacggtccattccacagcttgttccaaagacagtctgctcatgatgtagcttctgcacttgacaaattattttcatgcacgaggcccttgaaaatgttgacagtcttgtgacatccatggagggccttatttgacggtcacaaaggagcggttcctagaaggtgagcgcggacggtatgcaaagttgtgaatccagtggtgacagtgcggatgaccctctcagtcgcggcctacggagaaggggacagcctcgtgtggtggtgatcggcgccggcttggctggcctggctgcagccaaagcacttcttgagcagggtttcacggatgtcactgtgcttgaggcttccagccacatcggaggccgtgtgcagagtgtgaaacttggacacgccacctttgagctgggagccacctggatccatggctcccatgggaaccctatctatcatctagcagaagccaacggcctcctggaagagacaaccgatggggaacgcagcgtgggccgcatcagcctctattccaagaatggcgtggcctgctaccttaccaaccacggccgcaggatccccaaggacgtggttgaggaattcagcgatttatacaacgaggtctataacttgacccaggagttcttccggcacgataaaccagtcaatgctgaaagtcaaaatagcgtgggggtgttcacccgagaggaggtgcgtaaccgcatcaggaatgaccctgacgacccagaggctaccaagcgcctgaagctcgccatgatccagcagtacctgaaggtggagagctgtgagagcagctcacacagcatggacgaggtgtccctgagcgccttcggggagtggaccgagatccccggcgctcaccacatcatcccctcgggcttcatgcgggttgtggagctgctggcggagggcatccctgcccacgtcatccagctagggaaacctgtccgctgcattcactgggaccaggcctcagcccgccccagaggccctgagattgagccccggggtgagggcgaccacaatcacgacactggggagggtggccagggtggagaggagccccgggggggcaggtgggatgaggatgagcagtggtcggtggtggtggagtgcgaggactgtgagctgatcccggcggaccatgtgattgtgaccgtgtcgctaggtgtgctaaagaggcagtacaccagtttcttccggccaggcctgcccacagagaaggtggctgccatccaccgcctgggcattggcaccaccgacaagatctttctggaattcgaggagcccttctggggccctgagtgcaacagcctacagtttgtgtgggaggacgaagcagagagccacaccctcacctacccacctgagctctggtaccgcaagatctgcggctttgatgtcctctacccgcctgagcgctacggccatgtgctgagcggctggatctgcggggaggaggccctcgtcatggagaagtgtgatgacgaggcagtggccgagatctgcacggagatgctgcgtcagttcacagggaaccccaacattccaaaacctcggcgaatcttgcgctcggcctggggcagcaacccttacttccgcggctcctattcatacacgcaggtgggctccagcggggcggatgtggagaagctggccaagcccctgccgtacacagagagctcaaagacagcgcccatgcaggtgctgttttccggtgaggccacccaccgcaagtactattccaccacccacggtgctctgctgtccggccagcgtgaggctgcccgcctcattgagatgtaccgagacctcttccagcaggggacctgagggctgtcctcgctgctgagaagagccactaactcgtgacctccagcctgccccttgctgccgtgtgctcctgccttcctgatcctctgtagaaaggatttttatcttctgtagagctagccgccctgactgccttcagacctggccctgtagcttttctttttctccaggctgggccgtgagcaggtgggccgttgagttacctctgtgctggatcccgtgcccccacttgcctaccctctgtcctgccttgttattgtaagtgccttcaatactttgcattttgggataataaaaaaggctccctcccctgcccctcagcttctctctggttttctca

SEQ ID NO: 251962 - DNA, 1668 bp, Artificial Sequence
  derived and/or modified sequence
atgcagagctgcgagagcagcggcgacagcgccgacgaccccctgagcagaggtctcaggcgcaggggccaaccacgagtagttgtcataggggctggacttgctgggctcgcggcggccaaggctctgcttgagcaggggtttaccgacgtcactgtgctcgaagccagctcccacattggaggtcgagtgcaatcagtgaagctgggacacgctacattcgagctgggggctacgtggatacacgggagtcatggtaatcccatatatcatttggccgaggctaacggtctactggaggagaccacggatggcgaacggagcgttggtagaataagtctctatagcaagaacggcgtggcttgttatctcacaaaccatgggaggaggatacccaaggacgtcgtggaggagttctcggatctgtacaacgaggtgtataacttaacacaggaattttttcgccatgacaagccggtaaatgcagagtctcagaacagcgtgggcgttttcacacgagaggaagtacggaacagaatccgtaacgatcccgatgaccctgaagctacaaaaaggcttaagctggcgatgattcagcagtacctgaaggttgagtcctgcgagagcagctcccactctatggatgaagtgagcctgtcagcctttggggagtggaccgaaattccgggcgctcaccacatcattccatctggatttatgagagtagtggagttgttggctgagggtattcccgcccatgtcatacagttaggtaagcctgtccggtgcatccattgggatcaggcctcagcccggccaaggggacctgaaatcgaacctcgcggcgaaggggatcacaatcacgacaccggggagggggggcaaggcggtgaagaaccgcgcggaggacgctgggacgaagatgagcagtggtcagtggtggttgagtgcgaggattgtgagctgattccagcagatcacgttattgtgacagtgtcccttggcgtccttaagaggcaatacaccagtttcttccgccccggcctccccactgaaaaggtcgcagcaattcatcgactaggaataggtaccacagataagatattcctggaatttgaggaaccattttggggaccggagtgtaacagcctgcaattcgtctgggaggatgaagcagaatcacatactctaacctaccctccagaactttggtacagaaagatttgtgggttcgacgtgctttacccacctgagaggtacggccatgttttatctggctggatttgtggcgaagaggctttggtcatggagaagtgtgacgatgaagccgttgccgagatatgcactgagatgctgcggcaattcaccggcaatccaaacatacctaagcctcgacgaatactacggtcggcctggggctcaaacccttattttcgagggagctattcctacactcaagttggttcttcaggcgctgacgtcgaaaagctcgctaaaccattgccctacaccgaatcctccaagacagccccgatgcaggttttatttagcggggaagccactcaccggaaatactattccacaacccacggtgccctgttgtcgggtcagcgagaggctgcacgtctcatcgaaatgtatcgcgacctctttcagcaaggaacttag

SEQ ID NO: 251963 - DNA, 1668 bp, Artificial Sequence
  derived and/or modified sequence
atgcagagctgcgagagcagcggcgacagcgccgacgaccccctgagccgcgggctacgaaggagaggtcagccgcgggtggttgttatcggagcaggcctggccggactggccgccgctaaagcattgctggagcagggctttaccgatgtgaccgtcctagaggcctcatcccatatcggggggcgcgtgcagagtgtgaagttagggcatgcgacttttgaattaggagctacgtggattcatggatcgcacggtaacccaatttaccacctggccgaagccaacggcctcctggaggaaaccaccgatggtgaacgtagtgtgggccgcatcagcctatattccaaaaacggagttgcatgctatctcactaaccatggtagaaggatacccaaggatgtcgttgaagagttcagcgacctgtataatgaggtgtataatctgactcaggaattttttaggcacgataaacctgtgaacgcggaatcccagaacagtgtaggcgtcttcacgcgggaagaggtaagaaatcgaatccgtaacgatccagacgatcccgaggctacgaaaagattaaaactggccatgatccagcagtatcttaaagtggaatcttgcgaatcttctagccactcaatggatgaagtgtcactgagtgctttcggagagtggacagagattccaggagcacaccacatcatcccctctgggtttatgcgcgtggttgagctgctcgccgaagggatcccagcccacgtaattcagctagggaagcctgttcgctgcatccactgggaccaggcatccgctaggccgcgtggtccagagatcgagcccagaggagaaggggaccacaatcatgatactggcgagggtggacagggaggcgaggagcctcgagggggaagatgggacgaagacgaacagtggagcgtggtagtcgagtgcgaagattgcgagctgattcctgcagaccatgtgattgttacggtgtctttaggagtcctcaagcgacagtatacctcattcttccggcccggcctcccaactgaaaaagtggccgccattcacaggctcggcatcggcacaactgacaagattttcttggaatttgaagagcccttctggggacccgagtgcaacagcctgcagttcgtgtgggaagacgaggctgaaagccacaccttgacttacccgccggagctgtggtaccgcaagatctgcggattcgacgtactgtaccccccagaacgatacggacacgtactgtcaggatggatatgtggtgaagaggcactggtgatggaaaagtgcgacgacgaagcggtagcagaaatatgcaccgaaatgctgcgccagtttactggtaaccccaacatccctaagccacggcgtatcctgagatcagcctggggctccaacccttacttccggggttcttattcttatacacaggtgggctccagcggagctgatgtggaaaaattggcaaaaccactgccctatacagagtcctccaagacggcaccaatgcaggtgcttttttccggagaagccacccacaggaaatattatagcactacacacggggcactgctgtcagggcagagggaggcagctcggctcattgaaatgtaccgggatctctttcaacagggcacctag

SEQ ID NO: 251964 - DNA, 1668 bp, Artificial Sequence
  derived and/or modified sequence
atgcaaagttgcgagagctccggggatagtgccgatgaccctctgtcccgagggttgagacgtcgagggcagccacgggttgttgtcatcggggcaggtctcgccggactggccgcagctaaggccctgctggagcagggattcaccgacgtgactgtgctcgaggcctcaagccacattgggggtagggtgcaatcggtcaaactggggcatgcaacatttgaactgggtgcgacatggattcacggttctcacggtaaccccatttatcatcttgcagaagccaatggacttctggaagagaccaccgacggagagcgcagcgtgggacgcattagtctctattccaaaaatggcgttgcttgctatctgaccaaccatgggagacggattcccaaggacgtggtcgaggagttcagcgacttgtataacgaagtgtacaatttgacccaggaattcttccggcacgacaagccagttaatgccgagagccaaaactccgtgggcgtgtttactcgtgaagaggtccgcaatcgaatccgaaacgaccccgatgatccagaggccaccaaacggctgaagttagcaatgattcaacagtacctgaaagtggaaagctgtgaatcgtcttcacacagtatggacgaggtgagcctttctgcttttggggagtggacagaaatccccggtgcccaccacattattccctcaggctttatgcgggttgtggagctgctggctgagggcataccagcccacgtcatccagcttgggaagccagtcagatgcatccattgggaccaggcatctgccagacccagaggccctgagattgagcccaggggcgagggggaccacaatcatgacactggtgagggtgggcaaggaggcgaggagccacgcggaggtcgctgggacgaggacgagcaatggtcggttgtggtggagtgtgaagattgtgaacttattcctgcagaccacgtgatagtcacagtttctttaggggtgcttaagaggcaatatacaagcttctttaggccaggcttgcccacagaaaaggtagcggctattcatcgccttggcattggcactaccgacaaaatcttcctggaatttgaagaaccgttttggggacccgagtgtaattccctgcagttcgtctgggaggacgaggctgagtcccatactctgacctatccacccgagctgtggtatagaaaaatttgtggcttcgatgtgctgtacccacccgaaagatacggacatgttctaagcggctggatctgcggcgaggaggccctggtaatggagaaatgtgacgacgaagcagttgcggagatctgcacggagatgctgcggcagttcacgggaaaccctaatatcccgaagccaaggagaatcctacgttctgcctggggctccaatccttattttagggggagctactcctatacgcaggtgggttcctccggggctgacgtggagaagctggccaagcccctgccttataccgagagctcaaaaaccgcacccatgcaggttttgttctctggggaggccacacaccgaaagtactactcaactacccatggggcactgctatctggccaacgcgaagccgcacgccttattgaaatgtatagggatttgttccagcagggcacatag

SEQ ID NO: 251965 - DNA, 1668 bp, Artificial Sequence
  derived and/or modified sequence
atgcaatcgtgcgaatctagcggggatagcgccgatgatcctctgagtagaggcctcaggaggcggggtcaaccccgagtcgtcgtcatcggagccggactggctggattagcagccgcaaaggcgttgctggagcaaggcttcaccgacgtcacggtcttagaagcgtcatcccacattggcggaagagtgcagtctgtgaaactggggcatgctacattcgaactgggggcaacctggatccatggatcccacggaaatcccatctaccacctggcagaagcaaatgggctgctggaggaaactacagatggggagaggtcagtcggccgtatcagcctgtattctaaaaacggcgtggcatgttacctcaccaatcatggcagacggatccctaaggacgtagtcgaagagtttagcgatctgtataatgaagtgtacaatctaacccaggaattcttccggcacgataagcctgtcaacgctgaaagccagaactcagttggcgtgtttaccagggaagaagtcagaaatcgtataaggaatgatcccgacgaccccgaggccacaaagaggctgaaacttgcaatgattcagcagtacctgaaagtagaaagctgcgaatccagctcccacagcatggacgaagtatccttaagtgccttcggggaatggaccgagatcccaggggcacatcacatcataccatctggctttatgcgggtggttgagctactggccgaaggaatacctgctcacgtgattcagctgggtaagcctgtcagatgcatacactgggaccaggcctcagccaggcccagaggacccgaaattgagccaagaggagaaggtgatcacaatcacgacactggagagggcggacaagggggagaggaacccaggggtgggagatgggacgaggacgaacagtggtccgttgttgtagagtgtgaagactgcgaactgatccccgctgaccatgtgattgtgaccgtctctctcggggtgctgaaaaggcagtacacctccttttttaggcccggtctgcccactgagaaggtggccgcaatacatagactgggtatagggaccaccgacaagatcttccttgagtttgaagaaccgttttgggggccagagtgcaacagtttgcaattcgtgtgggaagacgaggcagaaagccatacattgacttaccctccagaactgtggtaccgcaagatttgtggctttgacgtgctgtaccccccagaaaggtatggccacgtgctttccgggtggatctgtggagaggaggccctcgtcatggagaaatgcgatgacgaggccgtggctgaaatatgcactgagatgctaaggcaatttactgggaatcccaacattcctaagccaaggcggatactccggagtgcctggggttccaacccgtacttccggggatcttacagctacactcaggtggggtcaagtggcgctgatgtcgaaaagctggcaaagccccttccatacacggaatcttcaaagacagctcctatgcaagtgttgttctccggagaagctacccatcgtaaatactacagcactacacacggagcattgctctctggccagcgggaggccgcacggttgatcgaaatgtatcgggatctttttcagcaggggacgtag

SEQ ID NO: 251966 - DNA, 2233 bp, Artificial Sequence
  derived and/or modified sequence
gccgggccggagcggggtgggtaggggacgcgaggcggagcggggccccacacaggccgcggcggctggctcgggcccctacggtcccggcggcggctggaggaggaagccaggcggctggcggaggaggagagacggaggaggccgagaccggagcgccgctcgccgcagacttacttccccggctcagcagggaaaggttcctagaaggtgagcgcggacggtatgcaaagttgtgaatccagtggtgacagtgcggatgaccctctcagtcgcggcctacggagaaggggacagcctcgtgtggtggtgatcggcgccggcttggctggcctggctgcagccaaagcacttcttgagcagggtttcacggatgtcactgtgcttgaggcttccagccacatcggaggccgtgtgcagagtgtgaaacttggacacgccacctttgagctgggagccacctggatccatggctcccatgggaaccctatctatcatctagcagaagccaacggcctcctggaagagacaaccgatggggaacgcagcgtgggccgcatcagcctctattccaagaatggcgtggcctgctaccttaccaaccacggccgcaggatccccaaggacgtggttgaggaattcagcgatttatacaacgaggtctataacttgacccaggagttcttccggcacgataaaccagtcaatgctgaaagtcaaaatagcgtgggggtgttcacccgagaggaggtgcgtaaccgcatcaggaatgaccctgacgacccagaggctaccaagcgcctgaagctcgccatgatccagcagtacctgaaggtggagagctgtgagagcagctcacacagcatggacgaggtgtccctgagcgccttcggggagtggaccgagatccccggcgctcaccacatcatcccctcgggcttcatgcgggttgtggagctgctggcggagggcatccctgcccacgtcatccagctagggaaacctgtccgctgcattcactgggaccaggcctcagcccgccccagaggccctgagattgagccccggggtgagggcgaccacaatcacgacactggggagggtggccagggtggagaggagccccgggggggcaggtgggatgaggatgagcagtggtcggtggtggtggagtgcgaggactgtgagctgatcccggcggaccatgtgattgtgaccgtgtcgctaggtgtgctaaagaggcagtacaccagtttcttccggccaggcctgcccacagagaaggtggctgccatccaccgcctgggcattggcaccaccgacaagatctttctggaattcgaggagcccttctggggccctgagtgcaacagcctacagtttgtgtgggaggacgaagcagagagccacaccctcacctacccacctgagctctggtaccgcaagatctgcggctttgatgtcctctacccgcctgagcgctacggccatgtgctgagcggctggatctgcggggaggaggccctcgtcatggagaagtgtgatgacgaggcagtggccgagatctgcacggagatgctgcgtcagttcacagggaaccccaacattccaaaacctcggcgaatcttgcgctcggcctggggcagcaacccttacttccgcggctcctattcatacacgcaggtgggctccagcggggcggatgtggagaagctggccaagcccctgccgtacacagagagctcaaagacagcgcccatgcaggtgctgttttccggtgaggccacccaccgcaagtactattccaccacccacggtgctctgctgtccggccagcgtgaggctgcccgcctcattgagatgtaccgagacctcttccagcaggggacctgagggctgtcctcgctgctgagaagagccactaactcgtgacctccagcctgccccttgctgccgtgtgctcctgccttcctgatcctctgtagaaaggatttttatcttctgtagagctagccgccctgactgccttcagacctggccctgtagcttttctttttctccaggctgggccgtgagcaggtgggccgttgagttacctctgtgctggatcccgtgcccccacttgcctaccctctgtcctgccttgttattgtaagtgccttcaatactttgcattttgggataataaaaaaggctccctcccctgcccctcagcttctctctggttttctca

SEQ ID NO: 251967 - DNA, 1668 bp, Artificial Sequence
  derived and/or modified sequence
atgcagagctgcgagagcagcggcgacagcgccgacgaccccctgagcagaggcctgagaagaagaggccagcccagagtggtggtgatcggcgccggcctggccggcctggccgccgccaaggccctgctggagcagggcttcaccgacgtgaccgtgctggaggccagcagccacatcggcggcagagtgcagagcgtgaagctgggccacgccaccttcgagctgggcgccacctggatccacggcagccacggcaaccccatctaccacctggccgaggccaacggcctgctggaggagaccaccgacggcgagagaagcgtgggcagaatcagcctgtacagcaagaacggcgtggcctgctacctgaccaaccacggcagaagaatccccaaggacgtggtggaggagttcagcgacctgtacaacgaggtgtacaacctgacccaggagttcttcagacacgacaagcccgtgaacgccgagagccagaacagcgtgggcgtgttcaccagagaggaggtgagaaacagaatcagaaacgaccccgacgaccccgaggccaccaagagactgaagctggccatgatccagcagtacctgaaggtggagagctgcgagagcagcagccacagcatggacgaggtgagcctgagcgccttcggcgagtggaccgagatccccggcgcccaccacatcatccccagcggcttcatgagagtggtggagctgctggccgagggcatccccgcccacgtgatccagctgggcaagcccgtgagatgcatccactgggaccaggccagcgccagacccagaggccccgagatcgagcccagaggcgagggcgaccacaaccacgacaccggcgagggcggccagggcggcgaggagcccagaggcggcagatgggacgaggacgagcagtggagcgtggtggtggagtgcgaggactgcgagctgatccccgccgaccacgtgatcgtgaccgtgagcctgggcgtgctgaagagacagtacaccagcttcttcagacccggcctgcccaccgagaaggtggccgccatccacagactgggcatcggcaccaccgacaagatcttcctggagttcgaggagcccttctggggccccgagtgcaacagcctgcagttcgtgtgggaggacgaggccgagagccacaccctgacctacccccccgagctgtggtacagaaagatctgcggcttcgacgtgctgtacccccccgagagatacggccacgtgctgagcggctggatctgcggcgaggaggccctggtgatggagaagtgcgacgacgaggccgtggccgagatctgcaccgagatgctgagacagttcaccggcaaccccaacatccccaagcccagaagaatcctgagaagcgcctggggcagcaacccctacttcagaggcagctacagctacacccaggtgggcagcagcggcgccgacgtggagaagctggccaagcccctgccctacaccgagagcagcaagaccgcccccatgcaggtgctgttcagcggcgaggccacccacagaaagtactacagcaccacccacggcgccctgctgagcggccagagagaggccgccagactgatcgagatgtacagagacctgttccagcagggcacctag

SEQ ID NO: 251968 - protein, 502 aa, Artificial Sequence
  derived and/or modified sequence
MQSCESSGDSADDPLSRGLRRRGQPRVVVIGAGLAGLAAAKALLEQGFTDVTVLEASSHIGGRVQSVKLGHATFELGATWIHGSHGNPIYHLAEANGLLEETTDGERSVGRISLYSKNGVACYLTNHGRRIPKDVVEEFSDLYNEVYNLTQEFFRHDKPVNAESQNSVGVFTREEVRNRIRNDPDDPEATKRLKLAMIQQYLKVESCESSSHSMDEVSLSAFGEWTEIPGAHHIIPSGFMRVVELLAEGIPAHVIQLGKPVRCIHWDQASARPRGPEIEPRGVLKRQYTSFFRPGLPTEKVAAIHRLGIGTTDKIFLEFEEPFWGPECNSLQFVWEDEAESHTLTYPPELWYRKICGFDVLYPPERYGHVLSGWICGEEALVMEKCDDEAVAEICTEMLRQFTGNPNIPKPRRILRSAWGSNPYFRGSYSYTQVGSSGADVEKLAKPLPYTESSKTAPMQVLFSGEATHRKYYSTTHGALLSGQREAARLIEMYRDLFQQGT

SEQ ID NO: 251969 - DNA, 1509 bp, Artificial Sequence
  derived and/or modified sequence
atgcagagctgcgagagcagcggcgacagcgccgacgaccccctgagcagaggcctgagaagaagaggccagcccagagtggtggtgatcggcgccggcctggccggcctggccgccgccaaggccctgctggagcagggcttcaccgacgtgaccgtgctggaggccagcagccacatcggcggcagagtgcagagcgtgaagctgggccacgccaccttcgagctgggcgccacctggatccacggcagccacggcaaccccatctaccacctggccgaggccaacggcctgctggaggagaccaccgacggcgagagaagcgtgggcagaatcagcctgtacagcaagaacggcgtggcctgctacctgaccaaccacggcagaagaatccccaaggacgtggtggaggagttcagcgacctgtacaacgaggtgtacaacctgacccaggagttcttcagacacgacaagcccgtgaacgccgagagccagaacagcgtgggcgtgttcaccagagaggaggtgagaaacagaatcagaaacgaccccgacgaccccgaggccaccaagagactgaagctggccatgatccagcagtacctgaaggtggagagctgcgagagcagcagccacagcatggacgaggtgagcctgagcgccttcggcgagtggaccgagatccccggcgcccaccacatcatccccagcggcttcatgagagtggtggagctgctggccgagggcatccccgcccacgtgatccagctgggcaagcccgtgagatgcatccactgggaccaggccagcgccagacccagaggccccgagatcgagcccagaggcgtgctgaagagacagtacaccagcttcttcagacccggcctgcccaccgagaaggtggccgccatccacagactgggcatcggcaccaccgacaagatcttcctggagttcgaggagcccttctggggccccgagtgcaacagcctgcagttcgtgtgggaggacgaggccgagagccacaccctgacctacccccccgagctgtggtacagaaagatctgcggcttcgacgtgctgtacccccccgagagatacggccacgtgctgagcggctggatctgcggcgaggaggccctggtgatggagaagtgcgacgacgaggccgtggccgagatctgcaccgagatgctgagacagttcaccggcaaccccaacatccccaagcccagaagaatcctgagaagcgcctggggcagcaacccctacttcagaggcagctacagctacacccaggtgggcagcagcggcgccgacgtggagaagctggccaagcccctgccctacaccgagagcagcaagaccgcccccatgcaggtgctgttcagcggcgaggccacccacagaaagtactacagcaccacccacggcgccctgctgagcggccagagagaggccgccagactgatcgagatgtacagagacctgttccagcagggcacctag

SEQ ID NO: 251970 - DNA, 2074 bp, Artificial Sequence
  derived and/or modified sequence
gccgggccggagcggggtgggtaggggacgcgaggcggagcggggccccacacaggccgcggcggctggctcgggcccctacggtcccggcggcggctggaggaggaagccaggcggctggcggaggaggagagacggaggaggccgagaccggagcgccgctcgccgcagacttacttccccggctcagcagggaaaggttcctagaaggtgagcgcggacggtatgcaaagttgtgaatccagtggtgacagtgcggatgaccctctcagtcgcggcctacggagaaggggacagcctcgtgtggtggtgatcggcgccggcttggctggcctggctgcagccaaagcacttcttgagcagggtttcacggatgtcactgtgcttgaggcttccagccacatcggaggccgtgtgcagagtgtgaaacttggacacgccacctttgagctgggagccacctggatccatggctcccatgggaaccctatctatcatctagcagaagccaacggcctcctggaagagacaaccgatggggaacgcagcgtgggccgcatcagcctctattccaagaatggcgtggcctgctaccttaccaaccacggccgcaggatccccaaggacgtggttgaggaattcagcgatttatacaacgaggtctataacttgacccaggagttcttccggcacgataaaccagtcaatgctgaaagtcaaaatagcgtgggggtgttcacccgagaggaggtgcgtaaccgcatcaggaatgaccctgacgacccagaggctaccaagcgcctgaagctcgccatgatccagcagtacctgaaggtggagagctgtgagagcagctcacacagcatggacgaggtgtccctgagcgccttcggggagtggaccgagatccccggcgctcaccacatcatcccctcgggcttcatgcgggttgtggagctgctggcggagggcatccctgcccacgtcatccagctagggaaacctgtccgctgcattcactgggaccaggcctcagcccgccccagaggccctgagattgagccccggggtgtgctaaagaggcagtacaccagtttcttccggccaggcctgcccacagagaaggtggctgccatccaccgcctgggcattggcaccaccgacaagatctttctggaattcgaggagcccttctggggccctgagtgcaacagcctacagtttgtgtgggaggacgaagcagagagccacaccctcacctacccacctgagctctggtaccgcaagatctgcggctttgatgtcctctacccgcctgagcgctacggccatgtgctgagcggctggatctgcggggaggaggccctcgtcatggagaagtgtgatgacgaggcagtggccgagatctgcacggagatgctgcgtcagttcacagggaaccccaacattccaaaacctcggcgaatcttgcgctcggcctggggcagcaacccttacttccgcggctcctattcatacacgcaggtgggctccagcggggcggatgtggagaagctggccaagcccctgccgtacacagagagctcaaagacagcgcccatgcaggtgctgttttccggtgaggccacccaccgcaagtactattccaccacccacggtgctctgctgtccggccagcgtgaggctgcccgcctcattgagatgtaccgagacctcttccagcaggggacctgagggctgtcctcgctgctgagaagagccactaactcgtgacctccagcctgccccttgctgccgtgtgctcctgccttcctgatcctctgtagaaaggatttttatcttctgtagagctagccgccctgactgccttcagacctggccctgtagcttttctttttctccaggctgggccgtgagcaggtgggccgttgagttacctctgtgctggatcccgtgcccccacttgcctaccctctgtcctgccttgttattgtaagtgccttcaatactttgcattttgggataataaaaaaggctccctcccctgcccctcagcttctctctggttttctca

SEQ ID NO: 251971 - DNA, 1509 bp, Artificial Sequence
  derived and/or modified sequence
atgcagtcatgtgaatcgtccggcgattccgctgacgatcccttatcacgcggattacggcggcgaggtcaaccaagagtagtcgttatcggcgctgggctagctggcttagcagctgccaaagcgctcctcgaacaaggctttacagacgtgaccgttctcgaggccagctctcacatcggaggcagagtgcaatcggtcaagctcggccacgcgaccttcgagctcggtgccacatggatccatgggagtcacggcaatcccatttatcacctggcggaggcaaatgggctgctggaggagactaccgatggcgagcgttccgtcggccgtataagcctctactctaaaaatggtgtggcctgttacttgactaaccatggccgtcggataccaaaagatgtggtggaggagttttctgatttgtataacgaggtatataacctgacacaggagttcttcaggcatgataagcccgtcaacgccgagtcacagaactctgttggcgtgtttacgcgagaagaggtgaggaatcgcataagaaatgaccccgatgatcctgaagccaccaagcgcctgaagctcgccatgattcagcagtacttgaaagtggagtcttgtgagtccagtagccactctatggacgaggtgtctctgtccgcttttggggaatggaccgaaatccctggtgctcatcacatcatccccagcggattcatgagggttgtggagcttctggccgaggggatacccgcacacgtgatacagctggggaaaccagtcagatgtatccactgggatcaggcatccgcccgccccagggggcccgagattgagcctaggggagtgttaaaaagacagtacacctccttcttccggccaggcttacctacggagaaggtcgccgcgattcatcgcttgggcattgggactaccgataagatcttcctggaattcgaggagccattctggggcccagaatgtaactcattgcaattcgtctgggaagatgaagctgaatcacacactctgacctacccaccagagctgtggtataggaaaatatgtggctttgatgtcctttatccccctgagcggtacggtcacgtcctgtccggttggatatgtggcgaggaggctctggtcatggaaaaatgtgacgatgaggctgttgcagaaatatgcacagagatgttgagacagttcaccggaaaccccaacatccctaaaccccggcgaattttgaggtcggcatggggctctaatccttacttccgtggaagctatagctacacccaggtgggaagcagtggtgctgatgtggagaagttagctaaacctctgccttatacagagagttcaaagactgcgcctatgcaggtactgtttagcggcgaagctactcacagaaaatactatagcacaacccatggagccctccttagcggtcagcgagaggccgccagactgatagaaatgtatcgtgacctcttccagcaaggaacgtag

SEQ ID NO: 251972 - DNA, 1509 bp, Artificial Sequence
  derived and/or modified sequence
atgcagagctgtgagagcagcggggacagcgcagatgaccccctgagccggggcctgcggcggcggggccagccccgggtggtggtgattggagctggcctggccggcctggccgccgccaaggccctgctggagcagggcttcacagatgtgacagtgctggaggccagcagccacatcggcggccgggtgcagagcgtgaagctgggccacgccacctttgagctgggcgccacctggatccacggcagccacggcaaccccatctaccacctggccgaggccaacggcctgctggaggagaccacagatggagagaggtctgtgggccgcatcagcctgtacagcaagaatggagtggcctgctacctgaccaaccacggccgccgcatccccaaggatgtggtggaggagttcagtgacctgtacaatgaggtgtacaacctgacccaggagttcttcagacatgacaagcctgtgaatgctgagagccagaacagcgtgggcgtcttcacccgggaggaggtgaggaaccgcatcagaaatgaccctgatgatcctgaggccaccaagaggctgaagctggccatgatccagcagtacctgaaggtggagagctgtgagagcagcagccacagcatggatgaggtgtccctgagcgccttcggggagtggacagagatccctggggcccaccacatcatccccagcggcttcatgagggtggtggagctgctggccgagggcatcccagcccacgtgatccagctgggcaagcctgtgcgctgcatccactgggaccaggccagcgcccggccccggggccctgagattgagccccggggcgtgctgaagaggcagtacaccagcttcttccggcccggcctgcccacagagaaggtggccgccatccaccggctgggcatcggcaccacagacaagatcttcctggagtttgaggagcccttctggggccctgagtgcaacagcctgcagtttgtgtgggaggatgaagctgagagccacaccctgacctacccacctgagctgtggtacaggaagatctgtggctttgatgtgctgtacccacctgagagatatggccacgtgctgagcggctggatctgtggggaggaggccctggtgatggagaagtgtgatgatgaggccgtggccgagatctgcacagagatgctgcggcagttcaccggcaaccccaacatccccaagccccggcgcatcctgcggagcgcctggggcagcaacccctacttccggggcagctacagctacacccaggtgggcagcagtggagcagatgtggagaagctggccaagcccctgccctacacagagagcagcaagacagcccccatgcaggtgctcttcagcggggaggccacccacaggaagtactacagcaccacccatggagccctgctgagcggccagcgggaggccgcccggctgattgagatgtacagagacctcttccagcagggcacctag

SEQ ID NO: 251973 - DNA, 1509 bp, Artificial Sequence
  derived and/or modified sequence
atgcagagctgcgagagcagcggcgacagcgccgacgaccccctgtcacggggtctccgtagacggggccagccaagagtcgtggtgattggagcgggattggcaggacttgccgctgccaaggcattgcttgaacagggattcacggacgtcactgtgttagaggcttctagccatatcgggggaagggttcagtcggttaagcttgggcatgcaaccttcgaactgggcgcaacatggatacatggatcacacggcaaccctatataccacttagctgaggcgaatgggctgctggaagagaccacagatggtgaacgaagtgtaggccggatcagtctgtactcaaaaaacggagttgcctgctatctaaccaaccacggccgcagaattccgaaagatgttgtggaggagttttcagatctttacaatgaagtgtataaccttacccaggagttttttcgccatgataaaccggtgaacgcagagtctcagaacagtgtgggggtattcacacgtgaggaggtccggaataggatcaggaacgatcctgacgacccggaagctacgaagcgcctaaaacttgcgatgatccagcagtatttgaaggtggaatcttgcgaaagcagcagccactccatggatgaagtatctctttccgccttcggtgagtggaccgaaattcccggggctcatcatataatcccctccggatttatgcgagtagtggaattgctggcagaaggaattccagcccatgtgatccagttaggaaagcccgttcggtgcattcactgggatcaggcttcagcacgcccgcgaggtcctgagatcgaaccacggggagtcctgaagagacaatacacaagcttttttcgcccaggactgcctaccgaaaaagtcgccgcaatccatcgtctgggtattgggacaaccgacaaaatttttctggagtttgaggagcccttttggggtcccgagtgtaactctctccagtttgtgtgggaagacgaggctgaaagtcacaccttgacatacccccccgaactatggtaccgaaaaatctgcggtttcgatgtactttacccaccagagcgctacggccatgttctctcaggatggatctgcggtgaggaagccctggtgatggaaaaatgtgacgatgaggcggtggccgagatttgtaccgagatgctcaggcagttcacaggcaatccaaatatacccaagcctcggcggattttgcgctccgcatgggggtctaatccctactttcggggatcttactcctacactcaggttgggagttccggcgccgacgtggagaaactggccaaacctttgccttataccgagagttccaagaccgcccctatgcaagtgcttttctccggcgaagccactcatagaaagtactatagcacaactcatggggcattgctgtcaggtcagagagaagctgctagactgatcgaaatgtaccgtgatctgtttcagcaaggaacctag

SEQ ID NO: 251974 - DNA, 1509 bp, Artificial Sequence
  derived and/or modified sequence
atgcaaagctgtgaatcgtctggggactcagctgatgaccccttgtcccggggactgcggaggcgtggccagccaagagtcgtcgttataggggctgggctggcaggccttgcagccgctaaggcacttctggaacaggggtttactgacgtaaccgtcttggaggcctcttctcatattggtggtagagtacagagtgtgaagctgggacacgcaacattcgagctcggcgctacatggattcatggctctcatggaaacccgatttatcatctggcggaagcgaacgggctgctggaggagactaccgacggtgaacggtccgtcggtaggattagcctatactcaaaaaatggcgtggcctgctacctgactaatcatggaagaagaatccctaaggacgtagtggaggaattcagtgatttatataacgaggtgtacaatctaacccaagaattctttaggcacgacaagcccgtcaatgcagagagccaaaactccgtgggcgtgttcacaagagaagaagttaggaatcgtatccgcaatgaccctgacgaccctgaagccaccaagaggcttaaactggccatgatccaacagtacctcaaagttgagtcctgcgagtctagtagtcattctatggatgaagttagcctgtctgcttttggagaatggacggagattcccggtgctcaccacataattccttctggcttcatgagagttgtggaattgctggctgagggcatcccagctcatgtcatacaactggggaaaccggtccgatgcatccactgggatcaggcctccgcccgtccccgtggcccagagatagagcccagaggagtcctgaaacggcagtatacaagcttctttcgcccaggtctcccaactgagaaggtcgcagcaattcaccgcctcggcattgggaccaccgacaagatcttcttagaatttgaagagcctttttggggccctgaatgcaactcactccagttcgtatgggaggatgaggccgagtcacatactctgacgtatccccctgaactatggtaccgcaaaatttgtggcttcgacgttctgtaccccccagagaggtacggccacgtcctctcgggctggatctgcggcgaagaggcattagtgatggagaagtgcgacgatgaggccgtggccgaaatctgcacagaaatgcttaggcagttcacaggcaacccaaacattcccaagcctagacgaatactgcggagcgcatggggctcaaatccttactttcggggatcatatagctacactcaggtcggatcctctggcgcagatgtggaaaaattggcgaagcctctgccgtatactgaaagctctaagacagctcccatgcaagtgttgttctccggtgaggcgactcaccggaagtactacagtaccacccatggcgcactattaagtggccagcgagaagccgcaaggctcattgaaatgtatagagaccttttccagcaggggacttag

SEQ ID NO: 251975 - protein, 190 aa, Artificial Sequence
  derived and/or modified sequence
MQSCESSGDSADDPLSRGLRRRGQPRVVVIGAGLAGLAAAKALLEQGFTDVTVLEASSHIGGRVQSVKLGHATFELGATWIHGSHGNPIYHLAEANGLLEETTDGERSVGRISLYSKNGVACYLTNHGRRIPKDVVEEFSDLYNEPMQVLFSGEATHRKYYSTTHGALLSGQREAARLIEMYRDLFQQGT

SEQ ID NO: 251976 - DNA, 573 bp, Artificial Sequence
  derived and/or modified sequence
atgcagagctgcgagagcagcggcgacagcgccgacgaccccctgagcagaggcctgagaagaagaggccagcccagagtggtggtgatcggcgccggcctggccggcctggccgccgccaaggccctgctggagcagggcttcaccgacgtgaccgtgctggaggccagcagccacatcggcggcagagtgcagagcgtgaagctgggccacgccaccttcgagctgggcgccacctggatccacggcagccacggcaaccccatctaccacctggccgaggccaacggcctgctggaggagaccaccgacggcgagagaagcgtgggcagaatcagcctgtacagcaagaacggcgtggcctgctacctgaccaaccacggcagaagaatccccaaggacgtggtggaggagttcagcgacctgtacaacgagcccatgcaggtgctgttcagcggcgaggccacccacagaaagtactacagcaccacccacggcgccctgctgagcggccagagagaggccgccagactgatcgagatgtacagagacctgttccagcagggcacctag

SEQ ID NO: 251977 - DNA, 982 bp, Artificial Sequence
  derived and/or modified sequence
cgccgctcgccgcagacttacttccccggctcagcagggaaaggttcctagaaggtgagcgcggacggtatgcaaagttgtgaatccagtggtgacagtgcggatgaccctctcagtcgcggcctacggagaaggggacagcctcgtgtggtggtgatcggcgccggcttggctggcctggctgcagccaaagcacttcttgagcagggtttcacggatgtcactgtgcttgaggcttccagccacatcggaggccgtgtgcagagtgtgaaacttggacacgccacctttgagctgggagccacctggatccatggctcccatgggaaccctatctatcatctagcagaagccaacggcctcctggaagagacaaccgatggggaacgcagcgtgggccgcatcagcctctattccaagaatggcgtggcctgctaccttaccaaccacggccgcaggatccccaaggacgtggttgaggaattcagcgatttatacaacgagcccatgcaggtgctgttttccggtgaggccacccaccgcaagtactattccaccacccacggtgctctgctgtccggccagcgtgaggctgcccgcctcattgagatgtaccgagacctcttccagcaggggacctgagggctgtcctcgctgctgagaagagccactaactcgtgacctccagcctgccccttgctgccgtgtgctcctgccttcctgatcctctgtagaaaggatttttatcttctgtagagctagccgccctgactgccttcagacctggccctgtagcttttctttttctccaggctgggccgtgagcaggtgggccgttgagttacctctgtgctggatcccgtgcccccacttgcctaccctctgtcctgccttgttattgtaagtgccttcaatactttgcattttgggataataaaaaaggctccctcccctgcccctcagcttctctctggttttctca

SEQ ID NO: 251978 - DNA, 573 bp, Artificial Sequence
  derived and/or modified sequence
atgcagagctgcgagtcctcgggcgatagtgccgatgatcctctgtcgaggggcttgagaagaagaggtcagccacgggtcgtggttatcggcgccggcctcgctgggctggcggcagccaaagccctccttgaacagggttttaccgacgtcacagtactcgaagctagctcgcatataggcgggcgcgtgcaatccgtgaagttgggtcacgccacatttgagcttggtgccacctggatacacggctcccatggaaatcccatctaccacttagccgaggctaacggactgctggaggagacgactgacggcgaacgctccgttggacgcatttccctgtattccaaaaacggagtcgcttgttacctcacaaaccacggcagacgcattcctaaggacgtcgtggaggaattctcagacctgtataatgaaccaatgcaggtgctgtttagtggagaggccacacacaggaagtattacagcactactcacggcgctttgctgagcggacaacgtgaggccgcgagactgattgagatgtaccgagatttgttccagcagggcacgtag

SEQ ID NO: 251979 - DNA, 573 bp, Artificial Sequence
  derived and/or modified sequence
atgcagagctgtgagagcagcggggacagcgcagatgaccccctgagccggggcctgcggcggcggggccagccccgggtggtggtgattggagctggcctggccggcctggccgccgccaaggccctgctggagcagggcttcacagatgtgacagtgctggaggccagcagccacatcggcggccgggtgcagagcgtgaagctgggccacgccacctttgagctgggcgccacctggatccacggcagccacggcaaccccatctaccacctggccgaggccaacggcctgctggaggagaccacagatggagagaggtctgtgggccgcatcagcctgtacagcaagaatggagtggcctgctacctgaccaaccacggccgccgcatccccaaggatgtggtggaggagttcagtgacctgtacaatgagcccatgcaggtgctcttcagcggggaggccacccacaggaagtactacagcaccacccatggagccctgctgagcggccagcgggaggccgcccggctgattgagatgtacagagacctcttccagcagggcacctag

SEQ ID NO: 251980 - DNA, 573 bp, Artificial Sequence
  derived and/or modified sequence
atgcagagctgcgagagcagcggcgacagcgccgacgaccccctgtccaggggactccgtcggcggggacagccaagggtggtggtcattggcgccgggctagccgggctggctgctgccaaagctctgctggagcagggatttactgacgtcaccgtgctggaggcaagttcacacataggaggcagggtccaaagcgtaaagctgggccacgccacctttgagctgggggcaacgtggatccatggcagtcacggcaaccccatctaccatcttgctgaggctaatggactgctggaagaaacaacagacggagagcggtccgtgggccggatatctctctactccaagaatggcgttgcatgttatctcacaaaccacggaaggcggattccaaaggatgttgtggaagagttctctgacctttacaatgaacctatgcaggtgctcttctccggcgaggcgactcacagaaaatactactccactactcatggggcactactatcgggacagcgagaagctgctcggttgatcgagatgtatcgagacctttttcagcagggaacctag

SEQ ID NO: 251981 - DNA, 573 bp, Artificial Sequence
  derived and/or modified sequence
atgcaatcatgtgaaagtagcggtgactcagctgacgatccgctctctcgcggtttgcgacggagagggcaaccccgagttgtggtcatcggggctggattggcgggtttggctgcggcaaaagctctccttgagcaggggttcactgatgtcactgttcttgaggcctctagtcacataggcggtcgggtacagtcggttaagctcggacatgctacttttgagcttggagcaacatggatccatggttcccatgggaacccaatctaccacttagcagaagccaatggattgttagaagagaccactgatggggagagatctgttgggagaatctctctgtactcgaaaaacggcgtggcctgctatctgaccaatcatggacggcgtattcctaaggacgtggtcgaggaattttctgatctgtacaatgaaccaatgcaggtgttgttttcaggagaggcgacacatagaaagtactacagtacaactcacggagcgctcctgagcgggcagcgtgaggctgcaaggttgattgaaatgtaccgggatcttttccaacaaggtacctag

SEQ ID NO: 251982 - protein, 532 aa, Artificial Sequence
  derived and/or modified sequence
MQSCESSGDSADDPLSRGLRRRGQPRVVVIGAGLAGLAAAKALLEQGFTDVTVLEASSHIGGRVQSVKLGHATFELGATWIHGSHGNPIYHLAEANGLLEETTDGERSVGRISLYSKNGVACYLTNHGRRIPKDVVEEFSDLYNEVYNLTQEFFRHDKPVNAESQNSVGVFTREEVRNRIRNDPDDPEATKRLKLAMIQQYLKVESCESSSHSMDEVSLSAFGEWTEIPGAHHIIPSGFMRVVELLAEGIPAHVIQLGKPVRCIHWDQASARPRGPEIEPRGVLKRQYTSFFRPGLPTEKVAAIHRLGIGTTDKIFLEFEEPFWGPECNSLQFVWEDEAESHTLTYPPELWYRKICGFDVLYPPERYGHVLSGWICGEEALVMEKCDDEAVAEICTEMLRQFTGNPNIPKPRRILRSAWGSNPYFRGSYSYTQVGSSGADVEKLAKPLPYTESSKTAHGSSTKQQPGHLFSSKCPEQPLDANRGAVKPMQVLFSGEATHRKYYSTTHGALLSGQREAARLIEMYRDLFQQGT

SEQ ID NO: 251983 - DNA, 1599 bp, Artificial Sequence
  derived and/or modified sequence
atgcagtcctgtgagagcagcggtgactccgccgacgacccgctctctagaggcctccgccgaagaggccaaccgcgcgtggtagtgataggggccggactggcaggtctagccgcagccaaggcattgttagagcaaggattcaccgatgtgacagttctggaagcatcaagccacattggcggccgggtgcaaagcgtgaagctcggccatgcgacctttgagttgggggcgacatggatccacggtagccacgggaatcccatataccacctagcagaggcgaacgggttgttggaagaaacgacagatggcgagcgatcagtcggcagaatcagcctgtacagcaagaacggcgtggcctgctacctgaccaatcacggcaggcggatcccaaaggatgttgtggaggaattctcagacctctataacgaggtctataacctgacacaggaattctttcgtcacgataagcccgtgaatgccgaatcccagaacagtgttggtgtgtttacccgagaggaggtccgaaatagaatcaggaacgaccctgatgatcccgaagccacaaagcgcctgaagttagctatgattcagcaatatcttaaggtcgagagctgcgaaagcagttcacactccatggatgaggtatccctttccgccttcggggaatggaccgagatcccgggggcccaccatatcatccccagtggatttatgcgtgttgtggaattactggctgaggggattcccgcccatgtgatccagcttggcaagcctgtcaggtgcattcactgggatcaggcttccgcccgcccacgtgggcctgaaattgagccccgtggcgttctgaaacggcagtacactagtttttttagacccggactcccgactgagaaagtggcagctatacaccgtctgggcattggaacaaccgacaagatatttctggagttcgaggaaccgttctggggcccagaatgcaattcattgcagttcgtatgggaggacgaagctgagagccacactcttacttatccaccggagttgtggtaccgcaagatatgtggctttgatgtactctaccccccagaaagatacggacatgtactctcaggctggatctgtggtgaggaggctctcgtcatggaaaagtgcgacgatgaagcagtcgcggagatctgtacggagatgctcaggcaattcactggaaatcccaacatccctaagccgcggcgcattctgagatcagcatggggctcaaatccgtatttccgagggagctatagctacactcaggttggcagttctggggcggacgtggagaaactcgccaagcctctgccatacaccgagtcaagcaaaacggcccatgggtcctcaacgaagcagcagcccggccatctcttctcctctaaatgccccgagcagcccctggatgctaatcgcggagccgtaaaaccgatgcaggtcctattctctggcgaagcaactcacagaaaatattactctaccacacacggtgctctgctgtctggtcagcgtgaagctgcgagactgatcgagatgtatcgcgacctgtttcagcaggggacatag

SEQ ID NO: 251984 - DNA, 1599 bp, Artificial Sequence
  derived and/or modified sequence
atgcagagctgtgagagcagcggggacagcgcagatgaccccctgagccggggcctgcggcggcggggccagccccgggtggtggtgattggagctggcctggccggcctggccgccgccaaggccctgctggagcagggcttcacagatgtgacagtgctggaggccagcagccacatcggcggccgggtgcagagcgtgaagctgggccacgccacctttgagctgggcgccacctggatccacggcagccacggcaaccccatctaccacctggccgaggccaacggcctgctggaggagaccacagatggagagaggtctgtgggccgcatcagcctgtacagcaagaatggagtggcctgctacctgaccaaccacggccgccgcatccccaaggatgtggtggaggagttcagtgacctgtacaatgaggtgtacaacctgacccaggagttcttcagacatgacaagcctgtgaatgctgagagccagaacagcgtgggcgtcttcacccgggaggaggtgaggaaccgcatcagaaatgaccctgatgatcctgaggccaccaagaggctgaagctggccatgatccagcagtacctgaaggtggagagctgtgagagcagcagccacagcatggatgaggtgtccctgagcgccttcggggagtggacagagatccctggggcccaccacatcatccccagcggcttcatgagggtggtggagctgctggccgagggcatcccagcccacgtgatccagctgggcaagcctgtgcgctgcatccactgggaccaggccagcgcccggccccggggccctgagattgagccccggggcgtgctgaagaggcagtacaccagcttcttccggcccggcctgcccacagagaaggtggccgccatccaccggctgggcatcggcaccacagacaagatcttcctggagtttgaggagcccttctggggccctgagtgcaacagcctgcagtttgtgtgggaggatgaagctgagagccacaccctgacctacccacctgagctgtggtacaggaagatctgtggctttgatgtgctgtacccacctgagagatatggccacgtgctgagcggctggatctgtggggaggaggccctggtgatggagaagtgtgatgatgaggccgtggccgagatctgcacagagatgctgcggcagttcaccggcaaccccaacatccccaagccccggcgcatcctgcggagcgcctggggcagcaacccctacttccggggcagctacagctacacccaggtgggcagcagtggagcagatgtggagaagctggccaagcccctgccctacacagagagcagcaagacagcccacggcagcagcaccaagcagcagcccggccacctgttcagcagcaaatgtcctgagcagcccctggatgccaacagaggagctgtgaagcccatgcaggtgctcttcagcggggaggccacccacaggaagtactacagcaccacccatggagccctgctgagcggccagcgggaggccgcccggctgattgagatgtacagagacctcttccagcagggcacctag

SEQ ID NO: 251985 - DNA, 1599 bp, Artificial Sequence
  derived and/or modified sequence
atgcagagctgcgagagcagcggcgacagcgccgacgaccccctgtctaggggccttagacggcgtggccagccaagagtcgtggttattggggctggcctggccggactagccgctgccaaagccctgcttgaacagggattcaccgacgtgaccgtgctggaagcctccagtcacattgggggtagagtccagagcgtgaaactggggcacgcaacctttgagctcggagctacttggattcacgggtctcacggtaaccctatttatcaccttgccgaagcaaatggactgctggaggagactactgatggagagcggtcagtgggaagaatcagcttgtactcaaagaacggagttgcttgttatctgacaaaccatggcagacgcatcccaaaggacgttgtggaggagtttagtgacctctataatgaggtctacaatttgacgcaggaatttttcaggcatgataaaccggtgaacgcagaatcacaaaactcagtcggagtattcacgcgagaagaggtgaggaatcgaattagaaatgaccccgacgatcccgaggctactaagcgtctgaaactcgccatgattcagcagtacctaaaagtggagagctgcgagtcttcaagccactctatggacgaggtcagtctgtccgcattcggtgagtggaccgagattcctggggcccatcacatcatcccatccgggttcatgcgtgtcgtggagctcctagccgaggggatcccagcacacgttatccagctgggtaaacccgtgcgatgtatacactgggaccaggctagtgccagacccagaggtcctgaaatcgagcctagaggcgtcttgaaaaggcagtatacctctttctttcgcccaggtctgcctacggagaaagtggccgccatccataggctcgggattggtactaccgacaagatcttcctggagttcgaggaaccattttgggggcccgagtgtaatagtctccagttcgtctgggaagatgaggcagagagccacacattaacataccctcccgaactctggtatcgaaagatatgtggctttgacgtcctgtatccccctgagcggtatggacacgtgttgagcggttggatctgcggagaagaagcacttgtcatggagaaatgtgacgacgaggccgtagccgaaatatgtaccgaaatgcttcgtcaattcacgggaaatcccaatatcccaaagcccaggaggattctcaggagtgcttggggatcaaacccctacttccgagggtcatactcctacacacaggttgggtcatcaggggcagatgtggagaagttggcaaagcctctgccttataccgagtcaagtaaaactgcacacggatcctccactaagcagcagccaggacatctgttttcttccaagtgtcctgagcaaccgctcgacgcaaataggggtgcggtcaagcccatgcaagtgttattctcaggagaagcaacacaccgcaaatactattccacaactcatggggcgctcctcagcggccaacgtgaggccgctcggctgatcgagatgtaccgagatctgttccagcaaggcacctag

SEQ ID NO: 251986 - DNA, 1599 bp, Artificial Sequence
  derived and/or modified sequence
atgcagagttgtgagagtagtggcgattccgcagatgaccccctgagtcgcggactccggagaaggggtcagccaagagtcgtggtgatcggggctggtttagccggactggctgcagctaaggcgctcctcgaacagggattcacggatgtaaccgtgcttgaggccagctcccatattgggggacgggtgcagtctgtgaaactcgggcatgctacattcgaactgggagcaacatggatccacggaagtcacggcaaccccatatatcacttggctgaggccaacggcctgctcgaggagacgaccgatggcgagcgctcagtgggcagaatctccctgtacagcaaaaatggagtagcatgctatcttaccaatcatggcagacgcattcccaaggatgtcgtggaggaattctctgacctgtacaacgaggtgtataatctgacgcaggaatttttccgtcacgacaaaccagtcaacgccgagagtcagaactctgtcggtgtcttcacccgcgaagaagtcaggaatcgcatccgaaacgaccccgatgaccctgaggctaccaaacgcctgaagctggccatgatacagcagtacttaaaagttgagtcatgcgagtcctccagtcattctatggacgaggttagtctgtccgcgtttggagagtggacggagatacctggagctcaccacattattccgagcgggttcatgagagtggtggaattgctggcggagggcatcccagcacacgtgatacagttaggaaaaccggtacgatgcatccattgggatcaagcctccgcacgtccgagaggacccgagattgagcctaggggcgtccttaagcgtcaatacaccagcttttttcgccctgggctgccaaccgagaaagtcgctgccatccatagactaggtattggcactacagacaagattttcctggaattcgaagagcccttctggggccctgagtgtaactcgctgcagttcgtttgggaagacgaagccgaatcccacactcttacttacccaccggaactgtggtatcggaaaatctgcggttttgacgtgctgtaccctcctgagcgctacggccacgtcctgtccgggtggatatgcggcgaggaggcgcttgtcatggaaaaatgtgatgatgaggctgtggccgaaatttgtacagagatgctgcgtcagtttacgggcaatcccaacatccctaaaccgcgtagaattttgagatctgcatggggctctaacccttactttagaggctcctacagttacacccaggtgggctcttccggagcagacgttgagaagctcgccaagccattgccttacactgagtccagcaagacagcccatggatcgtctactaaacagcaaccaggccacctgttttcaagtaaatgtccagagcagcccctggatgccaatcggggagctgtgaagcctatgcaagtgttgttcagtggcgaggccactcaccggaaatattactcaacgacgcatggcgcactcttaagcggtcagcgagaagccgctcggcttatcgaaatgtatcgcgacctctttcagcagggaacctag

SEQ ID NO: 251987 - DNA, 2164 bp, Artificial Sequence
  derived and/or modified sequence
gccgggccggagcggggtgggtaggggacgcgaggcggagcggggccccacacaggccgcggcggctggctcgggcccctacggtcccggcggcggctggaggaggaagccaggcggctggcggaggaggagagacggaggaggccgagaccggagcgccgctcgccgcagacttacttccccggctcagcagggaaaggttcctagaaggtgagcgcggacggtatgcaaagttgtgaatccagtggtgacagtgcggatgaccctctcagtcgcggcctacggagaaggggacagcctcgtgtggtggtgatcggcgccggcttggctggcctggctgcagccaaagcacttcttgagcagggtttcacggatgtcactgtgcttgaggcttccagccacatcggaggccgtgtgcagagtgtgaaacttggacacgccacctttgagctgggagccacctggatccatggctcccatgggaaccctatctatcatctagcagaagccaacggcctcctggaagagacaaccgatggggaacgcagcgtgggccgcatcagcctctattccaagaatggcgtggcctgctaccttaccaaccacggccgcaggatccccaaggacgtggttgaggaattcagcgatttatacaacgaggtctataacttgacccaggagttcttccggcacgataaaccagtcaatgctgaaagtcaaaatagcgtgggggtgttcacccgagaggaggtgcgtaaccgcatcaggaatgaccctgacgacccagaggctaccaagcgcctgaagctcgccatgatccagcagtacctgaaggtggagagctgtgagagcagctcacacagcatggacgaggtgtccctgagcgccttcggggagtggaccgagatccccggcgctcaccacatcatcccctcgggcttcatgcgggttgtggagctgctggcggagggcatccctgcccacgtcatccagctagggaaacctgtccgctgcattcactgggaccaggcctcagcccgccccagaggccctgagattgagccccggggtgtgctaaagaggcagtacaccagtttcttccggccaggcctgcccacagagaaggtggctgccatccaccgcctgggcattggcaccaccgacaagatctttctggaattcgaggagcccttctggggccctgagtgcaacagcctacagtttgtgtgggaggacgaagcagagagccacaccctcacctacccacctgagctctggtaccgcaagatctgcggctttgatgtcctctacccgcctgagcgctacggccatgtgctgagcggctggatctgcggggaggaggccctcgtcatggagaagtgtgatgacgaggcagtggccgagatctgcacggagatgctgcgtcagttcacagggaaccccaacattccaaaacctcggcgaatcttgcgctcggcctggggcagcaacccttacttccgcggctcctattcatacacgcaggtgggctccagcggggcggatgtggagaagctggccaagcccctgccgtacacagagagctcaaagacagcgcatggaagctccacaaagcagcagcctggtcaccttttctcttccaagtgcccagaacagcccctggatgctaacaggggcgccgtaaagcccatgcaggtgctgttttccggtgaggccacccaccgcaagtactattccaccacccacggtgctctgctgtccggccagcgtgaggctgcccgcctcattgagatgtaccgagacctcttccagcaggggacctgagggctgtcctcgctgctgagaagagccactaactcgtgacctccagcctgccccttgctgccgtgtgctcctgccttcctgatcctctgtagaaaggatttttatcttctgtagagctagccgccctgactgccttcagacctggccctgtagcttttctttttctccaggctgggccgtgagcaggtgggccgttgagttacctctgtgctggatcccgtgcccccacttgcctaccctctgtcctgccttgttattgtaagtgccttcaatactttgcattttgggataataaaaaaggctccctcccctgcccctcagcttctctctggttttctca

SEQ ID NO: 251988 - DNA, 1599 bp, Artificial Sequence
  derived and/or modified sequence
atgcagagctgcgagagcagcggcgacagcgccgacgaccccctgagcagaggcctgagaagaagaggccagcccagagtggtggtgatcggcgccggcctggccggcctggccgccgccaaggccctgctggagcagggcttcaccgacgtgaccgtgctggaggccagcagccacatcggcggcagagtgcagagcgtgaagctgggccacgccaccttcgagctgggcgccacctggatccacggcagccacggcaaccccatctaccacctggccgaggccaacggcctgctggaggagaccaccgacggcgagagaagcgtgggcagaatcagcctgtacagcaagaacggcgtggcctgctacctgaccaaccacggcagaagaatccccaaggacgtggtggaggagttcagcgacctgtacaacgaggtgtacaacctgacccaggagttcttcagacacgacaagcccgtgaacgccgagagccagaacagcgtgggcgtgttcaccagagaggaggtgagaaacagaatcagaaacgaccccgacgaccccgaggccaccaagagactgaagctggccatgatccagcagtacctgaaggtggagagctgcgagagcagcagccacagcatggacgaggtgagcctgagcgccttcggcgagtggaccgagatccccggcgcccaccacatcatccccagcggcttcatgagagtggtggagctgctggccgagggcatccccgcccacgtgatccagctgggcaagcccgtgagatgcatccactgggaccaggccagcgccagacccagaggccccgagatcgagcccagaggcgtgctgaagagacagtacaccagcttcttcagacccggcctgcccaccgagaaggtggccgccatccacagactgggcatcggcaccaccgacaagatcttcctggagttcgaggagcccttctggggccccgagtgcaacagcctgcagttcgtgtgggaggacgaggccgagagccacaccctgacctacccccccgagctgtggtacagaaagatctgcggcttcgacgtgctgtacccccccgagagatacggccacgtgctgagcggctggatctgcggcgaggaggccctggtgatggagaagtgcgacgacgaggccgtggccgagatctgcaccgagatgctgagacagttcaccggcaaccccaacatccccaagcccagaagaatcctgagaagcgcctggggcagcaacccctacttcagaggcagctacagctacacccaggtgggcagcagcggcgccgacgtggagaagctggccaagcccctgccctacaccgagagcagcaagaccgcccacggcagcagcaccaagcagcagcccggccacctgttcagcagcaagtgccccgagcagcccctggacgccaacagaggcgccgtgaagcccatgcaggtgctgttcagcggcgaggccacccacagaaagtactacagcaccacccacggcgccctgctgagcggccagagagaggccgccagactgatcgagatgtacagagacctgttccagcagggcacctag

SEQ ID NO: 251989 - protein, 792 aa, Artificial Sequence
  derived and/or modified sequence
MKGDTRHLNGEEDAGGREDSILVNGACSDQSSDSPPILEAIRTPEIRGRRSSSRLSKREVSSLLSYTQDLTGDGDGEDGDGSDTPVMPKLFRETRTRSESPAVRTRNNNSVSSRERHRPSPRSTRGRQGRNHVDESPVEFPATRSLRRRATASAGTPWPSPPSSYLTIDLTDDTEDTHGTPQSSSTPYARLAQDSQQGGMESPQVEADSGDGDSSEYQDGKEFGIGDLVWGKIKGFSWWPAMVVSWKATSKRQAMSGMRWVQWFGDGKFSEVSADKLVALGLFSQHFNLATFNKLVSYRKAMYHALEKARVRAGKTFPSSPGDSLEDQLKPMLEWAHGGFKPTGIEGLKPNNTQPENKTRRRTADDSATSDYCPAPKRLKTNCYNNGKDRGDEDQSREQMASDVANNKSSLEDGCLSCGRKNPVSFHPLFEGGLCQTCRDRFLELFYMYDDDGYQSYCTVCCEGRELLLCSNTSCCRCFCVECLEVLVGTGTAAEAKLQEPWSCYMCLPQRCHGVLRRRKDWNVRLQAFFTSDTGLEYEAPKLYPAIPAARRRPIRVLSLFDGIATGYLVLKELGIKVGKYVASEVCEESIAVGTVKHEGNIKYVNDVRNITKKNIEEWGPFDLVIGGSPCNDLSNVNPARKGLYEGTGRLFFEFYHLLNYSRPKEGDDRPFFWMFENVVAMKVGDKRDISRFLECNPVMIDAIKVSAAHRARYFWGNLPGMNRPVIASKNDKLELQDCLEYNRIAKDLWLSCALHRRVQHGPWCPPEAAGKVLERACHPTPLRPSEGLLCM

SEQ ID NO: 251990 - protein, 833 aa, Artificial Sequence
  derived and/or modified sequence
MKGDTRHLNGEEDAGGREDSILVNGACSDQSSDSPPILEAIRTPEIRGRRSSSRLSKREVSSLLSYTQDLTGDGDGEDGDGSDTPVMPKLFRETRTRSESPAVRTRNNNSVSSRERHRPSPRSTRGRQGRNHVDESPVEFPATRSLRRRATASAGTPWPSPPSSYLTIDLTDDTEDTHGTPQSSSTPYARLAQDSQQGGMESPQVEADSGDGDSSEYQDGKEFGIGDLVWGKIKGFSWWPAMVVSWKATSKRQAMSGMRWVQWFGDGKFSEVSADKLVALGLFSQHFNLATFNKLVSYRKAMYHALEKARVRAGKTFPSSPGDSLEDQLKPMLEWAHGGFKPTGIEGLKPNNTQPENKTRRRTADDSATSDYCPAPKRLKTNCYNNGKDRGDEDQSREQMASDVANNKSSLEDGCLSCGRKNPVSFHPLFEGGLCQTCRDRFLELFYMYDDDGYQSYCTVCCEGRELLLCSNTSCCRCFCVECLEVLVGTGTAAEAKLQEPWSCYMCLPQRCHGVLRRRKDWNVRLQAFFTSDTGLEYEAPKLYPAIPAARRRPIRVLSLFDGIATGYLVLKELGIKVGKYVASEVCEESIAVGTVKHEGNIKYVNDVRNITKKNIEEWGPFDLVIGGSPCNDLSNVNPARKGLYEGTGRLFFEFYHLLNYSRPKEGDDRPFFWMFENVVAMKVGDKRDISRFLECNPVMIDAIKVSAAHRARYFWGNLPGMNRPVIASKNDKLELQDCLEYNRIAKLKKVQTITTKSNSIKQGKNQLFPVVMNGKEDVLWCTELERIFGFPVHYTDVSNMGRGARQKLLGRSWSVPVIRHLFAPLKDYFACE

SEQ ID NO: 251991 - protein, 566 aa, Artificial Sequence
  derived and/or modified sequence
GRSPRGRSERPPTDGTGSLAVGRAGGNAARPAALGLSGPSKPSSAIGAGDSRAQRPARPPAGLPPASPDPRLRRPAAPQPALRQESMKGDTRHLNGEEDAGGREDSILVNGACSDQSSDSPPILEAIRTPEIRGRRSSSRLSKREVSSLLSYTQDLTGDGDGEDGDGSDTPVMPKLFRETRTRSESPAVRTRNNNSVSSRERHRPSPRSTRGRQGRNHVDESPVEFPATRSLRRRATASAGTPWPSPPSSYLTIDLTDDTEDTHGTPQSSSTPYARLAQDSQQGGMESPQVEADSGDGDSSEYQDGKEFGIGDLVWGKIKGFSWWPAMVVSWKATSKRQAMSGMRWVQWFGDGKFSEVSADKLVALGLFSQHFNLATFNKLVSYRKAMYHALEKARVRAGKTFPSSPGDSLEDQLKPMLEWAHGGFKPTGIEGLKPNNTQPENKTRRRTADDSATSDYCPAPKRLKTNCYNNGKDRGDEDQSREQMASDVANNKSSLEDGCLSCGRKNPVSFHPLFEGGLCQTCRHLCGDSVKPTHPSCLALCLWGRMGDSCHRGQWHAGHSQLSF

SEQ ID NO: 251992 - protein, 770 aa, Artificial Sequence
  derived and/or modified sequence
MKGDTRHLNGEEDAGGREDSILVNGACSDQSSDSPPILEAIRTPEIRGRRSSSRLSKREVSSLLSYTQDLTGDGDGEDGDGSDTPVMPKLFRETRTRSESPAVRTRNNNSVSSRERHRPSPRSTRGRQGRNHVDESPVEFPATRSLRRRATASAGTPWPSPPSSYLTIDLTDDTEDTHGTPQSSSTPYARLAQDSQQGGMESPQVEADSGDGDSSEYQDGKEFGIGDLVWGKIKGFSWWPAMVVSWKATSKRQAMSGMRWVQWFGDGKFSEVSADKLVALGLFSQHFNLATFNKLVSYRKAMYHALEKARVRAGKTFPSSPGDSLEDQLKPMLEWAHGGFKPTGIEGLKPNNTQPENKTRRRTADDSATSDYCPAPKRLKTNCYNNGKDRGDEDQSREQMASDVANNKSSLEDGCLSCGRKNPVSFHPLFEGGLCQTCRDRFLELFYMYDDDGYQSYCTVCCEGRELLLCSNTSCCRCFCVECLEVLVGTGTAAEAKLQEPWSCYMCLPQRCHGVLRRRKDWNVRLQAFFTSDTGLEYEAPKLYPAIPAARRRPIRVLSLFDGIATGYLVLKELGIKVGKYVASEVCEESIAVGTVKHEGNIKYVNDVRNITKKNIEEWGPFDLVIGGSPCNDLSNVNPARKGLYEGTGRLFFEFYHLLNYSRPKEGDDRPFFWMFENVVAMKVGDKRDISRFLECNPVMIDAIKVSAAHRARYFWGNLPGMNRIFGFPVHYTDVSNMGRGARQKLLGRSWSVPVIRHLFAPLKDYFACE

SEQ ID NO: 251993 - protein, 845 aa, Artificial Sequence
  derived and/or modified sequence
MEPSPEPPSLESMKGDTRHLNGEEDAGGREDSILVNGACSDQSSDSPPILEAIRTPEIRGRRSSSRLSKREVSSLLSYTQDLTGDGDGEDGDGSDTPVMPKLFRETRTRSESPAVRTRNNNSVSSRERHRPSPRSTRGRQGRNHVDESPVEFPATRSLRRRATASAGTPWPSPPSSYLTIDLTDDTEDTHGTPQSSSTPYARLAQDSQQGGMESPQVEADSGDGDSSEYQDGKEFGIGDLVWGKIKGFSWWPAMVVSWKATSKRQAMSGMRWVQWFGDGKFSEVSADKLVALGLFSQHFNLATFNKLVSYRKAMYHALEKARVRAGKTFPSSPGDSLEDQLKPMLEWAHGGFKPTGIEGLKPNNTQPENKTRRRTADDSATSDYCPAPKRLKTNCYNNGKDRGDEDQSREQMASDVANNKSSLEDGCLSCGRKNPVSFHPLFEGGLCQTCRDRFLELFYMYDDDGYQSYCTVCCEGRELLLCSNTSCCRCFCVECLEVLVGTGTAAEAKLQEPWSCYMCLPQRCHGVLRRRKDWNVRLQAFFTSDTGLEYEAPKLYPAIPAARRRPIRVLSLFDGIATGYLVLKELGIKVGKYVASEVCEESIAVGTVKHEGNIKYVNDVRNITKKNIEEWGPFDLVIGGSPCNDLSNVNPARKGLYEGTGRLFFEFYHLLNYSRPKEGDDRPFFWMFENVVAMKVGDKRDISRFLECNPVMIDAIKVSAAHRARYFWGNLPGMNRPVIASKNDKLELQDCLEYNRIAKLKKVQTITTKSNSIKQGKNQLFPVVMNGKEDVLWCTELERIFGFPVHYTDVSNMGRGARQKLLGRSWSVPVIRHLFAPLKDYFACE

SEQ ID NO: 251994 - DNA, 2538 bp, Artificial Sequence
  derived and/or modified sequence
atggaacccagcccagaacctcctagcctggagtccatgaagggtgatactcggcatctaaacggcgaggaagacgctggcgggagggaagattcaatattggtgaatggtgcttgctccgaccagagtagcgatagcccaccaatcctggaagcaatcagaacacccgagattcgggggaggcgcagttcatctcggctgtctaaacgcgaagttagctctttgctttcctacactcaggacctgaccggcgacggggatggagaagacggggacgggtcagacacgcccgtgatgccgaagctcttcagggaaacacgaacaagaagcgaatctcccgccgtgagaactcgcaacaacaactcagtttcatcgcgcgagagacatcggcccagcccaagaagcacaagaggtcggcaggggcgcaatcatgtagatgaatccccagtcgagttccctgcaacaagatctctccggagacgggccactgcatcggctggaacgccgtggccctcgccgccttcgtcgtacttgaccatcgacctcaccgacgatactgaggacactcatggcactccgcagtcttcttcaacaccatatgcacggttggcacaagactctcagcaaggaggaatggagtcccctcaagtggaagcagatagcggcgatggtgatagctctgagtaccaggatggcaaagaatttggcattggggatctcgtgtggggtaagatcaagggcttctcttggtggcctgctatggtggtctcctggaaggccacaagtaaaaggcaagccatgagtggcatgaggtgggtccagtggtttggtgacggtaaattctcagaagtctccgcagacaaacttgtggcactcggcctttttagccaacacttcaatttggccaccttcaacaaactggtgagttatcggaaagcaatgtatcacgcccttgagaaagcccgtgtcagagctggaaaaacgttcccaagcagtccaggggacagtctggaggatcaactcaagccaatgcttgaatgggcccacggcggatttaaacctaccggtattgagggactcaagccgaataatacccaacccgagaacaaaaccagaagaagaacagccgacgatagcgccacttctgattattgccctgcccctaagcggcttaaaacgaactgctacaataacgggaaagaccgaggcgacgaagaccagagccgtgagcagatggcgagcgacgtcgcaaacaacaaaagttcactcgaagatgggtgccttagctgtggcagaaagaacccggtctcctttcatcctttgttcgagggcgggctgtgccaaacttgtcgagaccgattcctggagctattttacatgtacgatgacgatggctaccagtcatactgcactgtatgttgcgaggggcgggaactgctactgtgctccaacactagctgctgccggtgcttctgcgtggagtgcctggaagtattagtgggaacgggtactgccgccgaagctaagctgcaggagccgtggtcctgctacatgtgccttccccagcggtgtcatggcgtgctgaggcgaaggaaagactggaatgtccggctacaggctttcttcacttcagatactggcctggagtacgaggctcccaagctatatcccgccattcccgccgcacggcgtcggcccattagggtactctcattgttcgacggcatcgcaaccggttacctcgtgctgaaagagctggggattaaagttggtaagtatgttgctagcgaagtttgcgaggagtccattgccgtgggaactgttaaacacgaaggcaacattaagtacgtgaacgatgtgaggaatatcactaaaaagaatattgaggagtggggcccttttgatctggttattggtggatcgccctgcaacgacttgagtaatgtgaaccccgcacgtaaaggcctctacgagggaacaggcaggttattctttgaattctatcacttgctgaactatagtaggcccaaggaaggggatgacagaccttttttttggatgttcgaaaatgtagtggcaatgaaggtgggagataagagggatatcagtagatttctggagtgtaatccagttatgatcgatgcaattaaggtcagcgcagcccaccgtgcccgatacttctggggaaacttgcctggaatgaaccgtcctgtgattgctagcaagaatgataagctggaacttcaggattgcctggagtacaatagaatcgcaaagctgaagaaagtgcaaactattactacaaaatccaattccatcaagcagggaaagaaccagctttttcctgtggtgatgaatgggaaagaagacgtcctttggtgtaccgaactggaaaggatttttggctttcctgtgcactacaccgacgtgagtaatatgggcaggggcgcaaggcaaaaattgctggggagaagctggagtgtcccagttattaggcacctgtttgccccacttaaggactacttcgcttgtgagtag

SEQ ID NO: 251995 - DNA, 2379 bp, Artificial Sequence
  derived and/or modified sequence
atgaagggcgataccaggcaccttaatggcgaagaagatgcaggtggccgtgaagattccatcttggtgaacggagcctgctcggatcagagtagcgacagcccaccaatccttgaggctatacggactcctgaaatacgaggtcgtaggtccagctcacgactgagtaagcgcgaggtttcgagcttgctttcttatacacaggacctgacaggcgacggagatggtgaagacggcgatgggtcagataccccagttatgcctaaactttttcgtgagacccggacacggtcagaatctccagcagtccgcacccggaacaacaactctgtaagctcacgggaacgccaccgtccatcccctaggtcaacccgcggtcggcagggcaggaaccacgtcgatgaatcccccgtcgagttccctgctacacgatctctgaggcgtcgggcaacagcctctgctggaactccatggccaagcccacccagcagctatttaaccattgacctgactgacgatacggaggacactcacggtacaccccaatcttcatccacaccctatgcccgcctggcacaagattcacagcagggcgggatggagagcccacaagtggaagcagatagcggggatggagatagcagtgagtatcaagatggaaaggagttcgggattggagacctcgtatggggcaaaatcaaaggcttttcttggtggcccgccatggtggtaagttggaaagccacatccaagcggcaggccatgtctggcatgcggtgggtgcagtggttcggggacgggaaattttcagaggtatcagccgataaactggttgcccttggcctgtttagccagcattttaatctagcaacctttaataagctggtgagctaccggaaagcgatgtaccatgctctggaaaaggccagggtgcgggctggcaaaacattcccatccagcccgggagattctctggaggatcaactaaaacccatgcttgagtgggcccatggtggttttaagcctactggcatcgaaggcctgaagcctaacaatacacaaccagagaacaaaacacgccggaggactgcagatgactcagcaactagcgattactgcccagctcccaagaggctcaaaaccaactgctacaataacgggaaggacaggggtgacgaagatcagtctagagagcagatggctagtgacgtagcaaataacaagtcttccttggaggatggttgcttgtcctgcggccgaaaaaaccccgtgtcttttcatccccttttcgaaggtgggctgtgtcagacttgtagggacagatttttggaactgttttatatgtacgacgacgatggttaccaaagctattgtaccgtgtgttgcgagggtcgcgaactgttactttgtagtaacacatcctgctgtaggtgtttttgcgtggagtgtctcgaggtcctggtggggaccggcactgctgctgaggctaaactgcaggagccatggtcttgctacatgtgtctgcctcaaagatgccacggagtcctgagacgacgaaaagactggaatgttagacttcaagctttctttacatctgatactggtctagaatatgaagcccctaagctttaccctgcaatcccagctgccaggagaagacccattagggtactgtctttattcgacggaatcgctacgggctatctggtccttaaagagttgggcattaaagtcggaaagtacgttgcatcagaagtgtgcgaggaatcgatcgccgtgggaacagtgaagcacgagggaaacattaagtacgtcaatgatgttcgcaatatcacaaagaaaaacattgaggaatggggccctttcgatctagtgataggaggatccccatgtaacgatctgagcaacgtaaatcccgcacgaaaaggactctacgagggcacggggcgcctcttcttcgagttttaccacttgctgaactatagtagaccgaaggagggcgacgacagaccatttttctggatgttcgagaacgttgtcgcgatgaaagtcggtgacaaaagggacatttctaggtttctcgagtgcaatccagtgatgatcgatgccattaaagtctctgccgcacatcgcgcccgctatttctggggaaacctaccaggaatgaacagaccggttattgcttctaagaatgataagttagagcttcaggattgtcttgagtataaccgcatcgctaaagacctttggctgtcatgtgcacttcatcggagagtgcagcacgggccctggtgtccacccgaggcggccggtaaagtcctggagagagcatgccacccgactcctttacggccttctgagggtctgttgtgtatgtag

SEQ ID NO: 251996 - DNA, 2502 bp, Artificial Sequence
  derived and/or modified sequence
atgaagggggatactaggcacttgaacggagaggaggacgccggaggtcgcgaggattctatactggtgaatggagcatgttccgatcagagcagcgacagtcccccaatcttggaggctataaggacccccgagatacgtggaagacgctcttcgtctcgactgtcaaagagagaggtatcgagcctgctctcatacacccaagatctgactggggacggtgacggggaggacggggacggtagtgataccccagtcatgcccaagctgtttcgagagacacgcactagaagtgaaagtccagcagtcagaactcggaacaataattccgtctcctctagagagcgacaccgtccatcaccaaggtcaacacgggggcgtcagggcaggaatcacgttgacgaaagcccagttgaatttcccgccacacggagcctgcgcaggagagcaacagcctccgcaggcaccccttggcccagtccaccctccagctacctgactatcgacctgacagacgacacagaagacacccatggcacacctcagagtagcagtactccatacgccaggctcgcacaagattctcagcagggaggaatggaatcaccgcaggtggaggcagacagtggagatggagatagttctgagtaccaggacggaaaggaatttggcataggcgatcttgtgtgggggaaaattaaggggttctcttggtggccagctatggtcgtttcctggaaagcaacctctaaacgccaagctatgagcgggatgaggtgggtgcagtggttcggagatgggaaatttagtgaggtttctgccgataagctggtggcgttgggtctgttctctcagcactttaaccttgcgaccttcaataaacttgtgtcttacagaaaggctatgtatcacgccttagagaaagctagagttagagccgggaaaaccttcccaagtagtccaggcgactctctggaggaccaactgaaacccatgctggagtgggcccacggcggcttcaaacctacgggtatcgaagggttaaagccaaacaacacccagcccgagaataaaacacgccggcgtaccgcggacgatagcgccacgtccgactactgtcctgcccccaaacgactgaagaccaattgctataacaacgggaaggatcgcggggatgaagatcagtctcgtgagcaaatggcatctgacgtcgccaacaataagagctctctggaggatggctgtctttcgtgcggacgcaagaatccagtgtctttccaccctctgtttgagggtggcttatgccagacatgtcgggatcggttcctagagcttttctatatgtatgacgatgatggataccagtcatactgtacggtgtgttgtgagggccgtgagttactactctgtagcaacacctcatgctgtagatgcttctgtgtggagtgcctggaagtgctcgtgggtactggcaccgccgcagaggcaaagctgcaggagccttggtcctgttacatgtgtcttccacagagatgccacggcgtattgcggcgacgcaaggattggaacgtgcgactgcaggcattctttacgagtgataccggccttgagtacgaggcccctaagttgtatccagcaattccggcagcccgccggagaccgattcgggtgctgtccttatttgatggtatcgctacgggctatctggtgttgaaagaattaggcatcaaggtaggaaagtacgtggcttctgaagtgtgcgaagaatctatcgcggtaggaactgttaagcacgagggcaatatcaagtacgtcaatgatgtgcgcaacatcactaagaaaaacatcgaggagtggggtcctttcgacctagtaatcggtgggagcccctgtaacgatttaagcaatgtgaacccagctcgaaaaggactctatgagggcaccggaaggctgttcttcgagttttaccaccttctgaattactcgagacccaaggaaggtgacgacaggcccttcttctggatgtttgagaacgttgtagccatgaaggtgggggacaagcgtgatattagccgctttctagagtgtaaccccgtcatgattgacgcgattaaggtgagtgccgcacacagggctaggtacttctggggtaacctgccgggcatgaaccggcccgtgatcgcctcgaaaaacgataagttggagttgcaggattgccttgagtataaccgaatagcaaagctcaagaaagtgcagacaatcaccacgaagagcaacagcatcaaacagggcaagaaccaactctttcccgtggtcatgaatggcaaagaagacgtattatggtgtaccgagctggaacgtatcttcgggtttccggttcattacacagatgtcagtaacatgggtcgcggagctcggcaaaagctcttgggccggtcttggtccgtccctgtcatccgccaccttttcgcaccactgaaggattattttgcgtgcgaatag

SEQ ID NO: 251997 - DNA, 2538 bp, Artificial Sequence
  derived and/or modified sequence
atggagcccagccctgagccccccagcctggagagcatgaagggggacaccaggcacctgaatggagaggaggatgctgggggccgggaggacagcatcctggtgaatggagcctgcagcgaccagagcagtgacagcccccccatcctggaggccatccgcaccccagagatccggggcagaagaagcagcagccggctgagcaagcgggaggtgagcagcctgctgagctacacccaggacctgactggagatggagatggagaagatggagatggcagtgacacccctgtgatgcccaagctgttccgggagaccaggaccaggtctgagagccctgctgtgaggaccaggaacaacaacagcgtgagcagccgggagcggcaccggcccagccccaggagcacccggggccggcagggcaggaaccacgtggatgagagccctgtggagttccctgccaccaggagcctgcggcggcgggccacagccagcgctggcaccccctggcccagcccccccagcagctacctgaccatcgacctgacagatgacacagaggacacccacggcaccccccagagcagcagcaccccctatgcccggctggcccaggacagccagcagggcggcatggagagcccccaggtggaggccgacagcggagatggagacagcagcgagtaccaggacggcaaggagtttggaattggagacctggtgtggggcaagatcaagggcttctcctggtggccagccatggtggtgtcctggaaggccaccagcaagaggcaggccatgagcggcatgcgctgggtgcagtggtttggagatggcaagttcagcgaggtgtctgctgacaagctggtggccctgggcctcttcagccagcacttcaacctggccaccttcaacaagctggtgtcctacaggaaggccatgtaccacgccctggagaaggcccgggtgcgggccggcaagaccttccccagcagccctggggacagcctggaggaccagctgaagcccatgctggagtgggcccatggaggcttcaagcccactggaattgagggcctgaagcccaacaacacccagcctgagaacaagaccaggagaagaacagcagatgattctgccaccagtgactactgcccagcccccaagaggctgaagaccaactgctacaacaacgggaaggacagaggagatgaggaccagagccgggagcagatggccagtgatgtggccaacaacaagagcagcctggaggatggctgcctgagctgtggcaggaagaaccctgtgtccttccaccccctgtttgagggcggcctgtgccagacctgccgggaccgcttcctggagctgttctacatgtatgatgatgatggctaccagagctactgcaccgtgtgctgtgagggccgggagctgctgctgtgcagcaacaccagctgctgccgctgcttctgtgtggagtgcctggaggtgctggtgggcaccggcacagctgctgaggccaagctgcaggagccctggagctgctacatgtgcctgccccagcgctgccacggcgtgctgcggcggaggaaggactggaatgtgcggctgcaggccttcttcaccagtgacaccggcctggagtatgaggcccccaagctgtacccagccatcccagctgcccggcggcggcccatccgggtgctgagcctgtttgatggcatcgccaccggctacctggtgctgaaggagctgggcatcaaggtgggcaagtatgtggccagcgaggtgtgtgaggagagcattgctgtgggcaccgtgaagcatgagggcaacatcaagtatgtgaatgatgtgaggaacatcaccaagaagaacatcgaggagtggggcccctttgacctggtgattggaggcagcccctgcaatgacctgagcaatgtgaacccagccaggaagggcctgtatgagggcaccggccgcctcttctttgagttctaccacctgctgaactacagccggcccaaggagggagatgaccggcccttcttctggatgtttgaaaatgtggtggccatgaaggtgggggacaagagggacatcagccgcttcctggagtgcaaccctgtgatgattgatgccatcaaggtgtctgctgcccaccgggcccgctacttctggggcaacctgcccggcatgaacagacctgtgattgccagcaagaatgacaagctggagctgcaggactgcctggagtacaacagaattgccaagctgaagaaggtgcagaccatcaccaccaagagcaacagcatcaagcagggcaagaaccagctgtttcctgtggtgatgaatggcaaggaggatgtgctgtggtgcacagagctggagcgcatcttcggcttccctgtgcactacacagatgtgagcaacatgggccgcggggcccggcagaagctgctgggccgctcctggagcgtgcctgtgatccgccacctgtttgcccccctgaaggactactttgcctgtgagtag

SEQ ID NO: 251998 - DNA, 2379 bp, Artificial Sequence
  derived and/or modified sequence
atgaagggggacaccaggcacctgaatggagaggaggatgctgggggccgggaggacagcatcctggtgaatggagcctgcagcgaccagagcagtgacagcccccccatcctggaggccatccgcaccccagagatccggggcagaagaagcagcagccggctgagcaagcgggaggtgagcagcctgctgagctacacccaggacctgactggagatggagatggagaagatggagatggcagtgacacccctgtgatgcccaagctgttccgggagaccaggaccaggtctgagagccctgctgtgaggaccaggaacaacaacagcgtgagcagccgggagcggcaccggcccagccccaggagcacccggggccggcagggcaggaaccacgtggatgagagccctgtggagttccctgccaccaggagcctgcggcggcgggccacagccagcgctggcaccccctggcccagcccccccagcagctacctgaccatcgacctgacagatgacacagaggacacccacggcaccccccagagcagcagcaccccctatgcccggctggcccaggacagccagcagggcggcatggagagcccccaggtggaggccgacagcggagatggagacagcagcgagtaccaggacggcaaggagtttggaattggagacctggtgtggggcaagatcaagggcttctcctggtggccagccatggtggtgtcctggaaggccaccagcaagaggcaggccatgagcggcatgcgctgggtgcagtggtttggagatggcaagttcagcgaggtgtctgctgacaagctggtggccctgggcctcttcagccagcacttcaacctggccaccttcaacaagctggtgtcctacaggaaggccatgtaccacgccctggagaaggcccgggtgcgggccggcaagaccttccccagcagccctggggacagcctggaggaccagctgaagcccatgctggagtgggcccatggaggcttcaagcccactggaattgagggcctgaagcccaacaacacccagcctgagaacaagaccaggagaagaacagcagatgattctgccaccagtgactactgcccagcccccaagaggctgaagaccaactgctacaacaacgggaaggacagaggagatgaggaccagagccgggagcagatggccagtgatgtggccaacaacaagagcagcctggaggatggctgcctgagctgtggcaggaagaaccctgtgtccttccaccccctgtttgagggcggcctgtgccagacctgccgggaccgcttcctggagctgttctacatgtatgatgatgatggctaccagagctactgcaccgtgtgctgtgagggccgggagctgctgctgtgcagcaacaccagctgctgccgctgcttctgtgtggagtgcctggaggtgctggtgggcaccggcacagctgctgaggccaagctgcaggagccctggagctgctacatgtgcctgccccagcgctgccacggcgtgctgcggcggaggaaggactggaatgtgcggctgcaggccttcttcaccagtgacaccggcctggagtatgaggcccccaagctgtacccagccatcccagctgcccggcggcggcccatccgggtgctgagcctgtttgatggcatcgccaccggctacctggtgctgaaggagctgggcatcaaggtgggcaagtatgtggccagcgaggtgtgtgaggagagcattgctgtgggcaccgtgaagcatgagggcaacatcaagtatgtgaatgatgtgaggaacatcaccaagaagaacatcgaggagtggggcccctttgacctggtgattggaggcagcccctgcaatgacctgagcaatgtgaacccagccaggaagggcctgtatgagggcaccggccgcctcttctttgagttctaccacctgctgaactacagccggcccaaggagggagatgaccggcccttcttctggatgtttgaaaatgtggtggccatgaaggtgggggacaagagggacatcagccgcttcctggagtgcaaccctgtgatgattgatgccatcaaggtgtctgctgcccaccgggcccgctacttctggggcaacctgcccggcatgaacagacctgtgattgccagcaagaatgacaagctggagctgcaggactgcctggagtacaacagaattgccaaggacctgtggctgagctgtgccctgcacagaagagtgcagcacggcccctggtgccccccagaggccgccggcaaggtgctggagcgggcctgccaccccacccccctgcggcccagcgagggcctgctgtgcatgtag

SEQ ID NO: 251999 - DNA, 2502 bp, Artificial Sequence
  derived and/or modified sequence
atgaagggggacaccaggcacctgaatggagaggaggatgctgggggccgggaggacagcatcctggtgaatggagcctgcagcgaccagagcagtgacagcccccccatcctggaggccatccgcaccccagagatccggggcagaagaagcagcagccggctgagcaagcgggaggtgagcagcctgctgagctacacccaggacctgactggagatggagatggagaagatggagatggcagtgacacccctgtgatgcccaagctgttccgggagaccaggaccaggtctgagagccctgctgtgaggaccaggaacaacaacagcgtgagcagccgggagcggcaccggcccagccccaggagcacccggggccggcagggcaggaaccacgtggatgagagccctgtggagttccctgccaccaggagcctgcggcggcgggccacagccagcgctggcaccccctggcccagcccccccagcagctacctgaccatcgacctgacagatgacacagaggacacccacggcaccccccagagcagcagcaccccctatgcccggctggcccaggacagccagcagggcggcatggagagcccccaggtggaggccgacagcggagatggagacagcagcgagtaccaggacggcaaggagtttggaattggagacctggtgtggggcaagatcaagggcttctcctggtggccagccatggtggtgtcctggaaggccaccagcaagaggcaggccatgagcggcatgcgctgggtgcagtggtttggagatggcaagttcagcgaggtgtctgctgacaagctggtggccctgggcctcttcagccagcacttcaacctggccaccttcaacaagctggtgtcctacaggaaggccatgtaccacgccctggagaaggcccgggtgcgggccggcaagaccttccccagcagccctggggacagcctggaggaccagctgaagcccatgctggagtgggcccatggaggcttcaagcccactggaattgagggcctgaagcccaacaacacccagcctgagaacaagaccaggagaagaacagcagatgattctgccaccagtgactactgcccagcccccaagaggctgaagaccaactgctacaacaacgggaaggacagaggagatgaggaccagagccgggagcagatggccagtgatgtggccaacaacaagagcagcctggaggatggctgcctgagctgtggcaggaagaaccctgtgtccttccaccccctgtttgagggcggcctgtgccagacctgccgggaccgcttcctggagctgttctacatgtatgatgatgatggctaccagagctactgcaccgtgtgctgtgagggccgggagctgctgctgtgcagcaacaccagctgctgccgctgcttctgtgtggagtgcctggaggtgctggtgggcaccggcacagctgctgaggccaagctgcaggagccctggagctgctacatgtgcctgccccagcgctgccacggcgtgctgcggcggaggaaggactggaatgtgcggctgcaggccttcttcaccagtgacaccggcctggagtatgaggcccccaagctgtacccagccatcccagctgcccggcggcggcccatccgggtgctgagcctgtttgatggcatcgccaccggctacctggtgctgaaggagctgggcatcaaggtgggcaagtatgtggccagcgaggtgtgtgaggagagcattgctgtgggcaccgtgaagcatgagggcaacatcaagtatgtgaatgatgtgaggaacatcaccaagaagaacatcgaggagtggggcccctttgacctggtgattggaggcagcccctgcaatgacctgagcaatgtgaacccagccaggaagggcctgtatgagggcaccggccgcctcttctttgagttctaccacctgctgaactacagccggcccaaggagggagatgaccggcccttcttctggatgtttgaaaatgtggtggccatgaaggtgggggacaagagggacatcagccgcttcctggagtgcaaccctgtgatgattgatgccatcaaggtgtctgctgcccaccgggcccgctacttctggggcaacctgcccggcatgaacagacctgtgattgccagcaagaatgacaagctggagctgcaggactgcctggagtacaacagaattgccaagctgaagaaggtgcagaccatcaccaccaagagcaacagcatcaagcagggcaagaaccagctgtttcctgtggtgatgaatggcaaggaggatgtgctgtggtgcacagagctggagcgcatcttcggcttccctgtgcactacacagatgtgagcaacatgggccgcggggcccggcagaagctgctgggccgctcctggagcgtgcctgtgatccgccacctgtttgcccccctgaaggactactttgcctgtgagtag

SEQ ID NO: 252000 - DNA, 2538 bp, Artificial Sequence
  derived and/or modified sequence
atggagcccagccccgagccccccagcctggagagcatgaagggcgatacccgccatcttaatggagaggaggatgccgggggtcgagaagattcaatccttgtcaatggcgcgtgctccgatcaaagtagtgattctcccccaattttggaggccatacgaacccctgaaatccggggccgcaggtcctcttcacgactcagcaagcgcgaagtcagctccctactgtcttatacacaggatttaaccggtgatggagatggcgaagatggggatggctctgataccccggtcatgccaaaattgttcagagagacccggacccggtccgagagccccgccgtgaggaccagaaacaacaattctgtgagctctagagaacgccatcggcctagcccacggtcaacgagagggcgtcagggacgtaatcacgtggacgagtctccagtggagtttccagccacgagaagtctgagaaggcgtgccaccgcatctgcgggaacgccttggccaagccctcctagcagttacctgacaatcgacttgacagacgacactgaggacactcacggcaccccccaatccagtagtactccctacgcccgtctggcccaggacagtcagcagggaggcatggagtcaccacaggtcgaagccgacagtggtgatggcgattctagcgagtatcaggacggaaaagagtttgggattggcgacctggtgtgggggaagatcaagggcttttcctggtggccagctatggtggtgtcatggaaagccacttctaagaggcaagccatgtccgggatgcgttgggttcagtggtttggcgatggcaagttttcggaggtctccgcagacaagttagtggctctcggcctcttttctcagcatttcaatcttgccacttttaacaaactcgtgtcctatagaaaagccatgtatcatgccttagaaaaggcacgggtgagggcgggcaagactttcccctcttctcccggagattcactggaggatcaactgaagcctatgctagagtgggcccatgggggcttcaaacccactggtatcgagggcctcaagcccaataacacccagccagaaaacaaaaccagaagacggactgcagatgacagcgcaaccagtgactactgtccagcccccaagcgccttaagacaaactgctacaataacggcaaagacagaggcgatgaggatcagtcccgagaacagatggcctcagacgtggctaataacaaatcctctttagaggacggctgcttgtcatgtggtcggaaaaatccggtctcatttcatccactatttgaggggggcctttgccagacatgccgggataggtttttggagctgttttacatgtacgacgatgatggatatcagagctactgtaccgtttgctgcgaagggcgtgagctcctgctctgctccaacacctcctgttgtcgctgtttctgcgtcgagtgcttggaagtgctggtgggcaccggtaccgccgcagaggcaaaactgcaagaaccttggtcatgctacatgtgcctgcctcagcggtgtcacggcgtcctccggagacgcaaagattggaacgtccgcctccaggcgttcttcacctctgacacaggcttggagtacgaagctcctaagttatatcccgctattccagcagcgagacgccgcccaatacgcgtgctgtctttgtttgacggtattgccactggatacctggtgcttaaggaattgggtattaaggttggcaagtacgtcgccagcgaggtgtgcgaggagtcaatagcagttggcaccgtcaagcatgagggaaacatcaaatatgtgaacgacgtaaggaacatcactaagaagaatatcgaagagtggggccccttcgacctagtgatcggggggtcaccctgtaacgatcttagcaacgtgaatccagccagaaagggactctatgaaggtacaggcaggctctttttcgagttctaccatctgctgaattatagccgaccgaaggagggcgacgaccgaccattcttctggatgttcgagaacgtggtggcaatgaaggtaggcgacaaacgggatatcagccgctttctggaatgtaatccggtgatgatagacgcaattaaggtgtcagcagcacatcgtgccagatacttttgggggaatctcccgggcatgaatcggccagtgatagcaagtaagaacgacaaacttgagctacaggattgcctcgagtacaaccggattgccaaattaaagaaagtgcagaccattacaactaagtccaattccatcaaacagggcaagaaccaactgtttccagttgtgatgaatgggaaagaagatgttctgtggtgcactgagctcgagcgaatctttggttttccagtgcactatacagacgtgtcaaatatgggacgtggggctcgccagaagttattaggtcgctcatggagtgtgcccgttatccggcacctttttgctcccttgaaagactatttcgcgtgcgagtag

SEQ ID NO: 252001 - DNA, 2379 bp, Artificial Sequence
  derived and/or modified sequence
atgaagggcgacacccggcacctgaacggcgaggaggacgccggcggcagagaggatagtatcctggtaaatggagcctgctcagaccagtcttctgatagcccgccaatcctggaggctatcaggactcctgagatccgcggaagaaggtcgtcctctagactgtctaaacgggaagtcagttctttgctgtcatacacccaggatctcacgggagatggggatggcgaggacggcgatggatctgacacccctgtaatgcctaagctgtttagagagactcgaaccagatcagagagtccagctgtacgcaccagaaacaataatagcgtgagttcccgcgagaggcacagaccaagtcctcggtccactcgtggcagacagggtaggaatcatgtggatgagtctcctgtggaatttcccgcgacacgtagtctaagacggcgagctaccgctagcgcaggcactccatggccttcccctccgtcctcctatctgacaatcgatctcacagacgacaccgaagatacacacgggaccccacagtcctctagcacgccatatgcccgcctggcccaggactcacaacaaggtggaatggaatcgccacaggtggaggcagactcaggcgacggagacagcagcgagtatcaggatgggaaagagtttgggatcggagatctggtgtgggggaagattaagggattctcttggtggcctgcgatggttgtctcttggaaagccacttctaagagacaggctatgagcggcatgcggtgggtacagtggtttggtgatggcaagtttagcgaggtctcagctgacaagctcgtggccctgggactcttctcccagcattttaacttggccactttcaacaagttggtgagttaccgaaaagccatgtatcacgctctagagaaagcacgtgtcagggctgggaagacattcccctcaagccctggagattctctggaggaccaactcaagcctatgttagagtgggcccacggcggttttaaacccactgggatagaaggtctgaaacccaataacacccagccagagaacaaaacgagacggcgaaccgctgacgactcagcgacatcagattattgccctgcaccaaagagacttaaaaccaattgctataataatggcaaagatcggggtgacgaggatcaatccagggagcaaatggccagtgacgtcgcgaataataaaagttccttagaagacggctgccttagctgtgggcgtaaaaacccagtctctttccatccactgtttgaaggcgggctctgtcagacatgccgggataggttcctcgaactgttctacatgtatgatgacgacggttaccaaagttactgcaccgtgtgctgtgaaggtcgcgaactgttgctgtgttccaatacctcatgctgtagatgtttctgcgtggaatgcctcgaggttctagtcggaacggggacagcagccgaagccaaactgcaggaaccctggtcctgctacatgtgcctgccacagagatgccatggcgtcctgcgccgtcgaaaggattggaatgtgcgcctccaggccttctttaccagcgacaccggactggagtatgaagccccaaagctctaccccgctatccccgcagcaagaagaagacccattagggtgctgtctctgtttgacggaattgcgaccggatatctggtgctcaaggagctcggcatcaaagtgggaaagtacgttgcctcagaggtttgtgaagagagtatcgcagtcgggacagtgaaacatgaaggaaacattaagtatgtcaatgatgttagaaatattactaaaaagaacatagaggagtggggcccgtttgacctcgtcattggcggctctccctgcaatgatctgtcaaacgtgaatccagcacgtaagggcctctatgagggtactggacggctcttctttgaattttatcacctactcaactactctaggcctaaggaaggggatgatcggccattcttctggatgttcgagaatgtagtcgcaatgaaggtgggtgacaaacgcgacatatctcggttcctcgaatgcaacccggtcatgattgacgctatcaaagttagcgcagctcatagagctcgctatttttgggggaaccttccaggcatgaataggccagttattgcttccaagaatgataagctggaattacaggattgtctggagtacaatcggatcgccaaagatctgtggctgagttgtgctcttcacagacgggtccaacacggaccctggtgtccaccagaggctgccggaaaggtgttagagcgggcctgtcatcccactcctctccggcctagcgaggggctgctctgcatgtag

SEQ ID NO: 252002 - DNA, 2502 bp, Artificial Sequence
  derived and/or modified sequence
atgaagggcgacacccggcacctgaacggcgaggaggacgccggcggccgagaagactcaatccttgtaaacggcgcatgctcagaccaatcttcagacagtcctccaatcctggaagccataagaacccctgagatcaggggccggcgtagctccagccggctgagcaaacgagaggtgtcaagtctgctctcctatacccaggatctgacaggggatggggacggcgaggatggagatgggtccgatacacctgtgatgcccaagctgttccgcgagaccaggacaaggagcgagtcaccagcggtcagaacgcgtaataacaactcagtaagtagcagggagcgccataggccgagtcccaggagtaccagaggacgacaagggcgaaaccatgtggatgagtctcccgtcgaattccccgctacccgctccctgcgaaggcgtgcaaccgcctctgccggcaccccttggcccagtcccccttctagttacctcacaatcgacctgactgacgacaccgaagacactcacggaacccctcagtcctcatctacaccttatgcgcgcctggctcaagattcgcagcaaggggggatggagtccccccaagtggaggccgattctggagatggcgacagtagtgaataccaggatggcaaggagtttgggatcggagatctcgtgtggggtaaaatcaagggctttagctggtggccagcaatggtggtgtcctggaaggcaaccagcaaacgacaggccatgtctggcatgcggtgggttcaatggtttggcgatgggaagttctctgaggtgtccgcagacaagctcgtggccttgggcctgttttcccagcactttaatctggccaccttcaataagctggtaagttacaggaaggctatgtatcacgccctggagaaagctcgagtaagagccggaaagacctttccatcaagccctggggattccctcgaggaccagttaaaaccgatgctggaatgggcacacggaggttttaagcccaccggcatcgagggtcttaagccaaataatacccagcctgagaataagactagacggcgtaccgccgatgactcagcaacctctgactactgtccagcaccaaaacggctgaagaccaattgttacaataatggcaaggatcgtggcgatgaggatcagagcagagagcagatggcttcggacgtggccaataacaagagttccttagaagacgggtgcctgtcctgtggacgtaagaatcccgtcagttttcatcccctgttcgagggcgggctgtgccaaacttgccgggatcggttcctggaactgttctacatgtatgacgatgacggataccaaagctactgcacagtgtgttgcgagggccgggaactactcctgtgttctaacacatcatgttgccgatgcttctgtgtggagtgtctggaagtgcttgtgggtaccggcacggctgccgaagcgaaactgcaggaaccttggtcctgctacatgtgcctcccacagcggtgccacggcgtcctacgcagacggaaagactggaatgtgcgcctccaagcttttttcacctcggatacgggtctggagtatgaagcccccaaactctacccggctataccagctgctcgccgacgccccatcagggtcctcagcctgtttgacggaatcgctaccgggtatctggtactcaaagagcttgggatcaaggtgggcaagtacgtagcctctgaggtatgtgaagaatcaatagctgttgggactgtcaagcacgagggtaatattaagtacgtaaacgacgtgcggaacataaccaaaaagaatattgaggaatgggggccctttgacttagtgattggaggatctccttgcaacgatctgtccaacgtgaacccagcccgcaaggggctgtatgagggcacaggacgactcttcttcgaattttaccaccttctgaactactctcggccaaaggaaggcgacgaccgcccatttttctggatgttcgagaacgttgtggcaatgaaggtgggcgacaaacgtgatattagcaggttccttgagtgcaaccccgtcatgatcgacgctatcaaagtgtctgcggctcacagagcacggtacttctggggaaatctgcctggcatgaatagacccgtgattgcatccaaaaatgataagttggagcttcaggactgtttggaatataatcgaatcgccaaacttaagaaagtccagactatcacaactaagtccaatagcattaagcagggcaagaaccagctctttccagtggtcatgaatggaaaagaggatgtgttatggtgtactgagttagaacgaattttcgggttccccgtccactacactgacgtctccaatatgggcagaggggctaggcagaagttactggggcggtcttggagtgtgcccgtcatccgtcaccttttcgcccctctgaaggattacttcgcctgtgaatag

SEQ ID NO: 252003 - DNA, 2538 bp, Artificial Sequence
  derived and/or modified sequence
atggagccaagtccagagccaccttccttggagtctatgaaaggagacacgcggcacctgaatggcgaggaggacgctggtgggagagaggattccatcttggtgaatggcgcttgttcggaccagagctctgacagtcccccaatactggaggccattcgaactcctgagatacgaggaaggaggagttcttcccggctatctaagcgcgaagtctccagcttgctgtcgtacactcaagatctgactggcgatggcgacggagaggatggggatggaagtgatacaccggtcatgccaaagctattccgtgagacccggacccggagcgaatctccggctgttcgcactcgcaacaataactctgtatccagtcgggaacggcacagaccctcccctcggtccacccggggtcggcagggcagaaaccacgtcgacgaaagcccagtcgagtttccagccacacggagcctgagaagaagagcaactgcttccgccggtacaccctggcctagccctccaagctcatacctaacgatagatctaaccgacgacactgaagacacacacggaactccacagtccagttccaccccctacgccagactggctcaggactctcaacaagggggtatggaatccccacaagtcgaagctgattccggcgacggggatagcagtgagtatcaggatgggaaggagtttggcatcggcgatttggtgtggggcaaaattaagggctttagttggtggccagccatggtggtgagttggaaagctaccagcaagcggcaggccatgtccggcatgcgatgggtccagtggtttggcgacggcaaattctccgaggtctccgctgacaaattagtggctcttggcctgtttagccagcacttcaatcttgcgacattcaataaactcgtgtcatacaggaaagcaatgtatcatgcactcgagaaagctcgagtacgtgccggtaagacctttccctcttctcccggtgactcccttgaggaccagcttaagcctatgctggaatgggctcacggcggatttaagccaacggggatcgagggacttaaaccaaataacacacagccagaaaataagacacgcagacgcacagcagatgactcagccacttctgactactgtcctgcaccaaagcgcctcaaaactaattgttacaataacggcaaagatcgcggagacgaggatcagagtcgtgagcagatggcctctgacgtggctaataacaaatccagcctcgaggatgggtgcctcagctgcggacggaagaatcccgtgtcctttcacccactgttcgagggagggctgtgccagacatgccgggacagatttctggagctattttacatgtatgatgacgacggttatcagtcatactgtacggtttgctgtgaaggcagagaactccttctgtgttcaaacacaagttgctgtcgctgtttttgtgtggagtgcctggaggtcctagtggggacagggaccgcagccgaagccaagctccaagagccatggtcttgttatatgtgtctgcctcagcggtgtcatggagtgctccgaaggagaaaggattggaatgtgcggctccaagcgtttttcacatctgacaccggcctggaatatgaggcacctaagctctaccccgcaatacccgcagcaaggcggagacctattcgggttttgagtctttttgacggcatagcaactgggtatttggtccttaaagaactgggcataaaggtcggtaaatacgtagcatccgaggtgtgcgaggaatctattgctgtggggaccgtgaaacacgaggggaatattaagtatgttaacgatgtgaggaacattaccaaaaagaacatcgaagagtggggaccatttgatctcgtaattgggggtagcccttgcaatgatctgtccaacgtgaaccctgcgaggaagggactgtacgaggggactggtaggctatttttcgagttctaccacctgttaaactactcaaggcctaaggagggtgacgacaggccctttttctggatgttcgaaaacgtggtggcaatgaaagttggcgacaagagagacattagccggttcctggagtgcaaccctgttatgatcgatgcgataaaagtctccgcggcacacagggcccgttacttttggggcaacctccctggaatgaatcgccctgttatagcctccaagaacgacaagctcgagctgcaggactgcctggaatataacagaattgcaaagctgaaaaaggtccagacaattactacaaagtcaaactctatcaagcagggcaaaaaccagctgtttccggtggtgatgaatgggaaagaagatgtactctggtgtacagaactggagcggatctttggctttccagtgcactacacagatgtgtcaaacatgggacgcggtgctcgtcaaaaactgctgggcagatcttggtcagttcccgtgatccggcacctgttcgcacccctcaaggattactttgcatgtgagtag

SEQ ID NO: 252004 - DNA, 2379 bp, Artificial Sequence
  derived and/or modified sequence
atgaagggggacactagacacctgaacggcgaagaggatgccggaggcagagaggacagcatcctggtaaatggtgcctgctccgaccagagctccgacagccccccaatactcgaggccatcagaacccccgagattcgaggaaggaggtcgagctctcgcctgtcaaagagggaggtttccagcttactatcttacacacaggaccttacaggagacggggacggcgaggacggggatggatctgacacacctgttatgcctaaactcttcagggagacaagaacgcgctctgaaagcccggcagttagaaccagaaacaacaactctgtgtcttccagggaacgccatcgccctagtcccaggtccacacggggaagacagggcaggaaccacgtagacgagtcacccgtggagtttccagccactcgaagtctccggagaagagccactgcctccgcaggtaccccttggcctagtccacctagcagctatctgaccatcgatttgactgacgacacggaagatacccacggcacaccccaatcctccagcacaccttatgcccgactagctcaagactcccagcaaggcggaatggaatcccctcaggttgaggcggactctggcgatggtgacagctctgaatatcaggatgggaaagagtttggaattggcgatttggtctggggaaaaataaagggcttttcttggtggcccgctatggttgtctcttggaaggcaacttccaaaaggcaggccatgagtggaatgagatgggtccagtggttcggggacgggaaattctcagaagtgagtgcagacaagttggtcgccttaggcctcttcagtcaacattttaaccttgcgacttttaataagcttgtgtcataccgaaaggccatgtatcatgctctggagaaggcgcgagttcgagcaggaaagacattcccctcttcacccggtgatagcctggaagatcaacttaaacccatgctggagtgggctcatggtggttttaaaccgactggaatagagggactcaagccaaacaatacccagcctgaaaataagaccaggcgtcgcacagccgatgatagcgccacatctgactactgtcctgctccaaaacggttgaaaactaactgttataataatggaaaagataggggcgatgaagatcagtcccgagagcagatggctagcgacgtcgctaacaacaaatcctccttagaagatggatgcttgagctgtggtagaaagaacccagtgtcgtttcatcccttattcgaggggggtctgtgtcaaacatgcagagataggttcttagaactcttctatatgtatgacgatgacggataccaaagctattgcacagtatgttgtgagggacgtgagttattgctgtgttccaacacctcatgttgtcggtgtttttgtgtagaatgccttgaagtgctggtcggtactgggaccgctgctgaggctaaactgcaggagccatggtcttgctacatgtgcttgccacagagatgtcatggtgtgttgcggagaaggaaggattggaatgttagactgcaagctttctttacaagtgacactggtcttgagtatgaggctcccaagctctacccagcaatacctgcagccagacggcgacctatccgagtgctctcactgtttgacgggatagccaccggatacctggttctcaaggagctgggcattaaggtgggaaaatacgtcgcgtctgaagtatgtgaagagagtatagctgtggggaccgtgaagcatgaaggcaatataaagtatgtgaacgacgttaggaacataactaagaagaacatcgaggagtgggggccttttgacctcgtaatcgggggttccccgtgcaacgatctctccaacgtgaaccctgctagaaagggcctgtacgaaggcacggggcgattgttctttgagttttatcatctactgaattactcccgacccaaagaaggtgacgacagaccatttttctggatgttcgagaatgtagtggcaatgaaagtgggagataagcgagacatatctaggtttttagagtgcaacccagtgatgatcgacgcaatcaaggtctctgcagcccaccgcgctaggtacttttgggggaacctccctggtatgaatagaccagttattgcttccaagaacgacaagctggaacttcaggattgcctagagtataaccgcattgctaaagacttgtggttgtcatgcgcacttcatcgccgagtacagcacggtccttggtgtccccctgaggctgcaggcaaggtcctggaaagagcatgccacccaacccctctgcgccctagcgagggattactttgcatgtag

SEQ ID NO: 252005 - DNA, 2502 bp, Artificial Sequence
  derived and/or modified sequence
atgaagggtgatactagacacttaaacggggaggaggatgccggtggtcgcgaggacagcattcttgtgaacggggcatgttctgatcagtcatcagatagcccgcctatcctagaggctattaggacacccgaaattcgtggccgtcggtcctcttctagattatctaagcgtgaggtgtcaagcttgcttagttatacacaggatctgaccggtgatggcgatggggaagacggcgatggatccgacactccggtcatgccaaagctattccgagaaaccagaaccaggagcgagagtcccgcagtgcgaactcggaataacaattccgtttcttcgcgcgagaggcaccgtccatcacccaggtcgacaaggggtcggcaagggcgaaaccacgtggacgaatccccagtcgagtttcctgccaccagatcactgagacggagggctaccgcatccgctggcactccctggcctagtccaccgtcctcctacctgacaatagacctgacagatgacaccgaagacacccacggcacacctcagagctcgtcgacgccctatgcacgcctggcgcaggactctcagcaaggtgggatggagtcacctcaggttgaggccgatagtggagacggagactctagtgaataccaggatgggaaggagttcggcattggcgacctggtttggggcaagatcaagggtttctcttggtggcccgctatggtagtgagctggaaagccacgagcaaaagacaggccatgtcaggaatgcgctgggttcagtggttcggtgacggtaagttcagtgaagtttcagcagataagttggtggctctgggtcttttcagccaacattttaacctggctacatttaacaaacttgtttcttacagaaaagccatgtatcacgctctagagaaggcccgtgttcgcgctggtaaaacatttccttcgtcaccaggtgactctctggaggaccaacttaaaccaatgctcgagtgggctcatggtggcttcaagccgaccggaatcgagggcctcaaaccgaataacacccagcctgagaacaaaacaaggaggcgcactgcagacgacagcgcaactagtgactattgcccggcaccaaaaaggctcaagacaaattgttacaataatggcaaggaccgaggcgatgaggatcagagcagagagcagatggctagtgacgttgctaataataaaagttccttagaagatggatgtctgtcttgtggccgaaaaaatcccgtctccttccacccattatttgagggtggtctatgtcagacttgtcgcgatcgtttcctagagctgttttatatgtatgacgatgatggataccagtcgtactgcaccgtgtgttgcgaagggcgtgaactcttgttatgttccaatacctcctgttgtcgttgcttctgcgtggagtgcctcgaagtccttgtggggaccggcacagcagcagaagcgaagctgcaggaaccatggtcatgctacatgtgcttgccccagcgttgtcacggagtgctgcgcagaagaaaagattggaatgtgcggcttcaggcctttttcacaagtgatactgggcttgagtacgaggctccaaagttgtatccggctatccccgctgcaaggcgcagaccaattagagtgctatcgctgttcgacggcatagccactggctatctggttctgaaagaactgggtattaaggtgggaaagtatgtagcaagcgaggtgtgtgaggaatcaatagcagtgggtaccgtgaaacacgagggtaatattaagtatgtcaatgacgtcaggaatataacaaagaagaacatcgaagagtggggtccattcgatctagtgatcggaggaagtccttgcaatgatctcagtaacgtaaatcccgcaagaaaagggctgtacgagggcacgggcaggctgttcttcgaattctatcatcttctgaattactccaggcccaaagagggtgatgaccgccctttcttctggatgtttgagaacgtggtcgctatgaaggtgggtgataagcgcgatatctccagattcttagagtgcaatcctgttatgatcgacgcaatcaaggtttctgccgcacatagagccagatatttctggggtaatctccctggaatgaatcgccctgtaattgctagtaagaatgataagctcgaactgcaggactgtctggagtataacaggatagcaaagcttaagaaggtccagacaattacaaccaaatcaaacagcatcaagcaaggtaagaaccagctgtttccagtcgtcatgaatggtaaggaagatgttctctggtgcacagaattggaacgtatatttgggttcccagtgcactacacagacgtctcgaacatgggaaggggcgcaaggcagaagctgctggggagaagctggtcagtcccagttatccgtcacctgttcgcgcctttgaaagactattttgcatgcgaatag

SEQ ID NO: 252006 - DNA, 2538 bp, Artificial Sequence
  derived and/or modified sequence
atggagcccagccccgagccccccagcctggagagcatgaagggcgacaccagacacctgaacggcgaggaggacgccggcggcagagaggacagcatcctggtgaacggcgcctgcagcgaccagagcagcgacagcccccccatcctggaggccatcagaacccccgagatcagaggcagaagaagcagcagcagactgagcaagagagaggtgagcagcctgctgagctacacccaggacctgaccggcgacggcgacggcgaggacggcgacggcagcgacacccccgtgatgcccaagctgttcagagagaccagaaccagaagcgagagccccgccgtgagaaccagaaacaacaacagcgtgagcagcagagagagacacagacccagccccagaagcaccagaggcagacagggcagaaaccacgtggacgagagccccgtggagttccccgccaccagaagcctgagaagaagagccaccgccagcgccggcaccccctggcccagcccccccagcagctacctgaccatcgacctgaccgacgacaccgaggacacccacggcaccccccagagcagcagcaccccctacgccagactggcccaggacagccagcagggcggcatggagagcccccaggtggaggccgacagcggcgacggcgacagcagcgagtaccaggacggcaaggagttcggcatcggcgacctggtgtggggcaagatcaagggcttcagctggtggcccgccatggtggtgagctggaaggccaccagcaagagacaggccatgagcggcatgagatgggtgcagtggttcggcgacggcaagttcagcgaggtgagcgccgacaagctggtggccctgggcctgttcagccagcacttcaacctggccaccttcaacaagctggtgagctacagaaaggccatgtaccacgccctggagaaggccagagtgagagccggcaagaccttccccagcagccccggcgacagcctggaggaccagctgaagcccatgctggagtgggcccacggcggcttcaagcccaccggcatcgagggcctgaagcccaacaacacccagcccgagaacaagaccagaagaagaaccgccgacgacagcgccaccagcgactactgccccgcccccaagagactgaagaccaactgctacaacaacggcaaggacagaggcgacgaggaccagagcagagagcagatggccagcgacgtggccaacaacaagagcagcctggaggacggctgcctgagctgcggcagaaagaaccccgtgagcttccaccccctgttcgagggcggcctgtgccagacctgcagagacagattcctggagctgttctacatgtacgacgacgacggctaccagagctactgcaccgtgtgctgcgagggcagagagctgctgctgtgcagcaacaccagctgctgcagatgcttctgcgtggagtgcctggaggtgctggtgggcaccggcaccgccgccgaggccaagctgcaggagccctggagctgctacatgtgcctgccccagagatgccacggcgtgctgagaagaagaaaggactggaacgtgagactgcaggccttcttcaccagcgacaccggcctggagtacgaggcccccaagctgtaccccgccatccccgccgccagaagaagacccatcagagtgctgagcctgttcgacggcatcgccaccggctacctggtgctgaaggagctgggcatcaaggtgggcaagtacgtggccagcgaggtgtgcgaggagagcatcgccgtgggcaccgtgaagcacgagggcaacatcaagtacgtgaacgacgtgagaaacatcaccaagaagaacatcgaggagtggggccccttcgacctggtgatcggcggcagcccctgcaacgacctgagcaacgtgaaccccgccagaaagggcctgtacgagggcaccggcagactgttcttcgagttctaccacctgctgaactacagcagacccaaggagggcgacgacagacccttcttctggatgttcgagaacgtggtggccatgaaggtgggcgacaagagagacatcagcagattcctggagtgcaaccccgtgatgatcgacgccatcaaggtgagcgccgcccacagagccagatacttctggggcaacctgcccggcatgaacagacccgtgatcgccagcaagaacgacaagctggagctgcaggactgcctggagtacaacagaatcgccaagctgaagaaggtgcagaccatcaccaccaagagcaacagcatcaagcagggcaagaaccagctgttccccgtggtgatgaacggcaaggaggacgtgctgtggtgcaccgagctggagagaatcttcggcttccccgtgcactacaccgacgtgagcaacatgggcagaggcgccagacagaagctgctgggcagaagctggagcgtgcccgtgatcagacacctgttcgcccccctgaaggactacttcgcctgcgagtag

SEQ ID NO: 252007 - DNA, 2379 bp, Artificial Sequence
  derived and/or modified sequence
atgaagggcgacaccagacacctgaacggcgaggaggacgccggcggcagagaggacagcatcctggtgaacggcgcctgcagcgaccagagcagcgacagcccccccatcctggaggccatcagaacccccgagatcagaggcagaagaagcagcagcagactgagcaagagagaggtgagcagcctgctgagctacacccaggacctgaccggcgacggcgacggcgaggacggcgacggcagcgacacccccgtgatgcccaagctgttcagagagaccagaaccagaagcgagagccccgccgtgagaaccagaaacaacaacagcgtgagcagcagagagagacacagacccagccccagaagcaccagaggcagacagggcagaaaccacgtggacgagagccccgtggagttccccgccaccagaagcctgagaagaagagccaccgccagcgccggcaccccctggcccagcccccccagcagctacctgaccatcgacctgaccgacgacaccgaggacacccacggcaccccccagagcagcagcaccccctacgccagactggcccaggacagccagcagggcggcatggagagcccccaggtggaggccgacagcggcgacggcgacagcagcgagtaccaggacggcaaggagttcggcatcggcgacctggtgtggggcaagatcaagggcttcagctggtggcccgccatggtggtgagctggaaggccaccagcaagagacaggccatgagcggcatgagatgggtgcagtggttcggcgacggcaagttcagcgaggtgagcgccgacaagctggtggccctgggcctgttcagccagcacttcaacctggccaccttcaacaagctggtgagctacagaaaggccatgtaccacgccctggagaaggccagagtgagagccggcaagaccttccccagcagccccggcgacagcctggaggaccagctgaagcccatgctggagtgggcccacggcggcttcaagcccaccggcatcgagggcctgaagcccaacaacacccagcccgagaacaagaccagaagaagaaccgccgacgacagcgccaccagcgactactgccccgcccccaagagactgaagaccaactgctacaacaacggcaaggacagaggcgacgaggaccagagcagagagcagatggccagcgacgtggccaacaacaagagcagcctggaggacggctgcctgagctgcggcagaaagaaccccgtgagcttccaccccctgttcgagggcggcctgtgccagacctgcagagacagattcctggagctgttctacatgtacgacgacgacggctaccagagctactgcaccgtgtgctgcgagggcagagagctgctgctgtgcagcaacaccagctgctgcagatgcttctgcgtggagtgcctggaggtgctggtgggcaccggcaccgccgccgaggccaagctgcaggagccctggagctgctacatgtgcctgccccagagatgccacggcgtgctgagaagaagaaaggactggaacgtgagactgcaggccttcttcaccagcgacaccggcctggagtacgaggcccccaagctgtaccccgccatccccgccgccagaagaagacccatcagagtgctgagcctgttcgacggcatcgccaccggctacctggtgctgaaggagctgggcatcaaggtgggcaagtacgtggccagcgaggtgtgcgaggagagcatcgccgtgggcaccgtgaagcacgagggcaacatcaagtacgtgaacgacgtgagaaacatcaccaagaagaacatcgaggagtggggccccttcgacctggtgatcggcggcagcccctgcaacgacctgagcaacgtgaaccccgccagaaagggcctgtacgagggcaccggcagactgttcttcgagttctaccacctgctgaactacagcagacccaaggagggcgacgacagacccttcttctggatgttcgagaacgtggtggccatgaaggtgggcgacaagagagacatcagcagattcctggagtgcaaccccgtgatgatcgacgccatcaaggtgagcgccgcccacagagccagatacttctggggcaacctgcccggcatgaacagacccgtgatcgccagcaagaacgacaagctggagctgcaggactgcctggagtacaacagaatcgccaaggacctgtggctgagctgcgccctgcacagaagagtgcagcacggcccctggtgcccccccgaggccgccggcaaggtgctggagagagcctgccaccccacccccctgagacccagcgagggcctgctgtgcatgtag

SEQ ID NO: 252008 - DNA, 2502 bp, Artificial Sequence
  derived and/or modified sequence
atgaagggcgacaccagacacctgaacggcgaggaggacgccggcggcagagaggacagcatcctggtgaacggcgcctgcagcgaccagagcagcgacagcccccccatcctggaggccatcagaacccccgagatcagaggcagaagaagcagcagcagactgagcaagagagaggtgagcagcctgctgagctacacccaggacctgaccggcgacggcgacggcgaggacggcgacggcagcgacacccccgtgatgcccaagctgttcagagagaccagaaccagaagcgagagccccgccgtgagaaccagaaacaacaacagcgtgagcagcagagagagacacagacccagccccagaagcaccagaggcagacagggcagaaaccacgtggacgagagccccgtggagttccccgccaccagaagcctgagaagaagagccaccgccagcgccggcaccccctggcccagcccccccagcagctacctgaccatcgacctgaccgacgacaccgaggacacccacggcaccccccagagcagcagcaccccctacgccagactggcccaggacagccagcagggcggcatggagagcccccaggtggaggccgacagcggcgacggcgacagcagcgagtaccaggacggcaaggagttcggcatcggcgacctggtgtggggcaagatcaagggcttcagctggtggcccgccatggtggtgagctggaaggccaccagcaagagacaggccatgagcggcatgagatgggtgcagtggttcggcgacggcaagttcagcgaggtgagcgccgacaagctggtggccctgggcctgttcagccagcacttcaacctggccaccttcaacaagctggtgagctacagaaaggccatgtaccacgccctggagaaggccagagtgagagccggcaagaccttccccagcagccccggcgacagcctggaggaccagctgaagcccatgctggagtgggcccacggcggcttcaagcccaccggcatcgagggcctgaagcccaacaacacccagcccgagaacaagaccagaagaagaaccgccgacgacagcgccaccagcgactactgccccgcccccaagagactgaagaccaactgctacaacaacggcaaggacagaggcgacgaggaccagagcagagagcagatggccagcgacgtggccaacaacaagagcagcctggaggacggctgcctgagctgcggcagaaagaaccccgtgagcttccaccccctgttcgagggcggcctgtgccagacctgcagagacagattcctggagctgttctacatgtacgacgacgacggctaccagagctactgcaccgtgtgctgcgagggcagagagctgctgctgtgcagcaacaccagctgctgcagatgcttctgcgtggagtgcctggaggtgctggtgggcaccggcaccgccgccgaggccaagctgcaggagccctggagctgctacatgtgcctgccccagagatgccacggcgtgctgagaagaagaaaggactggaacgtgagactgcaggccttcttcaccagcgacaccggcctggagtacgaggcccccaagctgtaccccgccatccccgccgccagaagaagacccatcagagtgctgagcctgttcgacggcatcgccaccggctacctggtgctgaaggagctgggcatcaaggtgggcaagtacgtggccagcgaggtgtgcgaggagagcatcgccgtgggcaccgtgaagcacgagggcaacatcaagtacgtgaacgacgtgagaaacatcaccaagaagaacatcgaggagtggggccccttcgacctggtgatcggcggcagcccctgcaacgacctgagcaacgtgaaccccgccagaaagggcctgtacgagggcaccggcagactgttcttcgagttctaccacctgctgaactacagcagacccaaggagggcgacgacagacccttcttctggatgttcgagaacgtggtggccatgaaggtgggcgacaagagagacatcagcagattcctggagtgcaaccccgtgatgatcgacgccatcaaggtgagcgccgcccacagagccagatacttctggggcaacctgcccggcatgaacagacccgtgatcgccagcaagaacgacaagctggagctgcaggactgcctggagtacaacagaatcgccaagctgaagaaggtgcagaccatcaccaccaagagcaacagcatcaagcagggcaagaaccagctgttccccgtggtgatgaacggcaaggaggacgtgctgtggtgcaccgagctggagagaatcttcggcttccccgtgcactacaccgacgtgagcaacatgggcagaggcgccagacagaagctgctgggcagaagctggagcgtgcccgtgatcagacacctgttcgcccccctgaaggactacttcgcctgcgagtag

SEQ ID NO: 252009 - DNA, 4255 bp, Artificial Sequence
  derived and/or modified sequence
gaagggagagagcaaacaaaggggtcaggagggaaaataatgcactggcttcctgagcccctgcagaggctgagcagggagagggggccagggccagaggggacagaggctggcggcagacgggccgggacaggcaggtcctaaatggcattgtttgaaggggccggctaattgcacagagcagtctgagcctgagaccccagccctggcctccccactctgtcctgggtgctggcgtctgagccttcgggacagcctgtccacatggaaccaagtcctgagcctccaagcttggaaagcatgaagggagacaccaggcatctcaatggagaggaggacgccggcgggagggaagactcgatcctcgtcaacggggcctgcagcgaccagtcctccgactcgcccccaatcctggaggctatccgcaccccggagatcagaggccgaagatcaagctcgcgactctccaagagggaggtgtccagtctgctaagctacacacaggacttgacaggcgatggcgacggggaagatggggatggctctgacaccccagtcatgccaaagctcttccgggaaaccaggactcgttcagaaagcccagctgtccgaactcgaaataacaacagtgtctccagccgggagaggcacaggccttccccacgttccacccgaggccggcagggccgcaaccatgtggacgagtcccccgtggagttcccggctaccaggtccctgagacggcgggcaacagcatcggcaggaacgccatggccgtcccctcccagctcttaccttaccatcgacctcacagacgacacagaggacacacatgggacgccccagagcagcagtaccccctacgcccgcctagcccaggacagccagcaggggggcatggagtccccgcaggtggaggcagacagtggagatggagacagttcagagtatcaggatgggaaggagtttggaataggggacctcgtgtggggaaagatcaagggcttctcctggtggcccgccatggtggtgtcttggaaggccacctccaagcgacaggctatgtctggcatgcggtgggtccagtggtttggcgatggcaagttctccgaggtctctgcagacaaactggtggcactggggctgttcagccagcactttaatttggccaccttcaataagctcgtctcctatcgaaaagccatgtaccatgctctggagaaagctagggtgcgagctggcaagaccttccccagcagccctggagactcattggaggaccagctgaagcccatgttggagtgggcccacgggggcttcaagcccactgggatcgagggcctcaaacccaacaacacgcaaccagagaacaagactcgaagacgcacagctgacgactcagccacctctgactactgccccgcacccaagcgcctcaagacaaattgctataacaacggcaaagaccgaggggatgaagatcagagccgagaacaaatggcttcagatgttgccaacaacaagagcagcctggaagatggctgtttgtcttgtggcaggaaaaaccccgtgtccttccaccctctctttgagggggggctctgtcagacatgccgggatcgcttccttgagctgttttacatgtatgatgacgatggctatcagtcttactgcactgtgtgctgcgagggccgagagctgctgctttgcagcaacacgagctgctgccggtgtttctgtgtggagtgcctggaggtgctggtgggcacaggcacagcggccgaggccaagcttcaggagccctggagctgttacatgtgtctcccgcagcgctgtcatggcgtcctgcggcgccggaaggactggaacgtgcgcctgcaggccttcttcaccagtgacacggggcttgaatatgaagcccccaagctgtaccctgccattcccgcagcccgaaggcggcccattcgagtcctgtcattgtttgatggcatcgcgacaggctacctagtcctcaaagagttgggcataaaggtaggaaagtacgtcgcttctgaagtgtgtgaggagtccattgctgttggaaccgtgaagcacgaggggaatatcaaatacgtgaacgacgtgaggaacatcacaaagaaaaatattgaagaatggggcccatttgacttggtgattggcggaagcccatgcaacgatctctcaaatgtgaatccagccaggaaaggcctgtatgagggtacaggccggctcttcttcgaattttaccacctgctgaattactcacgccccaaggagggtgatgaccggccgttcttctggatgtttgagaatgttgtagccatgaaggttggcgacaagagggacatctcacggttcctggagtgtaatccagtgatgattgatgccatcaaagtttctgctgctcacagggcccgatacttctggggcaacctacccgggatgaacaggcccgtgatagcatcaaagaatgataaactcgagctgcaggactgcttggaatacaataggatagccaagttaaagaaagtacagacaataaccaccaagtcgaactcgatcaaacaggggaaaaaccaacttttccctgttgtcatgaatggcaaagaagatgttttgtggtgcactgagctcgaaaggatctttggctttcctgtgcactacacagacgtgtccaacatgggccgtggtgcccgccagaagctgctgggaaggtcctggagcgtgcctgtcatccgacacctcttcgcccctctgaaggactactttgcatgtgaatagttccagccaggccccaagcccactggggtgtgtggcagagccaggacccaggaggtgtgattcctgaaggcatccccaggccctgctcttcctcagctgtgtgggtcataccgtgtacctcagttccctcttgctcagtgggggcagagccacctgactcttgcaggggtagcctgaggtgccgcctccttgtgcacaaatcagacctggctgcttggagcagcctaacacggtgctcattttttcttctcctaaaactttaaaacttgaagtaggtagcaacgtggctttttttttttcccttcctgggtctaccactcagagaaacaatggctaagataccaaaaccacagtgccgacagctctccaatactcaggttaatgctgaaaaatcatccaagacagttattgcaagagtttaatttttgaaaactggctactgctctgtgtttacagacgtgtgcagttgtaggcatgtagctacaggacatttttaagggcccaggatcgttttttcccagggcaagcagaagagaaaatgttgtatatgtcttttacccggcacattccccttgcctaaatacaagggctggagtctgcacgggacctattagagtattttccacaatgatgatgatttcagcagggatgacgtcatcatcacattcagggctattttttcccccacaaacccaagggcaggggccactcttagctaaatccctccccgtgactgcaatagaaccctctggggagctcaggaaggggtgtgctgagttctataatataagctgccatatattttgtagacaagtatggctcctccatatctccctcttccctaggagaggagtgtgaagcaaggagcttagataagacaccccctcaaacccattccctctccaggagacctaccctccacaggcacaggtccccagatgagaagtctgctaccctcatttctcatctttttactaaactcagaggcagtgacagcagtcagggacagacatacatttctcataccttccccacatctgagagatgacagggaaaactgcaaagctcggtgctccctttggagattttttaatccttttttattccataagaagtcgtttttagggagaacgggaattcagacaagctgcatttcagaaatgctgtcataatggtttttaacaccttttactcttcttactggtgctattttgtagaataaggaacaacgttgacaagttttgtggggctttttatacactttttaaaatctcaaacttctatttttatgtttaacgttttcattaaaattttttttgtaactggagccacgacgtaacaaatatggggaaaaaactgtgccttgtttcaacagtttttgctaatttttaggctgaaagatgacggatgcctagagtttaccttatgtttaattaaaatcagtatttgtcta

SEQ ID NO: 252010 - DNA, 3932 bp, Artificial Sequence
  derived and/or modified sequence
gcgccctgcacggccgccagccggcctcccgccagccagccccgacccgcggctccgccgcccagccgcgccccagccagccctgcggcaggaaagcatgaagggagacaccaggcatctcaatggagaggaggacgccggcgggagggaagactcgatcctcgtcaacggggcctgcagcgaccagtcctccgactcgcccccaatcctggaggctatccgcaccccggagatcagaggccgaagatcaagctcgcgactctccaagagggaggtgtccagtctgctaagctacacacaggacttgacaggcgatggcgacggggaagatggggatggctctgacaccccagtcatgccaaagctcttccgggaaaccaggactcgttcagaaagcccagctgtccgaactcgaaataacaacagtgtctccagccgggagaggcacaggccttccccacgttccacccgaggccggcagggccgcaaccatgtggacgagtcccccgtggagttcccggctaccaggtccctgagacggcgggcaacagcatcggcaggaacgccatggccgtcccctcccagctcttaccttaccatcgacctcacagacgacacagaggacacacatgggacgccccagagcagcagtaccccctacgcccgcctagcccaggacagccagcaggggggcatggagtccccgcaggtggaggcagacagtggagatggagacagttcagagtatcaggatgggaaggagtttggaataggggacctcgtgtggggaaagatcaagggcttctcctggtggcccgccatggtggtgtcttggaaggccacctccaagcgacaggctatgtctggcatgcggtgggtccagtggtttggcgatggcaagttctccgaggtctctgcagacaaactggtggcactggggctgttcagccagcactttaatttggccaccttcaataagctcgtctcctatcgaaaagccatgtaccatgctctggagaaagctagggtgcgagctggcaagaccttccccagcagccctggagactcattggaggaccagctgaagcccatgttggagtgggcccacgggggcttcaagcccactgggatcgagggcctcaaacccaacaacacgcaaccagagaacaagactcgaagacgcacagctgacgactcagccacctctgactactgccccgcacccaagcgcctcaagacaaattgctataacaacggcaaagaccgaggggatgaagatcagagccgagaacaaatggcttcagatgttgccaacaacaagagcagcctggaagatggctgtttgtcttgtggcaggaaaaaccccgtgtccttccaccctctctttgagggggggctctgtcagacatgccgggatcgcttccttgagctgttttacatgtatgatgacgatggctatcagtcttactgcactgtgtgctgcgagggccgagagctgctgctttgcagcaacacgagctgctgccggtgtttctgtgtggagtgcctggaggtgctggtgggcacaggcacagcggccgaggccaagcttcaggagccctggagctgttacatgtgtctcccgcagcgctgtcatggcgtcctgcggcgccggaaggactggaacgtgcgcctgcaggccttcttcaccagtgacacggggcttgaatatgaagcccccaagctgtaccctgccattcccgcagcccgaaggcggcccattcgagtcctgtcattgtttgatggcatcgcgacaggctacctagtcctcaaagagttgggcataaaggtaggaaagtacgtcgcttctgaagtgtgtgaggagtccattgctgttggaaccgtgaagcacgaggggaatatcaaatacgtgaacgacgtgaggaacatcacaaagaaaaatattgaagaatggggcccatttgacttggtgattggcggaagcccatgcaacgatctctcaaatgtgaatccagccaggaaaggcctgtatgagggtacaggccggctcttcttcgaattttaccacctgctgaattactcacgccccaaggagggtgatgaccggccgttcttctggatgtttgagaatgttgtagccatgaaggttggcgacaagagggacatctcacggttcctggagtgtaatccagtgatgattgatgccatcaaagtttctgctgctcacagggcccgatacttctggggcaacctacccgggatgaacaggcccgtgatagcatcaaagaatgataaactcgagctgcaggactgcttggaatacaataggatagccaaggatctttggctttcctgtgcactacacagacgtgtccaacatgggccgtggtgcccgccagaagctgctgggaaggtcctggagcgtgcctgtcatccgacacctcttcgcccctctgaaggactactttgcatgtgaatagttccagccaggccccaagcccactggggtgtgtggcagagccaggacccaggaggtgtgattcctgaaggcatccccaggccctgctcttcctcagctgtgtgggtcataccgtgtacctcagttccctcttgctcagtgggggcagagccacctgactcttgcaggggtagcctgaggtgccgcctccttgtgcacaaatcagacctggctgcttggagcagcctaacacggtgctcattttttcttctcctaaaactttaaaacttgaagtaggtagcaacgtggctttttttttttcccttcctgggtctaccactcagagaaacaatggctaagataccaaaaccacagtgccgacagctctccaatactcaggttaatgctgaaaaatcatccaagacagttattgcaagagtttaatttttgaaaactggctactgctctgtgtttacagacgtgtgcagttgtaggcatgtagctacaggacatttttaagggcccaggatcgttttttcccagggcaagcagaagagaaaatgttgtatatgtcttttacccggcacattccccttgcctaaatacaagggctggagtctgcacgggacctattagagtattttccacaatgatgatgatttcagcagggatgacgtcatcatcacattcagggctattttttcccccacaaacccaagggcaggggccactcttagctaaatccctccccgtgactgcaatagaaccctctggggagctcaggaaggggtgtgctgagttctataatataagctgccatatattttgtagacaagtatggctcctccatatctccctcttccctaggagaggagtgtgaagcaaggagcttagataagacaccccctcaaacccattccctctccaggagacctaccctccacaggcacaggtccccagatgagaagtctgctaccctcatttctcatctttttactaaactcagaggcagtgacagcagtcagggacagacatacatttctcataccttccccacatctgagagatgacagggaaaactgcaaagctcggtgctccctttggagattttttaatccttttttattccataagaagtcgtttttagggagaacgggaattcagacaagctgcatttcagaaatgctgtcataatggtttttaacaccttttactcttcttactggtgctattttgtagaataaggaacaacgttgacaagttttgtggggctttttatacactttttaaaatctcaaacttctatttttatgtttaacgttttcattaaaattttttttgtaactggagccacgacgtaacaaatatggggaaaaaactgtgccttgtttcaacagtttttgctaatttttaggctgaaagatgacggatgcctagagtttaccttatgtttaattaaaatcagtatttgtct

SEQ ID NO: 252011 - DNA, 4237 bp, Artificial Sequence
  derived and/or modified sequence
cgcagcagctgctcccggctccgcggccgcagcccgcgtggacgctccgagcgccccccgacggacgggaccggctccctggcggtcgggcgagcgggcggcaacgctgcccggccggcagcgctggggttaagtggcccaagtaaacctagctcggcgatcggcgccggagattcgcgagcccagcgccctgcacggccgccagccggcctcccgccagccagccccgacccgcggctccgccgcccagccgcgccccagccagccctgcggcaggaaagcatgaagggagacaccaggcatctcaatggagaggaggacgccggcgggagggaagactcgatcctcgtcaacggggcctgcagcgaccagtcctccgactcgcccccaatcctggaggctatccgcaccccggagatcagaggccgaagatcaagctcgcgactctccaagagggaggtgtccagtctgctaagctacacacaggacttgacaggcgatggcgacggggaagatggggatggctctgacaccccagtcatgccaaagctcttccgggaaaccaggactcgttcagaaagcccagctgtccgaactcgaaataacaacagtgtctccagccgggagaggcacaggccttccccacgttccacccgaggccggcagggccgcaaccatgtggacgagtcccccgtggagttcccggctaccaggtccctgagacggcgggcaacagcatcggcaggaacgccatggccgtcccctcccagctcttaccttaccatcgacctcacagacgacacagaggacacacatgggacgccccagagcagcagtaccccctacgcccgcctagcccaggacagccagcaggggggcatggagtccccgcaggtggaggcagacagtggagatggagacagttcagagtatcaggatgggaaggagtttggaataggggacctcgtgtggggaaagatcaagggcttctcctggtggcccgccatggtggtgtcttggaaggccacctccaagcgacaggctatgtctggcatgcggtgggtccagtggtttggcgatggcaagttctccgaggtctctgcagacaaactggtggcactggggctgttcagccagcactttaatttggccaccttcaataagctcgtctcctatcgaaaagccatgtaccatgctctggagaaagctagggtgcgagctggcaagaccttccccagcagccctggagactcattggaggaccagctgaagcccatgttggagtgggcccacgggggcttcaagcccactgggatcgagggcctcaaacccaacaacacgcaaccagagaacaagactcgaagacgcacagctgacgactcagccacctctgactactgccccgcacccaagcgcctcaagacaaattgctataacaacggcaaagaccgaggggatgaagatcagagccgagaacaaatggcttcagatgttgccaacaacaagagcagcctggaagatggctgtttgtcttgtggcaggaaaaaccccgtgtccttccaccctctctttgagggggggctctgtcagacatgccgggatcgcttccttgagctgttttacatgtatgatgacgatggctatcagtcttactgcactgtgtgctgcgagggccgagagctgctgctttgcagcaacacgagctgctgccggtgtttctgtgtggagtgcctggaggtgctggtgggcacaggcacagcggccgaggccaagcttcaggagccctggagctgttacatgtgtctcccgcagcgctgtcatggcgtcctgcggcgccggaaggactggaacgtgcgcctgcaggccttcttcaccagtgacacggggcttgaatatgaagcccccaagctgtaccctgccattcccgcagcccgaaggcggcccattcgagtcctgtcattgtttgatggcatcgcgacaggctacctagtcctcaaagagttgggcataaaggtaggaaagtacgtcgcttctgaagtgtgtgaggagtccattgctgttggaaccgtgaagcacgaggggaatatcaaatacgtgaacgacgtgaggaacatcacaaagaaaaatattgaagaatggggcccatttgacttggtgattggcggaagcccatgcaacgatctctcaaatgtgaatccagccaggaaaggcctgtatgagggtacaggccggctcttcttcgaattttaccacctgctgaattactcacgccccaaggagggtgatgaccggccgttcttctggatgtttgagaatgttgtagccatgaaggttggcgacaagagggacatctcacggttcctggagtgtaatccagtgatgattgatgccatcaaagtttctgctgctcacagggcccgatacttctggggcaacctacccgggatgaacaggcccgtgatagcatcaaagaatgataaactcgagctgcaggactgcttggaatacaataggatagccaagttaaagaaagtacagacaataaccaccaagtcgaactcgatcaaacaggggaaaaaccaacttttccctgttgtcatgaatggcaaagaagatgttttgtggtgcactgagctcgaaaggatctttggctttcctgtgcactacacagacgtgtccaacatgggccgtggtgcccgccagaagctgctgggaaggtcctggagcgtgcctgtcatccgacacctcttcgcccctctgaaggactactttgcatgtgaatagttccagccaggccccaagcccactggggtgtgtggcagagccaggacccaggaggtgtgattcctgaaggcatccccaggccctgctcttcctcagctgtgtgggtcataccgtgtacctcagttccctcttgctcagtgggggcagagccacctgactcttgcaggggtagcctgaggtgccgcctccttgtgcacaaatcagacctggctgcttggagcagcctaacacggtgctcattttttcttctcctaaaactttaaaacttgaagtaggtagcaacgtggctttttttttttcccttcctgggtctaccactcagagaaacaatggctaagataccaaaaccacagtgccgacagctctccaatactcaggttaatgctgaaaaatcatccaagacagttattgcaagagtttaatttttgaaaactggctactgctctgtgtttacagacgtgtgcagttgtaggcatgtagctacaggacatttttaagggcccaggatcgttttttcccagggcaagcagaagagaaaatgttgtatatgtcttttacccggcacattccccttgcctaaatacaagggctggagtctgcacgggacctattagagtattttccacaatgatgatgatttcagcagggatgacgtcatcatcacattcagggctattttttcccccacaaacccaagggcaggggccactcttagctaaatccctccccgtgactgcaatagaaccctctggggagctcaggaaggggtgtgctgagttctataatataagctgccatatattttgtagacaagtatggctcctccatatctccctcttccctaggagaggagtgtgaagcaaggagcttagataagacaccccctcaaacccattccctctccaggagacctaccctccacaggcacaggtccccagatgagaagtctgctaccctcatttctcatctttttactaaactcagaggcagtgacagcagtcagggacagacatacatttctcataccttccccacatctgagagatgacagggaaaactgcaaagctcggtgctccctttggagattttttaatccttttttattccataagaagtcgtttttagggagaacgggaattcagacaagctgcatttcagaaatgctgtcataatggtttttaacaccttttactcttcttactggtgctattttgtagaataaggaacaacgttgacaagttttgtggggctttttatacactttttaaaatctcaaacttctatttttatgtttaacgttttcattaaaattttttttgtaactggagccacgacgtaacaaatatggggaaaaaactgtgccttgtttcaacagtttttgctaatttttaggctgaaagatgacggatgcctagagtttaccttatgtttaattaaaatcagtatttgtcta

SEQ ID NO: 252012 - protein, 887 aa, Artificial Sequence
  derived and/or modified sequence
MNSGGGLPPPSAAASPSSSSLAAAVAVVAPPGVGGVPGGAAVGVKLKYCRYYAKDKTCFYGEECQFLHEDPAAGAAPGLGLHSNSVPLALAGAPVAGFPPGAVAGGGAGPPPGPKKPDLGDPGTGAAAGGGGSSGGLDGPRLAIPGMDGGALTDTSLTDSYFSTSFIGVNGFGSPVETKYPLMQRMTNSSSSPSLLNDSAKPYSAHDPLTSPASSLFNDFGALNISQRRKPRKYRLGMLEERLVPMGSKARKAKNPIGCLADRCKSGVPINMVWWNRVTENNLQTPNPTASEFIPKGGSTSRLSNVSQSNMSAFSQVFSHPSMGSPATAGLAPGMSLSAGSSPLHSPKITPHTSPAPRRRSHTPNPASYMVPSSASTSVNNPVSQTPSSGQVIQKETVGGTTYFYTDTTPAPLTGMVFPNYHIYPPTAPHVAYMQPKANAPSFFMADELRQELINRHLITMAQIDQADMPAVPTEVDSYHSLFPLEPLPPPNRIQKSSNFGYITSCYKAVNSKDDLPYCLRRIHGFRLVNTKCMVLVDMWKKIQHSNIVTLREVFTTKAFAEPSLVFAYDFHAGGETMMSRHFNDPNADAYFTKRKWGQHEGPLPRQHAGLLPESLIWAYIVQLSSALRTIHTAGLACRVMDPTKILITGKTRLRVNCVGVFDVLTFDNSQNNNPLALMAQYQQADLISLGKVVLALACNSLAGIQRENLQKAMELVTINYSSDLKNLILYLLTDQNRMRSVNDIMPMIGARFYTQLDAAQMRNDVIEEDLAKEVQNGRLFRLLAKLGTINERPEFQKDPTWSETGDRYLLKLFRDHLFHQVTEAGAPWIDLSHIISCLNKLDAGVPEKISLISRDEKSVLVVTYSDLKRCFENTFQELIAAANGQL

SEQ ID NO: 252013 - DNA, 2664 bp, Artificial Sequence
  derived and/or modified sequence
atgaacagcggcggcggcctgcccccccccagcgccgccgccagccccagcagcagcagcctggccgccgccgtggccgtggtggccccccccggcgtgggcggcgtgcccggcggcgccgccgtgggcgtgaagctgaagtactgcagatactacgccaaggacaagacctgcttctacggcgaggagtgccagttcctgcacgaggaccccgccgccggcgccgcccccggcctgggcctgcacagcaacagcgtgcccctggccctggccggcgcccccgtggccggcttcccccccggcgccgtggccggcggcggcgccggccccccccccggccccaagaagcccgacctgggcgaccccggcaccggcgccgccgccggcggcggcggcagcagcggcggcctggacggccccagactggccatccccggcatggacggcggcgccctgaccgacaccagcctgaccgacagctacttcagcaccagcttcatcggcgtgaacggcttcggcagccccgtggagaccaagtaccccctgatgcagagaatgaccaacagcagcagcagccccagcctgctgaacgacagcgccaagccctacagcgcccacgaccccctgaccagccccgccagcagcctgttcaacgacttcggcgccctgaacatcagccagagaagaaagcccagaaagtacagactgggcatgctggaggagagactggtgcccatgggcagcaaggccagaaaggccaagaaccccatcggctgcctggccgacagatgcaagagcggcgtgcccatcaacatggtgtggtggaacagagtgaccgagaacaacctgcagacccccaaccccaccgccagcgagttcatccccaagggcggcagcaccagcagactgagcaacgtgagccagagcaacatgagcgccttcagccaggtgttcagccaccccagcatgggcagccccgccaccgccggcctggcccccggcatgagcctgagcgccggcagcagccccctgcacagccccaagatcaccccccacaccagccccgcccccagaagaagaagccacacccccaaccccgccagctacatggtgcccagcagcgccagcaccagcgtgaacaaccccgtgagccagacccccagcagcggccaggtgatccagaaggagaccgtgggcggcaccacctacttctacaccgacaccacccccgcccccctgaccggcatggtgttccccaactaccacatctacccccccaccgccccccacgtggcctacatgcagcccaaggccaacgcccccagcttcttcatggccgacgagctgagacaggagctgatcaacagacacctgatcaccatggcccagatcgaccaggccgacatgcccgccgtgcccaccgaggtggacagctaccacagcctgttccccctggagcccctgcccccccccaacagaatccagaagagcagcaacttcggctacatcaccagctgctacaaggccgtgaacagcaaggacgacctgccctactgcctgagaagaatccacggcttcagactggtgaacaccaagtgcatggtgctggtggacatgtggaagaagatccagcacagcaacatcgtgaccctgagagaggtgttcaccaccaaggccttcgccgagcccagcctggtgttcgcctacgacttccacgccggcggcgagaccatgatgagcagacacttcaacgaccccaacgccgacgcctacttcaccaagagaaagtggggccagcacgagggccccctgcccagacagcacgccggcctgctgcccgagagcctgatctgggcctacatcgtgcagctgagcagcgccctgagaaccatccacaccgccggcctggcctgcagagtgatggaccccaccaagatcctgatcaccggcaagaccagactgagagtgaactgcgtgggcgtgttcgacgtgctgaccttcgacaacagccagaacaacaaccccctggccctgatggcccagtaccagcaggccgacctgatcagcctgggcaaggtggtgctggccctggcctgcaacagcctggccggcatccagagagagaacctgcagaaggccatggagctggtgaccatcaactacagcagcgacctgaagaacctgatcctgtacctgctgaccgaccagaacagaatgagaagcgtgaacgacatcatgcccatgatcggcgccagattctacacccagctggacgccgcccagatgagaaacgacgtgatcgaggaggacctggccaaggaggtgcagaacggcagactgttcagactgctggccaagctgggcaccatcaacgagagacccgagttccagaaggaccccacctggagcgagaccggcgacagatacctgctgaagctgttcagagaccacctgttccaccaggtgaccgaggccggcgccccctggatcgacctgagccacatcatcagctgcctgaacaagctggacgccggcgtgcccgagaagatcagcctgatcagcagagacgagaagagcgtgctggtggtgacctacagcgacctgaagagatgcttcgagaacaccttccaggagctgatcgccgccgccaacggccagctgtag

SEQ ID NO: 252014 - DNA, 2664 bp, Artificial Sequence
  derived and/or modified sequence
atgaacagcggcggaggcctcccacctccttctgctgcagccagtccttccagctccagtttggctgccgccgttgccgtagtcgcgcccccaggggtgggaggagttccagggggcgccgctgtcggagtcaaacttaaatactgcagatactatgcgaaagataagacctgcttttatggcgaggaatgccaattcctgcatgaagatcccgcagctggagccgcccccggcctgggactgcattccaacagtgtcccgctcgccctggccggggcccctgtcgccgggttccctcctggcgccgtcgccggaggcggcgcaggccccccacccgggcctaaaaagccagatctgggcgacccaggaactggggcggcggcaggtgggggagggtcgtctggaggtttagacgggccacgacttgcaatccctggtatggacgggggggctttgaccgacaccagtcttacagacagctacttttccaccagctttattggcgtaaatgggtttggcagcccagtcgagaccaagtatcccctcatgcagaggatgactaacagcagctccagtcccagcctgcttaatgactctgcgaaaccttatagcgctcacgaccctctcacatccccagcttcgtccctgttcaatgattttggagctctgaatatctcccagaggcggaaacccagaaaatataggttaggcatgctggaggagaggttagtgcctatgggctctaaggctagaaaagctaagaaccccatcggctgcctcgcagaccggtgcaaatccggggtccccattaatatggtatggtggaacagggtaaccgagaataacctgcagacccccaatccaaccgcttctgagtttatcccaaaaggaggttctacctcccggctttcaaacgtctcacaatctaatatgtcggccttctcccaggtgttctcacatcccagcatgggttctccagccaccgcaggtctggcccctgggatgtctctgagcgccgggtctagcccacttcacagtccgaaaatcacacctcacacctctccggctcctcgccgtcggtctcataccccaaaccctgcctcttacatggtgcctagttctgcgagtacgagcgttaacaacccagtttctcagacaccgtctagtggccaggtcattcagaaggagacagttggggggaccacctatttttacaccgacacaactcccgcccccctgactggcatggtgttcccaaactaccacatttatcctcccactgcacctcacgtagcgtacatgcagccaaaagcaaatgcaccttccttcttcatggccgatgaactgagacaggaactgatcaacagacacttgatcacaatggcccaaatagaccaggcagacatgccagccgttccgaccgaagttgacagctatcattccttatttcccctagagcctctaccccccccgaaccgcatccagaaaagtagtaactttggctacattacttcctgctataaggccgtgaacagtaaagatgacttgccgtactgccttcggcggatccatgggtttagacttgttaatactaaatgtatggttctcgtggatatgtggaagaagatccagcactcaaacatcgttactttgagggaggtgttcactactaaagctttcgcggagcctagtctcgtcttcgcgtatgatttccatgcaggtggcgagacaatgatgagtcgtcatttcaacgaccccaacgccgacgcgtactttactaaacgaaaatggggtcagcacgagggaccgttgcccagacagcatgccggcctactccccgaatcgttaatctgggcctatatcgttcaattgtcttctgccctgaggacgattcacacagccgggctggcttgcagagtgatggatcctacaaaaattttgattactggcaaaaccaggttgagggttaactgtgtcggcgtgtttgatgtcctaacttttgacaatagccagaacaacaaccccctcgctctgatggcccagtaccagcaggctgacctcatctctcttggaaaagttgtgcttgcactggcttgtaactccctggcaggcatccaaagagaaaatctgcagaaggctatggagcttgtgactatcaactattcgtcagatcttaagaatctgatcctgtacttactaactgaccaaaaccgcatgaggtcagtgaacgacatcatgccaatgattggcgcaagattctacacacagttagacgccgctcagatgcgtaatgatgtgatcgaggaggacctcgctaaggaggtgcaaaacggacgcctgttcaggttacttgccaagctaggcaccatcaacgaacgccccgagttccaaaaagacccgacgtggagcgagaccggcgacaggtatctgctaaaactgtttagagaccacttatttcaccaggtaaccgaggcaggggccccctggatcgacctgtcccatataatatcgtgcctgaataagctggatgccggcgtgcctgaaaagattagcttaatttcccgggatgaaaaatcggtgctggtggttacctattccgatcttaagagatgcttcgagaacaccttccaggaactgatcgcggcagcaaacggccagctgtag

SEQ ID NO: 252015 - DNA, 2664 bp, Artificial Sequence
  derived and/or modified sequence
atgaacagcggcggcggcctgcccccaccttctgctgctgccagccccagcagcagcagcctggccgctgctgtggccgtggtggcccctcctggggtgggcggcgtgcctggaggagctgctgtgggcgtgaagctgaagtactgccgctactatgccaaggacaagacctgcttctacggggaggagtgccagttcctgcatgaagatcctgctgctggagctgcccctggcctgggcctgcacagcaacagcgtgcccctggccctggccggggcccctgtggccggcttccccccaggagctgtggccggcggcggggccggccccccacctggccccaagaagccagacctgggggaccccggcaccggggctgctgctgggggcggcggcagcagcggcggcctggatggcccccggctggccatccctggcatggatggaggagccctgacagacaccagcctgacagacagctacttcagcaccagcttcatcggcgtgaatggcttcggcagccctgtggagaccaagtaccccctgatgcagaggatgaccaacagcagcagcagccccagcctgctgaatgattctgccaagccctacagcgcccatgaccccctgaccagccctgccagcagcctcttcaatgactttggagccctgaacatcagccagaggaggaagcccaggaagtaccgcctgggcatgctggaggagcggctggtgcccatgggcagcaaggccaggaaggccaagaaccccatcggctgcctggccgaccgctgcaagagcggcgtgcccatcaacatggtgtggtggaacagagtgacagagaacaacctgcagacccccaaccccacagccagcgagttcatccccaagggcggcagcaccagccggctgagcaatgtgtcccagagcaacatgtctgccttcagccaggtgttcagccaccccagcatgggcagccctgccacagctggcctggcccctggcatgagcctgtctgctggcagcagccccctgcacagccccaagatcaccccccacaccagccctgcccccaggagaagaagccacacccccaacccagccagctacatggtgcccagcagcgccagcacctctgtgaacaaccctgtgtcccagacccccagcagcggccaggtgatccagaaggagaccgtgggcggcaccacctacttctacacagacaccaccccagcccccctgaccggcatggtgttccccaactaccacatctacccacccacagccccccacgtggcctacatgcagcccaaggccaatgcccccagcttcttcatggctgatgagctgcggcaggagctgatcaacagacacctgatcaccatggcccagattgaccaggccgacatgcctgctgtgcccacagaggtggacagctaccacagcctcttccccctggagcccctgcccccacccaaccgcatccagaagagcagcaactttggctacatcaccagctgctacaaggctgtgaacagcaaggatgacctgccctactgcctgcggcgcatccacggcttccggctggtgaacaccaagtgcatggtgctggtggacatgtggaagaagatccagcacagcaacatcgtgaccctgcgggaggtgttcaccaccaaggcctttgctgagcccagcctggtgtttgcctatgacttccacgccggcggggagaccatgatgagccgccacttcaatgaccccaatgctgatgcctacttcaccaagaggaagtggggccagcacgagggccccctgccccggcagcacgccggcctgctgcctgagagcctcatctgggcctacatcgtgcagctgagcagcgccctgcggaccatccacacagctggcctggcctgccgggtgatggaccccaccaagatcctgatcaccgggaagacccggctgcgggtgaactgtgtgggcgtgtttgatgtgctgacctttgacaacagccagaacaacaaccccctggccctgatggcccagtaccagcaggccgacctgatcagcctgggcaaggtggtgctggccctggcctgcaacagcctggccggcatccagcgggagaacctgcagaaggccatggagctggtgaccatcaactacagcagtgacctgaagaacctgatcctgtacctgctgacagaccagaacaggatgaggtctgtgaatgacatcatgcccatgattggagcccgcttctacacccagctggatgctgcccagatgagaaatgatgtgattgaggaggacctggccaaggaggtgcagaatggccgcctcttccggctgctggccaagctgggcaccatcaatgaaagacctgagttccagaaggaccccacctggagcgagactggagaccgctacctgctgaagctgttccgggaccacctgttccaccaggtgacagaagctggggccccctggattgacctgagccacatcatcagctgcctgaacaagctggatgctggggtgcctgagaagatcagcctcatcagcagagatgagaagtctgtgctggtggtgacctacagcgacctgaagcgctgctttgagaacaccttccaggagctgattgctgctgccaacggccagctgtag

SEQ ID NO: 252016 - DNA, 2833 bp, Artificial Sequence
  derived and/or modified sequence
ctccccgggcggctccggctcccgcagcgggacagacccacccgcccaggcttttatccggcaccggcagcgtcttcctttcctcccccgtctatggtggtggcggcggcggctcctcgggcggcggcggaagacgaggctgcggcgttgccatgaacagtggcggcggcctcccgcccccctcggccgccgcctccccttcctcctcctcgctggcggcggcggtggcggtggtggccccgccgggggtcgggggtgtccccggcggggcggcggtaggagtgaagctgaagtactgccgctactacgctaaggataagacttgcttctacggggaggagtgtcagttcctgcatgaggaccctgccgccggggctgccccgggcctcggcctccatagcaacagcgtccccctggctctggctggtgcacccgtggccggctttccgccgggagccgtcgcgggcgggggagctgggccgccccccgggcccaagaagccggacctgggggacccggggaccggagccgcagccggcggaggaggcagtagcgggggactcgatggaccgcggctggcaattccaggaatggatggaggtgctttaactgatacaagtctcacagattcctattttagcaccagctttattggagtcaatggatttggaagccctgtagaaacaaaatatcccctgatgcagagaatgactaatagtagcagctccccaagccttctaaatgacagtgccaagccatattcagcccatgatcctctaacatcacctgcttcatccttgtttaatgactttggtgccctcaacatctctcagagacgaaagccaaggaagtatcgcctggggatgctggaggagaggctagttccgatgggatcaaaggcacgaaaagcaaagaaccctattggctgccttgctgacaggtgtaaatcaggagtacccatcaatatggtttggtggaacagagtcacagaaaacaatttacagacaccaaatcctactgcaagcgagtttattcctaaaggaggatcaacctccaggctgagtaacgtgtcccagtcaaatatgtctgccttctctcaagttttctctcacccatccatgggaagccctgctactgctggattagcgccaggaatgtcgttgtctgctgggtcttcccctcttcattcccccaagattactccacatacttctcctgctcccagaagaagaagtcacactccaaatccagcaagttacatggtgccttctagtgcctctacatctgttaataatcctgtttctcagactccgtcttctggtcaggtgatccaaaaggaaactgttggtgggacgacttacttctatacagacacaactccagcacctttgactggaatggtgtttccaaactatcatatttatcctccaactgcacctcacgttgcttatatgcaaccgaaagcaaacgcaccttccttcttcatggctgatgaactccgacaggagctgatcaacagacatttaataacaatggctcaaattgatcaagcagatatgccagcagttcctacagaggttgacagctaccatagcctattccctctagaaccactgccacctcccaaccggatacagaaatcaagtaattttggatatattacatcttgctacaaagctgtaaacagcaaagatgatctgccatattgccttcggaggatacatggttttcgtcttgttaacacaaagtgcatggtgttggtcgacatgtggaagaaaattcaacactcaaatatcgtaactttgcgtgaagtatttaccactaaagcatttgctgagccctctcttgtgtttgcatatgatttccatgctggaggagaaactatgatgagcagacactttaatgaccctaatgctgatgcctacttcaccaagagaaagtggggtcagcacgagggaccattgcccaggcagcatgctggattattgccagaatctcttatttgggcatatattgtccaactaagttctgcattgcgtaccattcatacagcaggtttggcatgtcgagttatggatccaacaaagattctgataactggcaaaacaaggttgcgagtaaattgtgttggagtttttgatgttttaacatttgataacagtcaaaataataatccattggcattaatggcccagtaccagcaagcagatctgatatcattaggaaaagttgtgttggctttggcttgcaactctttggcaggaattcagcgagagaatttacagaaagccatggaactggtgacaatcaactattcctctgacctgaagaatctgattttgtatttgttgactgaccaaaacaggatgcgaagtgtaaatgacatcatgcccatgattggtgctcgattttatactcaattggatgctgctcaaatgagaaatgatgtcatagaggaagaccttgcaaaggaggttcaaaatggaagactgtttaggctcctagcaaaattgggaacaatcaatgagaggccggagtttcagaaggatcccacttggtcagagactggagaccgttatctgttgaaactctttagggatcatctttttcatcaggtgacagaagcaggtgctccctggattgacctcagtcatataatttcttgtcttaacaagctagatgctggtgtgccagaaaaaataagcctgatttccagagatgagaagagtgtacttgtggtgacctacagtgacttaaagcgctgctttgaaaatacttttcaagaactgattgcagctgcaaatggtcagttgtagtatttgctaaaaaagca

SEQ ID NO: 252017 - DNA, 2664 bp, Artificial Sequence
  derived and/or modified sequence
atgaacagcggcggcggcctgcccccccccagcgccgccgccagcccttcatcttccagcctggccgccgcagtggctgtcgtggcaccccctggtgtaggaggcgttcctggaggcgcagcggttggagtcaagctcaaatactgccggtactatgctaaggataaaacgtgcttttacggagaggagtgtcaattcctgcacgaagacccagccgcaggtgccgctcctgggttaggcttgcacagcaactctgtaccgttagccctggctggtgctcccgtggccggctttccccccggggccgtagcgggaggaggtgctggaccaccacccggacctaaaaaacctgaccttggcgatccaggaacaggcgccgccgcaggtgggggcggaagttcaggcgggctcgatggccctcgcctcgccatccctggtatggatggcggcgcgcttaccgatacatctttaaccgacagctacttcagcacctcatttatcggcgtcaacggctttggtagccccgtcgaaacaaaatatcccctgatgcagaggatgacaaacagctcatcctctcctagcctgctcaacgactctgcaaagccctatagtgctcatgaccccttaacctcgccagcttcgtctctattcaatgacttcggcgctctgaacatcagccagagaaggaagcctcggaagtatagacttggcatgttggaagaaaggctggtgcctatgggctctaaggcaaggaaagcaaaaaacccgatcggttgtttagcggatcgatgtaaatcaggggtgcccataaacatggtgtggtggaatcgcgtgactgagaacaatttgcaaaccccgaatcccaccgccagcgagtttattccgaaaggcgggagcacatctcgcctgtctaatgtttcacagagcaacatgtcagcattcagccaagtcttctctcaccccagcatgggttctcctgctacagctggcttagccccaggtatgtccctgtcggcaggtagcagcccgctgcacagtccaaaaattacacctcacactagtccagccccgagacggcgatcacacacccccaatccagcttcctatatggtcccctctagcgcatcaacttccgtcaacaatccggtgagccagactcctagttcggggcaggttatacaaaaagagactgtgggcggcaccacttatttctataccgatacgacccccgctcctttgaccgggatggtgttcccgaactatcatatataccctccaaccgcgcctcatgtcgcctatatgcagcctaaggctaatgccccaagcttcttcatggccgacgagcttaggcaggaattgattaatcggcacctgattactatggcacagatcgaccaggcagatatgccagctgtccccactgaggtggactcatatcatagcctgtttccgttggagcccctcccacctccaaatcgtatccagaagagttcgaattttgggtatatcacatcttgctataaggccgtcaattcaaaggatgacctgccttactgtttacgaagaatccacggattccgcctggtgaacactaaatgcatggtcctagtcgacatgtggaaaaagatccagcacagtaatatagtgacactgagagaggtctttacaaccaaggcctttgctgaaccaagcctggtgttcgcctatgactttcatgctggcggggaaacaatgatgagccggcacttcaacgaccccaacgcagacgcctatttcaccaagcggaagtggggtcaacacgagggaccgctccctcgccagcacgcgggactcctgcccgagagcttaatttgggcctacattgtccagctcagctccgctctgaggaccatccacacggcaggtctggcatgccgtgtgatggatcctaccaagatcctgataacaggcaaaactcgtctaagagtcaattgcgttggcgtgtttgacgtgctgacgtttgacaattcccagaataacaacccattggctctcatggcccagtaccagcaagccgacctgatcagtctcggcaaggtcgttttggctctggcctgcaactcacttgccggtatccaacgggagaacttacagaaggccatggaactcgtaacaatcaattacagctctgacctgaaaaacttaattctgtatctgctcaccgatcaaaatcgaatgcggagtgtcaacgatatcatgcccatgatcggagcaagattttatactcagctcgacgcagctcaaatgcgaaatgacgtcatcgaagaagacctagcaaaagaggtacagaatggccgtctattccggctgctggccaagttgggcaccattaatgaaagacccgaatttcagaaggaccctacatggagcgaaaccggggataggtatttgttgaagctctttcgtgaccatctgtttcaccaggttactgaggcaggagccccatggatagacttaagccacatcatatcatgtcttaacaaattggatgctggagttccggagaagatttcgctcatctcacgggacgagaagagcgtgcttgttgtgacgtattctgacctgaaaagatgcttcgaaaatacttttcaggagttgatcgccgctgccaacggccagttgtag

SEQ ID NO: 252018 - DNA, 2664 bp, Artificial Sequence
  derived and/or modified sequence
atgaacagcggaggcggtctgccaccaccgagcgctgccgcaagcccatcttcatctagcctggccgctgccgtagcagtggtagctcctcctggggtcggcggtgttcccggaggcgcagctgtgggtgtgaagctaaaatactgccggtactacgcaaaggataagacttgtttttatggagaagagtgccagttcctgcatgaggaccccgctgccggtgcagctcccggtctgggtctgcactcgaactcagtgcccctggccttggccggtgcacctgttgccggatttcctccgggtgctgtcgccggtggaggcgctggtccccctccaggcccaaagaaaccagacttaggtgacccaggtactggcgcagcagctggcggtggtggcagttctggtggcctggacggcccacgattggcgattcccggaatggacggcggagccctgaccgacacatcactgaccgactcctacttctctaccagtttcatcggcgtaaatggttttggcagtcccgtagagacaaagtaccctcttatgcagcgaatgaccaattcgtcttctagcccatcgctcctgaacgactcggctaagccatatagtgctcacgaccccctgacttcccctgccagttctctgtttaatgacttcggagctttaaacatttcacagcgacggaaaccacgtaaatacagactcggaatgctggaagaacgcctcgtcccgatgggctccaaagcacgcaaggcaaagaatcctatcggttgcctcgctgatcgctgcaagtctggggtccccatcaacatggtgtggtggaaccgcgtgaccgaaaacaatctccagacccccaaccccaccgcatctgaattcatccccaagggcggaagcacatctcggctgtctaacgtaagccagagtaacatgagcgctttttcgcaggttttctcccacccaagcatgggtagccctgctaccgccggtttagctcccggtatgagtctgtctgccggttcaagccctctgcattcacccaaaataaccccccatacctcccctgcccctagaagaaggagtcacacacccaatcccgcttcctacatggtaccaagcagtgcctccactagcgtgaacaatccagttagccaaacaccaagtagcggccaggtgatccaaaaggaaacggtgggcggtacgacatatttctacacggatactacacctgcgcctttgactggaatggtcttccccaactaccatatctatccgccaaccgcaccacatgtcgcttatatgcagcctaaagccaatgcccctagcttctttatggctgatgagctgcggcaggaacttataaaccggcacctcattacgatggcccagatagaccaggcggacatgccagccgtgccgaccgaggttgactcgtaccattcactgttccccctcgaacccctgccgcctcccaacaggattcagaaaagctcaaatttcggatacattacaagctgctataaagccgttaatagcaaagacgacctgccgtattgcctacggcgtatccatgggttccggttggtgaacacgaaatgtatggtacttgtggatatgtggaagaaaattcagcattccaatatcgtgacattaagagaggtgttcaccacgaaggcttttgcagaaccctccctggtttttgcttacgattttcacgccggaggagagactatgatgagccggcattttaacgatccaaatgcagacgcgtactttaccaaaagaaaatgggggcagcatgaaggcccactgcctaggcagcacgccggattactccccgagagtctgatatgggcatacattgttcagctgtctagcgccttgcggactatccacactgccggacttgcctgtcgagtaatggacccaaccaagatcctgatcactggcaaaacccggctgagggttaattgtgtaggcgtatttgacgtgttgactttcgataacagtcagaacaataatcccctggctcttatggctcagtatcagcaagccgaccttatctctctgggcaaagtcgtgctcgcacttgcctgcaacagcctagccggtattcagagggagaatctgcagaaagccatggaattagtgacaattaactactcatccgatctgaagaacctgattctctacctgctgaccgatcaaaaccgcatgagaagtgtgaatgacatcatgcccatgatcggcgctcgattctatacccagttggacgccgctcaaatgcggaacgatgtgattgaagaagaccttgcaaaggaagtgcagaacggacggttgtttagactccttgccaaactgggtacgatcaatgagaggcctgagttccagaaagaccctacttggagcgagaccggagatcgctaccttttaaaacttttccgcgatcatcttttccatcaggtaacagaagctggcgctccatggatcgatctgagccatataatatcctgtctgaataaactcgacgctggggttcccgagaaaattagtttgatttctcgtgatgagaagtccgtcttggtggtgacttatagcgatctgaaaagatgctttgagaacacattccaggagctgatagcagccgctaatggtcaactgtag

SEQ ID NO: 252019 - protein, 882 aa, Artificial Sequence
  derived and/or modified sequence
MAVRSRRPWMSVALGLVLGFTAASWLIAPRVAELSERKRRGSSLCSYYGRSAAGPRAGAQQPLPQPQSRPRQEQSPPPARQDLQGPPLPEAAPGITSFRSSPWQQPPPLQQRRRGREPEGATGLPGAPAAEGEPEEEDGGAAGQRRDGRPGSSHNGSGDGGAAAPSARPRDFLYVGVMTAQKYLGSRALAAQRTWARFIPGRVEFFSSQQPPNAGQPPPPLPVIALPGVDDSYPPQKKSFMMIKYMHDHYLDKYEWFMRADDDVYIKGDKLEEFLRSLNSSKPLYLGQTGLGNIEELGKLGLEPGENFCMGGPGMIFSREVLRRMVPHIGECLREMYTTHEDVEVGRCVRRFGGTQCVWSYEMQQLFHENYEHNRKGYIQDLHNSKIHAAITLHPNKRPAYQYRLHNYMLSRKISELRYRTIQLHRESALMSKLSNTEVSKEDQQLGVIPSFNHFQPRERNEVIEWEFLTGKLLYSAAENQPPRQSLSSILRTALDDTVLQVMEMINENAKSRGRLIDFKEIQYGYRRVNPMHGVEYILDLLLLYKRHKGRKLTVPVRRHAYLQQLFSKPFFRETEELDVNSLVESINSETQSFSFISNSLKILSSFQGAKEMGGHNEKKVHILVPLIGRYDIFLRFMENFENMCLIPKQNVKLVIILFSRDSGQDSSKHIELIKGYQNKYPKAEMTLIPMKGEFSRGLGLEMASAQFDNDTLLLFCDVDLIFREDFLQRCRDNTIQGQQVYYPIIFSQYDPKVTNGGNPPTDDYFIFSKKTGFWRDYGYGITCIYKSDLLGAGGFDTSIQGWGLEDVDLYNKVILSGLRPFRSQEVGVVHIFHPVHCDPNLDPKQYKMCLGSKASTFASTMQLAELWLEKHLGVRYNRTLS

SEQ ID NO: 252020 - DNA, 2649 bp, Artificial Sequence
  derived and/or modified sequence
atggctgtccggtccaggcgaccatggatgagcgtggcactgggactggtgctgggctttaccgctgcctcatggctaattgctcctagagttgcagagctatccgaacggaaacgtcggggatcctcgctgtgctcttattatggccgaagcgccgccggacctcgcgccggtgcccagcagccgctacctcagcctcagtcccggcctcggcaagaacagtccccgccaccggctcgtcaggatctgcagggcccacctctgccagaagctgcccccggcattaccagcttccgtagtagcccctggcaacagcccccacctctccagcagagacgacgagggcgagagccagagggcgctaccggattgcccggtgcaccagctgccgagggggagcccgaggaggaggacggcggtgcggctggccagcgccgtgatggtcgcccgggtagctctcacaacggctcaggagacgggggcgcagccgccccaagcgctcgcccccgagacttcttgtatgtcggggtgatgacggctcagaagtatctaggctcccgagccttggctgctcaaaggacttgggcccggttcatccccggccgggtagaattcttttcttcccagcagccgcctaatgcagggcagccccctccaccactgcccgtaatagcactccctggggttgatgatagctacccccctcagaaaaaatcttttatgatgataaagtacatgcatgaccattatctggataaatacgagtggttcatgagggccgacgacgacgtctacatcaagggggacaaacttgaggaattcttgcgtagcctgaactcttctaaacccctttatcttggccagactggcctgggcaacattgaagagcttgggaagctcggacttgagcccggcgagaacttctgtatgggaggccccggaatgatcttctccagagaggtgctgcgcagaatggtgccccatatcggggagtgtttgcgcgaaatgtacaccactcacgaggacgttgaagtgggcaggtgtgtgagacgatttggcggaacccagtgtgtgtggtcgtacgagatgcaacaactgttccatgagaactacgaacataatcggaaaggatatatccaggatttgcacaactcaaagatccacgcggctataacactgcacccaaacaaacggcctgcctaccaataccgcctccataactatatgctgtcgcggaaaatctctgaattacgctataggacgattcagctccatagggaatctgccctcatgtcgaaactgtcgaacaccgaggtgtctaaagaagatcagcaactcggagtcatcccttcctttaaccattttcaaccaagagagagaaatgaggtgatcgaatgggaatttctcactggaaagctcctgtatagtgccgcggagaaccaaccaccacgacagagcttgtcctccattctacgaaccgctcttgacgacaccgttttacaggtaatggagatgattaatgagaatgcaaagagccgcggcaggttgatagatttcaaggagatccaatacggttatcgtcgggtgaaccccatgcacggggtagagtacattctggacctgctcctgttatacaaacgccacaaaggccgcaaactcacggtaccagtgcgaaggcacgcttacctccaacagctcttctccaaaccctttttccgggaaaccgaggaactggacgtgaactccctggtcgaatcaatcaatagtgaaacacagtccttcagcttcataagcaattccctcaaaatcctttcttctttccagggcgccaaggagatggggggacataatgagaaaaaggtgcacatcctggtgccactgattggccggtacgatattttcttgcgctttatggaaaattttgaaaacatgtgtctgatcccaaaacaaaacgtgaagctcgtgattatcctcttcagtcgcgactcaggccaggactccagcaagcacatcgagctcattaagggataccaaaacaaataccccaaggcagagatgactctgatcccaatgaagggcgaattcagccgcgggttaggcctggagatggcttctgcccagttcgataacgatactcttcttctattttgtgatgtagatctgatcttcagagaggactttctccagcgatgcagggacaacaccattcaggggcagcaggtctactaccccattattttcagccagtatgaccccaaggtgacaaacggagggaatccccccaccgacgactactttattttcagcaagaaaactggcttttggagagactacggctatggtattacttgtatctacaagtcagatctgctgggagcagggggcttcgatacgtctatacaaggctggggcttggaagacgttgacttgtacaataaagtaatcctgtccgggctcaggccatttcgcagccaggaggtgggtgtggtgcacatcttccatcccgtgcactgtgaccccaacttagaccctaaacagtacaagatgtgtttaggaagcaaggcctcaacgttcgcttctaccatgcaactggcggagctatggctggaaaagcatctgggagtacggtataacaggacgttatcatag

SEQ ID NO: 252021 - DNA, 2649 bp, Artificial Sequence
  derived and/or modified sequence
atggctgtgcgcagccggcggccctggatgtctgtggccctgggcctggtgctgggcttcaccgctgcctcctggctgattgccccccgggtggccgagctgtctgagaggaagagaagaggcagcagcctgtgcagctactacggccgctctgctgctggccccagggctggggcccagcagcccctgccccagccccagagccggccccggcaggagcagagccccccaccagcccggcaggacctgcagggcccccccctgcctgaggccgcccctggcatcaccagcttccgcagcagcccctggcagcagcccccacccctgcagcagaggagaagaggccgggagcctgagggcgccaccggcctgcccggggccccagctgctgagggggagcctgaggaggaggatggaggagctgctggccagaggagagatggccggcccggcagcagccacaatggaagtggagatggaggagctgctgcccccagcgcccggccccgggacttcctgtatgtgggcgtgatgacagcccagaagtacctgggcagccgggccctggccgcccagaggacctgggcccgcttcatccctggccgggtggagttcttcagcagccagcagcccccaaatgccggccagcccccaccacccctgcccgtcatcgccctgcccggggtggatgacagctacccaccccagaagaagagcttcatgatgatcaagtacatgcatgaccactacctggacaagtatgagtggttcatgagagcagatgatgatgtgtacatcaagggggacaagctggaggagttcctgcggagcctgaacagcagcaagcccctgtacctgggccagacaggcctgggcaacatcgaggagctgggcaagctgggcctggagcccggggagaacttctgcatgggcggccctggcatgatcttcagccgggaggtgctgcggaggatggtgccccacatcggagaatgtctgcgggagatgtacaccacccatgaagatgtggaggtgggccgctgtgtgagaagatttggaggcacccagtgtgtgtggagctatgagatgcagcagctgttccatgaaaattatgagcacaacaggaagggctacatccaggacctgcacaacagcaagatccatgctgccatcaccctgcaccccaacaagaggcctgcctaccagtaccgcctgcacaactacatgctgagcaggaagatcagcgagctgcgctaccgcaccatccagctgcaccgggagagcgccctgatgagcaagctgagcaacacagaggtgtccaaggaggaccagcagctgggcgtcatccccagcttcaaccacttccagccccgggagagaaatgaagtcatcgagtgggagttcctgaccgggaagctgctgtacagcgctgctgagaaccagcccccccggcagagcctgagcagcatcctgaggacagccctggatgacacagtgctgcaggtgatggagatgatcaatgaaaatgccaagagccggggccgcctgattgacttcaaggagatccagtatggctacagaagagtgaaccccatgcatggagtggagtacatcctggacctgctgctgctgtacaagaggcacaagggcaggaagctgactgtgcctgtgagaagacatgcctacctgcagcagctgttcagcaagcccttcttccgggagacagaggagctggatgtgaacagcctggtggagagcatcaacagcgagacccagagcttctccttcatcagcaacagcctgaagatcctgagcagcttccagggcgccaaggagatgggcggccacaatgagaagaaggtgcacatcctggtgcccctcatcggccgctatgacatcttcctgcgcttcatggagaactttgagaacatgtgcctgatccccaagcagaatgtgaagctggtgatcatcctcttcagccgggacagcggccaggacagcagcaagcacatcgagctgatcaagggctaccagaacaagtaccccaaggccgagatgaccctcatccccatgaagggggagttcagccggggcctgggcctggagatggccagcgcccagtttgacaatgacaccctgctgctcttctgtgatgtggacctgatcttccgggaggacttcctgcagcgctgccgggacaacaccatccagggccagcaggtgtactaccccatcatcttcagccagtatgaccccaaggtgaccaacggcggcaaccccccaacagatgactacttcatcttcagcaagaagacaggcttctggagggactatggctacggcatcacctgcatctacaagagtgacctgctgggcgccggcggctttgacaccagcatccagggctggggcctggaggatgtggacctgtacaacaaggtgatcctgagcggcctgcggcccttccgcagccaggaggtgggcgtggtgcacatcttccaccctgtgcactgtgaccccaacctggaccccaagcagtacaagatgtgcctgggcagcaaggccagcacctttgccagcaccatgcagctggccgagctgtggctggagaagcacctgggcgtgcgctacaacagaaccctgtcctag

SEQ ID NO: 252022 - DNA, 2649 bp, Artificial Sequence
  derived and/or modified sequence
atggccgtgcggagccggcggccctggatgagcgtggccctgggcctggtgctggggttcacagcagcctcgtggctcattgcaccaagagtggccgagctaagcgaaagaaagaggcgagggagttctctttgctcgtattatggccgctctgctgctgggcccagggccggggctcagcagcctctcccccaacctcagagtcgacccaggcaggaacagagccccccgcccgctcgccaggatctgcaggggcctcccctgcccgaggctgcccctggaattacaagtttccgcagcagtccatggcagcaacctccacccctgcagcagcggcgtagggggcgcgagcctgaaggtgcaaccggactgcctggtgcccctgccgccgagggagaacccgaagaggaagatggtggcgctgcagggcagaggcgtgacggaagacccggatcttctcacaacggctccggagacggaggggctgctgcaccgagtgctaggccccgagacttcctctacgtgggcgtgatgaccgcgcagaaatacctggggagcagggccctcgccgcccagagaacctgggcccggttcatccctgggagggtcgagtttttctccagccagcagccaccaaacgcaggccaacctccccctcctctgcctgtgatcgcactgcccggagtggacgacagttaccccccacaaaaaaaatcattcatgatgatcaagtatatgcacgaccactacctggacaagtacgagtggtttatgcgggcagacgatgatgtttacattaaaggcgacaaattggaggagtttctgcgaagccttaactcatccaaacctctgtacttaggacagacaggcctaggcaatatcgaggagctgggcaaattggggttagagcccggggaaaatttctgcatgggcggaccgggtatgatttttagtcgggaggtgttgcgacgcatggtcccccacataggcgaatgtctgcgtgaaatgtacaccactcacgaagacgtagaggtaggcaggtgcgtcaggagattcgggggtacgcagtgtgtctggagttatgaaatgcaacagctgttccacgagaattatgaacacaatcgcaaagggtacattcaggacctccataactccaaaatccatgcagctatcacccttcaccctaacaaacggcccgcctatcaataccggctgcataattacatgctcagccgaaaaatctcagaactcaggtaccgcacaattcagctgcatcgcgaatctgcactgatgagcaagctctcaaacacggaggtgagcaaggaagaccaacagctcggggtgataccgagctttaatcactttcagccccgggagcgcaatgaggttatcgaatgggagttcttgaccggcaaattactgtactccgccgcagaaaaccagcccccacgccagagtttgtcatccattctgaggacggctctcgatgacacagtgcttcaggtgatggagatgatcaatgagaatgcaaagagccggggccgcctaatagatttcaaagaaattcagtatggatatcgacgagttaaccctatgcacggggttgaatatatactcgacctgctgttactgtacaaacggcacaaaggaagaaaactcactgttcctgtgagacgccacgcgtatctgcaacaactattctccaagccattctttagggagacggaagaactcgacgtaaatagcttggtcgaaagtatcaatagcgaaacacagagtttctcttttatctcgaatagcttgaaaatcctctcctcattccagggagccaaagagatggggggccataacgaaaagaaagtgcacatcctcgtgcccctcatcggacggtacgacatctttcttcgctttatggagaacttcgagaatatgtgtctaattccgaagcagaatgtgaaactggtgatcatcctcttcagccgagacagcggccaggatagttcaaagcatattgagctgatcaaagggtatcaaaataaatatcccaaagccgaaatgactctgatcccaatgaagggcgagttttcacgcggactgggtctggagatggccagcgcccaattcgacaacgacaccctgctcctgttctgtgatgttgacctgatcttcagggaggatttcctgcaaaggtgccgagataataccatccaaggacagcaggtgtactacccgataattttctctcaatacgatcccaaggtcaccaatggcggcaaccccccaaccgatgactactttattttctccaagaagaccgggttctggcgcgactacggatacggtatcacatgtatctacaaatctgaccttttgggcgctggcggattcgacaccagcatccagggttggggactcgaggacgtggacctgtacaataaagtgatcttgtccggtctaagacccttccggtctcaagaggtgggcgtggtgcatatctttcatcccgtgcactgtgaccctaatctggatcccaagcaatacaaaatgtgtctaggcagcaaggcttctacattcgcttcaacaatgcagctagccgaactctggcttgaaaaacacttgggcgtaagatacaatcggacactgtcctag

SEQ ID NO: 252023 - DNA, 2649 bp, Artificial Sequence
  derived and/or modified sequence
atggccgtacgctcccgcaggccctggatgtcagtcgccctgggcttggtgttaggatttaccgctgcatcctggctaattgctcctcgcgttgcagaactctctgagaggaagcgcagaggttcctcactttgctcctactatggcagatcggcagctgggcctcgggctggcgctcagcaaccgctgccccaaccacagagccgcccacgtcaggagcagagtcccccacccgctaggcaggatttgcagggacctccacttccagaagctgccccagggatcacatccttcaggtcctctccatggcaacaacctccccctctccagcaacgcagacgaggcagggaaccagagggcgcaactggtttgcctggcgcacctgccgctgagggcgagccagaagaagaagatggaggcgcagcaggtcagcggagggacgggaggccgggatcaagccataacggttccggggacggcggtgcagcggctccaagtgctcgtcccagggactttctgtatgtgggagtcatgaccgctcaaaagtacctgggcagtcgggcattggctgcccagcgaacttgggccagattcatccctgggagggtcgaattcttcagcagtcagcagcccccaaatgcaggacagccaccgcctcccttgccagtgattgctctccctggagtggacgacagctaccctccccaaaagaagagcttcatgatgattaagtatatgcacgatcactatttagataagtatgagtggttcatgcgcgctgatgacgacgtgtatatcaaaggtgataaactagaggaattcttacgatccctgaactctagcaaacccctgtacttaggccagaccggcctgggaaatattgaggagttgggcaaactaggcctggaaccaggagagaatttttgtatgggtgggccagggatgatcttcagccgagaggtgctccgccgaatggtaccccatattggcgagtgcttgagagaaatgtatacgactcatgaagacgtcgaagtggggagatgcgtacgccgtttcggcggtacccagtgcgtctggagttatgagatgcagcagctcttccacgagaattatgaacacaataggaaaggctatattcaagatctgcacaactccaaaattcacgcggctatcacattgcaccctaacaaacgtcctgcttaccagtaccggctccataactatatgctctcccgaaagattagtgagctacgttacaggaccatccagctacatagagagtcggccttgatgtccaaactgagcaataccgaggtgtctaaggaggatcagcagctaggagttatccctagttttaatcactttcagccccgagagagaaacgaggttatcgaatgggagttcctgacaggcaaactcttgtactctgccgcagaaaaccaacctcctagacagtctctgagcagtatcctgagaaccgcattagatgacaccgttttacaagtgatggagatgattaacgaaaatgccaagtcacgtgggagactcattgactttaaagaaattcagtatggttacagacgcgtaaatccaatgcacggcgttgaatatatattagacttgttgctactttacaagaggcataaaggcaggaagcttaccgtccccgtacggcgacatgcctacctccagcagctcttttccaagcccttcttcagggaaaccgaggagttggatgtcaactctctggtggagtcaatcaactcggagacccagtcctttagttttattagcaactccctaaagattctcagtagctttcaaggtgcaaaggagatgggtggacacaacgagaagaaggtgcatatactggttcccttaattggtcggtacgatatctttctgaggttcatggaaaacttcgagaatatgtgtcttattccaaagcagaatgtgaaactagttattatcttattttcccgcgacagcggccaggatagttcaaaacacatcgagcttattaaaggctatcagaataagtatcctaaggctgagatgacgctcattcctatgaaaggagagttctcaagggggctgggcctggaaatggcatctgctcagttcgacaacgacacactcctgcttttctgtgacgtcgacctgattttccgggaagacttcctgcagcggtgcagggataatacaatccagggacagcaggtatactaccccatcatcttcagtcagtacgaccccaaggtgactaacggtggcaaccccccaactgacgactatttcattttcagcaagaaaactgggttttggagagattatgggtatggaatcacgtgtatctacaagtctgacctcctgggtgcaggagggttcgacacctcaattcaagggtggggactggaagatgttgatctgtacaacaaagtcatcctctccggtctccgacctttccggtcccaggaagtgggagtcgtgcatatctttcaccctgtgcactgcgaccctaacctggaccctaagcagtataaaatgtgcctaggcagcaaagcaagcacttttgccagtaccatgcagttagccgaattgtggctcgaaaagcatctgggcgtgcgttataacagaaccctttcatag

SEQ ID NO: 252024 - DNA, 3850 bp, Artificial Sequence
  derived and/or modified sequence
gggtggcagcctaggagcggacgcgttgccgccgccgctgctcctcctcctcctcctgcagctcctccagctgccgctgctgccgccgctgccgccaccgccgccgccgggagaagtttcactcccgacccttgctcggagccccggcccagagctgagcgggagcccggcaggcagctgcagcccgcggcagtcgaggcgtccgcggcgcttcgacctccagccggtgtcggcgcctaggcggccggctgcggccgcggctgggggcgcaaaggcggaggaggggcgggtgtgagccggggaaaccgcgtgccgcgccgcgacagcccagcgagcgtccgcgcccgggacagccgcgatggctgtgcgctctcgccgcccgtggatgagcgtggcattagggctggtgctgggcttcaccgccgcgtcctggctcatcgcccccagggtggcggagctgagcgagaggaagagacgtggctccagcctctgctcctactacggtcgctctgctgctggcccccgcgccggcgctcagcagccgctcccccagccccagtcccgaccacggcaggagcagtcgccgccccccgcgcgccaggatctccaggggccaccgctgcccgaggcagcacccgggatcaccagttttcgaagcagcccctggcagcagccacctccgctgcagcagcggcggcgaggacgcgagcctgagggcgcgacggggcttcccggtgctccagcggccgagggggagcccgaggaggaggacgggggcgcggctgggcagcggagagacggccggccggggagtagccacaacggcagcggggacgggggcgctgccgccccgagcgcccgaccccgggacttcctgtacgtgggggtgatgaccgcgcagaagtacctgggcagccgcgcgctggccgcgcagcggacctgggcgcgtttcatcccgggccgcgtggagttcttttccagccagcagccccccaacgccggccagcccccgccacccctgcctgtcatcgcgctaccgggtgtggacgactcctatcctccccagaaaaagtccttcatgatgatcaagtacatgcacgaccactacctggacaagtatgagtggttcatgcgcgccgacgacgatgtctacatcaaaggtgataaattagaagagtttcttagatcgctaaacagcagtaagcctctctacctgggacagactggcctggggaatattgaagagcttggaaagctgggactggagcctggggaaaacttctgtatgggaggacctggcatgatctttagccgagaagttctcaggaggatggtgccacatattggtgaatgccttagagaaatgtacacgactcatgaggatgtggaagtaggaagatgcgttcgccgttttggtgggactcagtgtgtctggtcttacgagatgcaacaactgttccatgaaaattatgaacacaatcggaagggttacatccaagaccttcacaatagcaaaatccatgcagccataacacttcatcccaacaaaaggcctgcataccaatacaggctgcataattacatgctcagccgcaaaatttctgaacttcgctaccgcaccatccagctccacagggaaagtgccctgatgagcaagctcagtaacacagaagtgagcaaagaggaccagcagctgggagtgataccttctttcaaccacttccagcctcgggagagaaatgaagtgatagaatgggagttcctgacagggaagcttctatactcagcagctgagaaccagccccctcgacagagcctcagtagcattttaagaacagcactggatgataccgtcctacaggtgatggagatgatcaatgagaatgccaagagcagaggacggctcattgacttcaaggaaattcagtatggctaccgcagagttaaccccatgcacggggtggagtacattttggatttactccttttatacaaaagacacaagggaaggaaactgactgtgccagtgagacgtcatgcctatcttcagcagttgttcagcaagcctttcttcagagagaccgaagagctagatgtcaacagtcttgtggagagtattaacagtgaaactcagtcattctcctttatatctaattctttaaagatattatcttcttttcaaggtgccaaagaaatgggagggcacaatgaaaagaaagtacacattctcgttcctctcatcggaaggtatgacattttcttgagattcatggagaactttgaaaacatgtgtcttatcccaaagcagaatgtaaagttggtcattatccttttcagtagggattctggccaagactccagcaagcatattgagctgataaaagggtaccagaacaagtaccccaaagcagaaatgaccctgatcccaatgaagggagagttttccagaggtcttggtcttgaaatggcttctgcccagtttgacaatgacactttgctgctattttgtgatgttgacttgatcttcagagaagattttctccaacgatgtagagacaatacaattcagggacaacaggtgtactatcccatcatctttagccagtatgacccaaaggtaacaaacgggggaaatcctcccactgatgattacttcatattctcaaaaaagactggattttggagagactatggatatggcatcacctgtatttacaaaagtgatcttctaggtgcaggtggatttgatacctcaatacaaggctggggactagaagatgtagatctctacaataaagtcattctatctggcttaaggccattcagaagccaagaagtaggagtggtgcatattttccatccagttcattgtgatcctaacttggaccctaagcagtataagatgtgcttaggatccaaggcaagtactttcgcctcaaccatgcaactggctgaactctggcttgaaaaacatttaggtgtcaggtacaatcgaactctctcctgacagtccaggcaacacattttgccttttttaaggggagtttacctcattgttggttgttgttatttttattgtattattgttattttattattattattgttataattttattttgttgtcctggtcttaaactactcttggttgtcttcctaagggtgtttgttgacctcaagcaagaagagtctgcagttcactgatgtttcagatttctactgaagtcaatatgttattacttttatataactttatttgagattgagttaaatcatagcaatcaaatgacttttgaaacgcattcatcacaagagacagcttagaagaatgttctcttggggcttaaagatgcaatatcgacttttatttggtttctcaaattcaatgtgatacaaatatttactggtgaaaggtaccacaaaagtgctttatgcttcctatggggaagggactctgtaacataaacttgagttttgtaatttatacaaggacttaaatatataaacaataattttcttcatctttagaatttttaaagtaaatgaatacctatgattgtatgtttattttttaaaaaaagttttaaaaattgaggagttttgttccacaagcaaccggtactggctaccctggtcttatgacaattatgagctcctcacaactgtctgctataaatgcgaatgaactttattttctcaaggaaatatgatttaattaaatattcatgtacattttagaagctttatgaaacaatgtccttcatttgctggcaagaagataaaatatgacagaacctgtttatttaaaataaaacacaggtatagcagtattctttttcaaaaacactga

SEQ ID NO: 252025 - DNA, 2649 bp, Artificial Sequence
  derived and/or modified sequence
atggccgtgagaagcagaagaccctggatgagcgtggccctgggcctggtgctgggcttcaccgccgccagctggctgatcgcccccagagtggccgagctgagcgagagaaagagaagaggcagcagcctgtgcagctactacggcagaagcgccgccggccccagagccggcgcccagcagcccctgccccagccccagagcagacccagacaggagcagagccccccccccgccagacaggacctgcagggcccccccctgcccgaggccgcccccggcatcaccagcttcagaagcagcccctggcagcagcccccccccctgcagcagagaagaagaggcagagagcccgagggcgccaccggcctgcccggcgcccccgccgccgagggcgagcccgaggaggaggacggcggcgccgccggccagagaagagacggcagacccggcagcagccacaacggcagcggcgacggcggcgccgccgcccccagcgccagacccagagacttcctgtacgtgggcgtgatgaccgcccagaagtacctgggcagcagagccctggccgcccagagaacctgggccagattcatccccggcagagtggagttcttcagcagccagcagccccccaacgccggccagccccccccccccctgcccgtgatcgccctgcccggcgtggacgacagctaccccccccagaagaagagcttcatgatgatcaagtacatgcacgaccactacctggacaagtacgagtggttcatgagagccgacgacgacgtgtacatcaagggcgacaagctggaggagttcctgagaagcctgaacagcagcaagcccctgtacctgggccagaccggcctgggcaacatcgaggagctgggcaagctgggcctggagcccggcgagaacttctgcatgggcggccccggcatgatcttcagcagagaggtgctgagaagaatggtgccccacatcggcgagtgcctgagagagatgtacaccacccacgaggacgtggaggtgggcagatgcgtgagaagattcggcggcacccagtgcgtgtggagctacgagatgcagcagctgttccacgagaactacgagcacaacagaaagggctacatccaggacctgcacaacagcaagatccacgccgccatcaccctgcaccccaacaagagacccgcctaccagtacagactgcacaactacatgctgagcagaaagatcagcgagctgagatacagaaccatccagctgcacagagagagcgccctgatgagcaagctgagcaacaccgaggtgagcaaggaggaccagcagctgggcgtgatccccagcttcaaccacttccagcccagagagagaaacgaggtgatcgagtgggagttcctgaccggcaagctgctgtacagcgccgccgagaaccagccccccagacagagcctgagcagcatcctgagaaccgccctggacgacaccgtgctgcaggtgatggagatgatcaacgagaacgccaagagcagaggcagactgatcgacttcaaggagatccagtacggctacagaagagtgaaccccatgcacggcgtggagtacatcctggacctgctgctgctgtacaagagacacaagggcagaaagctgaccgtgcccgtgagaagacacgcctacctgcagcagctgttcagcaagcccttcttcagagagaccgaggagctggacgtgaacagcctggtggagagcatcaacagcgagacccagagcttcagcttcatcagcaacagcctgaagatcctgagcagcttccagggcgccaaggagatgggcggccacaacgagaagaaggtgcacatcctggtgcccctgatcggcagatacgacatcttcctgagattcatggagaacttcgagaacatgtgcctgatccccaagcagaacgtgaagctggtgatcatcctgttcagcagagacagcggccaggacagcagcaagcacatcgagctgatcaagggctaccagaacaagtaccccaaggccgagatgaccctgatccccatgaagggcgagttcagcagaggcctgggcctggagatggccagcgcccagttcgacaacgacaccctgctgctgttctgcgacgtggacctgatcttcagagaggacttcctgcagagatgcagagacaacaccatccagggccagcaggtgtactaccccatcatcttcagccagtacgaccccaaggtgaccaacggcggcaacccccccaccgacgactacttcatcttcagcaagaagaccggcttctggagagactacggctacggcatcacctgcatctacaagagcgacctgctgggcgccggcggcttcgacaccagcatccagggctggggcctggaggacgtggacctgtacaacaaggtgatcctgagcggcctgagacccttcagaagccaggaggtgggcgtggtgcacatcttccaccccgtgcactgcgaccccaacctggaccccaagcagtacaagatgtgcctgggcagcaaggccagcaccttcgccagcaccatgcagctggccgagctgtggctggagaagcacctgggcgtgagatacaacagaaccctgagctag

SEQ ID NO: 252026 - protein, 163 aa, Artificial Sequence
  derived and/or modified sequence
MSFNCSTRNCSSRPIGGRCIVPVAQVTTTSTTDADCLGGICLPSSFQTGSWLLDHCQETCCEPTACQPTCYRRTSCVSNPCQVTCSRQTTCISNPCSTTYSRPLTFVSSGCQPLGGISSVCQPVGGISTVCQPVGGVSTVCQPACGVSRTYQQSCVSSCRRTC

SEQ ID NO: 252027 - DNA, 492 bp, Artificial Sequence
  derived and/or modified sequence
atgtccttcaactgctccactagaaattgcagttcccgccccattggaggacgatgcatcgtccccgtcgcacaagtcactaccacatcgacgacagacgccgattgtttaggagggatttgtcttccgtcttcttttcagactggctcatggctcctggaccattgccaggaaacatgctgcgaacctacagcctgtcagcctacatgttacagacgaacctcatgtgtcagtaatccctgtcaagtcacttgcagccgccaaactacctgtatctctaatccttgttccaccacctactctagacccctcactttcgtctcatccggttgtcagcctttggggggcatcagctcagtgtgccagcctgtgggaggcataagcactgtatgtcagccagtcggaggcgtcagcactgtgtgtcagccagcttgcggcgtgtcaagaacataccagcagagttgcgtgtcatcatgcaggaggacgtgttag

SEQ ID NO: 252028 - DNA, 909 bp, Artificial Sequence
  derived and/or modified sequence
gcaagctacctgcagccctctgtctgacatcatgtccttcaactgctccacaagaaattgctcttccaggcccattggaggacgctgcattgttccagtggcccaagttaccacgacttccaccactgatgctgactgcctgggcggcatctgtttgcccagttccttccagactggctcttggctcctggaccactgtcaagagacctgctgtgagcccactgcttgccagccaacctgttaccggcgaacttcatgtgtctccaacccttgccaggtgacttgctctcgacaaactacctgtatttccaacccctgctcaactacctacagccggccgctcacctttgtctctagtggatgtcagcccctgggaggcatctccagtgtctgccaaccagtgggcggcatctctactgtctgccaaccagtgggaggagtctctactgtctgccagccagcctgtggggtctccaggacgtatcagcagtcctgcgtgtccagctgccgaagaacctgctaagtgtgtaggagccagtgagcgaatcaagactccacgacctgccagctgtttccaggatcttccagcatgctgcttgtccctgaatagctcttcatagctgacccttcttgtgaccgcctgactgctggctactatccatgcacacgctgtctttagcactctaaaatttttctggccagccctaagcttgttttaagggttgctcactggtgctgtgtatgcctctggatgtgtccagaagctttaccatccacaccccagtctctgatgcttttgacatgttttcaccttgctgctgtatctcctggcctctgcttttgtgtctcacaaaaacagagcttgtctcaccatgtatttctcaataaacctgcattagttggcattgc

SEQ ID NO: 252029 - DNA, 492 bp, Artificial Sequence
  derived and/or modified sequence
atgtccttcaactgcagcaccaggaactgcagcagccggcccatcggcggccgctgcatcgtgcctgtggcccaggtgaccaccaccagcaccacagatgctgactgcctgggcggcatctgcctgcccagcagcttccagacaggctcctggctgctggaccactgccaggagacctgctgtgagcccacagcctgccagcccacctgctacagaaggaccagctgtgtgagcaacccctgccaggtgacctgcagccggcagaccacctgcatcagcaacccctgcagcaccacctacagccggcccctgacctttgtgagcagcggctgccagcccctgggcggcatcagctctgtgtgccagcctgtgggcggcatcagcacagtgtgccagcctgtgggcggcgtgtccacagtgtgccagcctgcctgtggggtgtccaggacctaccagcagagctgtgtgagcagctgcaggaggacctgctag

SEQ ID NO: 252030 - DNA, 492 bp, Artificial Sequence
  derived and/or modified sequence
atgagcttcaactgcagcacccggaactgcagcagccggcccatcggtggaagatgtattgtccccgtggcacaagtcactacgacctccacaacggatgcagactgtctcggcggtatttgcctgccatcctcttttcagaccggatcatggttgctggaccattgccaggagacctgctgcgaacccacagcatgccagccaacgtgctaccggcggacatcctgcgtgagcaatccatgccaagttacctgctcaagacagaccacctgtatttcaaacccatgcagcactacgtactcacgacctctgacttttgtgtccagcggatgtcagcctctgggaggcatctcaagtgtttgccagccagtcggcggtatcagcaccgtctgccagcccgtggggggagtgagtacagtttgccagccagcctgcggagtcagtagaacctaccagcagagctgcgtgtccagctgtaggcggacctgctag

SEQ ID NO: 252031 - DNA, 492 bp, Artificial Sequence
  derived and/or modified sequence
atgtcatttaattgttccacgcgaaactgtagcagcaggcccatcggcggtcgatgcatagtcccagtggcccaggtgacaaccacaagcaccaccgatgccgactgcctaggcggaatatgccttcccagcagcttccagacaggctcttggcttctcgaccattgtcaggagacctgttgcgagccgaccgcttgtcagcctacatgttatcggcgaactagttgcgtgtccaacccctgtcaggtgacctgttcacgccagactacctgcatatccaacccctgcagtactacttactcaaggcccctgacatttgtgagctctgggtgtcagcccctgggaggtatctcttccgtctgccagcctgtcggtggaatcagtaccgtatgccagcccgtggggggagtctctacagtatgccagccagcttgcggcgtgagccgtacgtaccagcagtcttgcgtcagctcttgcaggagaacgtgctag

SEQ ID NO: 252032 - DNA, 492 bp, Artificial Sequence
  derived and/or modified sequence
atgagcttcaactgcagcaccagaaactgcagcagcagacccatcggcggcagatgcatcgtgcccgtggcccaggtgaccaccaccagcaccaccgacgccgactgcctgggcggcatctgcctgcccagcagcttccagaccggcagctggctgctggaccactgccaggagacctgctgcgagcccaccgcctgccagcccacctgctacagaagaaccagctgcgtgagcaacccctgccaggtgacctgcagcagacagaccacctgcatcagcaacccctgcagcaccacctacagcagacccctgaccttcgtgagcagcggctgccagcccctgggcggcatcagcagcgtgtgccagcccgtgggcggcatcagcaccgtgtgccagcccgtgggcggcgtgagcaccgtgtgccagcccgcctgcggcgtgagcagaacctaccagcagagctgcgtgagcagctgcagaagaacctgctag

SEQ ID NO: 252033 - protein, 774 aa, Artificial Sequence
  derived and/or modified sequence
MNPFYFHAVNIILHCLVTLVLMYTCDKTVFKNRGLAFVTALLFAVHPIHTEAVAGIVGRADVLACLLFLLAFLSYNRSLDQGCVGGSFPSTVSPFFLLLSLFLGTCAMLVKETGITVFGVCLVYDLFSLSNKQDKSSNGALCPRSPQQPGSPQPSSLPGHPHRENGKQQRFPHKGAWGGCHSPLPPEPKSSGFPVSPRAVWSMMRFLTYSYLLAFNVWLLLAPVTLCYDWQVGSIPLVETIWDMRNLATIFLAVVMALLSLHCLAAFKRLEHKEVLVGLLFLVFPFIPASNLFFRVGFVVAERVLYMPSMGYCILFVHGLSKLCTWLNRCGATTLIVSTVLLLLLFSWKTVKQNEIWLSRESLFRSGVQTLPHNAKVHYNYANFLKDQGRNKEAIYHYRTALKLYPRHASALNNLGTLTRDTAEAKMYYQRALQLHPQHNRALFNLGNLLKSQEKKEEAITLLKDSIKYGPEFADAYSSLASLLAEQERFKEAEEIYQTGIKNCPDSSDLHNNYGVFLVDTGLPEKAVAHYQQAIKLSPSHHVAMVNLGRLYRSLGENSMAEEWYKRALQVAHKAEILSPLGALYYNTGRYEEALQIYQEAAALQPSQRELRLALAQVLAVMGQTKEAEKMTNHIVSEETGCLECYRLLSAIYSKQENHDKALDAIDKALQLKPKDPKVISELFFTKGNQLREQNLLDKAFESYRVAVQLNPDQAQAWMNMGGIQHIKGKYVSARAYYERALQLVPDSKLLKENLAKLDRLEKRLQEVREKDQT

SEQ ID NO: 252034 - DNA, 2325 bp, Artificial Sequence
  derived and/or modified sequence
atgaaccccttctacttccacgccgtgaacatcatcctgcactgcctggtgaccctggtgctgatgtacacctgcgacaagaccgtgttcaagaacagaggcctggccttcgtgaccgccctgctgttcgccgtgcaccccatccacaccgaggccgtggccggcatcgtgggcagagccgacgtgctggcctgcctgctgttcctgctggccttcctgagctacaacagaagcctggaccagggctgcgtgggcggcagcttccccagcaccgtgagccccttcttcctgctgctgagcctgttcctgggcacctgcgccatgctggtgaaggagaccggcatcaccgtgttcggcgtgtgcctggtgtacgacctgttcagcctgagcaacaagcaggacaagagcagcaacggcgccctgtgccccagaagcccccagcagcccggcagcccccagcccagcagcctgcccggccacccccacagagagaacggcaagcagcagagattcccccacaagggcgcctggggcggctgccacagccccctgccccccgagcccaagagcagcggcttccccgtgagccccagagccgtgtggagcatgatgagattcctgacctacagctacctgctggccttcaacgtgtggctgctgctggcccccgtgaccctgtgctacgactggcaggtgggcagcatccccctggtggagaccatctgggacatgagaaacctggccaccatcttcctggccgtggtgatggccctgctgagcctgcactgcctggccgccttcaagagactggagcacaaggaggtgctggtgggcctgctgttcctggtgttccccttcatccccgccagcaacctgttcttcagagtgggcttcgtggtggccgagagagtgctgtacatgcccagcatgggctactgcatcctgttcgtgcacggcctgagcaagctgtgcacctggctgaacagatgcggcgccaccaccctgatcgtgagcaccgtgctgctgctgctgctgttcagctggaagaccgtgaagcagaacgagatctggctgagcagagagagcctgttcagaagcggcgtgcagaccctgccccacaacgccaaggtgcactacaactacgccaacttcctgaaggaccagggcagaaacaaggaggccatctaccactacagaaccgccctgaagctgtaccccagacacgccagcgccctgaacaacctgggcaccctgaccagagacaccgccgaggccaagatgtactaccagagagccctgcagctgcacccccagcacaacagagccctgttcaacctgggcaacctgctgaagagccaggagaagaaggaggaggccatcaccctgctgaaggacagcatcaagtacggccccgagttcgccgacgcctacagcagcctggccagcctgctggccgagcaggagagattcaaggaggccgaggagatctaccagaccggcatcaagaactgccccgacagcagcgacctgcacaacaactacggcgtgttcctggtggacaccggcctgcccgagaaggccgtggcccactaccagcaggccatcaagctgagccccagccaccacgtggccatggtgaacctgggcagactgtacagaagcctgggcgagaacagcatggccgaggagtggtacaagagagccctgcaggtggcccacaaggccgagatcctgagccccctgggcgccctgtactacaacaccggcagatacgaggaggccctgcagatctaccaggaggccgccgccctgcagcccagccagagagagctgagactggccctggcccaggtgctggccgtgatgggccagaccaaggaggccgagaagatgaccaaccacatcgtgagcgaggagaccggctgcctggagtgctacagactgctgagcgccatctacagcaagcaggagaaccacgacaaggccctggacgccatcgacaaggccctgcagctgaagcccaaggaccccaaggtgatcagcgagctgttcttcaccaagggcaaccagctgagagagcagaacctgctggacaaggccttcgagagctacagagtggccgtgcagctgaaccccgaccaggcccaggcctggatgaacatgggcggcatccagcacatcaagggcaagtacgtgagcgccagagcctactacgagagagccctgcagctggtgcccgacagcaagctgctgaaggagaacctggccaagctggacagactggagaagagactgcaggaggtgagagagaaggaccagacctag

SEQ ID NO: 252035 - DNA, 2325 bp, Artificial Sequence
  derived and/or modified sequence
atgaaccctttctatttccatgcagtgaacatcatccttcattgcttagttaccttagtgctcatgtatacctgtgacaaaaccgtgttcaagaaccgcggcttggcctttgtgacggctctgcttttcgccgtccaccccatccacacggaggcggtggccgggattgtgggaagggcggacgtgttggcttgcctactgttcttgctcgcttttctctcatacaacagaagcctggaccagggctgcgtgggaggttcattccccagcacagtgtcaccattcttcttgcttctctctctctttctgggaacctgtgcaatgttggtcaaggagacaggaattacagttttcggagtgtgcctggtgtatgatctgttttcgctttctaataaacaagataagtcgtcaaatggagctctgtgcccgagaagtccccagcagcctggatctccccagccttcctcgctgccgggccacccgcatagggaaaacggaaaacagcagaggttcccacacaagggcgcatggggcggctgtcactcccctctgccccctgagcccaaaagctccgggttcccagtctcccccagggccgtgtggtccatgatgaggttcctgacctacagttacctgttggccttcaacgtgtggctgctgcttgcacctgttaccctgtgctatgactggcaggtcgggtctatcccgctggtcgaaaccatctgggacatgagaaacctcgctactatttttctggccgtggtgatggcgctacttagtctccactgtctcgcggcattcaagcgcctggagcataaggaggtcttagtgggcctgctgtttctcgtgttcccgttcatccccgcgtctaacctgttttttagggtaggcttcgtcgttgcagagcgggttctgtacatgcccagcatgggctattgtatccttttcgttcacgggctgagcaaactgtgcacatggctgaatcggtgtggagctacgacactaatagtctcgactgtgctactcctcctgctgttcagctggaagacagtgaagcaaaatgaaatttggctatcaagggagagcctctttcgatcaggcgtgcaaacactccctcataacgccaaagttcattacaattatgcaaattttctgaaggaccagggcaggaataaggaggctatttatcactaccgcaccgccctgaagctctatcctcgccacgcctcagctctcaataatctcggcaccctcacacgggacaccgcggaggctaagatgtactatcaaagagctttacagctgcaccctcagcataatcgggccctctttaacttgggcaatctgctgaaatcacaagaaaaaaaagaagaggcaattaccctgctgaaggattctataaagtatggaccagagtttgccgacgcttactctagtctggccagtttgctggccgaacaggaacggtttaaggaagcagaggaaatttaccagactggcattaaaaattgccctgactcatcagatctgcacaacaactatggtgtgttcctagtagatacaggacttccagaaaaggccgtggcccactaccagcaggcaattaaactgtcaccaagtcaccacgtggcaatggtgaatctgggtaggctttatcggtccctgggcgagaacagcatggctgaggagtggtacaaacgggctctgcaggttgctcacaaagccgagatcctctcgcctctcggagctctgtattacaacaccggacggtatgaggaagcgctgcagatataccaagaggcagccgctttacagccctcccaacgcgagttacgcctggccctggctcaggttcttgctgtgatgggccagacaaaagaggccgagaagatgaccaatcatattgttagcgaagagactggatgcctcgagtgttatcggctcctgtctgcaatctacagtaagcaggagaaccatgataaagcgcttgacgccattgataaggctctgcaactgaagccgaaagatcccaaggtgatcagcgaacttttttttacaaaaggaaaccagttgcgggagcagaacctcctcgacaaagcattcgagagctatagggtggcagtccagctgaaccctgatcaggcgcaggcttggatgaatatgggcggaatacagcatatcaaggggaagtacgtgagtgcccgcgcatattacgagcgcgctctgcagctggtgcctgatagcaaactgctgaaggagaatctggctaagctggacaggctggagaaacggttacaggaagtgagggagaaagatcaaacatag

SEQ ID NO: 252036 - DNA, 2325 bp, Artificial Sequence
  derived and/or modified sequence
atgaaccccttctacttccacgctgtgaacatcatcctgcactgcctggtgaccctggtgctgatgtacacctgtgacaagacagtgttcaagaacagaggcctggcctttgtgacagccctgctgtttgctgtgcaccccatccacacagaggccgtggccggcatcgtgggccgggcagatgtgctggcctgcctgctcttcctgctggccttcctgagctacaacagaagcctggaccagggctgtgtgggcggcagcttccccagcacagtgagccccttcttcctgctgctgagcctcttcctgggcacctgtgccatgctggtgaaggagaccggcatcaccgtgtttggagtgtgcctggtgtatgacctcttcagcctgagcaacaagcaggacaagagcagcaatggagccctgtgccccaggagcccccagcagcccggcagcccccagcccagcagcctgcccggccacccccaccgggagaatggcaagcagcagcgcttcccccacaagggggcctggggcggctgccacagccccctgcccccagagcccaagagcagcggcttccctgtgagccccagggctgtgtggagcatgatgaggttcctgacctacagctacctgctggccttcaacgtgtggctgctgctggcccctgtgaccctgtgctatgactggcaggtgggcagcatccccctggtggagaccatctgggacatgaggaacctggccaccatcttcctggccgtggtgatggccctgctgagcctgcactgcctggccgccttcaagaggctggagcacaaggaggtgctggtgggcctgctcttcctggtgttccccttcatcccagccagcaacctcttcttccgggtgggctttgtggtggccgagcgggtgctgtacatgcccagcatgggctactgcatcctgtttgtgcacggcctgagcaagctgtgcacctggctgaacagatgtggggccaccaccctcatcgtgtccacagtgctgctgctgctgctcttctcctggaagacagtgaagcagaatgagatctggctgagccgggagagcctcttccgcagcggcgtgcagaccctgccccacaatgccaaggtgcactacaactatgccaacttcctgaaggaccagggcaggaacaaggaggccatctaccactacagaacagccctgaagctgtaccccaggcatgccagcgccctgaacaacctgggcaccctgacccgggacacagctgaggccaagatgtactaccagagggccctgcagctgcacccccagcacaacagagccctcttcaacctgggcaacctgctgaagagccaggagaagaaggaggaggccatcaccctgctgaaggacagcatcaagtatggccctgagtttgctgatgcctacagcagcctggccagcctgctggccgagcaggagcgcttcaaggaggccgaggagatctaccagacaggcatcaagaactgcccagacagcagtgacctgcacaacaactacggcgtcttcctggtggacaccggcctgcctgagaaggctgtggcccactaccagcaggccatcaagctgagccccagccaccacgtggccatggtgaacctgggccgcctgtaccgcagcctgggagaaaattccatggccgaggagtggtacaagagggccctgcaggtggcccacaaggccgagatcctgagccccctgggcgccctgtactacaacacaggccgctatgaggaggccctgcagatctaccaggaggccgccgccctgcagcccagccagcgggagctgcggctggccctggcccaggtgctggccgtgatgggccagaccaaggaggccgagaagatgaccaaccacatcgtgtctgaggagaccggctgcctggagtgctaccgcctgctgagcgccatctacagcaagcaggagaaccacgacaaggccctggatgccatcgacaaggccctgcagctgaagcccaaggaccccaaggtgatcagcgagctgttcttcaccaagggcaaccagctgcgggagcagaacctgctggacaaggcctttgagagctacagagtggccgtgcagctgaacccagaccaggcccaggcctggatgaacatgggcggcatccagcacatcaagggcaagtatgtgtctgcccgggcctactatgaaagagccctgcagctggtgcctgacagcaagctgctgaaggagaacctggccaagctggaccggctggagaagaggctgcaggaggtgcgggagaaggaccagacctag

SEQ ID NO: 252037 - DNA, 2325 bp, Artificial Sequence
  derived and/or modified sequence
atgaaccccttctacttccacgccgtgaacatcatcctgcactgcctggtgacgcttgtgcttatgtacacctgcgacaagactgtcttcaagaaccgcggactcgcatttgtcactgctctgctatttgcagtgcacccgattcacactgaggcagtcgcgggaatcgtgggtagggcagatgtgcttgcatgtctcctgttcctgttggctttcctaagttataaccgcagcctcgatcagggatgtgttgggggctcatttccaagtactgtgtctccatttttcctccttctttcactgtttttaggaacatgtgcaatgctggtgaaagagaccggcattaccgtgttcggagtttgtctggtgtacgacttgttcagtttgtctaataagcaggacaagtcttccaatggggccctgtgcccccgcagcccccagcagccagggtcccctcagccgagcagtctgcctggtcacccacaccgcgaaaatggaaaacaacagcgctttccacacaaaggcgcctggggaggctgccacagtccattaccgcccgagccaaagagttccggatttccagtgtctcctcgggccgtctggagtatgatgcgctttcttacttacagctatctcctggcatttaacgtttggctgctgctcgctcctgtaaccttgtgctacgactggcaggtggggtctattccgctggtggagacaatatgggatatgcgtaacttggcaacgatattcctcgcggtggtgatggcccttttgagtctgcattgcctggcggccttcaagagactggaacacaaggaggtcctagtcggactgttatttctcgtcttccctttcatccccgcaagcaatctcttttttcgcgtggggttcgtagtagctgaacgtgttctgtacatgccctctatggggtactgtatcctattcgtacatggcctctccaagctgtgcacttggctcaaccgctgtggcgcaacaacactcattgtatcaactgttctgctgctgcttctcttctcttggaagacagtgaagcaaaacgagatttggctgagcagggagagtctgttccggagtggcgtgcagacattgccacataacgccaaggtacattacaactatgccaactttctcaaagaccaagggcgcaataaggaggccatttaccattatcggactgcgctgaaactgtacccacgacatgcaagcgcccttaataatttgggaactctgactcgtgatacggccgaggcaaagatgtactaccaacgagcccttcagctccatcctcagcacaatcgggctctctttaaccttggtaacctcctgaagagtcaggagaaaaaagaagaagcgatcacattactgaaagactccataaaatatgggcccgagttcgcagacgcctacagtagtctcgcttctcttctggccgagcaggagagattcaaggaggctgaggagatctaccagaccggcattaaaaattgtcctgatagctcagacctgcacaacaattacggagtctttctggtcgatacggggctaccggagaaggccgttgcacactaccagcaggctattaagctctctccctctcatcacgttgctatggtgaacctgggcaggctgtatagaagtctgggcgagaattctatggccgaggaatggtataagcgggccctgcaagtagcacacaaggcggaaatcctgagcccattaggcgccctgtactataataccggacgttacgaggaggccctgcaaatttatcaggaggctgccgctctgcaaccctcacagcgggagttacgactcgcgcttgcccaggttctcgccgtcatgggccaaacaaaagaggctgagaagatgacaaaccacattgtgtccgaagaaacagggtgtctggagtgctatcgcttgctgagcgcaatctattctaaacaagagaaccacgacaaggcacttgatgccatagacaaggcgcttcagttaaagcccaaagacccgaaagtcatctccgaactgtttttcaccaagggtaaccagctccgtgaacagaacctattagacaaagcttttgagagctacagggtggccgttcagctgaatcctgatcaagcgcaagcttggatgaatatgggcgggatccagcacattaaaggaaaatatgtgtccgcgcgcgcgtactatgaaagagccctacagctggtccccgactcaaagttactcaaggaaaacctggcaaaattagaccgattggagaaacggttgcaagaagtgcgtgaaaaggatcagacatag

SEQ ID NO: 252038 - DNA, 2325 bp, Artificial Sequence
  derived and/or modified sequence
atgaaccccttctacttccacgcagtgaatataatcctgcactgtttggtaaccttagtgctgatgtatacctgcgataaaaccgttttcaagaatcgtggcctcgcatttgttacagccctattgttcgccgtccaccccatccataccgaggccgtggctgggattgtgggcagggccgacgtactggcgtgccttttgttcctgctggcctttctgtcatacaatcgatccctcgatcagggctgtgttgggggttcctttccttccaccgtatctccgttctttctgttactgagcctgttccttgggacgtgcgctatgctcgtcaaggagaccgggatcaccgtgtttggcgtatgcctcgtatatgaccttttcagcttgagtaataagcaggataagtcttcgaacggcgcactgtgccccaggtctccccagcagcctgggtcaccccaacccagctcactgcccggacaccctcaccgcgaaaacggcaaacagcagcgtttccctcataagggggcttggggcggatgccactccccgcttcctcccgagcctaaatccagcggttttcctgtatcgccgcgtgctgtttggtcaatgatgcgatttctaacatactcttacctgctggctttcaacgtgtggctgcttctggccccagtcacactatgctacgactggcaggtaggaagcatccctctagtggagactatttgggacatgagaaacctggcaacgatttttctggcagtagtcatggcattgctgtcgttacattgtctcgccgcattcaaacgactggaacacaaagaagttctggtaggtctactgtttctggtgttcccgttcattcccgcatcgaacctgtttttccgggtcgggttcgttgtcgcagagcgggtgttatatatgccatcaatgggctactgcattttattcgtccacggattatctaaactgtgtacttggctgaatagatgtggagctaccacccttattgtttccaccgttctcctcctgcttctgttcagctggaaaaccgtaaaacaaaatgaaatctggttaagtagggaaagtctgttccgcagcggtgtacagacccttccccataacgcgaaagtgcactacaattacgctaactttctgaaggatcaaggaagaaataaggaggcgatctatcattatagaaccgccctgaagctgtacccgagacatgcttccgcactcaataacctgggcactctcactagagacactgcagaagcaaagatgtattaccagcgtgccctacaactccacccccaacataacagggccttgtttaacctggggaatcttctcaagtcccaggagaaaaaggaggaagccattacgctgctcaaggatagcataaagtatgggcctgagttcgccgatgcctattcatcccttgcttcattgctcgcagagcaggagcgattcaaggaggcagaagagatctaccaaaccgggatcaagaattgtcccgattcctccgatctgcacaacaactatggggtcttcctggtcgataccggcctgccagagaaagctgtggcccactaccagcaggccatcaaactatccccctctcaccacgtggccatggttaacttgggcagactgtacaggtctctcggagaaaattcaatggctgaggagtggtacaagcgtgccctgcaagtggcccacaaagctgaaattctgagcccactgggagcattgtactataatacgggcaggtacgaagaagcacttcaaatataccaagaggccgctgccctgcagccttcacaacgggagctacgcctggccctggcacaagtgcttgccgttatgggccaaactaaagaagccgaaaagatgaccaatcatattgtgtcagaagaaacaggctgtctggagtgctatcgcctgctcagcgctatctacagtaagcaagagaaccacgataaggcgttggacgccattgacaaagcattacaattgaagcccaaagatccaaaagtgatatctgagctcttttttaccaaagggaaccagctaagggaacagaatctcctggacaaggctttcgaatcttatcgagttgccgtccagctgaaccccgatcaggcccaggcctggatgaatatgggtggtatccagcacattaagggaaagtacgtttcggccagggcatactacgagcgggcactacagttggtcccagattccaaactattaaaagagaatctggccaaactcgatcgcctggagaagcgcttgcaggaagtgcgagaaaaggaccagacttag

SEQ ID NO: 252039 - protein, 329 aa, Artificial Sequence
  derived and/or modified sequence
MDPQCTMGLSNILFVMAFLLSGAAPLKIQAYFNETADLPCQFANSQNQSLSELVVFWQDQENLVLNEVYLGKEKFDSVHSKYMGRTSFDSDSWTLRLHNLQIKDKGLYQCIIHHKKPTGMIRIHQMNSELSVLANFSQPEIVPISNITENVYINLTCSSIHGYPEPKKMSVLLRTKNSTIEYDGVMQKSQDNVTELYDVSISLSVSFPDVTSNMTIFCILETDKTRLLSSPFSIELEDPQPPPDHIPWITAVLPTVIICVMVFCLILWKWKKKKRPRNSYKCGTNTMEREESEQTKKREKIHIPERSDEAQRVFKSSKTSSCDKSDTCF

SEQ ID NO: 252040 - DNA, 990 bp, Artificial Sequence
  derived and/or modified sequence
atggacccccagtgtactatggggctcagcaacatcttgtttgtcatggcgtttctgttgtcaggagccgcacctctgaagatccaggcctactttaacgagacagccgacctcccttgccagttcgcgaatagtcagaaccagtctctgtcagaactggtggtgttctggcaagatcaggagaaccttgtcctgaatgaggtgtatctagggaaggagaaattcgatagcgtgcacagcaaatatatgggccgcacatccttcgactctgattcgtggacgcttcgcttgcataacctgcagatcaaagataaggggctgtatcagtgcatcattcaccataaaaaacccactgggatgatccgtatacatcagatgaatagtgaactatccgtactcgccaacttttcacagcccgagatagttccaattagcaatattactgagaacgtgtacattaatttaacctgctcttccattcacggctatcccgagccaaagaagatgtctgtactcctgcgcacaaagaacagcactatcgaatatgatggcgtgatgcagaaatctcaggataatgtgacagagttgtatgacgtttccatcagtctcagcgtgagtttcccagacgtcacttccaacatgactatcttttgcatccttgagacggacaaaactagacttctatcgtcaccattttctatcgagctggaagaccctcagcctcctcccgatcacattccttggataactgctgtgctccctacagtaattatctgtgtgatggtgttttgccttatactatggaagtggaagaagaaaaagcggcctaggaattcatacaagtgcgggacaaacacgatggaacgtgaggagtccgagcagactaagaaacgagaaaagattcacatacccgagcggagcgacgaggcccagcgcgtgttcaaatctagcaagacctcttcatgcgacaaaagcgatacttgtttttag

SEQ ID NO: 252041 - DNA, 990 bp, Artificial Sequence
  derived and/or modified sequence
atggacccccagtgcaccatgggcctgagcaacatcctgtttgtgatggccttcctgctgtctggagctgcccccctgaagatccaggcctacttcaatgaaacagctgacctgccctgccagtttgccaacagccagaaccagagcctgtctgagctggtggtgttctggcaggaccaggagaacctggtgctgaatgaggtgtacctgggcaaggagaagtttgattctgtgcacagcaagtacatgggccgcaccagctttgacagcgacagctggaccctgcggctgcacaacctgcagatcaaggacaagggcctgtaccagtgcatcatccaccacaagaagcccaccggcatgatccgcatccaccagatgaacagcgagctgtctgtgctggccaacttcagccagcctgagatcgtgcccatcagcaacatcacagaaaatgtgtacatcaacctgacctgcagcagcatccacggctacccagagcccaagaagatgtctgtgctgctgcggaccaagaacagcaccatcgagtatgatggagtgatgcagaagagccaggacaacgtgacagagctgtatgatgtgtccatcagcctgtctgtgtccttcccagatgtgaccagcaacatgaccatcttctgcatcctggagacagacaagacccggctgctgagcagccccttcagcattgagctggaggacccccagcccccaccagaccacatcccctggatcacagctgtgctgcccaccgtcatcatctgtgtgatggtgttctgcctgatcctgtggaagtggaagaagaagaagaggcccagaaattcctacaagtgtggcaccaacaccatggagcgggaggagagcgagcagaccaagaagcgggagaagatccacatccctgagaggagtgatgaggcccagagggtcttcaagagcagcaagaccagcagctgtgacaagagtgacacctgcttctag

SEQ ID NO: 252042 - DNA, 990 bp, Artificial Sequence
  derived and/or modified sequence
atggacccccagtgcaccatgggcctgagcaacatcctgttcgtgatggctttcttactcagtggagcggcccccctcaagatccaggcctactttaacgagactgccgacctaccttgccagtttgccaattcccagaatcagtccctctccgagttggtggtgttttggcaggaccaggaaaatctcgtgcttaacgaggtttatctgggtaaagagaagttcgactccgtccatagcaagtacatgggcaggacctctttcgactcagatagctggactcttcgcctacataatttgcaaattaaggacaaggggctctaccaatgtatcattcaccataaaaaacctactggtatgatacgcattcaccagatgaacagcgaactctctgttctggctaatttcagccagccggagatcgtgccaatatcaaatattaccgaaaacgtctacattaacttaacctgcagcagtatccacggataccctgaacctaagaagatgagcgtcctcttacgtaccaagaattctaccatcgaatacgatggagtcatgcaaaaatcacaggataacgtgactgagctttacgacgtgagtatatcactcagtgtctcctttccagatgtgacctcgaatatgaccatattctgcatcttggaaacagacaagacacgcttgctatcgagcccttttagcattgagttggaagatccccagccccctccagaccatatcccctggatcaccgccgttctgcctaccgtaattatttgtgtgatggtattctgcctcatcctctggaagtggaaaaagaagaaaagaccaaggaatagctataagtgtgggaccaacacaatggagagagaagaatcagagcagacgaaaaaaagggaaaagattcacattccagagagatcagatgaggcccaaagagttttcaagtcaagtaaaactagcagctgcgacaagagcgatacctgcttttag

SEQ ID NO: 252043 - DNA, 990 bp, Artificial Sequence
  derived and/or modified sequence
atggatccccaatgtacaatgggtctgagcaacattttattcgtgatggcatttcttctgtccggcgcagcacccctcaaaattcaggcctacttcaatgaaacagccgacctgccgtgccagtttgccaattctcaaaaccagtcactcagtgaacttgtggtcttttggcaggatcaggagaatctagtgcttaacgaggtgtatctcggaaaggaaaagtttgactctgttcacagtaagtacatgggtcggacatccttcgatagcgacagttggacgctacgcttgcacaacctccaaataaaagacaaagggttgtaccagtgcattatacaccataagaaacctaccggtatgatcagaattcaccagatgaactccgagctatcagtcctggctaatttttcacagcccgaaatcgtacctatttccaacatcacagaaaatgtatacatcaatctgacatgttccagtatacacgggtaccccgaacctaaaaagatgtcagtcctgttaagaactaaaaactctactattgagtatgacggcgtgatgcagaaaagccaggacaacgtgacagaactgtatgacgtctccatttctctgtcggtgagctttcctgacgtcacaagtaacatgaccatattttgtatcctcgagactgataaaacccggcttctgtccagccctttcagtatcgaactcgaagacccccagccaccaccggaccacataccatggattactgctgtcctgccaaccgtgatcatttgcgtaatggttttctgtctgattctctggaagtggaagaagaaaaagagaccacggaactcatacaagtgtgggacaaataccatggagcgtgaagagagtgagcagaccaagaaacgcgagaagattcatataccggagcgcagcgatgaggcacagcgcgttttcaagtcaagcaagacctcttcctgcgataaaagtgacacatgcttctag

SEQ ID NO: 252044 - DNA, 2708 bp, Artificial Sequence
  derived and/or modified sequence
ggaaggcttgcacagggtgaaagctttgcttctctgctgctgtaacagggactagcacagacacacggatgagtggggtcatttccagatattaggtcacagcagaagcagccaaaatggatccccagtgcactatgggactgagtaacattctctttgtgatggccttcctgctctctggtgctgctcctctgaagattcaagcttatttcaatgagactgcagacctgccatgccaatttgcaaactctcaaaaccaaagcctgagtgagctagtagtattttggcaggaccaggaaaacttggttctgaatgaggtatacttaggcaaagagaaatttgacagtgttcattccaagtatatgggccgcacaagttttgattcggacagttggaccctgagacttcacaatcttcagatcaaggacaagggcttgtatcaatgtatcatccatcacaaaaagcccacaggaatgattcgcatccaccagatgaattctgaactgtcagtgcttgctaacttcagtcaacctgaaatagtaccaatttctaatataacagaaaatgtgtacataaatttgacctgctcatctatacacggttacccagaacctaagaagatgagtgttttgctaagaaccaagaattcaactatcgagtatgatggtgttatgcagaaatctcaagataatgtcacagaactgtacgacgtttccatcagcttgtctgtttcattccctgatgttacgagcaatatgaccatcttctgtattctggaaactgacaagacgcggcttttatcttcacctttctctatagagcttgaggaccctcagcctcccccagaccacattccttggattacagctgtacttccaacagttattatatgtgtgatggttttctgtctaattctatggaaatggaagaagaagaagcggcctcgcaactcttataaatgtggaaccaacacaatggagagggaagagagtgaacagaccaagaaaagagaaaaaatccatatacctgaaagatctgatgaagcccagcgtgtttttaaaagttcgaagacatcttcatgcgacaaaagtgatacatgtttttaattaaagagtaaagcccatacaagtattcattttttctaccctttcctttgtaagttcctgggcaacctttttgatttcttccagaaggcaaaaagacattaccatgagtaataagggggctccaggactccctctaagtggaatagcctccctgtaactccagctctgctccgtatgccaagaggagactttaattctcttactgcttcttttcacttcagagcacacttatgggccaagcccagcttaatggctcatgacctggaaataaaatttaggaccaatacctcctccagatcagattcttctcttaatttcatagattgtgttttttttttaaatagacctctcaatttctggaaaactgccttttatctgcccagaattctaagctggtgccccactgaattttgtgtgtacctgtgactaaacaactacctcctcagtctgggtgggacttatgtatttatgaccttatagtgttaatatcttgaaacatagagatctatgtactgtaatagtgtgattactatgctctagagaaaagtctacccctgctaaggagttctcatccctctgtcagggtcagtaaggaaaacggtggcctagggtacaggcaacaatgagcagaccaacctaaatttggggaaattaggagaggcagagatagaacctggagccacttctatctgggctgttgctaatattgaggaggcttgccccacccaacaagccatagtggagagaactgaataaacaggaaaatgccagagcttgtgaaccctgtttctcttgaagaactgactagtgagatggcctggggaagctgtgaaagaaccaaaagagatcacaatactcaaaagagagagagagagaaaaaagagagatcttgatccacagaaatacatgaaatgtctggtctgtccaccccatcaacaagtcttgaaacaagcaacagatggatagtctgtccaaatggacataagacagacagcagtttccctggtggtcagggaggggttttggtgatacccaagttattgggatgtcatcttcctggaagcagagctggggagggagagccatcaccttgataatgggatgaatggaaggaggcttaggactttccactcctggctgagagaggaagagctgcaacggaattaggaagaccaagacacagatcacccggggcttacttagcctacagatgtcctacgggaacgtgggctggcccagcatagggctagcaaatttgagttggatgattgtttttgctcaaggcaaccagaggaaacttgcatacagagacagatatactgggagaaatgactttgaaaacctggctctaaggtgggatcactaagggatggggcagtctctgcccaaacataaagagaactctggggagcctgagccacaaaaatgttcctttattttatgtaaaccctcaagggttatagactgccatgctagacaagcttgtccatgtaatattcccatgtttttaccctgcccctgccttgattagactcctagcacctggctagtttctaacatgttttgtgcagcacagtttttaataaatgcttgttacattca

SEQ ID NO: 252045 - DNA, 1405 bp, Artificial Sequence
  derived and/or modified sequence
aggagccttaggaggtacggggagctcgcaaatactccttttggtttattcttaccaccttgcttctgtgttccttgggaatgctgctgtgcttatgcatctggtctctttttggagctacagtggacaggcatttgtgacagcactatgggactgagtaacattctctttgtgatggccttcctgctctctggtgctgctcctctgaagattcaagcttatttcaatgagactgcagacctgccatgccaatttgcaaactctcaaaaccaaagcctgagtgagctagtagtattttggcaggaccaggaaaacttggttctgaatgaggtatacttaggcaaagagaaatttgacagtgttcattccaagtatatgggccgcacaagttttgattcggacagttggaccctgagacttcacaatcttcagatcaaggacaagggcttgtatcaatgtatcatccatcacaaaaagcccacaggaatgattcgcatccaccagatgaattctgaactgtcagtgcttgctaacttcagtcaacctgaaatagtaccaatttctaatataacagaaaatgtgtacataaatttgacctgctcatctatacacggttacccagaacctaagaagatgagtgttttgctaagaaccaagaattcaactatcgagtatgatggtgttatgcagaaatctcaagataatgtcacagaactgtacgacgtttccatcagcttgtctgtttcattccctgatgttacgagcaatatgaccatcttctgtattctggaaactgacaagacgcggcttttatcttcacctttctctatagagcttgaggaccctcagcctcccccagaccacattccttggattacagctgtacttccaacagttattatatgtgtgatggttttctgtctaattctatggaaatggaagaagaagaagcggcctcgcaactcttataaatgtggaaccaacacaatggagagggaagagagtgaacagaccaagaaaagagaaaaaatccatatacctgaaagatctgatgaagcccagcgtgtttttaaaagttcgaagacatcttcatgcgacaaaagtgatacatgtttttaattaaagagtaaagcccatacaagtattcattttttctaccctttcctttgtaagttcctgggcaacctttttgatttcttccagaaggcaaaaagacattaccatgagtaataagggggctccaggactccctctaagtggaatagcctccctgtaactccagctctgctccgtatgccaagaggagactttaattctcttactgcttcttttcacttcagagcacacttatgggccaagcccagcttaatggctcatgacctggaaataaaatttaggaccaata

SEQ ID NO: 252046 - DNA, 990 bp, Artificial Sequence
  derived and/or modified sequence
atggacccccagtgcaccatgggcctgagcaacatcctgttcgtgatggccttcctgctgagcggcgccgcccccctgaagatccaggcctacttcaacgagaccgccgacctgccctgccagttcgccaacagccagaaccagagcctgagcgagctggtggtgttctggcaggaccaggagaacctggtgctgaacgaggtgtacctgggcaaggagaagttcgacagcgtgcacagcaagtacatgggcagaaccagcttcgacagcgacagctggaccctgagactgcacaacctgcagatcaaggacaagggcctgtaccagtgcatcatccaccacaagaagcccaccggcatgatcagaatccaccagatgaacagcgagctgagcgtgctggccaacttcagccagcccgagatcgtgcccatcagcaacatcaccgagaacgtgtacatcaacctgacctgcagcagcatccacggctaccccgagcccaagaagatgagcgtgctgctgagaaccaagaacagcaccatcgagtacgacggcgtgatgcagaagagccaggacaacgtgaccgagctgtacgacgtgagcatcagcctgagcgtgagcttccccgacgtgaccagcaacatgaccatcttctgcatcctggagaccgacaagaccagactgctgagcagccccttcagcatcgagctggaggacccccagcccccccccgaccacatcccctggatcaccgccgtgctgcccaccgtgatcatctgcgtgatggtgttctgcctgatcctgtggaagtggaagaagaagaagagacccagaaacagctacaagtgcggcaccaacaccatggagagagaggagagcgagcagaccaagaagagagagaagatccacatccccgagagaagcgacgaggcccagagagtgttcaagagcagcaagaccagcagctgcgacaagagcgacacctgcttctag

SEQ ID NO: 252047 - protein, 419 aa, Artificial Sequence
  derived and/or modified sequence
MAGSGCAWGAEPPRFLEAFGRLWQVQSRLGSGSSASVYRVRCCGNPGSPPGALKQFLPPGTTGAAASAAEYGFRKERAALEQLQGHRNIVTLYGVFTIHFSPNVPSRCLLLELLDVSVSELLLYSSHQGCSMWMIQHCARDVLEALAFLHHEGYVHADLKPRNILWSAENECFKLIDFGLSFKEGNQDVKYIQTDGYRAPEAELQNCLAQAGLQSDTECTSAVDLWSLGIILLEMFSGMKLKHTVRSQEWKANSSAIIDHIFASKAVVNAAIPAYHLRDLIKSMLHDDPSRRIPAEMALCSPFFSIPFAPHIEDLVMLPTPVLRLLNVLDDDYLENEEEYEDVVEDVKEECQKYGPVVSLLVPKENPGRGQVFVEYANAGDSKAAQKLLTGRMFDGKFVVATFYPLSAYKRGYLYQTLL

SEQ ID NO: 252048 - DNA, 1260 bp, Artificial Sequence
  derived and/or modified sequence
atggccggcagcggctgcgcctggggcgccgagccccccagattcctggaggccttcggcagactgtggcaggtgcagagcagactgggcagcggcagcagcgccagcgtgtacagagtgagatgctgcggcaaccccggcagcccccccggcgccctgaagcagttcctgccccccggcaccaccggcgccgccgccagcgccgccgagtacggcttcagaaaggagagagccgccctggagcagctgcagggccacagaaacatcgtgaccctgtacggcgtgttcaccatccacttcagccccaacgtgcccagcagatgcctgctgctggagctgctggacgtgagcgtgagcgagctgctgctgtacagcagccaccagggctgcagcatgtggatgatccagcactgcgccagagacgtgctggaggccctggccttcctgcaccacgagggctacgtgcacgccgacctgaagcccagaaacatcctgtggagcgccgagaacgagtgcttcaagctgatcgacttcggcctgagcttcaaggagggcaaccaggacgtgaagtacatccagaccgacggctacagagcccccgaggccgagctgcagaactgcctggcccaggccggcctgcagagcgacaccgagtgcaccagcgccgtggacctgtggagcctgggcatcatcctgctggagatgttcagcggcatgaagctgaagcacaccgtgagaagccaggagtggaaggccaacagcagcgccatcatcgaccacatcttcgccagcaaggccgtggtgaacgccgccatccccgcctaccacctgagagacctgatcaagagcatgctgcacgacgaccccagcagaagaatccccgccgagatggccctgtgcagccccttcttcagcatccccttcgccccccacatcgaggacctggtgatgctgcccacccccgtgctgagactgctgaacgtgctggacgacgactacctggagaacgaggaggagtacgaggacgtggtggaggacgtgaaggaggagtgccagaagtacggccccgtggtgagcctgctggtgcccaaggagaaccccggcagaggccaggtgttcgtggagtacgccaacgccggcgacagcaaggccgcccagaagctgctgaccggcagaatgttcgacggcaagttcgtggtggccaccttctaccccctgagcgcctacaagagaggctacctgtaccagaccctgctgtag

SEQ ID NO: 252049 - DNA, 1260 bp, Artificial Sequence
  derived and/or modified sequence
atggctggctctggatgcgcttggggggcagagccgcccagattcctcgaagcatttggaaggctttggcaggtgcagtccaggctcggcagcgggtcttcggctagcgtgtatcgcgtgcgttgctgtggaaaccctggctctcctccaggcgctcttaaacagtttctgccccctggtaccaccggagccgcagcatccgcagctgagtacggcttcaggaaagaaagagcagctttggaacagcttcagggccaccgcaatatagtcacactctacggcgtgtttactattcacttctccccaaatgtgccaagccggtgtctgctccttgaactcctggatgtctccgtgtcggagctccttttgtactcgagccatcaaggttgtagtatgtggatgatccagcactgcgcacgcgacgtcctggaggctctcgccttcttacaccatgagggctacgttcacgccgatctcaaaccccgtaacatactttggagcgccgaaaacgagtgcttcaagctgatcgatttcgggctgtcttttaaggagggaaaccaagacgtcaagtacattcagactgacggctaccgcgcccctgaggccgagctgcaaaactgcttggcgcaggccggtctccagagtgacactgagtgcacaagcgctgtcgatctctggtcattgggcattatcctgctcgagatgttttccgggatgaaattgaaacacacagtcaggtctcaggaatggaaggcaaatagctcagctatcatcgaccacatcttcgccagcaaggctgttgtcaatgccgctatccctgcctaccacttgagagacttaatcaaatcaatgctccatgatgacccatctcgtcgaatccctgctgaaatggccctgtgcagcccatttttttcaatcccctttgcgccgcacatcgaggacctcgtcatgctgcccaccccagtactgcggctgttgaatgtcttggacgacgactatttagaaaatgaagaagaatatgaggacgtggtcgaagatgtcaaggaggagtgccagaagtatggacccgtcgtgtctctactggtgccgaaggaaaacccggggcgcggccaggtgttcgtggagtacgccaacgccggggattctaaggccgcacagaagctcctgacaggaagaatgttcgacggtaagtttgtagttgccaccttttatcctctgagcgcctacaaacgcggctatctgtatcagacactgctgtag

SEQ ID NO: 252050 - DNA, 1260 bp, Artificial Sequence
  derived and/or modified sequence
atggccggcagcggctgtgcctggggcgctgagcccccacgcttcctggaggccttcggccgcctgtggcaggtgcagagccggctgggcagcggcagcagcgcctctgtgtacagagtgcgctgctgcggcaaccctggcagccccccaggggccctgaagcagttcctgcccccaggcaccaccggggctgctgccagcgctgctgaatatggcttcaggaaggagcgggccgccctggagcagctgcagggccacagaaatattgtgaccctgtatggagtcttcaccatccacttcagccccaacgtgcccagccgctgcctgctgctggagctgctggatgtgtctgtgtctgagctgctgctgtacagcagccaccagggctgcagcatgtggatgatccagcactgtgccagagatgtgctggaggccctggccttcctgcaccacgagggctacgtgcatgctgacctgaagcccaggaacatcctgtggagcgcagaaaatgaatgcttcaagctgattgactttggcctgtccttcaaggagggcaaccaggatgtgaagtacatccagacagatggctaccgggcccctgaggccgagctgcagaactgcctggcccaggccggcctgcagagcgacacagagtgcaccagcgctgtggacctgtggagcctgggcatcatcctgctggagatgttttctggcatgaagctgaagcacacagtgcgcagccaggagtggaaggccaacagcagcgccatcatcgaccacatctttgccagcaaggctgtggtgaatgctgccatcccagcctaccacctgcgggacctgatcaagtccatgctgcatgatgaccccagccgccgcatcccagctgagatggccctgtgcagccccttcttcagcatcccctttgccccccacatcgaggacctggtgatgctgcccacccctgtgctgcggctgctgaatgtgctggatgatgactacctggagaatgaggaggagtatgaagatgtggtggaggatgtgaaggaggagtgccagaagtatggccctgtggtgtccctgctggtgcccaaggaaaatcctggccggggccaggtgtttgtggagtatgccaatgctggggacagcaaggccgcccagaagctgctgaccggccgcatgtttgatggcaagtttgtggtggccaccttctaccccctgagcgcctacaagaggggctacctgtaccagaccctgctgtag

SEQ ID NO: 252051 - DNA, 1260 bp, Artificial Sequence
  derived and/or modified sequence
atggccggcagcggctgcgcctggggcgccgagcccccccggttcctcgaagcctttggacggttatggcaggtgcaatcccgtctagggagtggcagctctgcatccgtctaccgggtcaggtgctgtggcaacccagggtcaccacccggtgccctgaaacagtttttgcctcccggaacaactggcgctgctgccagcgcagcagagtacgggttccgtaaagaaagggcagctctggaacagttgcagggtcatcgaaacatcgtcacgctgtatggcgtctttaccatacatttcagccccaacgttccatcaaggtgccttctgctggaactgctcgatgtgtccgtttctgagttattactgtatagcagccaccagggctgtagcatgtggatgatccagcattgcgccagagacgtgctggaggccctagccttcttgcaccacgagggctacgtgcacgccgatctcaagcctcgcaatattttgtggtctgcagagaacgaatgttttaagctgattgactttgggctgtcttttaaggagggcaatcaggatgtcaagtacatccaaactgatggataccgggctcctgaagccgaactccagaactgcctggcacaggccggactgcagtccgacaccgaatgcactagtgccgtagacctctggtcactgggcatcatcctgctggagatgtttagtggcatgaagctgaaacacactgtcaggtctcaggagtggaaggcaaactcttcagctatcattgatcatattttcgcttctaaggccgtagttaacgctgcaattccggcataccatcttagggacttgatcaagtctatgcttcacgacgatccttccaggcgcatacctgccgagatggcactatgttcacccttcttcagcatcccctttgcacctcatatcgaggatctggtgatgcttccgactcctgtgttgaggctgcttaacgtgctggacgatgattatctcgaaaacgaggaagagtatgaggacgtggttgaagacgtaaaagaagaatgccagaagtacggtcccgtggtgtccctgctagtgccgaaggagaatcccggacggggacaggtcttcgtggagtacgctaatgcgggcgactcgaaggcggcccagaagctcctcactggacgaatgttcgatgggaagtttgtggtggcaacattctacccactttctgcttataaacgggggtatttatatcagacactgttatag

SEQ ID NO: 252052 - DNA, 1260 bp, Artificial Sequence
  derived and/or modified sequence
atggcgggaagtggctgcgcatggggagcagagcctccccgatttcttgaggcattcggcagactgtggcaagtgcagtctcgcctagggagcggatctagtgcaagcgtgtaccgggttagatgctgtggcaacccagggtctcccccaggggcactcaagcagttcttacccccagggaccacgggagccgcagcgtcagccgcagaatacggcttcaggaaggagagggctgccctcgagcagcttcagggacacaggaatatagtaacattgtatggtgtttttacgatacacttctccccaaatgtaccatctagatgtctgctcctggaacttctggatgtctctgtttcagagttgctgctctattcaagtcaccaagggtgcagcatgtggatgatacaacactgcgccagagacgtgctggaggccctggcattcttacatcatgaagggtatgtacatgccgatctgaagcccaggaacattctatggagtgcagagaacgaatgcttcaagctgatagatttcggactcagcttcaaagagggaaaccaggacgtgaaatatatccaaacagatggctatagggcccctgaagctgaactgcagaactgcctggcccaagcgggtctgcaatcagataccgagtgcacttcagctgtagacttgtggagccttggcatcattctgctggaaatgttctccggcatgaagctcaaacatacagttagatcccaggagtggaaggcgaattcaagcgctataattgaccacatctttgcctccaaggccgtcgtgaatgccgctatcccagcttaccacctgagggatttaattaagagcatgttacatgacgatcccagccgcaggattccggcagagatggctctgtgctcaccctttttttcgatcccctttgcccctcacatcgaggacctcgtcatgctgccaaccccagtgttgaggctgttgaatgtccttgacgatgattatctggagaatgaggaggagtatgaagacgtagtggaagatgttaaggaagagtgtcagaaatatgggcctgtcgtgtccctcctcgtgccaaaagaaaaccctggcaggggacaggtgttcgtggagtacgctaatgcgggagattccaaagccgctcagaagctgttgactggccgaatgtttgacgggaagttcgtggtggcaacattttatccattatcggcctacaaaagagggtacctctaccagaccctgctttag

SEQ ID NO: 252053 - DNA, 8478 bp, Artificial Sequence
  derived and/or modified sequence
ggtgtcatggctgcttgaagtcccgggagtcggtgaggcggctgcaggtccctccctgcggagccgctggtccggctggcggagatgtgaccgcgggcccggccggcctgcctcaggcgtcgcgtcagctcccgtgtccgtgcccttaacccacaccgatggcgggatccggctgcgcctggggcgcggagccgccgcgttttctggaggccttcgggcggctgtggcaggtacagagccgtctgggtagcggctcctccgcctcggtgtatcgggttcgctgctgcggcaaccctggctcgccccccggcgccctcaagcagttcttgccgccaggaaccaccggggctgcggcctctgccgccgagtatggtttccgcaaagagagggcggcgctggaacagttgcagggtcacagaaacatcgtgactttgtatggagtgtttacaatccacttttctccaaatgtgccatcacgctgtctgttgcttgaactcctggatgtcagtgtttcggaattgctcttatattccagtcaccagggttgttccatgtggatgatacagcattgtgcccgagatgttttggaggcccttgcttttcttcatcatgagggctatgtccatgcggacctcaaaccacgtaacatattgtggagtgcagagaatgaatgttttaaactcattgactttggacttagcttcaaagaaggcaatcaggatgtaaagtatattcagacagacgggtatcgggctccagaagcagaattgcaaaattgcttggcccaggctggcctgcagagtgatacagaatgtacctcagctgttgatctgtggagcctaggaatcattttactggaaatgttctcaggaatgaaactgaaacatacagtcagatctcaggaatggaaggcaaacagttctgctattattgatcacatatttgccagtaaagcagtggtgaatgccgcaattccagcctatcacctaagagaccttatcaaaagcatgcttcatgatgatccaagcagaagaattcctgctgaaatggcattgtgcagcccattctttagcattccttttgcccctcatattgaagatctggtcatgcttcccactccagtgctaagactgctgaatgtgctggatgatgattatcttgagaatgaagaggaatatgaagatgttgtagaagatgtaaaagaggagtgtcaaaaatatggaccagtggtatctctacttgttccaaaggaaaatcctggcagaggacaagtctttgttgagtatgcaaatgctggtgattccaaagctgcgcagaaattactgactggaaggatgtttgatgggaagtttgttgtggctacattctacccgctgagtgcctacaagaggggatatctgtatcaaaccttgctttaatcagtaacctaaggactgtttcctttttctcctcttccatttcttgggttattccacatatgaatgcaggactacccccttaccattttaagaaggtactttatacatttatttaatcctactaatgtgcagccattgcccaagcagtgactgcgttgcatacatttggcactgagtaggacaagacctctcagctatacattgaggggttttagagcatccatgtgggcaacccttttttgtgcgggagagcaggtgttgctcttcagtatgtagcctaaaaaaatcttaattatttcatggatcatgaagcaaggatgaataatatcatgtcttggtaaatactaacaaatttgttaggtttggtgacatcatttacagattatttctttatgttgtccagtggttcttccttattgttgatatccataagctggcactggatgctctcagtaatgttaagtaattgtcaagcagcagttacctactgtgttcttaacactgagttgtgaattttttcttaaagcagtactgtagtactgaatattcctttaaaggaactgcagtgagcctatctaagtttttttaaattaaggcttttaaaatagaaagctgatgcttgatcttgcacaatttttatgtctagtatgtatgcttgagtgaatgtgcgagtatgaatgattagagaaaatttgagtcagtgtactttatagtgtgaatcctgtgagctaatacagtctatacttatttcttccctacctgtttcacatccgtaagatttaagatatacattttttgagaggtagtctgtctgatacaatgtaaatgacaaaacataattcctgagaggcccagaacaaactggagtctagcctggagttaaattgagacttctaaaatgattggaacaaagactaagttgtgccagatgtaaatcaacccctcttttagtttactttagactttgtattagctcatcttttttgtagtaaatctatagttttaaggtttctcaagatgtggctctacctactatgatgaaaattgaagtgggtcaaaagaattagatgtacagtgaagggaaaagaaaaaaaatgggcgaagagagggtggaaaataaaaggattcttttttcttcctttctgtttctcgtatccctgctccctttttcctccccttccctcattctttgcctctatccttagctgaagacaaactagaggagcagcatcccaggtagtttggcttttgactgcaaggtagttaagaaaggtgtagatataatgaggtagaagtagaaaggaagaaaaactcaaagaattcttaaaaggattcatagcaacataatgtgtccctgagtagaggatgctgctatgcgtgagttcatggacacaagttgattacatggtttttagaattataattatggattcttcttatttcatggtaggttgtctttaaagatataaaaattaggatgcctttatgaagcactgattataccaaaaaaaaaagacaagttatatacaggttattaatttttttatttatttattttttcctaaggaaaaagtcttctatctttccctgctggaagcctcctcatatttccttatgtttgccatgcaggttgctgagagtccagttagaatttgcattttacagaatgaaatactttaccccattcaaacaattattgtttgacattttagttatttataattgtcaaattcaggactctcctttaatgtttattatgaaaccaaatttggcataaggaggctgatttatgaattaccaaagggtcttgtggcatgttccccaatacatgcccttagaaggaagaactattattttttattttggccctttcaggagttgattataaattggtttgttttcaagtcagaattcaagtgggcagaacccgtattgtgaagacctaaactttcctaaatgttcatatgggtagcagattttgtggtgattagaaacatcaggtccttaaatacgatgaacatgggatacaaaggaattctttataagggcaagtatcctaagttagcacatttacttttctctcccctccgcccccaaaagaaaaatccttacaaataaactgcaggtaggcttctaagcctagtcctgcagtatgctgctaacatcttgatgccaatcttcacagcattctttgattgtcatcttattgctgatacattcatacatatatttagtgcttgacactgtagaattttgttacagaagatggttactagattttaagggagctgagggaataattgatgagccttgaattaaccatgcatttaattagattttttgttgttgttgttgttgttttgagatgatgtcttgctctgttgcccaggctggagtgcagtggctcaatctcggctcactgcaacctctgcctcgcaggtttgagcgattctcctgtctcagcctccccagtagctgggtttacaggcgcttgccaccacacctggctagatgttttatattaaagccagagaattgaaaaagaaatgcctcctgtgattgaaattattttatagctcttagcccgttctaccaaagatcacattagcagattacccctccctcctgtgatattatctttcttaaacctgaaccaaatatcaaaagatacaagtttcatgattaggatgaaatatatacatagggattttggtttattgaagttattgaaagacctagaaattttctttttgagagaaagggtaaagaggtgagggttcatgtcacttaacccctacccttttgggcaaattttgtctcaggtagtgtttcattccctaaattaatacctgtgcttccttgcctctcaccttcccagttacttctttggggtattactgtggcacattgtacacccagaaaaggcacatacagtgattattttgtgggaaatacttgattcttttgaaatatatttggagggggtagctagctagccactgtcaaaactaatgctgtatttacaggacaaaaacaagtagagttggacacctcagtaagagacagcattaactaaaagtactgactgccttttaaaggaatttttaaaactattctcttgcaataagagatccgcatttattaccactggatgtcttccttttttgtggccaccaatatagcagctctctttagagggattccctttctgctatgccttgagccaaactggctgcttttagaacaaaaaccataagtatggttttactcgaacttctctttgtttttattgagagaaatattgccttctttttggtactccagctgctaaagagtgctgagatatgttaaattattttttaaaagaaaatctccaaatacttatttaacttgtcttctagattcatgttgcttatattttaactattgagcaagtttattataaggaatgctgccatatagagaaagctgaagagaaaccatgggcagaaggcttttttctgtcttattacactggaccttcactctggtaagggcatcagttacttttctggaataaaaggcggagttagagcacttatcagatgctgtttcatggcttgttttagttaatttatcatgcagataactaacatttgggtatctttttgttttaggtcttattttctgactgttaggcctatcttacacataagttctactatcagtatacttggcagcatgacttttttttttttttacagttaatttaatgaaaatcagcaccattgtaaatgatagtaattgtaacaacatagttactgggtgaaggagtaggggagacactcagtaaccatctatttacctagacacttatgcaggggtacatgctaggtggctttattcagattcgggtacattggaatcacatcatgactttgagtctgatggctgtgtagataaagatttaagcaagtgccttgtgtttgctggaaaatattaaaactcatttgggtgaaagcttcccagatgatgataattaatagcacttctgcctttttcctggagtaacttttagattgagtcacatatgatagtataaaagtccaaaattttctgggtttacctttgttttatttttcatatatatattcactgtctgcctggaaatagccttggtttaccttatttttttgtatatgtaaaactattcatatttgattttattccaatattatatatgatggaaaagccagaattgtctggcagaatttaattcttccttggatctctagttctgtttttaatatcaggttccttcatcaaattttactactgtagctctgtgatataatttcatttcttgtcaattatggtcacatatagacaagtacttggtcacaattagctcaaaagaatccccatttcttaaggtgctcagtcaatcacctttattttgagatggtagtttttcaagttagtattacttactagctttcttgatgaatataaaaatgttgtctccatcatacagagctgagcctcttgtggtatattaagataagtcccattcttaatcacagaagaacatggatattttagtttttggagtacccagaattgtaaagattttgtttcattttgttttaggatagcttctctgcctaatactataggatatgtcatgttcgttattgtagccacctccctcagatgtttttcactatttttaaattatataatgaccagtagattcacagtagcatgtacttgacaagtgccatggatatttaagaagaaggtaaataattttaatattttttgctgtaattttataggagcagtggactgtaagagaaatatctataaatcagagagtatttaggaaactttgtattttataggtggtcattaaagtgatcttcaggatataagatagtttacacaaactttattctcctgataggaaatttttattcattttcctaccactcagcacttttgttctgccttgtactgcttatgaggattaatgttttaaatttgctttatttgtgcttttcagagagttgtcataattgtggcagttgtgtttgtggcactgtaaatgctgaaattcatgggaaacttaccaaatgactgcttgagtgttatttcccattaaattgggtagctgtcacaataaccagaagaaatcttgtggcccttttgaagaaagccatgtatgttttgttacctaggttcatagtattttaatttaaaggcaaagagaagcattctacttatttgtcttataaaccattaatcgttttttgtgcagaagagagcttattttgttatactgctttgtataatggaaataagtcacattctgggggaaaaaaactggaattgtttgtattttgtttttttggggggggatctttatgtgaaaaatcagagctacttgttaccataagcccttactatcaacaagataattatttgtaatcacttttttatcccaggttggaattgctttccccttctaagttatcttcccttaataatatttatgataccaggacagtgagggtataagagcaaatgtagtgaggtattcaaaaatcctgcatatatggactcaaaagttctttagttatttgaattatatatagctatattattttattagcttgggttgtcagaagattgccaattttaagagtaaagaggagagagataagtaataaaaatagaggaggggaagaaaatggctcccttactggtcttagtaatcttctatatagttaatgagctaaaaaatgatacttaaagttccaggtttggtaccgctagcatagaaacattgcctttcctacacattcctcatcattgtttcctcagaaaattattttaagagtttgtgaaaccagattaaatatctatattcagtttggcctaatttttaaaaataaatatttatactccagcttttgtgtatttggtgtacatcaccacttatgcaaatcaaggatcagaaaactggaggttagccatctccattatttccttttgcacattgggtacagtgggtggcattagtatgcactagctgcaaagtcacagcaccttatggaaataagtatgtttattataataaaaaaaagttaagctgcatctctgtagattatttactttgcagactgtaaagctgccctatcttttccagcagaatttactcttccattcttaattcttttttgaaatatcttaaataatttaacattcctttataacttcttaacagtgtcaaaactggggtagaagggattttattttttcccaaaagggttccatctttgctatctgttgatcagccttagaaaatctaagtatgatcaataaattttaatggttgatggcatcctgtgtcagctggagtagttggttgtgaatattaaaacctagtactattttccctcagtaacatgtaattgctacattttttataagaaggtatggttagaaaaaaatgtgaaagatcacttaaaccaaagccagttacaaggagtaatctctcctgttggtttaccttcacctcagaactacaagaatattacaatacatagtgaatagttgtctgtaacatttctaccagttgtttcagtagcatattggtcttggcatttcttggcactgtggttctgctgtattatttgtgatgtcttattgtttgtgagcttttgttttttttttaaagaaaaaacaaaaactaagtgggactatgtatgtagatgtgtgtcagtaccaaaaagttattttctcaaatccctaaatttctgatttccattcaagtcttttaaactctttcctgctgaatagcaaagaacttttattttccactttcctatattcctaaaaagtgtgaacaatgcgtttcagttgactgtattgcatacttttttgctgaagactttttctgtaaacacaattgccttgttcagttttgttgtaaactgacttaccataagatgcactgttgataatgctttctgatgtgtgtttgataagagtgataaaataaaagcttaaaaataaa

SEQ ID NO: 252054 - protein, 386 aa, Artificial Sequence
  derived and/or modified sequence
MAAIPALDPEAEPSMDVILVGSSELSSSVSPGTGRDLIAYEVKANQRNIEDICICCGSLQVHTQHPLFEGGICAPCKDKFLDALFLYDDDGYQSYCSICCSGETLLICGNPDCTRCYCFECVDSLVGPGTSGKVHAMSNWVCYLCLPSSRSGLLQRRRKWRSQLKAFYDRESENPLEMFETVPVWRRQPVRVLSLFEDIKKELTSLGFLESGSDPGQLKHVVDVTDTVRKDVEEWGPFDLVYGATPPLGHTCDRPPSWYLFQFHRLLQYARPKPGSPRPFFWMFVDNLVLNKEDLDVASRFLEMEPVTIPDVHGGSLQNAVRVWSNIPAIRSRHWALVSEEELSLLAQNKQSSKLAAKWPTKLVKNCFLPLREYFKYFSTELTSSL

SEQ ID NO: 252055 - DNA, 1161 bp, Artificial Sequence
  derived and/or modified sequence
atggctgccatccccgctctggaccccgaagcagagccgtcaatggacgtcattctggtaggatcttctgagctgtcctcctccgtcagccccggcactggaagagacctgatcgcatatgaagtgaaggccaatcagagaaatatcgaggacatttgcatctgttgcggcagtcttcaagtgcacacccagcaccccctgttcgagggaggcatttgtgccccgtgcaaagataaattcttggatgctctgttcctttatgatgacgacgggtaccagtcctactgctcaatttgttgcagcggtgaaacactccttatctgtggaaaccccgactgcactcggtgctattgcttcgagtgcgtggattccctcgtggggccaggcacatccggtaaggtgcatgccatgtccaattgggtgtgttacctctgtcttccaagttcacgatcgggactactgcagcggagacggaagtggcggagccagttaaaagctttttatgaccgtgagagtgagaaccccctggagatgttcgagacagttccagtctggcggcggcaacctgtcagggtcctctcccttttcgaagacatcaaaaaagaactgacaagcctcggcttcctggaaagcggatccgaccccggccagctgaagcacgtggtggacgtaacagacactgtgcgcaaagacgtcgaagagtgggggcccttcgatttagtgtatggggccacgcccccgctcggtcatacctgcgatcgaccgccaagctggtatctctttcagtttcacaggctgctacaatacgcccgcccaaagcccgggagccccaggccattcttctggatgtttgtcgataaccttgtgctgaacaaagaagatctggacgtggcatcccggttcctggaaatggaacctgttaccattccagatgtgcatggtggttccttacaaaatgcggtgagagtgtggagtaacattcctgctatacggtcacgtcattgggcattagtatctgaagaagagctcagtctactggcacagaataagcaatcttccaagctggcagctaaatggcccacaaagctggtgaagaactgcttcctgccactgagggaatactttaaatacttttccaccgaactgacatcatctctttag

SEQ ID NO: 252056 - DNA, 1161 bp, Artificial Sequence
  derived and/or modified sequence
atggccgccatcccagccctggaccctgaggccgagcccagcatggatgtgatcctggtgggcagcagcgagctgagcagctctgtgtccccaggcaccggccgggacctgattgcctatgaggtgaaggccaaccagagaaatattgaggacatctgcatctgctgcggcagcctgcaggtgcacacccagcaccccctgtttgagggcggcatctgtgccccctgcaaggacaagttcctggatgccctcttcctgtatgatgatgatggctaccagagctactgcagcatctgctgcagcggggagaccctgctgatctgtggcaacccagactgcacccgctgctactgctttgaatgtgtggacagcctggtgggccctggcaccagcggcaaggtgcacgccatgagcaactgggtgtgctacctgtgcctgcccagcagccgcagcggcctgctgcagaggaggaggaagtggaggagccagctgaaggccttctatgaccgggagagcgagaaccccctggagatgtttgaaacagtgcctgtgtggaggcggcagcctgtgcgggtgctgagcctgtttgaggacatcaagaaggagctgaccagcctgggcttcctggagagcggcagtgaccccggccagctgaagcacgtggtggatgtgacagacacagtgaggaaggatgtggaggagtggggcccctttgacctggtgtatggagccaccccacccctgggccacacctgtgacaggcctccttcctggtacctgttccagttccaccggctgctgcagtatgcccggcccaagccaggcagcccccggcccttcttctggatgtttgtggacaacctggtgctgaacaaggaggacctggatgtggccagccgcttcctggagatggagcctgtgaccatcccagatgtgcatggaggcagcctgcagaatgctgtgcgggtgtggagcaacatcccagccatccgcagccgccactgggccctggtgtctgaggaggagctgagcctgctggcccagaacaagcagagcagcaagctggccgccaagtggcccaccaagctggtgaagaactgcttcctgcccctgcgggagtacttcaagtacttcagcacagagctgaccagcagcctgtag

SEQ ID NO: 252057 - DNA, 1161 bp, Artificial Sequence
  derived and/or modified sequence
atggccgccatccccgccctggaccccgaggccgagcccagcatggacgtgattttggtgggctcctccgaattgagttcgtccgtctctccagggaccggtcgggatctgattgcctacgaggtcaaggccaaccagaggaacattgaggacatctgcatctgctgtggatctctgcaggtgcatacacagcaccctctcttcgaaggaggcatatgcgctccatgcaaagataagttcctggacgcccttttcctgtacgacgacgatggctatcaaagttactgttctatctgctgttcaggggagactttgctaatttgcggcaaccccgactgcactcggtgctattgctttgagtgtgtggatagcctggtcggcccaggcacctctggcaaagtgcacgccatgtccaattgggtgtgttatttgtgtttaccaagttcccggagcggactcctgcaaagacggagaaagtggagaagccaactgaaggccttttatgatagagaatccgagaacccacttgaaatgttcgaaactgtgccagtgtggcggaggcagcctgtgagagtgctcagtttgttcgaggacatcaaaaaggagctcactagtttgggatttctagagtcaggtagcgatcctggccagttgaagcacgtcgtagatgtgacagacaccgtgcgcaaagatgttgaggaatggggcccatttgatttagtctatggagccaccccacccctgggccatacctgtgatcggccacccagttggtacttattccagttccatcggttgctgcagtacgcccggccgaaaccagggtcgccaagacctttcttttggatgtttgtagacaatcttgtactaaataaggaggacctggatgtggcatcccgtttcctcgagatggaaccagtgacaatccccgacgtccacggcggctcactccaaaatgctgtccgggtttggtcaaatatcccagcgatcagatcacgtcactgggctcttgtgtctgaggaggagctaagtctgcttgcgcagaacaaacaatctagtaagttagccgcgaagtggccaaccaagttagtcaaaaactgtttcctgcctttgagagagtattttaagtacttttccacggaattaacaagcagtctgtag

SEQ ID NO: 252058 - DNA, 1161 bp, Artificial Sequence
  derived and/or modified sequence
atggctgctattcccgcattagaccctgaggcagagccgtctatggatgtgattctggtgggttcgtccgagctgagcagtagcgttagcccaggaacaggacgcgacctgatagcttacgaagttaaggccaatcaacgaaacatcgaggatatctgcatctgttgtggatcacttcaggtccatactcaacacccactgttcgaaggaggcatctgtgcaccgtgtaaagataagtttcttgatgccctgtttctttacgacgacgacggttatcagagctattgtagtatctgctgtagtggagagaccctgctgatttgtggaaaccccgattgcaccagatgttactgcttcgagtgtgtggactctctggtaggcccaggcacttccggcaaggtgcatgccatgtccaactgggtctgttacttgtgcctgccgtcctctcgctctggtctccttcagaggaggcggaaatggcgcagccagctgaaggcgttttacgacagggagtccgaaaaccctcttgagatgttcgagaccgtgccagtctggcgcaggcagcccgtgcgggtacttagcctgtttgaagacatcaagaaggaactgacttcacttggctttctggagagcggatccgaccctggacaactgaagcacgtcgtagatgtgaccgacaccgtgagaaaggatgtcgaagaatggggacctttcgacctggtctacggagccaccccacctctggggcacacctgcgacaggcctccctcctggtatctgttccagttccataggctgctgcaatacgctagaccgaagcctggttcccccaggcccttcttctggatgtttgtcgataatttggttctgaataaagaggatctggacgtagcatcacgcttcttagagatggagcctgtgacgatacctgacgtgcacgggggttccttgcagaatgccgtccgcgtgtggagcaacatcccggcaatccgctcccgtcactgggctctcgtatctgaggaagaacttagccttcttgcccagaataaacagtccagtaagcttgcggctaagtggccaacaaagctggtgaaaaactgctttctccctcttcgggagtactttaagtacttttctaccgagctgacttcttctctgtag

SEQ ID NO: 252059 - DNA, 1161 bp, Artificial Sequence
  derived and/or modified sequence
atggccgccatccccgccctggaccccgaggccgagcccagcatggacgtgatcctggtgggcagcagcgagctgagcagcagcgtgagccccggcaccggcagagacctgatcgcctacgaggtgaaggccaaccagagaaacatcgaggacatctgcatctgctgcggcagcctgcaggtgcacacccagcaccccctgttcgagggcggcatctgcgccccctgcaaggacaagttcctggacgccctgttcctgtacgacgacgacggctaccagagctactgcagcatctgctgcagcggcgagaccctgctgatctgcggcaaccccgactgcaccagatgctactgcttcgagtgcgtggacagcctggtgggccccggcaccagcggcaaggtgcacgccatgagcaactgggtgtgctacctgtgcctgcccagcagcagaagcggcctgctgcagagaagaagaaagtggagaagccagctgaaggccttctacgacagagagagcgagaaccccctggagatgttcgagaccgtgcccgtgtggagaagacagcccgtgagagtgctgagcctgttcgaggacatcaagaaggagctgaccagcctgggcttcctggagagcggcagcgaccccggccagctgaagcacgtggtggacgtgaccgacaccgtgagaaaggacgtggaggagtggggccccttcgacctggtgtacggcgccaccccccccctgggccacacctgcgacagaccccccagctggtacctgttccagttccacagactgctgcagtacgccagacccaagcccggcagccccagacccttcttctggatgttcgtggacaacctggtgctgaacaaggaggacctggacgtggccagcagattcctggagatggagcccgtgaccatccccgacgtgcacggcggcagcctgcagaacgccgtgagagtgtggagcaacatccccgccatcagaagcagacactgggccctggtgagcgaggaggagctgagcctgctggcccagaacaagcagagcagcaagctggccgccaagtggcccaccaagctggtgaagaactgcttcctgcccctgagagagtacttcaagtacttcagcaccgagctgaccagcagcctgtag

SEQ ID NO: 252060 - DNA, 1702 bp, Artificial Sequence
  derived and/or modified sequence
cccatctccacccctcccctgaaccccactccccactgaggtccccaaaccccacccctcactccaccctgagggccccatcctctgaaccccaatcccccagccccactgagctcttaaccctccccacctgagggttccctttccctgcccgtcccccagcttcctagctccccaccccaagtgaccccccgcagctcctcgcccctcccactgcaaaccggcactgaagggctgccccgcccccgcccctccccgcccccgcgggacacgcccagattctttgcccccatagcctggtgacctctggccacccgctgtcccaggtgggcctggatccttccagctcattctttgcctgcgccgtccctcgttccatggcccagtcctccccggggaccctgagcctggaagccccggaccactggaaccttgaacccaccagctggctgtacccggagccgtggcagcagccctcatccccatggcggccatcccagccctggacccagaggccgagcccagcatggacgtgattttggtgggatccagtgagctctcaagctccgtttcacccgggacaggcagagatcttattgcatatgaagtcaaggctaaccagcgaaatatagaagacatctgcatctgctgcggaagtctccaggttcacacacagcaccctctgtttgagggagggatctgcgccccatgtaaggacaagttcctggatgccctcttcctgtacgacgatgacgggtaccaatcctactgctccatctgctgctccggagagacgctgctcatctgcggaaaccctgattgcacccgatgctactgcttcgagtgtgtggatagcctggtcggccccgggacctcggggaaggtgcacgccatgagcaactgggtgtgctacctgtgcctgccgtcctcccgaagcgggctgctgcagcgtcggaggaagtggcgcagccagctcaaggccttctacgaccgagagtcggagaatccccttgagatgttcgaaaccgtgcctgtgtggaggagacagccagtccgggtgctgtccctttttgaagacatcaagaaagagctgacgagtttgggctttttggaaagtggttctgacccgggacaactgaagcatgtggttgatgtcacagacacagtgaggaaggatgtggaggagtggggacccttcgatcttgtgtacggcgccacacctcccctgggccacacctgtgaccgtcctcccagctggtacctgttccagttccaccggctcctgcagtacgcacggcccaagccaggcagccccaggcccttcttctggatgttcgtggacaatctggtgctgaacaaggaagacctggacgtcgcatctcgcttcctggagatggagccagtcaccatcccagatgtccacggcggatccttgcagaatgctgtccgcgtgtggagcaacatcccagccataaggagcaggcactgggctctggtttcggaagaagaattgtccctgctggcccagaacaagcagagctcgaagctcgcggccaagtggcccaccaagctggtgaagaactgctttctccccctaagagaatatttcaagtatttttcaacagaactcacttcctctttataaatgagtcactatactgtgaagaaaaagacttttcctagaacaaaggcaactttcctc

SEQ ID NO: 252061 - protein, 739 aa, Artificial Sequence
  derived and/or modified sequence
MATLPAEPSAGPAAGGEAVAAAAATEEEEEEARQLLQTLQAAEGEAAAAAGAGAGAAAAGAEGPGSPGVPGSPPEAASEPPTGLRFSPEQVACVCEALLQAGHAGRLSRFLGALPPAERLRGSDPVLRARALVAFQRGEYAELYRLLESRPFPAAHHAFLQDLYLRARYHEAERARGRALGAVDKYRLRKKFPLPKTIWDGEETVYCFKERSRAALKACYRGNRYPTPDEKRRLATLTGLSLTQVSNWFKNRRQRDRTGAGGGAPCKSESDGNPTTEDESSRSPEDLERGAAPVSAEAAAQGSIFLAGTGPPAPCPASSSILVNGSFLAASGSPAVLLNGGPVIINGLALGEASSLGPLLLTGGGGAPPPQPSPQGASETKTSLVLDPQTGEVRLEEAQSEAPETKGAQVAAPGPALGEEVLGPLAQVVPGPPTAATFPLPPGPVPAVAAPQVVPLSPPPGYPTGLSPTSPLLNLPQVVPTSQVVTLPQAVGPLQLLAAGPGSPVKVAAAAGPANVHLINSGVGVTALQLPSATAPGNFLLANPVSGSPIVTGVALQQGKIILTATFPTSMLVSQVLPPAPGLALPLKPETAISVPEGGLPVAPSPALPEAHALGTLSAQQPPPAAATTSSTSLPFSPDSPGLLPNFPAPPPEGLMLSPAAVPVWSAGLELSAGTEGLLEAEKGLGTQAPHTVLRLPDPDPEGLLLGATAGGEVDEGLEAEAKVLTQLQSVPVEEPLEL

SEQ ID NO: 252062 - DNA, 5800 bp, Artificial Sequence
  derived and/or modified sequence
ggatcccgcgcccccctcctcacttgcgctgctctcggagccccagccggctccgcccgcttcggcggtttggatatttattgacctcgtcctccgactcgctgacaggctacaggacccccaacaaccccaatccacgttttggatgcactgagaccccgacattcctcggtatttattgtctgtccccacctaggacccccacccccgaccctcgcgaataaaaggccctccatctgcccaaagctctggactccacagtgtccgcggtttgcgttgtgggccggaggctccgcagcgggccaatccggaggcgtgtggaggcggccgaaggtctgggaggagctagcgggatgcgaagcggccgaatcagggttgggggaggaaaagccacggggcggggctttggcgtccggccaataggagggcgagcgggccacccggaggcaccgcccccgcccagctgtggcccagctgtgccaccgagcgtcgagaagagggggctgggctggcagcgcgcgcggccatcctccttccactgcgcctgcgcacgccacgcgcatccgctcctgggacgcaagctcgagaaaagttgctgcaaactttctagcccgttcgccgcccctcctcccggccagacccgccccccctgcggagccgggaattccgaggggcggagcgcaggccgagatggggaatgtgggggcctgcagaggaccctggagacggaggcgtgcagaagctcagtctcggggcggaggcttcgcgcccttagtcctcctggacggcccgttaccttctgcgttgtcccgatggggaaactgaggccctgagccagaagcacacgctggggggaggcagaaagcgcggccagaggcggagggaaaacaaagggagaatcacagacagacgggagggggacggacacacacaaggggacagagacccgagtggagagctggatctcgccttcccggcgtggggcgcagggtcggccagaaagaagatcgagaagagcggggagtgggggcgaaaaggggggacaggtgggggaggaggctggggaaagcccgagggaggaagagagggagggaggaacttcccaaagttgcaaaacatggctaccttgcctgcggagccgagcgcggggccggcggctgggggggaggcggtggcggcggcggcggcgaccgaagaggaggaggaggaagcgcgccagctcttgcagactttgcaggcggccgagggtgaggcggcggcggcggccggggccggggcgggcgcagcggctgcgggagctgagggcccgggatccccgggcgtccccgggtcgccccccgaggccgcttccgaaccgcccacgggcctccgcttctcgcccgagcaggtggcgtgcgtctgcgaggcgctgctccaggcgggccacgccggccgcttgagccgcttcctgggcgcactgcccccggccgagcgcctacgtggcagcgacccggtgttgcgcgcgcgggccctggtggccttccagcggggcgagtacgccgagctctaccggctactcgagagccgccccttccccgccgcccaccacgccttcctgcaggacctctacctgcgcgcgcgctaccatgaggccgagcgggcccgcggccgcgcgcttggcgcagtggacaagtatcgactgcgcaagaagttcccgctgcccaagaccatctgggacggcgaggagacagtctactgcttcaaggagcgctcccgcgcagcgctcaaggcctgctaccgcggcaaccgctaccccacgccggacgagaagcgccgcctggccacactcaccggcctgtcgctcacgcaggtcagcaactggttcaagaaccggcgacagcgcgaccggaccggggccggaggcggcgcgccctgcaagaggtgaggggcctcgggcggcgcaagtccagttctcccggggacatcccgtccaccagccctcttcccccgtgcccactgctggggccggcgcgccgaggtcctcggacatctcccgggacagctcacaatctcaggcgcccgcggggcgcggggactaagtgtggacgggacaggcacccgcccgggccctctccccgcacgcgtctcctcttccagcggctccattccgagctccttcccaaatcccatcggtgttggggaatcacactgcggggggcactagagggactgaggaaaaaggacagggcctgtggccactccactccgcgtaggggctgcctcccagccccctttcttcactgaccgttactcttacccacccgcccccacactccctccgggcccggacggcgtggtccgtcttctgcctttgttgtgaaacgtgaacctttcccagctccggtttccctgtaacccaaacccttctcctcccaccctgagcgccggcctctcccttctctgacgccccgcggggagggcaccgggaactgggctggcggctgctgctccctctctccaggccactcgcccgctttccgcccaaccaaggaacttttagggcaacctgggagctcagcctctggggacccgaggccgaggtgggggagagcaagggcctcttccctccccagcgcttctctgcagtggtgtccacgcagggcttgcaaaaggccctggagtttggagtggtctcagagaggcgtcataacccctggaatgatccaccgaaacttgggccagggaaaggtgggggagcagctggctggctatgcgggaggccccacaggctaagggaccccagctgacagccatttctccggccagcgagtctgatgggaatcccacgactgaggacgagtccagccgaagtcctgaggacctggagagaggggcggccccagtgtccgccgaggccgctgcccagggctccatattcctggcagggaccggccctcccgcgccttgcccggcttcctcctccatcctggtgaacgggagcttcctggcagccagcggctccccagcagtgctcctcaacgggggccccgtcatcatcaacggcctggccctgggcgaggcctccagcctgggcccgctgctgctcactgggggcgggggtgcccctccaccgcagcccagccctcagggggccagcgagaccaagacctctctggtcctggaccctcagacaggggaggtgcggctggaggaggctcagtcggaggcccctgagaccaaaggggcccaggtggctgctccgggaccagcccttggagaggaggtcctggggcccctggcccaagtggtgcctggccccccgacggctgccacctttcctctgcccccggggccagtgcctgctgtggctgccccacaagtggtaccgctctccccacccccggggtatcccacgggcctgagccccacctccccactattgaacctgccccaggtagtacccacctcacaggtggtgaccctgccccaggctgtggggcccctgcagctgttggcagccgggccaggcagccctgtgaaggtggcagctgcagcaggccctgccaatgtgcacctcatcaactccggggtgggcgtgactgccctgcagctgccttcggccactgccccaggtacccccatctccctccctcaggcctaggtgagagccggggaggggtgcagtcatctcggagagggaggggctgtccctgggctcctggagggcatctcatccctggcaagtcccagtgccccaaggcccaccacaaggctccctccgcccgccctccagctgcacagtctccacttctctctggcttggcctgctctcctggctctcacctgcgctcggtccctctctccccacaggaaacttcctcctggccaaccctgtgtctggcagccccatcgtgacgggtgtggccctgcagcagggcaagatcatcctcaccgccaccttccccaccagcatgctcgtctcccaggtcctgccgccagcccccggcctggccctgccactgaagccagagacggccatctccgtgcctgagggaggcctcccggtggcccccagccctgctctcccagaggctcacgccctaggcaccctttctgcacagcagccaccccccgccgctgccaccacctccagcaccagcctgcccttctcccctgactcccctggcctcctgcccaacttcccggcgcccccaccagaggggctgatgttgtcacccgcggccgtgcctgtctggtcagcagggctggaactaagcgcaggaacagaggggctgctggaagcggaaaaggggctggggacacaggccccccacaccgtgctgaggctgccagaccccgaccctgaggggctgctcctgggggccaccgcagggggtgaggttgacgaggggttggaagctgaggccaaggttctgacccagctccagtcggtgcctgtggaggagcccttggaactgtgaccagtgtggccccgtggcctctcccgacattggtgctgaagacgcagggacaggaatgggaggggggagccccagaaatgcggttgctgaagaccccagtcaccacatccttctgctctgggtggcctctccaagccctggtggtgctgggggttgtatccccggccacctcctgtccaggtctccatccccctttggatgggaggcctctctgttacagccctccccatgctgtgccctgccatatacgtgggggactcagggtcctgactcaggggccctgccccctccacttggtactagctgtaagcggaacaccctgccccagggccggacttccagcccccagagccctctccctgtcactccctgaaacactattaatagctctgccgatagctggtgttgtcacaactgcctggaatccgaaggtggaggacaggcagccccgcgcccctgagactggagaccctccccagtgtggcatttcctgccaggggcggggggtggggcagctgtggggagacgggggtcttccttcaccagctcccctcgactcaagcccttgtcctcattatccggcccagaccaaagattccctcatccctgggggcagccctgccgctgtgtctcctttgtatcctaaatctttatttttctaggacatgttatgcctccattttcaattaaaataaagttatcggattacaccaccaccaggggtctggggtgccttccagtgtctgtccaaagcagcgctgaacacagagcccacctcgagacctggccttcccattgctgcctcccgaggggaagaggggtttgcattcagatgcacagagtggctggggagggggtggcactgaggcctcttgcaagccacaggcctccagatgagggtggacggagcaccccagtggggcagcagggggacgcaggagggcctgcccttgtctctcttgctggtaacaaaggttccacttgctttattttatttaaaacaataaatagtctaaaaatagaacaggagagggaggagtagggtgaggtgagcatgaacagggttgcaaccgagtggctctggggtggggaagggaaggggagaggggtgggtaaacttcaccttccgacaccccgcatttcattttgggtttccttcctaagcctgggggagaatcaaggcagctgtgggtgactctggtgctccaggcaaatgtgcccagcggttggggctaatcagtgcccccctccccagtcccatgggacctgcattctcaggggctggaggcccaggagggacaagttcatcgatgggtcctggcttccagcaagagccgcgg

SEQ ID NO: 252063 - DNA, 2220 bp, Artificial Sequence
  derived and/or modified sequence
atggccacactgcctgccgagcctagtgcaggacctgcggctgggggcgaagccgtggcggccgcggccgctacggaggaggaggaggaggaggcgagacagcttctgcaaacattgcaggccgccgagggcgaagctgccgcagcagcgggtgcaggggccggagccgcagctgccggagctgaggggcctggcagcccaggtgtgccggggagcccccccgaggccgcctccgagccccccacgggcctccgtttcagccctgagcaggtcgcctgcgtatgcgaggcgctgctgcaggccggccacgccgggcggctgagccgcttcctcggcgccctgccgccagccgagagactacgaggtagtgacccagtgctgagggcccgggcattggtagccttccagcggggagagtacgctgaactgtaccgtttactcgaaagccgaccctttcccgctgcccaccacgcatttctgcaggatctctacctgagagccaggtaccacgaggctgaaagagccagaggaagagccctcggggctgttgataaatatcgccttaggaagaagttccctcttcccaaaaccatttgggatggcgaagaaactgtgtactgcttcaaggaacggtcccgggctgcgctcaaggcctgctatcgcggcaaccgctatccaaccccagacgagaagaggaggctcgccacgctcacaggactgtctctgacccaggtttcaaattggttcaagaaccgtagacagcgggaccgaacgggagccggcggcggtgctccttgcaaatcagagtctgacggtaacccaactacagaggacgaatcctcccgcagtcctgaagatctcgagagaggagctgcacccgtgtccgccgaggcagcagcccagggtagcattttcctcgctggcaccgggccccccgcaccttgcccagcctcatcttctatactggtcaacggatcttttctggctgcctcaggttcacctgctgtcctgcttaatggaggccctgtcataatcaatggattggcccttggagaggcgtccagtcttgggcctcttctgttaactgggggtggcggtgcgcccccaccacagccgtctcctcagggcgcttcagagaccaagacatccctggtgttggatcctcagacgggagaggtccgtctggaagaagctcagtctgaagcccccgagaccaagggagcacaagtagccgcccccggccccgcactgggtgaagaggtcctcggccccctggcacaggtggtgcccggaccccccacagccgccaccttccccctaccacccggcccggtgcccgctgtggctgccccgcaggttgttcccttgtcacccccccccgggtaccctacaggcttgagtcccactagtccgctgttgaatctcccccaggtggtgcctacctcgcaggtcgtcactctgccccaggctgtcggcccgttgcagctgttagccgcgggacctggcagtccggttaaagtggcggccgccgccgggcctgccaatgtccacttaattaactccggagtgggcgtaactgcccttcagctgccttcagcaactgcaccgggtaactttttattggctaatccggtaagcggatctcccattgtaacaggtgtagcactgcaacagggaaaaattatcctgacagcaacttttcccactagtatgctggttagccaggtgctgccccccgctccaggccttgccctccccctgaagcccgaaactgcgatcagcgttcccgaaggagggctcccagtggcaccctcacctgccctccctgaggctcacgcgctggggacgctgtccgcccagcagcctccccctgcagcagccaccacttctagtacgtcactgcccttcagcccagatagccctgggctcctcccaaattttcccgcaccccctccagagggcctcatgttatcccccgctgctgtgcctgtgtggtcagcaggcctcgagctcagtgcgggaacagagggactgctggaagctgagaaggggctgggtacacaggccccgcatacagtgcttagattgcctgatcccgacccagaaggcctattgctcggcgccactgcaggcggtgaggtggatgaaggcctggaggccgaggccaaggtgcttacccagctgcagtcggtacccgtcgaggagcccttggagctatag

SEQ ID NO: 252064 - DNA, 2220 bp, Artificial Sequence
  derived and/or modified sequence
atggccaccctgcctgctgagcccagcgctggccctgctgctggaggagaggccgtggccgctgctgctgccacagaggaggaggaggaggaggcccggcagctgctgcagaccctgcaggccgctgagggggaggccgctgctgctgctggggccggggccggggctgctgctgctggagctgagggccctggcagccctggggtgcccggcagccccccagaggccgccagcgagccccccaccggcctgcgcttcagccctgagcaggtggcctgtgtgtgtgaggccctgctgcaggccggccacgccggccgcctgagccgcttcctgggcgccctgcccccagctgagcggctgcggggcagtgaccctgtgctgcgggcccgggccctggtggccttccagagaggagaatatgcagagctgtaccgcctgctggagagccggcccttccctgctgcccaccacgccttcctgcaggacctgtacctgcgggcccgctaccacgaggccgagcgggcccggggccgggccctgggcgctgtggacaagtaccgcctgaggaagaagttccccctgcccaagaccatctgggatggagaggagaccgtgtactgcttcaaggagaggagccgggccgccctgaaggcctgctaccggggcaaccgctaccccaccccagatgagaagaggcggctggccaccctgaccggcctgagcctgacccaggtgagcaactggttcaagaacagacggcagagggacagaactggagctgggggcggggccccctgcaagtctgagagtgatggcaaccccaccacagaagatgagagcagccgcagccctgaggacctggagagaggagctgcccctgtgtctgctgaggccgccgcccagggcagcatcttcctggccggcactggacctccagccccctgcccagccagcagcagcatcctggtgaatggcagcttcctggccgccagcggcagccctgctgtgctgctgaatggaggccctgtgatcatcaatggcctggccctgggggaggccagcagcctgggccccctgctgctgaccggcggcggcggggcccccccaccccagcccagcccccagggcgccagcgagaccaagaccagcctggtgctggacccccagacaggagaggtgcggctggaggaggcccagagcgaggcccctgagaccaagggggcccaggtggccgcccctggccctgccctgggggaggaggtgctgggccccctggcccaggtggtgcccggccccccaacagctgccaccttccccctgcccccaggccctgtgcctgctgtggccgccccccaggtggtgcccctgagccccccacctggctaccccaccggcctgagccccaccagccccctgctgaacctgccccaggtggtgcccaccagccaggtggtgaccctgccccaggccgtgggccccctgcagctgctggccgccggccctggcagccctgtgaaggtggccgctgctgctggccctgccaacgtgcacctgatcaacagcggcgtgggcgtgacagccctgcagctgcccagcgccacagcccctggcaacttcctgctggccaaccctgtgtctggcagccccatcgtgactggagtggccctgcagcagggcaagatcatcctgacagccaccttccccacctccatgctggtgtcccaggtgctgcccccagcccctggcctggccctgcccctgaagccagagacagccatctctgtgcctgagggcggcctgcctgtggcccccagccctgccctgcctgaggcccacgccctgggcaccctgagcgcccagcagcccccacctgctgctgccaccaccagcagcaccagcctgcccttctccccagacagccctggcctgctgcccaacttccctgcccctcctcctgagggcctgatgctgagccctgctgctgtgcctgtgtggagcgctggcctggagctgtctgctggaacagagggcctgctggaggccgagaagggcctgggcacccaggccccccacacagtgctgcggctgcctgaccctgaccctgagggcctgctgctgggcgccacagctggaggagaggtggatgagggcctggaggccgaggccaaggtgctgacccagctgcagagcgtgcctgtggaggagcccctggagctgtag

SEQ ID NO: 252065 - DNA, 2220 bp, Artificial Sequence
  derived and/or modified sequence
atggccaccctgcccgccgagcccagcgccggccccgccgccggcggggaggcagtggccgccgcagccgccaccgaagaggaggaggaggaagcccgtcagctgctgcagaccctccaggcagccgaaggagaggccgccgctgccgcgggggccggagcgggtgctgcagctgccggggcagagggcccagggtcccccggcgtccccggaagtcctcctgaggccgcatccgaaccgccaaccggacttaggttcagccctgagcaggtcgcctgcgtctgcgaagccctgctgcaggctgggcacgccggacgcctatcccgctttctaggggctctacctccagctgaaaggctcagaggatcggaccccgtactgcgggctcgggctctggtggccttccagcgtggcgaatatgccgagctctacagactgctcgagagtcggccattccccgctgcccaccatgccttcctgcaggacctctatctgagggcccggtaccacgaggccgaaagagctagagggcgagcccttggcgctgtcgacaagtacaggctgcgaaaaaagttcccgctgcccaagacaatctgggatggcgaggagactgtgtactgctttaaggagcgcagccgcgctgctctcaaagcttgctatagaggcaaccgctatcccacccctgacgaaaaaagacgcctggcaacactgaccgggctctccctgacgcaggtatccaattggttcaagaatcgccggcaacgggacaggacgggggccggcggcggagctccctgcaagagcgagagcgacggcaatcccacaaccgaggacgagtccagtcggtcccccgaagacctggaacgcggggcagcccccgtctctgctgaggccgccgcacaggggtctatcttcttagctggcacagggccgcctgcgccctgccccgctagctccagcatcctggtcaacggatcattcctcgcagcaagtggcagtccagctgtactgcttaacggtgggccagtcataattaacggtctagccctgggggaggcttccagcctgggaccactcttactcactggcggtggaggcgcaccccctccacagccttctcctcaaggcgcctctgagaccaagacatccctcgtgctcgatccccaaaccggggaagtgcgccttgaagaggcgcaatcggaagctccagagacaaagggagcacaagttgctgccccgggacccgcgctgggcgaagaggtgctgggtccactcgcgcaggtggttcctggcccacctacagctgccaccttcccattacctcctggaccggtgcccgccgtggcggcaccccaagtcgtgccattaagtccaccccccggctatcccacgggtctcagccctacttccccgctgctgaacctgccacaggtcgtaccaacttcgcaggtggttacccttccacaggccgtcggacccctccaactacttgctgccgggcccgggagtcccgtgaaagtggccgctgcggccggtccagcaaatgtgcatcttatcaactccggcgttggcgtgacggctctacagctgccctctgccaccgctccaggtaactttctcttagctaaccctgtgtcaggcagcccaatcgtgaccggggtcgccctccagcagggaaaaatcatattgaccgctacctttccaactagtatgttggtctcccaggtccttccccctgctcctggactcgccctgcctttgaagcccgagacagcgatttcggtaccggagggcggactacctgttgcacccagcccagcacttccggaggcacacgcccttggcacactcagtgcccagcagcctcccccagccgcggcaaccactagttcaacaagcctccccttttcaccggactcccctgggctcctgccgaattttccagcgccacctccagagggcttgatgctcagtccagcagcagtgccggtgtggtcagccggtctggagctttccgccggaaccgagggtctccttgaagccgagaaggggctaggtacacaggctcctcacaccgtcttaagacttcccgatcctgatcccgaaggattactgttaggtgcgaccgccggcggggaggttgatgagggcctggaggccgaggctaaagtcctgacgcagcttcagtccgtgcccgtagaagaacctctcgagttgtag

SEQ ID NO: 252066 - DNA, 2220 bp, Artificial Sequence
  derived and/or modified sequence
atggccacactgcccgcagagccttctgcaggacccgctgccggtggggaggcagtggcggcagctgccgcaaccgaagaagaggaggaagaggctagacaactgttgcagacgcttcaagcggcagaaggggaggccgcagctgctgcgggagcgggagctggtgcggctgctgctggcgctgagggtccaggctccccaggggtgcctgggtcgcctccggaagccgcttccgaacccccaactggattgcggttctcccctgaacaggttgcttgcgtctgcgaggcactgctccaagccggacatgccggaagactttcccggttccttggcgctctgccccctgcggaacgtcttcgcggttccgaccccgtcctgcgggctagagcactcgtggccttccaacggggagagtatgccgagctgtaccggctgctggagagcagaccattccctgcagcacaccatgcatttctgcaggacctgtacttgcgcgcacgttaccacgaggctgaacgcgctcggggaagggctttgggcgctgtagacaaatacaggctgcgaaagaaattccctttacccaaaacaatttgggatggtgaagagaccgtgtactgctttaaggagaggtccagagctgctctgaaggcatgctacaggggcaacaggtatccaacaccggacgagaagcggcgattggctactctgacaggactgtcgctaacacaggtaagcaactggttcaagaaccgaagacagcgcgaccggactggagccggaggaggcgctccatgtaaatcagaaagtgatggtaatcctaccaccgaggatgaaagcagccgatctcccgaagatctcgagcggggtgccgctcccgtcagcgctgaggctgccgcacaaggcagcatttttcttgccggaaccggaccgcctgccccatgtcctgcaagcagtagcattctggttaatggttctttcctagctgcctccggaagccctgccgttctacttaacgggggacccgtcattatcaacggcctggcactgggcgaggcgagtagcctgggcccacttttgctgacaggtggcggaggtgcccctcccccacagccttcaccccagggtgcttccgagaccaaaacctccctggtgctggaccctcagaccggtgaggtgcgacttgaagaggcccagtctgaagctccggagactaagggtgctcaggtcgccgctcccggtcctgccctcggcgaggaagtgctcggaccgctcgcgcaagtggtacccggacccccaaccgctgcaactttcccgttgcctcccggaccggtgccagcagtagcagcccctcaagttgtgccgttgagtccaccgccaggttatccaacggggctatcacctacaagtccccttctcaatctgccacaggtagttcccacttcccaggtcgtcacccttcctcaggctgtgggcccactccagcttttagcggctggtcctggttctccagtgaaagtggccgctgccgctggcccagctaacgtccatttgataaattctggtgtcggtgtgaccgcactccagttgccctcagccaccgcccctggaaattttttgctggccaacccggttagcggtagcccaatcgtgacaggggttgcccttcaacaaggtaagataatattgactgcaactttcccaacttccatgttggtctcgcaggtgctccccccagctcctggcctagccctgcctcttaagcccgagactgcaattagcgtccctgagggcggtctcccagtcgctccctccccagcattgcccgaagcgcacgcattgggcactttgtccgcacagcaaccccctcccgcagcggctaccacatcatcaaccagcctgccattcagtcctgattcccccggtctgctgcctaatttccccgctcctccaccagagggcctgatgctcagtcccgcagcggtgccagtgtggagtgctggtctggagctgtctgcgggtacggaggggctgctggaggctgagaaagggctcggaactcaagcaccccatacagtgcttagacttccggacccagatccagagggcctgctcttaggcgctacagcaggtggtgaggttgatgagggcctggaggccgaggctaaagtgctaacccaactgcagtccgtccctgtggaagagcccttggaactctag

SEQ ID NO: 252067 - DNA, 2974 bp, Artificial Sequence
  derived and/or modified sequence
ggaagagagggagggaggaacttcccaaagttgcaaaacatggctaccttgcctgcggagccgagcgcggggccggcggctgggggggaggcggtggcggcggcggcggcgaccgaagaggaggaggaggaagcgcgccagctcttgcagactttgcaggcggccgagggtgaggcggcggcggcggccggggccggggcgggcgcagcggctgcgggagctgagggcccgggatccccgggcgtccccgggtcgccccccgaggccgcttccgaaccgcccacgggcctccgcttctcgcccgagcaggtggcgtgcgtctgcgaggcgctgctccaggcgggccacgccggccgcttgagccgcttcctgggcgcactgcccccggccgagcgcctacgtggcagcgacccggtgttgcgcgcgcgggccctggtggccttccagcggggcgagtacgccgagctctaccggctactcgagagccgccccttccccgccgcccaccacgccttcctgcaggacctctacctgcgcgcgcgctaccatgaggccgagcgggcccgcggccgcgcgcttggcgcagtggacaagtatcgactgcgcaagaagttcccgctgcccaagaccatctgggacggcgaggagacagtctactgcttcaaggagcgctcccgcgcagcgctcaaggcctgctaccgcggcaaccgctaccccacgccggacgagaagcgccgcctggccacactcaccggcctgtcgctcacgcaggtcagcaactggttcaagaaccggcgacagcgcgaccggaccggggccggaggcggcgcgccctgcaagagcgagtctgatgggaatcccacgactgaggacgagtccagccgaagtcctgaggacctggagagaggggcggccccagtgtccgccgaggccgctgcccagggctccatattcctggcagggaccggccctcccgcgccttgcccggcttcctcctccatcctggtgaacgggagcttcctggcagccagcggctccccagcagtgctcctcaacgggggccccgtcatcatcaacggcctggccctgggcgaggcctccagcctgggcccgctgctgctcactgggggcgggggtgcccctccaccgcagcccagccctcagggggccagcgagaccaagacctctctggtcctggaccctcagacaggggaggtgcggctggaggaggctcagtcggaggcccctgagaccaaaggggcccaggtggctgctccgggaccagcccttggagaggaggtcctggggcccctggcccaagtggtgcctggccccccgacggctgccacctttcctctgcccccggggccagtgcctgctgtggctgccccacaagtggtaccgctctccccacccccggggtatcccacgggcctgagccccacctccccactattgaacctgccccaggtagtacccacctcacaggtggtgaccctgccccaggctgtggggcccctgcagctgttggcagccgggccaggcagccctgtgaaggtggcagctgcagcaggccctgccaatgtgcacctcatcaactccggggtgggcgtgactgccctgcagctgccttcggccactgccccaggaaacttcctcctggccaaccctgtgtctggcagccccatcgtgacgggtgtggccctgcagcagggcaagatcatcctcaccgccaccttccccaccagcatgctcgtctcccaggtcctgccgccagcccccggcctggccctgccactgaagccagagacggccatctccgtgcctgagggaggcctcccggtggcccccagccctgctctcccagaggctcacgccctaggcaccctttctgcacagcagccaccccccgccgctgccaccacctccagcaccagcctgcccttctcccctgactcccctggcctcctgcccaacttcccggcgcccccaccagaggggctgatgttgtcacccgcggccgtgcctgtctggtcagcagggctggaactaagcgcaggaacagaggggctgctggaagcggaaaaggggctggggacacaggccccccacaccgtgctgaggctgccagaccccgaccctgaggggctgctcctgggggccaccgcagggggtgaggttgacgaggggttggaagctgaggccaaggttctgacccagctccagtcggtgcctgtggaggagcccttggaactgtgacccagtgtggccccgtggcctctcccgacattggtgctgaagacgcagggacaggaatgggaggggggagccccagaaatgcggttgctgaagaccccagtcaccacatccttctgcctgggtggcctctccaagccctggtggtgctgggggttgtatccccggccacctcctgtccaggtctccatccccctttggatgggaggcctctctgttacagccctccccatgctgtgccctgccatatacgtgggggactcagggtcctgactcaggggccctgccccctccacttggtactagctgtaagcggaacaccctgccccagggccggacttccagcccccagagccctctccctgtcactccctgaaacactattaatagctctgccgatagctggtgttgtcacaactgcctggaatccgaaggtggaggacaggcagccccgcgcccctgagactggagaccctccccagtgtggcatttcctgccaggggcggggggtggggcagctgtggggagacgggggtcttccttcaccagctcccctcgactcaagcccttgtcctcattatccggcccagaccaaagattccctcatccctgggggcagccctgccgctgtgtctcctttgtatcctaaatctttatttttctaggacatgttatgcctccattttcaattaaaataaagttatcggattacaccacc

SEQ ID NO: 252068 - DNA, 2220 bp, Artificial Sequence
  derived and/or modified sequence
atggccaccctgcccgccgagcccagcgccggccccgccgccggcggcgaggccgtggccgccgccgccgccaccgaggaggaggaggaggaggccagacagctgctgcagaccctgcaggccgccgagggcgaggccgccgccgccgccggcgccggcgccggcgccgccgccgccggcgccgagggccccggcagccccggcgtgcccggcagcccccccgaggccgccagcgagccccccaccggcctgagattcagccccgagcaggtggcctgcgtgtgcgaggccctgctgcaggccggccacgccggcagactgagcagattcctgggcgccctgccccccgccgagagactgagaggcagcgaccccgtgctgagagccagagccctggtggccttccagagaggcgagtacgccgagctgtacagactgctggagagcagacccttccccgccgcccaccacgccttcctgcaggacctgtacctgagagccagataccacgaggccgagagagccagaggcagagccctgggcgccgtggacaagtacagactgagaaagaagttccccctgcccaagaccatctgggacggcgaggagaccgtgtactgcttcaaggagagaagcagagccgccctgaaggcctgctacagaggcaacagataccccacccccgacgagaagagaagactggccaccctgaccggcctgagcctgacccaggtgagcaactggttcaagaacagaagacagagagacagaaccggcgccggcggcggcgccccctgcaagagcgagagcgacggcaaccccaccaccgaggacgagagcagcagaagccccgaggacctggagagaggcgccgcccccgtgagcgccgaggccgccgcccagggcagcatcttcctggccggcaccggcccccccgccccctgccccgccagcagcagcatcctggtgaacggcagcttcctggccgccagcggcagccccgccgtgctgctgaacggcggccccgtgatcatcaacggcctggccctgggcgaggccagcagcctgggccccctgctgctgaccggcggcggcggcgccccccccccccagcccagcccccagggcgccagcgagaccaagaccagcctggtgctggacccccagaccggcgaggtgagactggaggaggcccagagcgaggcccccgagaccaagggcgcccaggtggccgcccccggccccgccctgggcgaggaggtgctgggccccctggcccaggtggtgcccggcccccccaccgccgccaccttccccctgccccccggccccgtgcccgccgtggccgccccccaggtggtgcccctgagccccccccccggctaccccaccggcctgagccccaccagccccctgctgaacctgccccaggtggtgcccaccagccaggtggtgaccctgccccaggccgtgggccccctgcagctgctggccgccggccccggcagccccgtgaaggtggccgccgccgccggccccgccaacgtgcacctgatcaacagcggcgtgggcgtgaccgccctgcagctgcccagcgccaccgcccccggcaacttcctgctggccaaccccgtgagcggcagccccatcgtgaccggcgtggccctgcagcagggcaagatcatcctgaccgccaccttccccaccagcatgctggtgagccaggtgctgccccccgcccccggcctggccctgcccctgaagcccgagaccgccatcagcgtgcccgagggcggcctgcccgtggcccccagccccgccctgcccgaggcccacgccctgggcaccctgagcgcccagcagcccccccccgccgccgccaccaccagcagcaccagcctgcccttcagccccgacagccccggcctgctgcccaacttccccgcccccccccccgagggcctgatgctgagccccgccgccgtgcccgtgtggagcgccggcctggagctgagcgccggcaccgagggcctgctggaggccgagaagggcctgggcacccaggccccccacaccgtgctgagactgcccgaccccgaccccgagggcctgctgctgggcgccaccgccggcggcgaggtggacgagggcctggaggccgaggccaaggtgctgacccagctgcagagcgtgcccgtggaggagcccctggagctgtag

SEQ ID NO: 252069 - protein, 684 aa, Artificial Sequence
  derived and/or modified sequence
MACLGFLLPVGFLLLISTVAGGKYGVAHVVSENWSKDYCILFSSDYITLPRDLHHAPLLPLYDGTKAPWCPGEDSPHQAQLRSPSQRPLRQTTAMVMRGNCSFHTKGWLAQGQGAHGLLIVSRVSDQQCSDTTLAPQDPRQPLADLTIPVAMLHYADMLDILSHTRGEAVVRVAMYAPPEPIIDYNMLVIFILAVGTVAAGGYWAGLTEANRLQRRRARRGGGSGGHHQLQEAAAAEGAQKEDNEDIPVDFTPAMTGVVVTLSCSLMLLLYFFYDHFVYVTIGIFGLGAGIGLYSCLSPLVCRLSLRQYQRPPHSLWASLPLPLLLLASLCATVIIFWVAYRNEDRWAWLLQDTLGISYCLFVLHRVRLPTLKNCSSFLLALLAFDVFFVFVTPFFTKTGESIMAQVALGPAESSSHERLPMVLKVPRLRVSALTLCSQPFSILGFGDIVVPGFLVAYCCRFDVQVCSRQIYFVACTVAYAVGLLVTFMAMVLMQMGQPALLYLVSSTLLTSLAVAACRQELSLFWTGQGRAKMCGLGCAPSAGSRQKQEGAADAHTASTLERGTSRGAGDLDSNPGEDTTEIVTISENEATNPEDRSDSSEGWSDAHLDPNELPFIPPGASEELMPLMPMAMLIPLMPLMPPPSELGHVHAQAQAHETGLPWAGLHKRKGLKVRKSMSTQAPL

SEQ ID NO: 252070 - protein, 684 aa, Artificial Sequence
  derived and/or modified sequence
MACLGFLLPVGFLLLISTVAGGKYGVAHVVSENWSKDYCILFSSDYITLPRDLHHAPLLPLYDGTKAPWCPGEDSPHQAQLRSPSQRPLRQTTAMVMRGNCSFHTKGWLAQGQGAHGLLIVSRVSDQQCSDTTLAPQDPRQPLADLTIPVAMLHYADMLDILSHTRGEAVVRVAMYAPPEPIIDYNMLVIFILAVGTVAAGGYWAGLTEANRLQRRRARRGGGPGGHHQLQEAAAAEGAQKEDNEDIPVDFTPAMTGVVVTLSCSLMLLLYFFYDHFVYVTIGIFGLGAGIGLYSCLSPLVCRLSLRQYQRPPHSLWASLPLPLLLLASLCTTVIIFWVAYRNEDRWAWLLQDTLGISYCLFVLHRVRLPTLKNCSSFLLALLAFDVFFVFVTPFFTKTGESIMAQVALGPAESSSHERLPMVLKVPRLRVSALTLCSQPFSILGFGDIVVPGFLVAYCCPFDVQVCSRQVYFVACTVAYAVGLLVTFMAMVLMQMGQPALLYLVSSTLLTSLAVAACRQELSLFWTGQGRAKMCGLGCAPSAGSRQKQEGAADAHTASTLERGTSRGAGDLDSNPGEDTTEIVTISENEATNPEDRSDSPEGWSDAHLDPNELPFIPPRASEELMPLMPMAMLIPLMPLMPRPSELGHVHAQAQAHETGLPWAGLHKRKGLKVRKSMSTQAPL

SEQ ID NO: 252071 - DNA, 2055 bp, Artificial Sequence
  derived and/or modified sequence
atggcctgcctgggcttcctgctgcccgtgggcttcctgctgctgatcagcaccgtggccggcggcaagtacggcgtggcccacgtggtgagcgagaactggagcaaggactactgcatcctgttcagcagcgactacatcaccctgcccagagacctgcaccacgcccccctgctgcccctgtacgacggcaccaaggccccctggtgccccggcgaggacagcccccaccaggcccagctgagaagccccagccagagacccctgagacagaccaccgccatggtgatgagaggcaactgcagcttccacaccaagggctggctggcccagggccagggcgcccacggcctgctgatcgtgagcagagtgagcgaccagcagtgcagcgacaccaccctggccccccaggaccccagacagcccctggccgacctgaccatccccgtggccatgctgcactacgccgacatgctggacatcctgagccacaccagaggcgaggccgtggtgagagtggccatgtacgccccccccgagcccatcatcgactacaacatgctggtgatcttcatcctggccgtgggcaccgtggccgccggcggctactgggccggcctgaccgaggccaacagactgcagagaagaagagccagaagaggcggcggcagcggcggccaccaccagctgcaggaggccgccgccgccgagggcgcccagaaggaggacaacgaggacatccccgtggacttcacccccgccatgaccggcgtggtggtgaccctgagctgcagcctgatgctgctgctgtacttcttctacgaccacttcgtgtacgtgaccatcggcatcttcggcctgggcgccggcatcggcctgtacagctgcctgagccccctggtgtgcagactgagcctgagacagtaccagagacccccccacagcctgtgggccagcctgcccctgcccctgctgctgctggccagcctgtgcgccaccgtgatcatcttctgggtggcctacagaaacgaggacagatgggcctggctgctgcaggacaccctgggcatcagctactgcctgttcgtgctgcacagagtgagactgcccaccctgaagaactgcagcagcttcctgctggccctgctggccttcgacgtgttcttcgtgttcgtgacccccttcttcaccaagaccggcgagagcatcatggcccaggtggccctgggccccgccgagagcagcagccacgagagactgcccatggtgctgaaggtgcccagactgagagtgagcgccctgaccctgtgcagccagcccttcagcatcctgggcttcggcgacatcgtggtgcccggcttcctggtggcctactgctgcagattcgacgtgcaggtgtgcagcagacagatctacttcgtggcctgcaccgtggcctacgccgtgggcctgctggtgaccttcatggccatggtgctgatgcagatgggccagcccgccctgctgtacctggtgagcagcaccctgctgaccagcctggccgtggccgcctgcagacaggagctgagcctgttctggaccggccagggcagagccaagatgtgcggcctgggctgcgcccccagcgccggcagcagacagaagcaggagggcgccgccgacgcccacaccgccagcaccctggagagaggcaccagcagaggcgccggcgacctggacagcaaccccggcgaggacaccaccgagatcgtgaccatcagcgagaacgaggccaccaaccccgaggacagaagcgacagcagcgagggctggagcgacgcccacctggaccccaacgagctgcccttcatcccccccggcgccagcgaggagctgatgcccctgatgcccatggccatgctgatccccctgatgcccctgatgcccccccccagcgagctgggccacgtgcacgcccaggcccaggcccacgagaccggcctgccctgggccggcctgcacaagagaaagggcctgaaggtgagaaagagcatgagcacccaggcccccctgtag

SEQ ID NO: 252072 - DNA, 2055 bp, Artificial Sequence
  derived and/or modified sequence
atggcctgtcttggctttctgctccccgtaggcttcctgctccttatcagcacagtggcagggggcaaatacggagtagcacatgttgtttctgaaaactggagtaaagattactgtatactgtttagctcggactacattactctcccccgcgacttgcaccacgcgccacttttgcccctgtatgacgggactaaagctccctggtgccctggggaagattctccccatcaggctcagctacgcagcccttcacaaagaccactgaggcagaccaccgctatggtgatgcgcgggaactgttctttccacaccaaaggatggctggcacaagggcagggagctcatggcctgttaatagtttccagagtctcagatcagcagtgtagcgacaccaccctcgcacctcaagaccctaggcagcctttagcggaccttaccattcctgtcgctatgctgcactacgccgatatgctggatattctctcacacacaagaggagaagctgttgtgagagtggctatgtatgctcctccggagccaattatagactataatatgctggtgatttttattttggcagtagggacagtcgccgctggaggctactgggcgggtcttaccgaagcaaaccggctccaacggaggagggcaagacgcggtggaggtagcggcggtcatcatcagcttcaggaggctgcagctgcggaaggagcccaaaaagaggacaacgaagacatcccagtggattttacgcccgcaatgaccggtgtggtcgtgaccctttcctgctctctgatgttgctgctgtacttcttttacgaccattttgtctacgtcactatcggaatatttggcttgggggcggggattgggctctattcgtgcctttctcccctcgtttgccggctctccctgcgacaataccagcgcccacctcattcgctgtgggcgtccctccctctgccactcctgctgctggcaagcttatgtgcaacggtgatcatcttttgggtagcataccgaaatgaagatcgttgggcttggctcctgcaggatactctcgggatctcctattgtctgttcgtgttgcatcgcgtgcgactgcccacactgaagaactgcagctcattccttctggccttgttggcctttgatgtcttctttgtttttgtgaccccatttttcaccaagaccggtgagtccatcatggcccaggttgccctgggacccgcagaaagcagctcgcacgaacggctccccatggtgctgaaggtgcccagactgcgcgttagcgcactgaccctgtgctcacagccattttcaattctagggtttggagacatcgtcgtgccgggatttcttgtggcatattgttgtagattcgatgtacaggtgtgctcgagacagatctacttcgtggcgtgtactgtggcatacgcagtggggttattggtcacatttatggctatggtactgatgcagatggggcagccagcgctgctctatctagtgtcatcgaccctgctaacaagcttggcagtagccgcatgtcggcaggagttgtccctattctggactggtcagggacgcgctaagatgtgcgggctcggatgcgccccgagcgccggatcccgtcaaaagcaggaaggagctgcagatgctcacactgcctcgacactggaacgtgggacaagccggggtgcaggagacctagattccaatcccggagaggatacaacagaaattgttaccattagcgaaaatgaagcgacaaatcctgaggacagatcggatagtagcgagggttggtccgatgcacacctggacccgaatgagctgccattcatccctcccggggcatcagaagaactgatgccgctgatgccgatggcgatgctgattcctctaatgccacttatgccccccccaagcgaactgggacacgtgcatgcccaggcccaggcacatgaaaccggtctcccctgggctggcctgcataagcgaaagggccttaaagtccgcaaaagtatgagtacccaagctccactctag

SEQ ID NO: 252073 - DNA, 2055 bp, Artificial Sequence
  derived and/or modified sequence
atggcctgcctgggcttcctgctgcctgtgggcttcctgctgctgatcagcacagtggccggcggcaagtatggagtggcccacgtggtgtctgagaactggagcaaggactactgcatcctcttcagcagtgactacatcaccctgccccgggacctgcaccacgcccccctgctgcccctgtatgatggcaccaaggccccctggtgccctggagaggacagcccccaccaggcccagctgcggagccccagccagaggcccctgcggcagaccacagccatggtgatgaggggcaactgcagcttccacaccaagggctggctggcccagggccagggcgcccacggcctgctgattgtgtcccgggtgtctgaccagcagtgcagcgacaccaccctggccccccaggacccccggcagcccctggccgacctgaccatccctgtggccatgctgcactacgccgacatgctggacatcctgagccacaccagaggagaggccgtggtgcgggtggccatgtatgcccctcctgagcccatcatcgactacaacatgctggtgatcttcatcctggccgtgggcaccgtggccgccggcggctactgggccggcctgacagaggccaaccggctgcagaggcggcgggccaggagaggaggcggcagcggcggccaccaccagctgcaggaggccgctgctgctgagggcgcccagaaggaggacaatgaagacatccctgtggacttcaccccagccatgactggagtggtggtgaccctgagctgcagcctgatgctgctgctgtacttcttctatgaccactttgtgtatgtgaccatcggcatcttcggcctgggcgccggcatcggcctgtacagctgcctgagccccctggtgtgccgcctgagcctgcggcagtaccagaggcctccccacagcctgtgggccagcctgcccctgcccctgctgctgctggccagcctgtgtgccaccgtcatcatcttctgggtggcctacagaaatgaagatcgctgggcctggctgctgcaggacaccctgggcatctcctactgcctgtttgtgctgcaccgggtgcggctgcccaccctgaagaactgcagcagcttcctgctggccctgctggcctttgatgtgttctttgtgtttgtgacccccttcttcaccaagacaggagagagcatcatggcccaggtggccctgggccctgctgagagcagcagccatgagcggctgcccatggtgctgaaggtgccccggctgcgggtgtctgccctgaccctgtgcagccagcccttcagcatcctgggctttggagacatcgtggtgcccggcttcctggtggcctactgctgccgctttgatgtgcaggtgtgcagccggcagatctactttgtggcctgcaccgtggcctatgctgtgggcctgctggtgaccttcatggccatggtgctgatgcagatgggccagcctgccctgctgtacctggtgagcagcaccctgctgaccagcctggccgtggccgcctgccggcaggagctgagcctcttctggacaggccagggccgggccaagatgtgtggcctgggctgtgcccccagcgctggcagccggcagaagcaggagggcgctgctgatgcccacacagccagcaccctggagcggggcaccagcagaggagctggggacctggacagcaaccctggagaggacaccacagaaattgtgaccatcagtgaaaatgaggccaccaacccagaagatagaagtgacagcagcgagggctggagcgatgcccacctggaccccaatgagctgcccttcatccccccaggggccagcgaggagctgatgcccctgatgcccatggccatgctgatccccctgatgcccctgatgcctcctccttctgagctgggccacgtgcacgcccaggcccaggcccatgaaacaggcctgccctgggccggcctgcacaagaggaagggcctgaaggtgaggaagtccatgagcacccaggcccccctgtag

SEQ ID NO: 252074 - DNA, 2055 bp, Artificial Sequence
  derived and/or modified sequence
atggcctgcctgggcttcctgctgcccgtgggcttcctgctgctgataagtaccgtggctggcggaaagtatggagttgcccatgtggtctccgaaaactggtctaaggactactgtattttattttcatcagactatatcactctgcccagggacctgcaccacgcaccacttctgccgctttacgacggaactaaggcaccatggtgcccaggggaggacagccctcaccaagcgcagctgagatcccccagtcagagacccctgagacaaactactgctatggtgatgcgcggaaactgttccttccacacaaagggctggctcgcccagggtcagggcgctcatgggttgctaatcgtgtctcgtgtctcagaccagcagtgcagtgacacaaccctggcacctcaggacccaagacaacccttggcagatttaaccattccagtggccatgctgcactatgcagatatgctggacatcctctcccatacacggggagaggctgtagtgcgcgtcgctatgtacgctcctccagaacccatcattgattacaatatgctggttatttttattctggcagtcggaacagtagccgcaggaggttactgggccgggttaactgaagccaataggctacaacgccgccgtgcccgtcggggcggaggctctggggggcatcaccagctgcaggaagccgccgccgccgagggagcccagaaagaagataatgaggacattccagtcgactttacacccgctatgactggcgtggttgtcaccctgtcctgctcccttatgctgctgttgtatttcttctacgaccatttcgtgtacgtcactatcgggatcttcgggctaggtgcaggtattggactgtacagttgcctgagtcccctggtttgcaggctgtctcttaggcaataccaaaggcccccacatagcctgtgggcctcccttcctctaccgcttctgcttttggcttccttgtgcgctacggttatcattttctgggtggcctacagaaatgaagatcgatgggcatggcttctgcaggacacactcgggatatcttactgcctcttcgtgttgcaccgagtccggcttcccacgctcaagaactgctctagcttcctgctggcacttttggcattcgatgtgttcttcgtcttcgtgacaccattttttacaaaaacgggtgagtccatcatggcacaggtggcactagggcctgctgagtcttccagtcacgaacgtctacctatggtccttaaggtgcctagactgcgggtgtcggcgctgaccctgtgttcgcagcctttttcaatcctcggattcggagatatagtcgtccccggcttcctggtcgcgtattgttgcagattcgatgttcaggtgtgcagtcgacagatttacttcgtcgcctgtactgtcgcatatgctgttgggctactcgtcacattcatggccatggtgttgatgcagatgggtcaacccgccctgctctacctggtgagcagcactctgttgacatcccttgctgtggccgcctgccgacaagaattgtccctgttctggactggacagggaagagccaaaatgtgtggccttggatgtgcaccatctgcggggtctcgccaaaagcaagagggtgccgccgatgcccacacagctagcacactcgagcgtggcacgtccaggggggccggcgatctagattccaatccgggagaagataccaccgagattgtcacaatatccgaaaatgaggccaccaaccccgaggacagatctgactcttcagaagggtggagcgacgctcacctcgaccccaatgaactcccttttatccctcctggagcaagtgaagaactcatgcccctcatgcctatggctatgcttattcctcttatgccactgatgcctccccctagcgaactggggcatgtccatgctcaggctcaggcccacgaaacagggctgccttgggctggcctccacaagaggaaaggacttaaagtgcgaaaatccatgagcacccaagcaccactttag

SEQ ID NO: 252075 - DNA, 2055 bp, Artificial Sequence
  derived and/or modified sequence
atggcttgcttgggcttcctgctacctgtggggtttttactgctaatcagtacagtagcgggtggaaaatatggcgtagctcacgtggtctcagaaaattggtctaaagattactgcatacttttctcgagcgactatatcacactgcccagggaccttcaccacgccccactcctgcctctctatgatggcaccaaggccccatggtgtcctggcgaagattcccctcatcaagcgcagctaagatccccctcccagagaccactgcgccagactaccgcgatggtgatgagaggaaattgctcttttcacactaagggctggctcgcccagggtcagggcgctcatggcctcttaatcgtcagtcgggtgtctgaccagcaatgttccgacaccaccctggctccacaggatccacgccagcctctggcggatctgacgatcccagtggcgatgctccactacgcggacatgctcgatattcttagccacactagaggggaggcagttgtccgcgtggcaatgtatgcgccaccagaaccaattattgactacaacatgctggttatctttatcttggcagtcggcaccgtggctgcaggtgggtattgggccggactcactgaagctaaccgcctccagcgcaggagagcccgtcggggagggggatccggaggtcaccatcaactgcaagaggccgctgccgcagagggcgctcagaaggaggataatgaggatattccggttgacttcactcctgccatgacgggggtagtggtcactctctcatgtagtttaatgctccttctttattttttctacgaccattttgtgtacgtgaccataggaatctttgggcttggagccggaattgggttgtattcttgcctgtctcctttggtgtgccgcctgagtctacgccaataccagcgaccgcctcactcactctgggcctcactgccgttacctctcctcctgcttgcatccctgtgcgctaccgtgatcattttctgggttgcctaccggaacgaagatcggtgggcctggttactacaagacactctaggaatctcttattgcttgttcgtgctccacagagttcggctccccacactgaagaattgctcttctttcctgctcgcacttctggccttcgacgtcttttttgtcttcgttacaccattctttacgaaaacaggagagtccatcatggctcaggtggccctgggacccgctgaatcttcctcccatgagcggctcccaatggttcttaaagttccccgtttgcgcgtttcggcccttactctgtgtagccagcccttcagcattctgggattcggtgatatcgtggtgcctggatttctggtggcctactgctgtcgattcgacgttcaagtgtgtagtcgacagatttacttcgtggcgtgtactgttgcttatgcagtaggcctgctcgtaactttcatggccatggtgctgatgcagatgggtcagcctgctctactttatctagtatcaagtacactgcttacatcactagccgtagccgcatgccgtcaggaactgagcttattttggactggccaaggacgggctaaaatgtgcggacttggatgcgccccttctgctgggtcacgtcagaagcaggaaggagccgcagacgcacacacagcctccactctcgaacggggaacaagcaggggggcaggagatctggattctaatcctggcgaggacactaccgagatcgttacaatttctgagaatgaggcaacaaatcccgaagatcgatctgactcttccgagggctggagtgatgctcatctggaccctaatgagcttccttttatccccccaggcgcttcagaagaactaatgcccctcatgccgatggcaatgttaatccccctcatgcctctgatgccgccaccgtctgagttgggtcacgtccacgcccaggcacaggctcacgagactggtctgccttgggctggactacacaaacgaaaggggctgaaggtgcggaagagtatgtccacacaggcacccctgtag

SEQ ID NO: 252076 - DNA, 2183 bp, Artificial Sequence
  derived and/or modified sequence
agtaggaactgaagaagatggcgtgcctgggcttcctcctccccgtgggcttcctcctcctcatcagcaccgtggccgggggaaagtacggcgtggcccacgtggtgtcggagaattggagcaaggactactgtatcctgttcagctccgactacatcaccctcccccgggacctgcaccacgccccactcctgcccctgtatgatggcaccaaggcaccctggtgcccgggtgaggattccccccaccaggcccagctccgctcccccagccagcggcccctccgccagaccactgccatggtcatgaggggtaactgcagcttccacacgaaaggctggctggctcagggccaaggtgcccacgggctgctcatcgtgagccgggtcagtgaccaacagtgctcagacaccaccctggcaccccaggatccccgccagcccctggcagacctcaccatccctgtggctatgctccactatgctgacatgctggacatcctcagccacactcgtggggaggccgtcgtccgcgtggccatgtacgcacccccagagcccatcatcgactacaacatgctggtcatcttcatcctggctgtgggcacagtggctgcaggcggctactgggccggcctgaccgaagccaaccggctacagcggcgccgtgcccgaagaggaggggggtctggtggtcaccatcagctgcaggaagctgcagcagctgagggagcccagaaggaagataatgaggacatcccagtggacttcacgccggccatgacaggcgtggtggtcaccctgtcctgctcgctcatgctgctgctctacttcttctatgaccactttgtctatgtcaccattgggatctttggcctgggtgctggcattggcctctacagctgcctgtcacccctggtgtgccgcctgtccctgcggcaataccagaggcctccgcacagcctctgggcctctctgccgctgcctctgctgctgctggcgagcctgtgcgcaaccgtgatcatcttctgggtggcctaccgcaatgaggaccgctgggcgtggctcctgcaggacacactgggcatttcctactgcctgttcgtcctgcaccgtgtgcggctgcccactctcaagaactgctcctccttcctgctggccctgctggcctttgatgtcttctttgtcttcgtcacccccttcttcaccaaaaccggtgagagcatcatggcgcaggttgccttgggccctgcagagtcttcaagccatgagaggctgcccatggtactcaaagtgccccggctaagagtctccgccttgaccctgtgcagccagcccttctccatccttggcttcggtgacattgtggtccccggcttcctggttgcttactgttgccgctttgatgtgcaagtctgctcccgtcagatctacttcgtggcctgcaccgtggcctatgctgtgggcctgctggtcacattcatggccatggtcctcatgcagatgggccaacctgccttgctctacctagtgtccagcaccctgctcaccagcctggctgtggctgcctgccgccaagagctcagcctcttctggactggccagggcagagctaagatgtgtgggctcggctgtgccccttcagctggctctaggcagaagcaggagggcgcagcagatgcccacacagccagcacacttgagagaggcaccagccgaggagcaggggacttagacagcaaccctggagaagacaccactgagattgtcaccatatctgagaatgaagccaccaatccagaggaccgcagtgatagctccgagggctggagtgacgcccacttggatcctaatgagctgcccttcatcccccctggggcctcggaggagctgatgccactgatgccaatggccatgctgatcccactcatgcccctgatgcccccgccctcagagctgggccatgtccatgcccaggcccaggcccacgagactggcctgccctgggcgggactccacaagaggaagggtttgaaagtaagaaagagcatgtcgacccaggctcccttgtgaactggaggcactgggacacacgcctctcaaagggctggtggaacattgcagagcaaagccatgcatggcaacaagaaatcagggtatcaaagagatttcatatctacccaa

SEQ ID NO: 252077 - DNA, 2055 bp, Artificial Sequence
  derived and/or modified sequence
atggcctgcctgggcttcctgctgcccgtgggcttcctgctgctgatcagcaccgtggccggcggcaagtacggcgtggcccacgtggtgagcgagaactggagcaaggactactgcatcctgttcagcagcgactacatcaccctgcccagagacctgcaccacgcccccctgctgcccctgtacgacggcaccaaggccccctggtgccccggcgaggacagcccccaccaggcccagctgagaagccccagccagagacccctgagacagaccaccgccatggtgatgagaggcaactgcagcttccacaccaagggctggctggcccagggccagggcgcccacggcctgctgatcgtgagcagagtgagcgaccagcagtgcagcgacaccaccctggccccccaggaccccagacagcccctggccgacctgaccatccccgtggccatgctgcactacgccgacatgctggacatcctgagccacaccagaggcgaggccgtggtgagagtggccatgtacgccccccccgagcccatcatcgactacaacatgctggtgatcttcatcctggccgtgggcaccgtggccgccggcggctactgggccggcctgaccgaggccaacagactgcagagaagaagagccagaagaggcggcggccccggcggccaccaccagctgcaggaggccgccgccgccgagggcgcccagaaggaggacaacgaggacatccccgtggacttcacccccgccatgaccggcgtggtggtgaccctgagctgcagcctgatgctgctgctgtacttcttctacgaccacttcgtgtacgtgaccatcggcatcttcggcctgggcgccggcatcggcctgtacagctgcctgagccccctggtgtgcagactgagcctgagacagtaccagagacccccccacagcctgtgggccagcctgcccctgcccctgctgctgctggccagcctgtgcaccaccgtgatcatcttctgggtggcctacagaaacgaggacagatgggcctggctgctgcaggacaccctgggcatcagctactgcctgttcgtgctgcacagagtgagactgcccaccctgaagaactgcagcagcttcctgctggccctgctggccttcgacgtgttcttcgtgttcgtgacccccttcttcaccaagaccggcgagagcatcatggcccaggtggccctgggccccgccgagagcagcagccacgagagactgcccatggtgctgaaggtgcccagactgagagtgagcgccctgaccctgtgcagccagcccttcagcatcctgggcttcggcgacatcgtggtgcccggcttcctggtggcctactgctgccccttcgacgtgcaggtgtgcagcagacaggtgtacttcgtggcctgcaccgtggcctacgccgtgggcctgctggtgaccttcatggccatggtgctgatgcagatgggccagcccgccctgctgtacctggtgagcagcaccctgctgaccagcctggccgtggccgcctgcagacaggagctgagcctgttctggaccggccagggcagagccaagatgtgcggcctgggctgcgcccccagcgccggcagcagacagaagcaggagggcgccgccgacgcccacaccgccagcaccctggagagaggcaccagcagaggcgccggcgacctggacagcaaccccggcgaggacaccaccgagatcgtgaccatcagcgagaacgaggccaccaaccccgaggacagaagcgacagccccgagggctggagcgacgcccacctggaccccaacgagctgcccttcatcccccccagagccagcgaggagctgatgcccctgatgcccatggccatgctgatccccctgatgcccctgatgcccagacccagcgagctgggccacgtgcacgcccaggcccaggcccacgagaccggcctgccctgggccggcctgcacaagagaaagggcctgaaggtgagaaagagcatgagcacccaggcccccctgtag

SEQ ID NO: 252078 - DNA, 2055 bp, Artificial Sequence
  derived and/or modified sequence
atggcttgtctgggcttcctactccccgtggggttcctgcttctgatctctactgtagctggcggcaaatatggggttgcccacgtggtgtctgaaaactggtccaaggactattgcattcttttctccagcgattatattacgttaccaagggatcttcaccatgccccccttttgccgctgtacgatggcaccaaggccccgtggtgtccgggggaggattcaccacatcaagctcagcttcgtagtccttcgcagcgacctctgcgccagacgacggctatggtgatgaggggcaattgcagcttccacactaagggctggctggcacagggccagggagctcatggactcctaatagtttcccgcgtgagcgatcagcaatgttcagatacgaccctggcccctcaagacccaagacagcctcttgccgatctgactatccccgtggctatgcttcactacgccgatatgctggacattctgtcacacacacggggggaggccgtggttagagtggctatgtacgcaccacctgagccaatcatcgactacaatatgctggttattttcattctggccgtaggcacagtggcagctggagggtactgggcggggctgactgaggccaacaggttgcagcgtagaagagctaggaggggaggcgggcccggagggcaccaccaactgcaggaagccgcagcggccgaaggggcgcaaaaggaggacaacgaagatatccccgtcgattttactcccgctatgaccggggtcgtggtgactctctcctgtagcctgatgctgctattgtattttttttacgaccattttgtgtatgtcactatcggcatattcggcttgggagctggtatcggcctttatagctgcctgagtcccttagtctgtcgactctccctcaggcagtatcagcgcccccctcactccctttgggcctcactgcccctacccctgctgctgctggctagcctgtgcaccaccgtgatcatcttctgggttgcctaccgcaacgaggatcgatgggcatggctgctgcaagataccctcggcatctcatattgcctcttcgtgttacaccgcgtaagacttccaactctcaagaactgcagcagcttccttcttgccctgttggcctttgacgtgttcttcgtgttcgtgacccccttcttcacaaaaacgggcgagtctattatggctcaggtggctttgggccctgccgagagctctagtcacgaacggctcccaatggtgctgaaagtgcctaggctaagagtctctgccttaaccctttgctcgcagccgttttccatcctgggattcggtgatatcgtcgttccaggattcctcgtggcttactgttgtccttttgatgtgcaagtgtgtagtcggcaggtgtatttcgttgcttgtaccgtagcatacgcagtgggccttctggtcacctttatggctatggtgctaatgcaaatggggcaaccggcattgctttacctcgtgtcaagcaccttgctgaccagccttgctgtcgccgcttgtaggcaggaattgtcacttttttggacagggcaaggtagggccaagatgtgcggcctcggttgcgcgccgtctgccggtagccgtcagaagcaggaaggggcagccgatgctcacacagcctccaccttggaaaggggaacaagtcgcggagccggagaccttgattccaatccgggcgaggataccacggagatagtgacaatttcagagaacgaggctacaaacccagaggacaggtcagatagccccgagggatggagtgatgcccacctggaccccaacgaactgccttttatccctcctagggccagcgaagaattgatgccattaatgcctatggcaatgctcatcccactgatgcccctcatgcctcgtccctccgaactggggcacgtccatgcccaggcacaggcgcatgaaaccggattaccgtgggccggtctccacaagcggaaaggccttaaagtgcgcaaatctatgagcactcaagctcccctgtag

SEQ ID NO: 252079 - DNA, 2055 bp, Artificial Sequence
  derived and/or modified sequence
atggcctgcctgggcttcctgctgcctgtgggcttcctgctgctgatcagcacagtggccggcggcaagtatggagtggcccacgtggtgtctgagaactggagcaaggactactgcatcctcttcagcagtgactacatcaccctgccccgggacctgcaccacgcccccctgctgcccctgtatgatggcaccaaggccccctggtgccctggagaggacagcccccaccaggcccagctgcggagccccagccagaggcccctgcggcagaccacagccatggtgatgaggggcaactgcagcttccacaccaagggctggctggcccagggccagggcgcccacggcctgctgattgtgtcccgggtgtctgaccagcagtgcagcgacaccaccctggccccccaggacccccggcagcccctggccgacctgaccatccctgtggccatgctgcactacgccgacatgctggacatcctgagccacaccagaggagaggccgtggtgcgggtggccatgtatgcccctcctgagcccatcatcgactacaacatgctggtgatcttcatcctggccgtgggcaccgtggccgccggcggctactgggccggcctgacagaggccaaccggctgcagaggcggcgggccaggagaggaggcggccctgggggccaccaccagctgcaggaggccgctgctgctgagggcgcccagaaggaggacaatgaagacatccctgtggacttcaccccagccatgactggagtggtggtgaccctgagctgcagcctgatgctgctgctgtacttcttctatgaccactttgtgtatgtgaccatcggcatcttcggcctgggcgccggcatcggcctgtacagctgcctgagccccctggtgtgccgcctgagcctgcggcagtaccagaggcctccccacagcctgtgggccagcctgcccctgcccctgctgctgctggccagcctgtgcaccaccgtcatcatcttctgggtggcctacagaaatgaagatcgctgggcctggctgctgcaggacaccctgggcatctcctactgcctgtttgtgctgcaccgggtgcggctgcccaccctgaagaactgcagcagcttcctgctggccctgctggcctttgatgtgttctttgtgtttgtgacccccttcttcaccaagacaggagagagcatcatggcccaggtggccctgggccctgctgagagcagcagccatgagcggctgcccatggtgctgaaggtgccccggctgcgggtgtctgccctgaccctgtgcagccagcccttcagcatcctgggctttggagacatcgtggtgcccggcttcctggtggcctactgctgcccctttgatgtgcaggtgtgcagccggcaggtgtactttgtggcctgcaccgtggcctatgctgtgggcctgctggtgaccttcatggccatggtgctgatgcagatgggccagcctgccctgctgtacctggtgagcagcaccctgctgaccagcctggccgtggccgcctgccggcaggagctgagcctcttctggacaggccagggccgggccaagatgtgtggcctgggctgtgcccccagcgctggcagccggcagaagcaggagggcgctgctgatgcccacacagccagcaccctggagcggggcaccagcagaggagctggggacctggacagcaaccctggagaggacaccacagaaattgtgaccatcagtgaaaatgaggccaccaacccagaagatagaagtgacagccctgagggctggagcgatgcccacctggaccccaatgagctgcccttcatccccccccgggccagcgaggagctgatgcccctgatgcccatggccatgctgatccccctgatgcccctgatgccccggcccagcgagctgggccacgtgcacgcccaggcccaggcccatgaaacaggcctgccctgggccggcctgcacaagaggaagggcctgaaggtgaggaagtccatgagcacccaggcccccctgtag

SEQ ID NO: 252080 - DNA, 2055 bp, Artificial Sequence
  derived and/or modified sequence
atggcctgcctgggcttcctgctgcccgtgggcttcctgctgctgatttcaaccgttgctggggggaagtacggcgtagcccacgtcgtgtcagaaaactggagcaaagactactgtattctgttttcttctgactacatcaccttgccaagggatctgcaccacgctcctctgctgccgctgtatgacggaaccaaggccccctggtgtcccggagaagactcccctcaccaggcccagctccggtctcctagccagagacctttgcgacaaacgaccgccatggttatgcgcgggaactgtagttttcataccaagggttggctggcccagggccagggggcccacgggctgttaatcgtttctagagtcagcgaccagcaatgctcggataccacactggcgccacaggacccacgccagcctcttgctgacttaaccattccggttgctatgctccattatgctgacatgcttgacatactatctcatacaagaggcgaggccgttgtgagggtcgccatgtatgccccgcccgagcccattatagattacaacatgttggtcattttcatcctggcagtcggcactgtggccgcgggcggctattgggctggcctcacagaggctaatcgcctgcagaggcggcgagctcgcaggggcggaggccccgggggtcaccaccagctgcaggaggcagcagccgctgagggggcccagaaagaagataacgaggacatcccggtggacttcacccccgctatgactggcgtcgtggtgaccctgtcatgttccctgatgcttctcctctacttcttttatgaccattttgtgtacgtgactatcggcattttcgggttgggggctggaattgggttatatagttgcctgagccccctggtctgccgcctgagcttgcggcagtatcagcgaccgccgcattctctgtgggcaagtttgccattgccactcctcttgttggcctccctttgtaccacggtgattatattctgggtggcctatagaaatgaggaccgatgggcgtggctcctacaggacactctgggaatctcctactgcctgtttgtcctgcatagggtcagactgccgaccttgaaaaactgtagctcctttttactcgctctcctggcctttgacgtgttcttcgtgtttgtgaccccttttttcaccaagaccggagagagtattatggctcaggtggcgctcgggcccgctgagtctagctcccacgagaggctaccgatggtgcttaaagtcccacgtcttcgcgtatctgctttaactctttgtagccaaccgttcagcattctgggatttggggatatagtggtacctggattcttagtcgcctactgctgccccttcgacgtccaggtgtgcagccgacaggtttactttgtggcgtgcacagtggcctacgccgtcgggcttctggtcaccttcatggctatggtgctcatgcaaatggggcaacccgcgctgctttacttagtgagcagtactctcctgacatctttagccgtggcggcctgccgccaggagctatctctcttttggacaggccaggggagggccaaaatgtgcgggttaggctgcgccccatccgcagggagcagacagaagcaggaaggcgcggcagacgcacatacagcgagtactctcgaacgcggcacctcaaggggagccggtgatctagacagtaaccctggggaagacacaacagaaattgtgaccatctcggagaatgaagccacgaatcccgaagacaggagcgattctccagagggctggagtgatgcacatctggacccgaatgaactcccttttattcctcctcgcgcatcagaggagttgatgcccctgatgccaatggcaatgctgattccccttatgcctcttatgcccagaccgagcgagctgggacacgtacacgcccaggcccaagcacatgagactggtttgccgtgggctggtttacataaaagaaaagggctgaaggtccgtaagtctatgtcaacccaagcccccctctag

SEQ ID NO: 252081 - DNA, 2055 bp, Artificial Sequence
  derived and/or modified sequence
atggcctgtttgggatttctgttaccagtcggcttcctcctacttattagcacggtcgccggtggaaagtatggcgttgcgcacgtcgtgagcgaaaattggtcaaaggactactgcatcctgttcagctccgattatatcacactcccacgtgacctgcatcacgcccctctgcttccactgtatgatggtacgaaggccccttggtgccccggagaggactctccccaccaggctcagctgcgcagcccatctcagaggccgttacggcaaacaacggcgatggttatgcgagggaattgtagttttcacaccaagggttggctcgcccagggccaaggtgcacatggccttctgatagtcagcagggtctctgatcagcaatgctccgacactactctggctccacaggatccccgtcagcctttagccgatttgaccatacccgtcgcaatgctccactatgcagacatgctggacattctgtcccatacacgtggagaagccgtggtcagagtcgccatgtacgcacccccagagccaatcatcgactacaatatgttagtaatttttattttggctgtcggaaccgttgctgcaggtgggtactgggccggactaaccgaggctaacaggctgcagcggaggcgtgcgcgaagagggggtggccctgggggtcaccatcagctgcaggaggctgccgctgctgagggagctcaaaaagaggacaatgaagatataccagttgattttacaccagcaatgaccggggtggtggtcacactcagctgctcattaatgctcctcctatacttcttttatgaccactttgtctacgttaccattggaatctttggtttgggtgcgggtatagggttatacagctgtctaagtcctctggtctgtaggctgtcacttcggcaataccagcggccaccccattctctgtgggcatccctgccgctgcctcttttactcctcgcctctctatgcacaaccgtaatcatcttttgggtggcatacaggaatgaggatagatgggcatggctgttacaggacactctgggaattagttattgcctgtttgtcctccaccgcgtgcggctgcccaccctgaaaaactgctcttccttcctgctagccctgttggctttcgacgtatttttcgtctttgtgactccgttttttaccaaaactggcgaatccattatggcccaggtcgctcttggcccagccgaaagctcatcccacgagcgacttcccatggtgctgaaagttccgaggcttcgagtgagtgcactaaccctgtgcagtcaacccttctccattctcggctttggcgatatcgtcgtgcccggattcctggtggcttactgttgtccgttcgacgtgcaagtatgttctcgccaggtgtactttgtggcgtgcactgtggcgtatgcagtcggactcctggtgacattcatggcgatggtcctgatgcagatgggccaaccagcgttgctttacctcgtgagttcaacactcctgacatccttggcagtcgctgcatgcaggcaggagctcagccttttttggactggccagggtcgagcaaagatgtgtggtctgggttgtgccccttcggccggaagcagacagaaacaggaaggtgccgctgacgcccatacagcctccactctggagaggggcacttcccgaggagcgggagatcttgattccaacccaggtgaagacaccaccgaaatagtgaccatctcagagaacgaagccactaaccccgaggatcggtccgatagcccagaaggatggtctgatgcccacttggatccgaacgagcttccgttcattccgcctagagcttcagaagaactcatgcctctaatgcccatggccatgctcattcctctaatgccacttatgcctcgcccaagcgagttgggacacgtgcacgcccaggcccaggctcacgagacagggttgccctgggccggtctccacaaacggaagggcctgaaggtcagaaagagcatgagtacccaggcccctctttag

SEQ ID NO: 252082 - DNA, 2183 bp, Artificial Sequence
  derived and/or modified sequence
agtaggaactgaagaagatggcgtgcctgggcttcctcctccccgtgggcttcctcctcctcatcagcaccgtggccgggggaaagtacggcgtggcccacgtggtgtcggagaattggagcaaggactactgtatcctgttcagctccgactacatcaccctcccccgggacctgcaccacgccccactcctgcccctgtatgatggcaccaaggcaccctggtgcccgggtgaggattccccccaccaggcccagctccgctcccccagccagcggcccctccgccagaccactgccatggtcatgaggggtaactgcagcttccacacgaaaggctggctggctcagggccaaggtgcccacgggctgctcatcgtgagccgggtcagtgaccaacagtgctcagacaccaccctggcaccccaggatccccgccagcccctggcagacctcaccatccctgtggctatgctccactatgctgacatgctggacatcctcagccacactcgtggggaggccgtcgtccgcgtggccatgtacgcacccccagagcccatcatcgactacaacatgctggtcatcttcatcctggctgtgggcacagtggctgcaggcggctactgggccggcctgaccgaagccaaccggctacagcggcgccgtgcccgaagaggaggggggcctggtggtcaccatcagctgcaggaagctgcagcagctgagggagcccagaaggaagataatgaggacatcccagtggacttcacgccggccatgacaggcgtggtggtcaccctgtcctgctcgctcatgctgctgctctacttcttctatgaccactttgtctatgtcaccattgggatctttggcctgggtgctggcattggcctctacagctgcctgtcacccctggtgtgccgcctgtccctgcggcaataccagaggcctccgcacagcctctgggcctctctgccgctgcctctgctgctgctggcgagcctgtgcacaaccgtgatcatcttctgggtggcctaccgcaatgaggaccgctgggcgtggctcctgcaggacacactgggcatttcctactgcctgttcgtcctgcaccgtgtgcggctgcccactctcaagaactgctcctccttcctgctggccctgctggcctttgatgtcttctttgtcttcgtcacccccttcttcaccaaaaccggtgagagcatcatggcgcaggttgccttgggccctgcagagtcttcaagccatgagaggctgcccatggtactcaaagtgccccggctaagagtctccgccttgaccctgtgcagccagcccttctccatccttggcttcggtgacattgtggtccccggcttcctggttgcttactgttgcccctttgatgtgcaagtctgctcccgtcaggtctacttcgtggcctgcactgtggcctatgctgtgggcctgctggtcacattcatggccatggtcctcatgcagatgggccaacctgccttgctctacctagtgtccagcaccctgctcaccagcctggctgtggctgcctgccgccaagagctcagcctcttctggactggccagggcagagctaagatgtgtgggctcggctgtgccccttcggctggctctaggcagaagcaggagggcgcagcagacgcccacacagccagcacacttgagagaggcaccagccgaggagcaggggacttagacagcaaccctggagaagacaccactgagattgtcaccatatctgagaatgaagccaccaatccagaggaccgcagtgatagccccgagggctggagtgacgcccacttggatcctaatgagctgcccttcatcccccctagggcctcggaggagctgatgccactgatgccaatggccatgctgatcccactcatgcccctgatgccccggccctcagagctgggccacgtccatgcccaagcccaggcccacgagactggcctgccctgggcgggactccacaagaggaagggtttgaaagtaagaaagagcatgtcgacccaggctcccttgtgaactggaggccctgggacacacgcctctcaaagggctggtggaacattgcagagcaaagccatgcatggcaacaagaaatcagggcatcaaagagatttcatatctacccaa

SEQ ID NO: 252083 - protein, 312 aa, Artificial Sequence
  derived and/or modified sequence
MEAGNQTGFLEFILLGLSEDPELQPFIFGLFLSMYLVTVLGNLLIILAISSDSHLHTPMYFFLSNLSWVDICFSTCIVPKMLVNIQTENKAISYMDCLTQVYFSMFFPILDTLLLTVMAYDRFVAVCHPLHYMIIMNPHLCGLLVFVTWLIGVMTSLLHISLMMHLIFCKDFEIPHFFCELTYILQLACSDTFLNSTLIYFMTGVLGVFPLLGIIFSYSRIASSIRKMSSSGGKQKALSTCGSHLSVVSLFYGTGIGVHFTSAVTHSSQKISVASVMYTVVTPMLNPFIYSLRNKDVKGALGSLLSRAASCL

SEQ ID NO: 252084 - DNA, 939 bp, Artificial Sequence
  derived and/or modified sequence
atggaggccggcaaccagaccggcttcctggagttcatcctgctgggcctgagcgaggaccccgagctgcagcccttcatcttcggcctgttcctgagcatgtacctggtgaccgtgctgggcaacctgctgatcatcctggccatcagcagcgacagccacctgcacacccccatgtacttcttcctgagcaacctgagctgggtggacatctgcttcagcacctgcatcgtgcccaagatgctggtgaacatccagaccgagaacaaggccatcagctacatggactgcctgacccaggtgtacttcagcatgttcttccccatcctggacaccctgctgctgaccgtgatggcctacgacagattcgtggccgtgtgccaccccctgcactacatgatcatcatgaacccccacctgtgcggcctgctggtgttcgtgacctggctgatcggcgtgatgaccagcctgctgcacatcagcctgatgatgcacctgatcttctgcaaggacttcgagatcccccacttcttctgcgagctgacctacatcctgcagctggcctgcagcgacaccttcctgaacagcaccctgatctacttcatgaccggcgtgctgggcgtgttccccctgctgggcatcatcttcagctacagcagaatcgccagcagcatcagaaagatgagcagcagcggcggcaagcagaaggccctgagcacctgcggcagccacctgagcgtggtgagcctgttctacggcaccggcatcggcgtgcacttcaccagcgccgtgacccacagcagccagaagatcagcgtggccagcgtgatgtacaccgtggtgacccccatgctgaaccccttcatctacagcctgagaaacaaggacgtgaagggcgccctgggcagcctgctgagcagagccgccagctgcctgtag

SEQ ID NO: 252085 - DNA, 939 bp, Artificial Sequence
  derived and/or modified sequence
atggaggctggcaatcagaccggatttctcgaatttattctgcttggtctgtccgaggatcccgagctgcagccatttatattcggtcttttcctgagcatgtacctggtcacagtgctgggaaacctactcatcattcttgctatctccagcgacagtcacctccatacaccgatgtactttttcctatcgaacctgtcttgggttgacatttgtttctccacctgtattgtccctaaaatgcttgtgaatattcagaccgagaataaagctataagctacatggactgcctgactcaagtctatttttctatgttctttcccattctcgataccttattgttgactgtcatggcatatgatcggtttgtcgccgtttgtcacccattacactatatgatcataatgaatccacatttgtgcggcctgctcgtttttgtgacttggctaatcggtgtaatgacatcattattacatattagtctgatgatgcacctcatattctgtaaagatttcgaaataccacacttcttctgcgaactcacctacatcctccaactggcttgcagtgatacattcctgaacagcacgctaatctacttcatgaccggggtccttggcgtctttcccctcctgggtatcatcttctcttactctcggatagcgtctagcattagaaagatgtctagctcaggcggaaaacaaaaggcactgtccacgtgtggctcgcatctgtccgtcgtctccttgttctacggaacagggataggagtccacttcacgagtgctgtgactcatagttcacagaagatttccgttgcctccgtgatgtataccgtagtcacccccatgctgaatcctttcatctacagcttaagaaataaggacgtaaagggcgctttaggatccctgctgagcagggctgctagctgcctgtag

SEQ ID NO: 252086 - DNA, 939 bp, Artificial Sequence
  derived and/or modified sequence
atggaggccggcaaccagacaggcttcctggagttcatcctgctgggcctgtctgaagatcctgagctgcagcccttcatcttcggcctcttcctgtccatgtacctggtgacagtgctgggcaacctgctgatcatcctggccatcagcagtgacagccacctgcacacccccatgtacttcttcctgagcaacctgtcctgggtggacatctgcttcagcacctgcatcgtgcccaagatgctggtgaacatccagacagagaacaaggccatctcctacatggactgcctgacccaggtgtacttctccatgttcttccccatcctggacaccctgctgctgactgtgatggcctatgacagatttgtggccgtgtgccaccccctgcactacatgatcatcatgaacccccacctgtgtggcctgctggtgtttgtgacctggctgattggagtgatgaccagcctgctgcacatcagcctgatgatgcacctgatcttctgcaaggactttgagatcccccacttcttctgtgagctgacctacatcctgcagctggcctgcagcgacaccttcctgaacagcaccctcatctacttcatgactggagtgctgggcgtcttccccctgctgggcatcatcttctcctacagcagaattgccagcagcatcaggaagatgagcagcagcggcggcaagcagaaggccctgagcacctgtggcagccacctgtctgtggtgtccctcttctacggcaccggcatcggcgtgcacttcaccagcgctgtgacccacagcagccagaagatctctgtggcctctgtgatgtacacagtggtgacccccatgctgaaccccttcatctacagcctgaggaacaaggatgtgaagggggccctgggcagcctgctgagccgggccgccagctgcctgtag

SEQ ID NO: 252087 - DNA, 939 bp, Artificial Sequence
  derived and/or modified sequence
atggaggccggcaaccagaccggcttcctggagttcatcctgctgggactgtcggaagatccagagctccagccatttatctttggtcttttcttgtctatgtacctcgttactgttctgggaaacctgctgattatcttggccatttcgtctgacagccaccttcacacccctatgtactttttcctgtcgaacctatcctgggtcgacatctgcttttctacatgcatcgttccaaagatgctggttaatatacagaccgagaataaagcaatctcgtacatggactgtctgacacaggtgtacttttcaatgttctttcccattctggacacgctgctcctcactgtgatggcctatgacaggtttgtggcagtatgtcatcccttgcactacatgattatcatgaacccccacttatgcggtctgctggtcttcgttacgtggcttatcggcgttatgacctctctcctccacatttctctaatgatgcatctcatcttctgcaaggatttcgaaatacctcattttttttgtgagctgacctatatactccagctcgcgtgttccgatacattccttaactccaccttgatttactttatgacaggcgtgttgggagtctttcccctgctgggaatcatattcagctattcaaggatcgctagttcaatcagaaagatgtccagtagcgggggcaagcagaaagctctttccacgtgcgggtcccatctttcggtcgtgtccctgttctacggaaccggtattggtgtacactttacctctgccgtaactcatagctcacagaagataagcgtggcgagcgtaatgtacacagtggtaacacccatgctgaacccctttatttattcactgcgcaacaaagacgttaaaggagccctaggctccttactcagccgtgccgctagttgcctctag

SEQ ID NO: 252088 - DNA, 3215 bp, Artificial Sequence
  derived and/or modified sequence
gagacagttctccctctattgcccaggctggagtgcagtggtgtaaacatagctccctgcagttgcaaattcctgggctcaagtgatccttccatctcagcctcccgagtagctgggactacaggtgtccaccaccatgcctggctaatgacctcttcttttgtagatacatcagctacatggaagcaggaaaccaaacaggatttttagagtttatccttctcggactctctgaggatccagaactacagccgttcatatttgggctgttcctgtccatgtacctggtgacggtgctgggaaacctgctcatcatcctggccatcagctctgactcccacctccacacccccatgtacttcttcctctccaacctgtcctgggttgacatctgtttcagcacttgcatcgtccccaagatgctggtgaacatccagaccgagaacaaagccatctcctacatggactgcctcacacaggtctatttctccatgttttttcctattctggacacgctactcctgaccgtgatggcctatgaccggtttgtggctgtctgccaccctctgcactatatgatcatcatgaacccccacctctgtggcctcctggtttttgtcacctggctcattggtgtcatgacatccctcctccatatttctctgatgatgcatctaatcttctgtaaagattttgaaattccacattttttctgcgaactgacgtacatcctccagctggcctgctctgataccttcctgaacagcacgttgatatactttatgacgggtgtgctgggcgtttttcccctccttgggatcattttctcttattcacgaattgcttcatccataaggaagatgtcctcatctgggggaaaacaaaaagcactttccacctgtgggtctcacctctccgtcgtttctttattttatgggacaggcattggggtccacttcacttctgcggtgactcactcttcccagaaaatctccgtggcctcggtgatgtacactgtggtcacccccatgttgaaccccttcatctacagcctgaggaacaaggatgtgaagggagccctggggagtctcctcagcagggcagcctcttgtttgtgatggatcccttggccccaggactaagaagttttgtgagcaccaatggcaaaaatgttttattttgaaattcttactctttaaaattaaaaacatttttttatactttgagagtacaaatgcagatttcttaacatgcatttgcataagggtgaagtctgagcttttggcgtaccaattacctgaatagtgaacataaggcacttttttttcttttttgagacggagtctcactctgtctcccaggctggagtgcagtggagtgatctcggctcactgcaacctccgcctcccgggttcaagtgattcttctgtctcagcctcctgagtagctgagattacaggtgtgtgccacccatgccttttagtagagacggggtttcaccatcttggccaggctggtctcgaactcctgaccttgtgatccacctgccttggcctctcaaagtgctgggattacaggtgtgagccaccacgcccggccaaggcagtttttaaactctcactcccctctcaccttttgcagtctccagtgtccattattctgttataatgcccatgcgtatacattgtttagctcccaattataagtgagatcatgcagcatttgactttgtttctttactaccttacttaagagaatggcttccagtcccatcgatgttgctgcaaaagacatgatttcatccttttttatggctgagtagtactccattgtatatatcctcgatatctatatagatatagacatatgtagatacataccatgttttctttttttaaaaaaatttatttttatgtcagtagtttttggggtacatgtggtttttcattacacggatgagttctttagtggtgacttctgagtttttagtgtacccgtcacccaagtggtagtagtctcttattcctcacccccctcccaacctttctcccttcaagtcaccaaagttcattatattgttcatatccctttgtgtcctcatagcttagctcccacttataactgagaacatacgatatgttcatatggatcttatgtatgttggttgaacatacaaacaagtccaggtttttcattcctgagttacttcacctagagtaatgacctccagttccatccaagttgctacaaaagacattatttggttcctttttatggataagtagtattccatgctgtacatataccacaatctttatcactcattggttgatgggcacttaggttggttccatgcctttgtaattgctaattatgttgctataaacatgcaggtgtatgtgtctttttcacataatgactttgtttcctttgggtagatacccagtagtggaactgctggactgaaaggtagttctacttttagttcttttttttgttttttttttaagacagagtctcactctgttgcccaggctggagtgcagtggcgcgatctcatctcactgcaacctccacctcccaggttcaagcgattctcctgcctcaacctcctgagtagctgggactacaggcacctgccaccccacccagctaattcttctatttttagtagagacagggtttcaccatgttggccaggctggtcttgaactcctgacctcaggtgatacgcccacctcggcctcccaaagtgctgggattacaggtgtgagccactgtgcctggccttctagttctttaagataccactttaaaaaaagtccagtcctccattgatggacacgtaggttgattccatatctttgctaatgtgaatagtgccgtgataaacatgggggtgtaagttaacaattaatctccaagtaatttccttgatggcacttctgtcctatgtgctattcaaaaattgtgtccttgatcatcgttcttaattctccattagtgagttctgaacttgggtttgaagcatttgctatagctttgttatctcaagtggtggcacagagttcttaagctattgattgttcactgactttatttctatgtgtttgcatgtgggtttttgttgtttgtgtgttcgatcatgaacagatcaacagtgtttatttgttttcctactggatgaagtatgattaaaatacgtatttaaatat

SEQ ID NO: 252089 - DNA, 939 bp, Artificial Sequence
  derived and/or modified sequence
atggaggctggtaaccaaaccggattccttgaattcattctgcttggactctctgaggaccctgaactgcagcctttcatttttggcctgtttctctccatgtatctggtcactgtcttaggcaatctgctcataatattagcaattagcagcgattcccatctgcacacacccatgtacttctttctgtctaacctcagctgggtagacatctgcttctccacgtgtatcgtgccaaagatgttagtgaatatacagacagagaataaggccatcagctatatggactgtttgactcaggtgtacttttctatgttctttccaattctagatactttactgctgacggtcatggcttatgataggttcgtggctgtctgccatcccttgcattatatgataatcatgaatcctcatctgtgcggcttacttgtctttgtcacatggttgatcggggtgatgacctctctcctgcacatctccctgatgatgcacctcatcttttgtaaagactttgagatccctcacttcttttgtgaactgacgtatattctccagctggcatgtagtgatactttccttaattccacactgatttacttcatgactggcgtgttaggggtgtttcctcttctcggaataatattcagctacagcagaatagcatcttctattaggaaaatgagctcttcaggcggaaagcagaaagctcttagcacctgtggcagccacctttccgtggtgagcttattttacggaacaggcattggggtccactttacttccgccgttactcatagctcgcagaaaatatctgtggcatctgtaatgtatactgttgttacgccaatgttgaacccgttcatttactcacttcggaacaaggacgttaaaggagccctgggaagtctactctcacgagctgcatcatgcctgtag

SEQ ID NO: 252090 - protein, 318 aa, Artificial Sequence
  derived and/or modified sequence
TPNIKIFSGSSHQDLSQKIADRLGLELGKVVTKKFSNQETCVEIDESVRGEDVYIVQSGCGEINDSLMELLIMINACKIASASRVTAVIPCFPYARQDKKDKSRSPISAKLVANMLSIAGADHIITMDLHASQIQGFFDIPVDNLYAEPTVLKWIRENIPEWKNCIIVSPDAGGAKRVTSIADQLNVDFALIHKERKKANEVDCIVLVGDVNDRVAILVDDMADTCVTICLAADKLLSAGATRVYAILTHGIFSGPAISRINTACFEAVVVTNTIPQDEKMKHCSKIRVIDISMILAEAIRRTHNGESVSYLFSHVPL

SEQ ID NO: 252091 - DNA, 957 bp, Artificial Sequence
  derived and/or modified sequence
acccctaatattaagatcttttctggatcctcccatcaagacctgtcccaaaaaatcgccgatcgactgggcttggagcttggtaaggtggtgactaagaagttttccaatcaagaaacatgcgtggaaatcgacgagagtgtcaggggcgaggatgtgtatatcgtgcaatccggctgcggagagataaatgatagcctgatggagctgctcattatgatcaacgcctgcaagatagcgagcgcctcccgagtgaccgccgtgatcccatgttttccctacgcccggcaagacaaaaaggacaagtctagatcaccaatcagtgctaaactggtagccaacatgctgagtattgccggcgcggatcatattatcaccatggacttgcacgcttcacagatacagggatttttcgatatccccgtcgataacctgtatgccgagccaactgtgcttaagtggatcagggaaaatatccctgaatggaagaattgcatcatcgtctcccctgacgccggaggcgccaaaagggtgacatccatcgcagaccagttgaacgtagactttgccctgatccataaagagcgaaaaaaggctaacgaggtagattgcatcgtgctggtgggggacgttaacgaccgggtcgctattttagtggatgacatggctgatacctgcgtgacaatctgcctcgccgccgacaaattgctcagtgccggggctaccagagtttacgccattctgactcatggcatcttttccggacctgccatcagcaggatcaacacagcttgtttcgaagctgtggtcgttacgaacacgatccctcaggacgagaaaatgaaacactgtagcaagatcagggtcattgacatctccatgattcttgcagaagccatacggcgaacccataacggcgagagcgtgagctacctgttttcccacgtgcctctctag

SEQ ID NO: 252092 - DNA, 957 bp, Artificial Sequence
  derived and/or modified sequence
acccccaacatcaagatcttcagcggcagcagccaccaggacctgagccagaagattgctgaccggctgggcctggagctgggcaaggtggtgaccaagaagttcagcaaccaggagacctgtgtggagattgatgaatctgtgagaggagaagatgtgtacatcgtgcagagcggctgtggggagatcaatgacagcctgatggagctgctgatcatgatcaatgcctgcaagatcgccagcgccagccgggtgacagctgtgatcccctgcttcccctatgcccggcaggacaagaaggacaagagccgcagccccatcagcgccaagctggtggccaacatgctgagcattgctggagctgaccacatcatcaccatggacctgcacgccagccagatccagggcttctttgacatccctgtggacaacctgtatgcagagcccaccgtgctgaagtggatccgggagaacatccctgagtggaagaactgcatcatcgtgtccccagatgctgggggcgccaagagggtgaccagcattgctgaccagctgaatgtggactttgccctgatccacaaggagaggaagaaggccaatgaggtggactgcatcgtgctggtgggagatgtgaatgacagagtggccatcctggtggatgacatggctgacacctgtgtgaccatctgcctggccgctgacaagctgctgtctgctggggccaccagggtgtatgccatcctgacccacggcatcttcagcggccctgccatcagccgcatcaacacagcctgctttgaggccgtggtggtgaccaacaccatcccccaggatgagaagatgaagcactgcagcaagatccgggtcatcgacatctccatgatcctggccgaggccatccggaggacccacaatggagagagcgtgtcctacctgttcagccacgtgcccctgtag

SEQ ID NO: 252093 - DNA, 957 bp, Artificial Sequence
  derived and/or modified sequence
acccccaacatcaagatcttcagcggcagcagccaccaggacctgagccagaaaatcgcagataggcttgggctcgagctagggaaggtcgtgacaaagaaatttagcaaccaagagacctgtgtggaaatcgacgaatccgtgcgcggtgaggacgtgtatatcgtgcagtccggctgtggcgagatcaatgacagtctgatggagctcctgatcatgatcaacgcctgtaagatcgcaagtgcctcgcgcgtaaccgccgttattccttgcttcccatacgccaggcaggataaaaaagataagagtcggtctcctatttccgctaagctagtcgccaacatgttatccattgctggtgccgatcatatcattaccatggatctacacgctagccagatacaagggttttttgacatccctgtggacaacctgtatgcagaacctacagtgttgaaatggatacgcgagaacatacctgagtggaaaaactgcataattgttagcccagacgcaggcggtgccaagcgtgttacttctatcgccgatcagctcaacgttgacttcgctctcatacataaggaaaggaaaaaggcgaatgaggtcgactgtattgtcctggtgggtgacgtgaacgatagggtggcaatcctggttgacgacatggccgacacctgcgttactatttgtctcgcagccgataagttgttaagcgccggcgccactagggtatatgctatcctcacgcacggcatcttctcgggacccgcaattagccgcattaacaccgcctgttttgaagccgtcgtggtgactaataccatcccccaggatgagaagatgaagcactgctccaagatacgcgttatcgacatcagcatgatccttgctgaagctattcgccggactcacaatggagagagcgtgagctatcttttctcccatgtgccactgtag

SEQ ID NO: 252094 - DNA, 1082 bp, Artificial Sequence
  derived and/or modified sequence
attagagtctgtgcttcacttccgttccagcctcagcggcagctggatcgctcgacggagtgcctctggtagttggccaagacgccgaatatcaaaatcttcagcggcagctcccaccaggacttatcccagaaaattgctgaccgcctgggcctggagctaggcaaggtggtgactaagaaattcagcaaccaggagacctgcgtggaaattgatgagagtgtgcgtggagaggatgtctacatcgttcagagtggttgtggcgaaatcaacgacagtctaatggagcttttgatcatgattaatgcctgcaagattgcttcagctagccgagttactgcagtcatcccatgcttcccttatgcccgacaggataagaaggataagagccggtccccaatctctgccaagcttgttgcaaatatgctctctatagcaggtgcggatcatatcatcaccatggacctacatgcttctcaaattcagggcttttttgatatcccagtagacaacttgtatgcagagccaactgtcctgaagtggataagggagaatatccctgagtggaagaactgcattattgtctcgccagatgctggtggagctaaaagagtgacctccattgcagaccagttgaatgtggactttgctttgattcataaagaacggaagaaggccaatgaagtggactgcatagtgctagtgggagatgtgaatgatcgtgtggctatccttgtagatgacatggcagacacttgtgttacaatctgcctcgcagctgacaaacttctctcagctggagcaaccagagtttatgctatcttgactcatggaatcttttctggcccagccatttctcgcatcaacactgcatgctttgaagcagtggtagtcaccaataccatacctcaagatgagaagatgaagcattgctccaaaatacgagtaattgacatctccatgatccttgcagaagccataaggagaactcataatggggaatctgtttcctacctgttcagccatgttcctttataacagaataacttctaggttatgctattttaaaataaaataagatt

SEQ ID NO: 252095 - DNA, 957 bp, Artificial Sequence
  derived and/or modified sequence
acccctaatatcaagatcttttctgggtcctcacatcaggacctcagccaaaagatcgcggataggctgggacttgaactgggcaaggtggtgacaaaaaagttctcaaatcaggaaacctgtgtggagattgacgaatcggtgagaggtgaggatgtgtatattgtgcaaagtggatgtggtgaaattaatgacagcctgatggagctcttaattatgataaacgcgtgcaaaattgcttccgcgagtcgtgtaacagcagtaatcccttgttttccttacgcgagacaggacaagaaggataagagcagaagccccatcagcgccaagctggttgccaatatgcttagcattgctggcgcagaccacattattaccatggatcttcacgcctctcaaatacaggggttttttgacatcccagtcgataatctgtacgctgagcctaccgttttgaagtggattcgcgaaaacattccagaatggaagaactgcattattgtgtccccagacgccggaggggctaagcgtgtgacaagcattgccgaccagctcaacgtcgactttgccctgattcataaagagagaaagaaagccaacgaagtggactgcattgtgctcgttggtgacgtcaatgatagggtggccatcttggtggacgacatggcggacacttgtgtcacaatttgcctcgccgctgataaacttcttagcgccggtgctaccagggtctatgcgattttgactcatgggatctttagcggaccagctatctctcggattaatactgcttgctttgaggccgtcgttgtgaccaacacgattccccaagacgagaagatgaagcactgttctaagatcagggtcatcgatatctcaatgatcttggccgaggccattagacgcacccacaatggagaatccgtctcatacctgttcagtcacgtcccactgtag

SEQ ID NO: 252096 - DNA, 957 bp, Artificial Sequence
  derived and/or modified sequence
acccccaacatcaagatcttcagcggcagcagccaccaggacctgagccagaagatcgccgacagactgggcctggagctgggcaaggtggtgaccaagaagttcagcaaccaggagacctgcgtggagatcgacgagagcgtgagaggcgaggacgtgtacatcgtgcagagcggctgcggcgagatcaacgacagcctgatggagctgctgatcatgatcaacgcctgcaagatcgccagcgccagcagagtgaccgccgtgatcccctgcttcccctacgccagacaggacaagaaggacaagagcagaagccccatcagcgccaagctggtggccaacatgctgagcatcgccggcgccgaccacatcatcaccatggacctgcacgccagccagatccagggcttcttcgacatccccgtggacaacctgtacgccgagcccaccgtgctgaagtggatcagagagaacatccccgagtggaagaactgcatcatcgtgagccccgacgccggcggcgccaagagagtgaccagcatcgccgaccagctgaacgtggacttcgccctgatccacaaggagagaaagaaggccaacgaggtggactgcatcgtgctggtgggcgacgtgaacgacagagtggccatcctggtggacgacatggccgacacctgcgtgaccatctgcctggccgccgacaagctgctgagcgccggcgccaccagagtgtacgccatcctgacccacggcatcttcagcggccccgccatcagcagaatcaacaccgcctgcttcgaggccgtggtggtgaccaacaccatcccccaggacgagaagatgaagcactgcagcaagatcagagtgatcgacatcagcatgatcctggccgaggccatcagaagaacccacaacggcgagagcgtgagctacctgttcagccacgtgcccctgtag

SEQ ID NO: 252097 - DNA, 390 bp, Artificial Sequence
  derived and/or modified sequence
atgagcggcggccgattcgatttcgacgatggaggggcttattgcggcgggtgggagggcgggaaagctcatggccacggcctctgcaccgggcctaagggacagggggagtactctggatcctggaattttggattcgaggttgcaggagtgtacacatggccaagcggaaatacctttgagggttattggagccagggcaagagacacgggctgggcatcgaaacaaaaggacggtggctctataagggcgagtggacccacggcttcaaaggcagatacgggatccggcagtcatctagctcaggggctaagtacgaaggcacctggaacaacggccttcaagacggatatggtaccgaaacttatgccgacggaggcatgtgttag

SEQ ID NO: 252098 - DNA, 1923 bp, Artificial Sequence
  derived and/or modified sequence
ctttgaaaaggctggggacccctccaccccaccctttcactgggcttcttaaagagatcacaccgttttcccttggacttcttggaaggcagacttgggacgctttgtggggactttgaacctttccttcctgctttctttccagcaggcagccttgctctggctggtggagtcggggctcccgggcatggcactgactagccgacccggtgctgacttggcgccggggctctttcagcctctgctggcatcctgcttcccccctcctggggtgcagtggtgagtctgggggcctgcccccgagggcactggaggagtgttgcaggcatcacccacgccctctgcacccacgctggaggacggggaggttgtcaggggctatgatgagatgagtgggggccgcttcgactttgatgatggaggggcgtactgcgggggctgggaggggggaaaggcccatgggcatggactgtgcacaggccccaagggccagggcgaatactctggctcctggaactttggctttgaggtggcaggtgtctacacctggcccagcggaaacacctttgagggatactggagccagggcaaacggcatgggctgggcatagagaccaaggggcgctggctctacaagggcgagtggacacatggcttcaagggacgctacggaatccggcagagctcaagcagcggtgccaagtatgagggcacctggaacaatggcctgcaagacggctatggcaccgagacctatgctgatggagggatgtgttaaaatcgccctcagaatatggtcgagacaatgaaacaagacaatgaagcactgagcatcatgcctggcacataggaaatgccaaaatatatattcccgtatttccttcacattccaaagggtgaattaattcaggatggcctgaaccatagctgtcactgtcttcgggaggatatttgaggacaaaaacgagtttttgactttggaacagtaaataagacaagactttgattcgcttagttctgccttgagtcctgccagtgtagatggaatccatgccagacatgattccatttcgaatgtagaatcagcataatttaacctcatcttggaaatctcatgtcccagttcacagccaggcatcagcgtgacagtcagctgagctgctgtcttggcagcttctgggcattctatggagaccccaggagagcacagcagacccttagcagaacagaaaagcggaccgtattagtctttcctgtccacggccttgttttcagtgattcatgtgcccgattggccaaatctctgcagacgtgcccctgtccgaggccaggcttctgggattcatcgagcttgcttgtttccgggacctgctaattccgtgcccagcagctgttccccggagcaggccctgccctccacaccctcatgaggaatgccgagtctcattttctgagggccctggttgagggtggggtgtggggcgagggggacagggttgcttcctgccatagacttcctgccttggagggttatccttgttctcacctatcccttcccgagctgaagccacagagtaggagagaagttagggctggcacacctccctcccgtgtaactttcactccctgcttaaagggaactgatgagagttgcctggcacagatctgtgcctggcagaatccacagagcagcccaggtgtgctaggaactccagagtgacccctgctccaggccaggaatgagcaccttgtgcctggaggtcttcctgccactgctggctgcccattgctgtggatggggtagagctggagtcacacatggaggctggacagctgcatgcagcctgcaggggacactctggatggcatgtaccatgtttttattatttctatttttaattaaattggaatcctttatggata

SEQ ID NO: 252099 - DNA, 390 bp, Artificial Sequence
  derived and/or modified sequence
atgtctgggggccgctttgattttgatgatggaggagcctactgcggcggctgggagggcggcaaggcccacggccacggcctgtgcaccggccccaagggccagggcgagtacagcggctcctggaactttggatttgaggtggccggcgtgtacacctggcccagcggcaacacctttgagggctactggagccagggcaagagacatggcctgggcatcgagaccaagggccgctggctgtacaagggggagtggacccacggcttcaagggccgctatggcatccggcagagcagcagcagcggggccaagtatgagggcacctggaacaacggcctgcaggacggctacggcacagagacctatgcagatggcggcatgtgctag

SEQ ID NO: 252100 - DNA, 390 bp, Artificial Sequence
  derived and/or modified sequence
atgagcggcggccggttcgacttcgacgacggcggcgcctactgcggcggctgggagggcggtaaagcgcacgggcatggcctgtgtaccggaccaaaggggcaaggagaatactcgggcagctggaacttcggctttgaggtggctggagtctatacttggcctagtggcaacacgtttgagggttattggagtcaggggaagagacatggtctgggaattgagaccaagggacgatggctgtacaagggtgaatggacacacggattcaagggtagatatgggattagacagtcttcctcatctggcgccaaatatgagggaacttggaataacggcctccaagacggatatgggacggaaacgtacgccgatgggggcatgtgttag

SEQ ID NO: 252101 - DNA, 390 bp, Artificial Sequence
  derived and/or modified sequence
atgtctggcggtaggttcgactttgacgacggtggtgcttactgtggaggttgggaagggggaaaagctcatgggcacggtctgtgtaccggcccaaaaggtcaaggcgaatactccgggtcctggaacttcggatttgaggtcgcgggtgtgtacacatggccctctggtaatacttttgaaggctattggtcccagggtaaaaggcacggtctaggaattgagactaagggaagatggctgtataaaggtgagtggactcacggattcaagggtcgctatggtatacgacaatccagcagtagcggagcaaagtatgaagggacctggaacaatggactgcaggacgggtacgggactgaaacatacgccgacggaggtatgtgctag

SEQ ID NO: 252102 - DNA, 390 bp, Artificial Sequence
  derived and/or modified sequence
atgagcggcggcagattcgacttcgacgacggcggcgcctactgcggcggctgggagggcggcaaggcccacggccacggcctgtgcaccggccccaagggccagggcgagtacagcggcagctggaacttcggcttcgaggtggccggcgtgtacacctggcccagcggcaacaccttcgagggctactggagccagggcaagagacacggcctgggcatcgagaccaagggcagatggctgtacaagggcgagtggacccacggcttcaagggcagatacggcatcagacagagcagcagcagcggcgccaagtacgagggcacctggaacaacggcctgcaggacggctacggcaccgagacctacgccgacggcggcatgtgctag

SEQ ID NO: 252103 - protein, 452 aa, Artificial Sequence
  derived and/or modified sequence
MVSVNAPLGAPVESSYDTSPSEGTNLNAPNSLGVSALCAICGDRATGKHYGASSCDGCKGFFRRSVRKNHMYSCRFSRQCVVDKDKRNQCRYCRLKKCFRAGMKKEAVQNERDRISTRRSSYEDSSLPSINALLQAEVLSRQITSPVSGINGDIRAKKIASIADVCESMKEQLLVLVEWAKYIPAFCELPLDDQVALLRAHAGEHLLLGATKRSMVFKDVLLLGNDYIVPRHCPELAEMSRVSIRILDELVLPFQELQIDDNEYAYLKAIIFFDPDAKGLSDPGKIKRLRSQVQVSLEDYINDRQYDSRGRFGELLLLLPTLQSITWQMIEQIQFIKLFGMAKIDNLLQEMLLGGSPSDAPHAHHPLHPHLMQEHMGTNVIVANTMPTHLSNGQMCEWPRPRGQAATPETPQPSPPGGSGSEPYKLLPGAVATIVKPLSAIPQPTITKQEVI

SEQ ID NO: 252104 - DNA, 1359 bp, Artificial Sequence
  derived and/or modified sequence
atggtctcagtcaatgcccccttgggcgctcccgtggaaagctcctatgatacttccccttcagagggtactaaccttaacgctccgaactccctcggtgtgtctgcactgtgcgctatttgcggcgaccgagccaccggcaagcattacggggccagtagttgcgacgggtgcaagggtttcttccgccgttccgtgaggaaaaatcacatgtactcctgtagattctcgagacagtgtgtagtggataaggacaaacgaaatcagtgcagatactgtaggcttaagaagtgcttcagggctggaatgaagaaagaagcagtgcagaatgaaagagatcgtatcagtactcggaggtccagttacgaggacagcagtctgccaagtatcaatgcgctactgcaggccgaggtgttgtctcgccagatcacctctcctgtgtcaggtatcaatggtgacatacgagccaaaaagattgcaagtattgccgacgtgtgtgagtctatgaaagagcagctgctagtgctggtagaatgggctaagtatataccggccttttgcgagttacctctggacgaccaggtagcactacttcgggcccatgctggagaacacctgttacttggagcaactaagagaagcatggtatttaaggacgtcctgttgctaggcaacgactacattgtgccaaggcattgtcccgaattggccgagatgtcccgtgtgtcaatccgcattttggacgagttggttctgccttttcaggaactgcaaattgacgacaatgagtatgcatatctcaaggcaatcattttttttgacccagatgccaaaggcctgtctgacccaggtaaaatcaagaggttaaggagccaggtccaggtgtccctggaagattacattaacgacaggcagtacgattctcgaggtagatttggagagctcctcctcctactaccaacactccaatcaataacgtggcagatgattgaacagattcagtttattaaacttttcggaatggcgaaaatcgacaacctgctgcaggagatgctgctcggcggtagtcccagcgatgccccacacgcccaccatccactccacccacatctcatgcaggagcacatgggaaccaacgtcattgttgcaaacactatgccaacacatttaagtaatggtcagatgtgcgagtggcctcggccacgcggacaagctgccacaccagagactcctcagccatctccacccggaggctctggatccgaaccatacaaactgctgccaggagccgttgcaaccatagtgaaacccttgagtgcaattcctcagcctacaattaccaagcaggaggttatttag

SEQ ID NO: 252105 - DNA, 1470 bp, Artificial Sequence
  derived and/or modified sequence
cactcaccgccttcctggtggacgggctcctggtggctgtgctgctgctgtgagcgggcccctgctcctccatgcccccagctctccggctgggtgggcttggccatggtcagcgtgaacgcgcccctcggggctccagtggagagttcttacgacacgtccccatcagaaggcaccaacctcaacgcgcccaacagcctgggtgtcagcgccctgtgtgccatctgcggggaccgggccacgggcaaacactacggtgcctcgagctgtgacggctgcaagggcttcttccggaggagcgtgcggaagaaccacatgtactcctgcagatttagccggcagtgcgtggtggacaaagacaagaggaaccagtgccgctactgcaggctcaagaaatgcttccgggctggcatgaagaaggaagccgtccagaatgagcgggaccggatcagcactcgaaggtcaagctatgaggacagcagcctgccctccatcaatgcgctcctgcaggcggaggtcctgtcccgacagatcacctcccccgtctccgggatcaacggcgacattcgggcgaagaagattgccagcatcgcagatgtgtgtgagtccatgaaggagcagctgctggttctcgttgagtgggccaagtacatcccagctttctgcgagctccccctggacgaccaggtggccctgctcagagcccatgctggcgagcacctgctgctcggagccaccaagagatccatggtgttcaaggacgtgctgctcctaggcaatgactacattgtccctcggcactgcccggagctggcggagatgagccgggtgtccatacgcatccttgacgagctggtgctgcccttccaggagctgcagatcgatgacaatgagtatgcctacctcaaagccatcatcttctttgacccagatgccaaggggctgagcgatccagggaagatcaagcggctgcgttcccaggtgcaggtgagcttggaggactacatcaacgaccgccagtatgactcgcgtggccgctttggagagctgctgctgctgctgcccaccttgcagagcatcacctggcagatgatcgagcagatccagttcatcaagctcttcggcatggccaagattgacaacctgttgcaggagatgctgctgggagggtcccccagcgatgcaccccatgcccaccaccccctgcaccctcacctgatgcaggaacatatgggaaccaacgtcatcgttgccaacacaatgcccactcacctcagcaacggacagatgtgtgagtggccccgacccaggggacaggcagccacccctgagaccccacagccctcaccgccaggtggctcagggtctgagccctataagctcctgccgggagccgtcgccacaatcgtcaagcccctctctgccatcccccagccgaccatcaccaagcaggaagttatctagcaagcc

SEQ ID NO: 252106 - DNA, 1359 bp, Artificial Sequence
  derived and/or modified sequence
atggtgtctgtgaatgcccccctgggcgcccctgtggagagcagctatgacaccagccccagcgagggcaccaacctgaatgcccccaacagcctgggcgtgtctgccctgtgtgccatctgtggggaccgggccaccgggaagcactacggggccagcagctgtgatggctgcaagggcttcttcagaagatctgtgaggaagaaccacatgtacagctgccgcttcagccggcagtgtgtggtggacaaggacaagaggaaccagtgccgctactgccgcctgaagaagtgcttccgggccggcatgaagaaggaggccgtgcagaatgaaagagaccgcatcagcacccggcgcagcagctatgaggacagcagcctgcccagcatcaatgccctgctgcaggccgaggtgctgagccggcagatcaccagccctgtgtctggcatcaatggagacatccgggccaagaagatcgccagcattgctgatgtgtgtgagagcatgaaggagcagctgctggtgctggtggagtgggccaagtacatcccagccttctgtgagctgcccctggatgaccaggtggccctgctgcgggcccacgccggggagcacctgctgctgggcgccaccaagaggtccatggtgttcaaggatgtgctgctgctgggcaatgactacatcgtgcccaggcactgcccagagctggccgagatgagccgggtgtccatccgcatcctggatgagctggtgctgcccttccaggagctgcagattgatgacaatgaatatgcctacctgaaggccatcatcttctttgatcctgatgccaagggcctgagtgaccccgggaagatcaagaggctgcggagccaggtgcaggtgtccctggaggactacatcaatgaccggcagtatgacagccggggccgctttggagagctgctgctgctgctgcccaccctgcagagcatcacctggcagatgattgagcagatccagttcatcaagctgtttggcatggccaagattgacaacctgctgcaggagatgctgctgggcggcagccccagtgatgccccccacgcccaccaccccctgcacccccacctgatgcaggagcacatgggcaccaacgtgattgtggccaacaccatgcccacccacctgagcaatggccagatgtgtgagtggccccggccccggggccaggccgccaccccagagaccccccagcccagccccccaggcggcagcggcagcgagccctacaagctgctgcccggggctgtggccaccatcgtgaagcccctgagcgccatcccccagcccaccatcaccaagcaggaggtgatctag

SEQ ID NO: 252107 - DNA, 1359 bp, Artificial Sequence
  derived and/or modified sequence
atggtgagcgtgaacgcccccctgggcgcccccgtggagagcagctacgacacctccccctccgaggggaccaacctgaatgctccgaatagccttggcgtgagtgctctttgtgcaatctgcggagatcgggccacagggaagcattacggcgccagtagctgtgacgggtgcaaaggattctttcggcggagcgtcaggaagaatcacatgtacagctgtaggttttcccgccagtgtgtggtagacaaagacaagagaaatcaatgtaggtattgcagactgaagaaatgtttccgggccgggatgaagaaggaggccgtgcagaacgaacgcgatcgcattagtacaaggaggtcctcttacgaggattcctcattgccttctataaacgctctgttgcaagccgaggtactctcgcgccagatcaccagccctgtcagcggaattaacggagatatacgagctaagaagattgccagcatagccgacgtctgtgagtctatgaaggagcagctgctcgtgctggtggaatgggccaagtatatacccgctttttgcgaattgcccctggacgaccaggttgccctgcttcgggcccatgctggagaacatctgttactgggagcaactaaacgctccatggtcttcaaggacgtgctgctgcttggtaacgactacatcgttccaagacactgtccggagctggccgaaatgtcccgcgtctccatccggatcctagatgaactagttttgccttttcaggagctgcagattgatgacaacgagtatgcctacctgaaagctattatttttttcgatcctgacgctaaaggcctaagtgatcccggtaagatcaaaaggctgaggtctcaggtgcaggtctcactcgaagactacataaatgaccgtcagtacgactctcgaggccgttttggggagctcctgctcctgttacctacgcttcaaagtatcacatggcaaatgattgagcagatccagttcattaagctctttggcatggccaaaatcgacaacttgctgcaggagatgctgttaggtggaagcccaagcgacgcccctcatgcacatcaccctctgcatcctcacctaatgcaggagcatatgggtacaaacgtgatcgtggctaacactatgcccactcacctctcaaatgggcaaatgtgcgagtggccaaggccccgaggacaagccgcaacgccggagaccccccagccatcgccaccgggaggctcggggagcgaaccttacaaattgttgccgggcgcagtcgcgactatcgtcaaacccctttccgctataccccagcctacgattaccaagcaggaggtgatctag

SEQ ID NO: 252108 - DNA, 1359 bp, Artificial Sequence
  derived and/or modified sequence
atggtatccgtgaatgcgccacttggcgcacctgtagaaagtagctatgatacatccccttctgaaggaactaacttgaatgccccaaatagtttgggggtgagcgccctgtgtgccatttgtggggacagggcaaccgggaaacattatggtgcaagttcttgtgacggatgcaaaggatttttcaggcgctctgttaggaaaaaccatatgtacagttgcagatttagtaggcagtgcgtggttgataaagacaagaggaatcaatgcagatattgtcggctgaagaaatgtttccgcgcaggcatgaagaaggaggcggtccaaaatgaacgggataggatctctacaaggagaagctcctacgaggactcaagtctgccctcaatcaacgcactcctgcaggcggaggtgttgagccgacagatcacatctcctgtaagtgggataaatggcgacatcagggctaaaaaaatcgcctccattgccgatgtgtgcgaatctatgaaggagcagttactagtgctagtggaatgggccaagtatattcccgctttttgcgagttacctctcgatgaccaagttgccctcctcagagcacacgcgggagagcatttactgctgggggctactaaacgatccatggtgttcaaggatgtcctgctgctggggaatgactacattgtgcctcggcactgtcctgagcttgccgaaatgagcagggtttctattaggatcctagacgaactggtgcttccctttcaagaattacagatagatgacaacgaatacgcgtatctgaaggccattatctttttcgatcccgatgcgaaagggttatccgaccccggtaaaatcaaaaggcttaggtctcaggtgcaagtgtcattagaggactacattaacgataggcagtacgattcccgtgggaggtttggtgaactgctcttactcttgcccactttgcagagtatcacttggcagatgattgaacaaatccaattcatcaagctattcggaatggccaagatcgacaatttgctgcaggagatgttgctgggaggctctccttcagacgctccacatgcgcaccatccgctgcacccacatctcatgcaggaacatatgggcaccaatgttatcgtggctaatacgatgccgacccatctctctaacgggcaaatgtgtgaatggcctcgcccacgcggacaggccgcaacgcctgagacgcctcagccaagtccacccggtggaagcgggagcgaaccgtataagcttttgcctggcgctgtcgcaaccattgttaagccactgagcgccattccccaacccaccattaccaagcaagaggtcatctag

SEQ ID NO: 252109 - DNA, 1359 bp, Artificial Sequence
  derived and/or modified sequence
atggtgagcgtgaacgcccccctgggcgcccccgtggagagcagctacgacaccagccccagcgagggcaccaacctgaacgcccccaacagcctgggcgtgagcgccctgtgcgccatctgcggcgacagagccaccggcaagcactacggcgccagcagctgcgacggctgcaagggcttcttcagaagaagcgtgagaaagaaccacatgtacagctgcagattcagcagacagtgcgtggtggacaaggacaagagaaaccagtgcagatactgcagactgaagaagtgcttcagagccggcatgaagaaggaggccgtgcagaacgagagagacagaatcagcaccagaagaagcagctacgaggacagcagcctgcccagcatcaacgccctgctgcaggccgaggtgctgagcagacagatcaccagccccgtgagcggcatcaacggcgacatcagagccaagaagatcgccagcatcgccgacgtgtgcgagagcatgaaggagcagctgctggtgctggtggagtgggccaagtacatccccgccttctgcgagctgcccctggacgaccaggtggccctgctgagagcccacgccggcgagcacctgctgctgggcgccaccaagagaagcatggtgttcaaggacgtgctgctgctgggcaacgactacatcgtgcccagacactgccccgagctggccgagatgagcagagtgagcatcagaatcctggacgagctggtgctgcccttccaggagctgcagatcgacgacaacgagtacgcctacctgaaggccatcatcttcttcgaccccgacgccaagggcctgagcgaccccggcaagatcaagagactgagaagccaggtgcaggtgagcctggaggactacatcaacgacagacagtacgacagcagaggcagattcggcgagctgctgctgctgctgcccaccctgcagagcatcacctggcagatgatcgagcagatccagttcatcaagctgttcggcatggccaagatcgacaacctgctgcaggagatgctgctgggcggcagccccagcgacgccccccacgcccaccaccccctgcacccccacctgatgcaggagcacatgggcaccaacgtgatcgtggccaacaccatgcccacccacctgagcaacggccagatgtgcgagtggcccagacccagaggccaggccgccacccccgagaccccccagcccagcccccccggcggcagcggcagcgagccctacaagctgctgcccggcgccgtggccaccatcgtgaagcccctgagcgccatcccccagcccaccatcaccaagcaggaggtgatctag

SEQ ID NO: 252110 - protein, 446 aa, Artificial Sequence
  derived and/or modified sequence
MHEPSLCANVECPPAHTCPCGVPACSCAHVECPPAHTCRCGVPACSHMPMWSARLLTRAHVECPPAHTRVHVECPPAHVPMWSAHLLTCADVECHLLTHVPMWSARLLTCPCGVPACSHVPMRSARLLTRAHAECPPAHTCPCGVPACSHVPMRSARLLTRADVECPPAHTCPCGVPACSHVPTWSARLITRAHVECSPAHTCRCGVPACSHVPMWSVRLLTRADAECPPAHTCRCGVPACSHVPMWSARLLTCRCGVPACSHVPMWSARLLTCRCGVPACSHVPMWSARLLTRAHVECPPAHTCRRGVPACSRAHMECPPAHTCHCGVPACSHTCRCGVPACSHVPMWSARLLTRAHVECPPAHTRAHVECPPAHTCPCGVPACSHTCPCGVPACSHKALAWWFCRFPVLPAESDAVTVHSTHGGFLIRFYVKDPFYISLHLEIT

SEQ ID NO: 252111 - protein, 388 aa, Artificial Sequence
  derived and/or modified sequence
ANVECPPAHTCPCGVPACSCAHVECPPAHTCRCGVPACSHMPMWSARLLTRAHVECPPAHTRVHVECPPAHVPMWSAHLLTCADVECHLLTHVPMWSARLLTRADAECPPAHTCPCGVPACSHVPMRSARLLTRAHAECPPAHTCRRGVPACSHVPMWSARLLTRADAECPPAHTCRCGVPACSHVPMWSARLLTCRCGVPACSHVPMWSARLLTCRCGVPACSHVPMWSARLLTRAHVECPPAHTCRRGVPACSRAHMECPPAHTCHCGVPACSHTCRCGVPACSHVPMWSARLLTRAHVECPPAHTRAHVECPPAHTCPCGVPACSHTCPCGVPACSHKALAWWFCRFPVLPAESDAVTVHSTHGGFLIRFYVKDPFYISLHLEIT

SEQ ID NO: 252112 - DNA, 4441 bp, Artificial Sequence
  derived and/or modified sequence
tagtgaaaaaaaaatgtctttaagtcccttttgtatgttattagtatagccacttagctcttttttgattattgtttgcatggtatcttttttcaccctttaactttcattgtatctctgaatctaaagtgtgtttcttgtaaacagcatatagtgggatcatgtttcttatctgtcctgctggtctctgccgtgaatctaaagtgtgtttcttgtaaacagcatatagtaggatagtgtttctcatctgtctttctggtctctgctctgaatcaaaagtgtgtttcttgtagacagcacatagtgggatcatgtttttcatctgtcctgctggtctctgctgtttgagagggatgtttaatccatttacattcagtgtgattactgagaaagttggatttgtatctgccatttctaaatttgtttactatattgtcttttttgtctttcttcctttatttctccattacttttttgtgttaaatggacatttaattctcttgtaacattgtaatttccttgtctgttttactgggtttttttaaaagtaactttcttagcagctgctctgagtattacagtaacaacgtaaaaccaatcaagtgttcagatgaacttaatataatgtacaaaaaccttcacttcaagtagctttgtttcctctcagcttcttggtgctgtatttgtcatataaatgctaccttttagattgtaagtccgtcagcagtcttgtaattattgctttatgcagttgtcttttaaatcacatagaagaagaaaagatgtacaaacagaaatgagtttctgctgtctctgttgctggctttgcagttgtcttttttggtgctctttgtgtggatttgagtgtggtgtcttggacttcagcctcaagtatttcttgtaggacagatcttctagcaatgaattctctttgtttttgtttatctgagaatgttgtaatttttccttctcttctgaagaataattgtgctggatatggctgacttggttggccctctttttctttcagtcctctatagatgtcattccactgcctctggcatctgtggtttccatggcgggagcaccgcaccatgtctcagtctctttttagcttctgactgtttgactgtggtgtgtctaattgtggatctttcagtgtgtcctacctgcagttctttgagcttcttggatatagaggttaatatttcttgtagtctgattgtttacatcttctcttcacttattgatcttctgcctagttatattgatattgaatgtgggtattgaatccttcggttttgtcagcttcatgttcagccagtgactggacaggggacccctttaagtgctttgcaccagtaactctcatggttctgctgacacacagttgatgtgtggtgagtatgccttcagcgctccattgtggttctgcaaatttgggaaattttaggttgtcgtttctcgaaatattttatgtccatgttctcttcccccacttggactccagctacgtgtgttgatgtggagctgggcacagccttggaggcctccttgactttcctttattccggaattttttcttcttctcagaatgggtcatctcagttgacctatcttcaaggtcacagatgcttttgccaaacaaaacctgatgtcaagctgctctagtgaatttttcatttcagttattgtacttttctactccaaacttccatttggctctctcctataatttctgtatctttactcatattctttgtttagtgaaacattctcatactttaattctgtagacacagtttcctttagttatttgaacatatgtgtagaagctgatttaaagtacttgtctaagccgggcgtggtggtgtgcacctgtaatcccagctacttgggaggcagaggcaggagaattgcttgaacccgggaggcagaggttgcagtgagccaggatcaagccattgtactccagcctgggccacagagcgagacgctttcaaaactagatagatagatagattagatagatagatagatagatagatagatagatagatagataggataagataagatagataggtgacttgtctactaagttcaacatcagggcttattcaggggaagttcctattgatgaccttttttcccatgtcagagccaaggaaataacatactctttctttgtggtctcatatatatgtattttttgaagactggacactttaataatgtgctgtgcaactctggaaatcagataccctctccacgagtttattgttgttctgttgctgttaccttttgtttagtgtgtgttctggactaatttgaagtgtccacctcatcagcttcatgttcagccagtgactggacagaggacccctttaagtgctttgcaccagtaactctcacggttctgccgacacgcagttgatgcatggtgagtgtgccttcagcgctccatcgcggttctgctgacacgcagttgatatgtggtcagtgctccagcaggcagctgccaactgtgcctttgccttcacttcttacttgcacacagccacaaagccagccagaggtgagggccagggcagctcaggttcctctcgggcacacacacagctctgtgcctgtgtgggcacagccttccatgcctccaggagtgtggcagagcttctcagcggccactgtgggcatctcgttcctcagatcttcctttcatgagttatgtagttgaattatcaatctttcttggcttctaagttttgtgttctacttagaatgctcttcccccttaaagattatatttgaaatgttttccatgttttcttctagtacttttatgggtttcattttcatattgaaatcattgatctacttctagtttttgatacaaaatgtgagccaggaaacccagtttttaaatttcaaatagctgtccaggtgtccctgcacctcttatgcatgagccctcgctttgtgccaatgtggagtgcccgcctgctcacacgtgcccatgtggagtgcccgcctgctcatgtgcccatgtggagtgcccgcctgctcacacatgtcgatgcggagtgcccgcctgctcacacatgcccatgtggagtgcccgcctgctcacacgtgcccatgtggagtgcccgcctgctcacacacgtgtccatgtggagtgcccacctgctcatgtgcccatgtggagtgcccacctgctcacatgtgccgatgtggagtgccacctgctcacacacgtgcccatgtggagtgcccgcctgctcacgtgcccatgtggagtgcccgcctgctcacacgtgccgatgcggagtgcccgcctgctcacacgtgcccatgcggagtgcccgcctgctcacacgtgcccatgcggagtgcccgcctgctcacacgtgcccatgcggagtgcccgcctgctcacacgtgccgacgtggagtgcccgcctgctcacacgtgcccatgtggagtgcccgcctgctcacacgtgccaacgtggagtgcccgcctgatcacacgtgcccatgtggagtgctcgcctgctcacacgtgccgatgtggagtgcctgcctgctcacacgtgcccatgtggagtgttcgcctgctcacacgtgccgatgcggagtgcccgcctgctcacacgtgccgatgcggagtgcccgcctgctcacacgtgcccatgtggagtgcccgcctgctcacgtgccgatgtggagtgcccgcctgctcacacgtgcccatgtggagtgcccgcctgctcacgtgccgatgtggggtgcccgcctgctcacatgtgccgatgtggagtgcccgcctgctcacacgtgcccatgtggagtgcccgcctgctcacacgtgccgacgtggagtgcccgcctgctcacgtgcccatatggagtgcccgcctgctcacacgtgccattgtggagtgcccgcctgctcacacacatgccgatgtggagtgcccgcctgctcacacgtgcccatgtggagtgcccgcctgctcacacgtgcccatgtggagtgcccgcctgctcacacacgtgcccatgtggagtgcccgcctgctcacacgtgcccatgtggagtgcctgcctgctcacacacgtgcccatgtggagtgcccgcctgctcacacaaagccctggcatggtggttctgtaggtttcctgtcctgccggccgagtcagacgctgttaccgtacattctactcatggtggctttttaatacgtttttatgtcaaggatcccttttatatttctctgcacctcgagataacgtaggaatattagggatgagatggaagaggagagggtgtttttgtaaaattgaattcaggactgatttgttagcctggtgcttttcgtatcagaccttttaatgaattttcatggatgctgattaaaagacaaacctgtgactc

SEQ ID NO: 252113 - DNA, 1167 bp, Artificial Sequence
  derived and/or modified sequence
gccaatgtggagtgcccgcctgctcacacgtgcccatgtggagtgcccgcctgctcatgtgcccatgtggagtgcccgcctgctcacacatgtcgatgcggagtgcccgcctgctcacacatgcccatgtggagtgcccgcctgctcacacgtgcccatgtggagtgcccgcctgctcacacacgtgtccatgtggagtgcccacctgctcatgtgcccatgtggagtgcccacctgctcacatgtgccgatgtggagtgccacctgctcacacacgtgcccatgtggagtgcccgcctgctcacacgtgccgatgcggagtgcccgcctgctcacacgtgcccatgcggagtgcccgcctgctcacacgtgcccatgcggagtgcccgcctgctcacacgtgcccatgcggagtgcccgcctgctcacacgtgccgacgtggagtgcccgcctgctcacacgtgcccatgtggagtgcccgcctgctcacacgtgccgatgcggagtgcccgcctgctcacacgtgccgatgcggagtgcccgcctgctcacacgtgcccatgtggagtgcccgcctgctcacgtgccgatgtggagtgcccgcctgctcacacgtgcccatgtggagtgcccgcctgctcacgtgccgatgtggggtgcccgcctgctcacatgtgccgatgtggagtgcccgcctgctcacacgtgcccatgtggagtgcccgcctgctcacacgtgccgacgtggagtgcccgcctgctcacgtgcccatatggagtgcccgcctgctcacacgtgccattgtggagtgcccgcctgctcacacacatgccgatgtggagtgcccgcctgctcacacgtgcccatgtggagtgcccgcctgctcacacgtgcccatgtggagtgcccgcctgctcacacacgtgcccatgtggagtgcccgcctgctcacacgtgcccatgtggagtgcctgcctgctcacacacgtgcccatgtggagtgcccgcctgctcacacaaagccctggcatggtggttctgtaggtttcctgtcctgccggccgagtcagacgctgttaccgtacattctactcatggtggctttttaatacgtttttatgtcaaggatcccttttatatttctctgcacctcgagataacgtag

SEQ ID NO: 252114 - DNA, 1341 bp, Artificial Sequence
  derived and/or modified sequence
atgcacgagcccagcctgtgcgccaacgtggagtgcccccccgcccacacctgcccctgcggcgtgcccgcctgcagctgcgcccacgtggagtgcccccccgcccacacctgcagatgcggcgtgcccgcctgcagccacatgcccatgtggagcgccagactgctgaccagagcccacgtggagtgcccccccgcccacaccagagtgcacgtggagtgcccccccgcccacgtgcccatgtggagcgcccacctgctgacctgcgccgacgtggagtgccacctgctgacccacgtgcccatgtggagcgccagactgctgacctgcccctgcggcgtgcccgcctgcagccacgtgcccatgagaagcgccagactgctgaccagagcccacgccgagtgcccccccgcccacacctgcccctgcggcgtgcccgcctgcagccacgtgcccatgagaagcgccagactgctgaccagagccgacgtggagtgcccccccgcccacacctgcccctgcggcgtgcccgcctgcagccacgtgcccacctggagcgccagactgatcaccagagcccacgtggagtgcagccccgcccacacctgcagatgcggcgtgcccgcctgcagccacgtgcccatgtggagcgtgagactgctgaccagagccgacgccgagtgcccccccgcccacacctgcagatgcggcgtgcccgcctgcagccacgtgcccatgtggagcgccagactgctgacctgcagatgcggcgtgcccgcctgcagccacgtgcccatgtggagcgccagactgctgacctgcagatgcggcgtgcccgcctgcagccacgtgcccatgtggagcgccagactgctgaccagagcccacgtggagtgcccccccgcccacacctgcagaagaggcgtgcccgcctgcagcagagcccacatggagtgcccccccgcccacacctgccactgcggcgtgcccgcctgcagccacacctgcagatgcggcgtgcccgcctgcagccacgtgcccatgtggagcgccagactgctgaccagagcccacgtggagtgcccccccgcccacaccagagcccacgtggagtgcccccccgcccacacctgcccctgcggcgtgcccgcctgcagccacacctgcccctgcggcgtgcccgcctgcagccacaaggccctggcctggtggttctgcagattccccgtgctgcccgccgagagcgacgccgtgaccgtgcacagcacccacggcggcttcctgatcagattctacgtgaaggaccccttctacatcagcctgcacctggagatcacctag

SEQ ID NO: 252115 - DNA, 1167 bp, Artificial Sequence
  derived and/or modified sequence
gccaacgtggagtgcccccccgcccacacctgcccctgcggcgtgcccgcctgcagctgcgcccacgtggagtgcccccccgcccacacctgcagatgcggcgtgcccgcctgcagccacatgcccatgtggagcgccagactgctgaccagagcccacgtggagtgcccccccgcccacaccagagtgcacgtggagtgcccccccgcccacgtgcccatgtggagcgcccacctgctgacctgcgccgacgtggagtgccacctgctgacccacgtgcccatgtggagcgccagactgctgaccagagccgacgccgagtgcccccccgcccacacctgcccctgcggcgtgcccgcctgcagccacgtgcccatgagaagcgccagactgctgaccagagcccacgccgagtgcccccccgcccacacctgcagaagaggcgtgcccgcctgcagccacgtgcccatgtggagcgccagactgctgaccagagccgacgccgagtgcccccccgcccacacctgcagatgcggcgtgcccgcctgcagccacgtgcccatgtggagcgccagactgctgacctgcagatgcggcgtgcccgcctgcagccacgtgcccatgtggagcgccagactgctgacctgcagatgcggcgtgcccgcctgcagccacgtgcccatgtggagcgccagactgctgaccagagcccacgtggagtgcccccccgcccacacctgcagaagaggcgtgcccgcctgcagcagagcccacatggagtgcccccccgcccacacctgccactgcggcgtgcccgcctgcagccacacctgcagatgcggcgtgcccgcctgcagccacgtgcccatgtggagcgccagactgctgaccagagcccacgtggagtgcccccccgcccacaccagagcccacgtggagtgcccccccgcccacacctgcccctgcggcgtgcccgcctgcagccacacctgcccctgcggcgtgcccgcctgcagccacaaggccctggcctggtggttctgcagattccccgtgctgcccgccgagagcgacgccgtgaccgtgcacagcacccacggcggcttcctgatcagattctacgtgaaggaccccttctacatcagcctgcacctggagatcacctag

SEQ ID NO: 252116 - DNA, 1341 bp, Artificial Sequence
  derived and/or modified sequence
atgcatgaaccctcgctgtgtgcgaacgtggagtgcccacccgcccatacttgtccttgcggggtgcctgcctgctcctgcgcgcacgtggagtgtcccccggcccatacgtgtcggtgtggtgtgcctgcctgtagtcacatgcccatgtggtctgccaggcttctaacaagagcacacgtagagtgcccgcctgcgcacacaagagtgcacgtcgagtgtcctcccgctcatgtgccaatgtggtccgcacatctgctcacctgcgcagacgtggaatgccacctccttacacacgtgcctatgtggtccgccagactgttgacctgcccctgtggggtgccagcctgcagtcacgtgcccatgaggtctgcaagactgttgactagagctcatgccgagtgtcctcctgcgcacacctgcccctgcggcgtccctgcatgttcacacgtccctatgcgaagtgccaggctccttactagagctgacgtcgagtgtccccctgcccatacgtgtccgtgtggagtacccgcctgttcccatgtgccaacctggagcgcacggctgatcacaagagctcacgttgagtgctcccccgcccacacatgtcgttgtggagtgcctgcttgtagccacgtccctatgtggagtgtgcgccttttgacccgtgctgacgccgaatgccccccagctcatacctgtaggtgcggagttcccgcctgcagtcatgtgcccatgtggtctgcacgactgctcacctgtagatgtggcgtgccggcttgttcacatgttcctatgtggagtgctcgcctcttgacctgcagatgtggtgtgcccgcctgctcccacgtcccgatgtggagtgcccgcctccttacaagggcccacgtggagtgtcccccggcccacacctgccggcgcggtgtgcctgcttgcagccgagcacatatggagtgccctcctgcacacacttgtcattgtggcgtgcccgcttgcagtcacacatgtcgctgtggtgtcccggcatgcagtcacgtgcctatgtggtccgcacgattgctaacccgggcccacgtggagtgtccccctgcacatactagggctcatgtcgagtgccccccggcacatacctgcccttgtggggttcctgcctgcagtcatacctgtccctgcggggtcccagcctgtagtcacaaggcactggcgtggtggttttgtcggtttcctgtgttgccagctgaatccgacgcagtaacagttcatagcactcacggtggctttttgatcaggttttacgtgaaggatcctttctatatttctctccatctggaaatcacgtag

SEQ ID NO: 252117 - DNA, 1167 bp, Artificial Sequence
  derived and/or modified sequence
gccaacgtcgaatgccccccagcacatacctgcccctgcggcgtgcctgcttgtagctgcgctcacgtggagtgtccccctgcccatacatgccggtgcggtgtcccagcctgctcccacatgccgatgtggtcggctcgactgctaacgcgcgcacacgtcgagtgccctcccgcccacactagggtgcacgtagaatgcccacccgcacacgttcctatgtggagtgcccacctcttgacatgtgccgatgtagagtgccatctgctgacccacgtcccaatgtggtctgcccggctgctgacgcgcgcagacgccgaatgtcctccagcacatacctgtccatgcggggtgcccgcctgttcccacgttcccatgaggtcagctcgactgttgacacgagcgcatgctgaatgcccgccggcacacacttgccgtaggggggtacctgcatgctcccacgtgccaatgtggagcgctcgtctgctgacgcgggccgacgctgagtgcccgccagcacatacctgtaggtgcggggtaccagcatgtagtcatgtgcctatgtggagcgctaggttgctgacatgtcggtgcggagtccctgcctgttcccacgtacccatgtggtccgctagattattgacatgccgctgtggggtgcccgcctgttctcacgtgcccatgtggagcgcaagattgctgaccagggctcatgtggagtgtcctcctgcacacacgtgtagacgaggtgttccagcctgctcaagggcccacatggaatgcccgcctgcccatacttgccattgcggggtaccggcctgcagtcatacatgtaggtgtggcgtgcctgcctgctcccatgtccctatgtggtctgcccgcctgctgactagagcccacgtggaatgccccccagcgcatacacgggctcatgtggaatgcccccccgcgcatacctgcccttgtggcgtgccagcctgtagccatacatgcccatgcggagtgccagcatgctcacacaaggccctggcttggtggttctgtcgtttcccggtgttaccagcagagagtgatgcggtgactgtccattccacacatggaggctttctcatccgattctatgtgaaagatcccttctatataagcctgcacctcgaaattacctag

SEQ ID NO: 252118 - DNA, 1341 bp, Artificial Sequence
  derived and/or modified sequence
atgcatgagcccagcctgtgtgccaacgtggagtgccccccagcccacacctgcccctgtggggtgcctgcctgcagctgtgcccacgtggagtgccccccagcccacacctgccgctgtggggtgcctgcctgcagccacatgcccatgtggagcgcccggctgctgacccgggcccacgtggagtgccccccagcccacaccagggtgcacgtggagtgccccccagcccacgtgcccatgtggagcgcccacctgctgacctgtgctgatgtggagtgccacctgctgacccacgtgcccatgtggagcgcccggctgctgacctgcccctgtggggtgcctgcctgcagccacgtgcccatgaggtctgcccggctgctgacccgggcccatgctgagtgccccccagcccacacctgcccctgtggggtgcctgcctgcagccacgtgcccatgaggtctgcccggctgctgaccagggcagatgtggagtgccccccagcccacacctgcccctgtggggtgcctgcctgcagccacgtgcccacctggagcgcccggctcatcacccgggcccacgtggagtgcagccctgcccacacctgccgctgtggggtgcctgcctgcagccacgtgcccatgtggagcgtgcggctgctgaccagggcagatgctgaatgtcctccagcccacacctgccgctgtggggtgcctgcctgcagccacgtgcccatgtggagcgcccggctgctgacctgccgctgtggggtgcctgcctgcagccacgtgcccatgtggagcgcccggctgctgacctgccgctgtggggtgcctgcctgcagccacgtgcccatgtggagcgcccggctgctgacccgggcccacgtggagtgccccccagcccacacctgccggcggggcgtgcctgcctgcagccgggcccacatggagtgccccccagcccacacctgccactgcggcgtgcctgcctgcagccacacctgccgctgtggggtgcctgcctgcagccacgtgcccatgtggagcgcccggctgctgacccgggcccacgtggagtgccccccagcccacacccgggcccacgtggagtgccccccagcccacacctgcccctgtggggtgcctgcctgcagccacacctgcccctgtggggtgcctgcctgcagccacaaggccctggcctggtggttctgccgcttccctgtgctgcctgctgagagtgatgctgtgacagtgcacagcacccacggcggcttcctgatccgcttctacgtgaaggaccccttctacatcagcctgcacctggagatcacctag

SEQ ID NO: 252119 - DNA, 1167 bp, Artificial Sequence
  derived and/or modified sequence
gccaacgtggagtgccccccagcccacacctgcccctgtggggtgcctgcctgcagctgtgcccacgtggagtgccccccagcccacacctgccgctgtggggtgcctgcctgcagccacatgcccatgtggagcgcccggctgctgacccgggcccacgtggagtgccccccagcccacaccagggtgcacgtggagtgccccccagcccacgtgcccatgtggagcgcccacctgctgacctgtgctgatgtggagtgccacctgctgacccacgtgcccatgtggagcgcccggctgctgaccagggcagatgctgaatgtcctccagcccacacctgcccctgtggggtgcctgcctgcagccacgtgcccatgaggtctgcccggctgctgacccgggcccatgctgagtgccccccagcccacacctgccggcggggcgtgcctgcctgcagccacgtgcccatgtggagcgcccggctgctgaccagggcagatgctgaatgtcctccagcccacacctgccgctgtggggtgcctgcctgcagccacgtgcccatgtggagcgcccggctgctgacctgccgctgtggggtgcctgcctgcagccacgtgcccatgtggagcgcccggctgctgacctgccgctgtggggtgcctgcctgcagccacgtgcccatgtggagcgcccggctgctgacccgggcccacgtggagtgccccccagcccacacctgccggcggggcgtgcctgcctgcagccgggcccacatggagtgccccccagcccacacctgccactgcggcgtgcctgcctgcagccacacctgccgctgtggggtgcctgcctgcagccacgtgcccatgtggagcgcccggctgctgacccgggcccacgtggagtgccccccagcccacacccgggcccacgtggagtgccccccagcccacacctgcccctgtggggtgcctgcctgcagccacacctgcccctgtggggtgcctgcctgcagccacaaggccctggcctggtggttctgccgcttccctgtgctgcctgctgagagtgatgctgtgacagtgcacagcacccacggcggcttcctgatccgcttctacgtgaaggaccccttctacatcagcctgcacctggagatcacctag

SEQ ID NO: 252120 - DNA, 1341 bp, Artificial Sequence
  derived and/or modified sequence
atgcacgagcccagcctgtgcgccaacgtggagtgcccccccgcccacacatgcccttgtggcgttcccgcatgtagctgtgcacatgtcgagtgccccccagctcatacctgccggtgcggggtccctgcttgtagtcatatgcctatgtggtcggcacgccttctgacacgggcccatgttgagtgcccccccgcccacacaagagtgcacgtcgagtgcccccctgcacatgtccccatgtggtctgctcatctgctgacctgtgccgatgtcgagtgtcatctgctgactcatgtgccaatgtggtcggccaggctgctgacttgtccctgtggcgtaccggcttgctcacatgtcccaatgcgcagcgcccgcctgctgacaagggctcacgccgagtgtccacccgcccatacctgtccttgtggtgtgccggcgtgcagccacgtgcctatgcggtcggctaggctgctgacacgggctgacgttgagtgtcctcccgcacacacatgtccttgtggtgtccctgcgtgctctcacgtccctacttggtcagcacgcctcatcactagagcacacgtggagtgttctcccgcccacacatgtcgatgcggagttcctgcatgttcccacgtccccatgtggagtgtccgcctactgaccagagcagatgccgaatgtccacccgctcatacttgcaggtgcggagtgcccgcatgcagtcatgttcccatgtggagcgcacgactcctgacatgcagatgcggggtgccggcctgttctcatgtacctatgtggtcagcccgattgctcacgtgccgctgtggtgtccccgcctgctcccacgtgccgatgtggtcggccaggctgctgactagagcgcatgtggaatgtccacccgcccacacttgccgccgcggcgtgcccgcctgctccagggcccatatggagtgtcccccagcccacacctgccactgtggagtgcctgcctgctcccatacctgcaggtgtggtgtccccgcatgctctcatgtccctatgtggagcgcccgcctcctaaccagggctcacgtggaatgtccaccagctcataccagagcccatgtggagtgcccgccagctcacacttgcccgtgtggggtacccgcttgtagtcatacctgcccttgtggtgtgccagcatgtagtcacaaggcacttgcctggtggttctgccggttccctgtgctgccagctgaatctgacgctgtcacagttcactctacccacggcggctttctgatcagattttacgtaaaggatcccttttacattagcctgcatctggagatcacctag

SEQ ID NO: 252121 - DNA, 1167 bp, Artificial Sequence
  derived and/or modified sequence
gccaacgtggagtgcccccccgcccacacctgcccctgcggcgtgcctgcctgttcttgtgctcacgtggagtgcccaccggctcatacatgtcggtgtggtgttcccgcttgctcccatatgccaatgtggtctgcccgtctattgactcgtgcccatgtggaatgtccgcctgctcacacacgggtgcacgtcgagtgtccccctgcacacgtgcccatgtggtctgcccacctgttgacctgcgcagacgtcgaatgccacctgttgacccatgtccctatgtggtccgctagactgcttacccgtgcagacgccgagtgtcctcccgcccatacttgcccttgcggggttccagcttgttctcatgtgcccatgcgtagcgcccgcctattgaccagagctcatgctgagtgtcctcccgctcacacatgcagacgcggggtgcctgcatgcagccacgtgccaatgtggagcgccaggctgctcacccgcgccgacgccgaatgcccacctgcacatacgtgcaggtgtggagtgcccgcctgtagtcatgtacccatgtggtctgcacgcctgctcacttgcaggtgtggcgtgccagcctgttcacacgtgccaatgtggtcggctcgtctcttgacctgtaggtgcggcgtgcccgcctgctcacatgtgcctatgtggtctgcccgcttactgacccgagcccacgtagaatgtccacctgcccatacttgccgccggggcgtgcctgcctgcagccgggcccacatggaatgcccccccgcccacacatgtcattgcggcgtgcccgcctgtagccatacttgtcgttgtggcgtccctgcatgctcacacgttccaatgtggtccgctaggctgctgactcgggctcacgttgaatgcccccctgcgcacacgagagcccacgtggaatgtccaccggcccacacttgtccatgtggggtccccgcctgttctcacacatgtccctgtggcgtccctgcgtgctctcacaaagccctggcttggtggttttgtagattcccggtgcttcccgcggagtctgatgccgtcactgttcactctacccatggcggttttttaatcaggttctatgtcaaggatccattctacattagtctgcacctggagataacttag

SEQ ID NO: 252122 - DNA, 1341 bp, Artificial Sequence
  derived and/or modified sequence
atgcacgaaccctccctatgcgctaatgtcgagtgtcctccggcacatacgtgtccctgtggggtgccggcatgttcctgcgcccacgtggaatgccctccagcccacacctgccgatgtggtgtaccagcctgctcacacatgcccatgtggtctgccaggctcctgaccagggcccacgtcgaatgtcctcctgcgcatacacgcgtccatgtcgagtgcccgcctgctcacgtgccaatgtggtcagcacaccttctgacatgcgcagatgtggagtgccatttgctcacacatgtaccgatgtggtcggcacgcctgctcacatgcccttgcggcgtccctgcctgttcacatgtcccaatgcgcagcgcaaggctcctgacaagggcccacgccgaatgccctcccgctcacacctgtccctgtggcgttccggcatgttcccacgttcctatgcgcagcgcacgactcctgacacgggctgacgtagagtgtcctccggctcatacctgcccttgtggtgttccggcttgtagccatgtgcctacatggagcgctaggcttattacaagggcacacgtggagtgtagtcccgctcatacgtgccggtgtggagttcctgcatgtagccacgtaccaatgtggtcagtgcgcctgctgaccagggccgacgccgaatgcccccctgcacacacctgccggtgtggcgttccagcctgctcccacgtgcccatgtggtccgcacggctcctgacctgtagatgcggtgtgcctgcatgctcgcatgtgccaatgtggagcgcacggctccttacgtgtcgctgcggcgtgccagcttgtagccatgttccaatgtggtccgcaagacttctgacgagggctcatgtagaatgcccaccggcacacacatgtagacgcggagtgcccgcatgttcgcgggcacatatggaatgtcctcctgcccacacttgccactgtggcgtgcctgcttgttcacacacgtgccggtgcggtgtgccagcttgttcgcatgtcccaatgtggtcggccaggctgctgacaagggcacacgtggagtgccctccagcccacacaagagcccatgtggagtgccccccagcacacacctgcccctgtggcgtccccgcatgcagccacacatgtccttgtggcgtgcccgcttgctctcacaaggccctggcttggtggttctgccgattcccagttcttccagccgagagtgacgcagtcactgtccatagcacccacggcggatttctgatcaggttttatgtcaaagatccgttctatatcagtctgcatctggagataacatag

SEQ ID NO: 252123 - DNA, 1167 bp, Artificial Sequence
  derived and/or modified sequence
gctaacgtcgaatgcccacccgctcacacttgcccatgtggtgtgcccgcttgttcttgtgcccacgtggaatgccctccggcacacacttgtcgatgcggagtgcctgcgtgttcccacatgcctatgtggagtgctaggctcctgacacgtgctcacgtagagtgccctccagctcataccagggtgcatgtggagtgccctccagcccatgtgcccatgtggtccgcccaccttctcacatgcgccgatgtagagtgtcacctcctcactcatgtcccgatgtggagcgccagactccttacacgagctgatgcggagtgtccacccgctcatacatgcccatgcggcgtgcctgcctgttctcacgttcccatgcggtccgctcggctattaacacgtgctcacgccgaatgtcctcccgcacacacctgccggcgaggcgtgcccgcttgtagccacgtcccaatgtggtctgccaggttgcttactcgtgccgacgctgagtgccctcctgctcatacttgtaggtgcggtgtgcctgcctgtagtcacgtccctatgtggagcgcccgattactgacttgcagatgcggagtgccagcttgctcgcatgtaccgatgtggtcagcccgactgctcacctgcaggtgtggggtgccggcttgtagccacgtgccaatgtggtcggctcgtcttctgacgcgcgctcacgttgagtgtccccctgctcacacctgtaggcgaggagtacctgcttgcagccgggctcacatggagtgcccacccgctcatacctgtcactgcggtgtgcctgcctgctctcatacctgtagatgcggagtacccgcatgtagccacgtccccatgtggagcgctcggctgctcactcgagcacatgtcgaatgcccacccgctcatacccgtgcacatgtggaatgccctccagcacatacttgtccctgcggcgtgccagcttgttcccatacatgtccatgcggcgttcctgcgtgctcacacaaggccttggcatggtggttttgtagattcccagtcctaccagcagagagtgatgccgtcaccgtgcactccactcatgggggattcctcatccggttttacgtcaaagatccattctacatatcccttcaccttgaaatcacgtag

SEQ ID NO: 252124 - DNA, 84 bp, Artificial Sequence
  derived and/or modified sequence
gacatcctgcagcacaaccaccccgtggtgggcctgctgcaggtgggcagcgagcacggcagcgaggaggccgccctgagctag

SEQ ID NO: 252125 - DNA, 84 bp, Artificial Sequence
  derived and/or modified sequence
gacatcctgcagcacaaccaccctgtggtgggcctgctgcaggtgggcagcgagcacggcagcgaggaggccgccctgtcctag

SEQ ID NO: 252126 - DNA, 504 bp, Artificial Sequence
  derived and/or modified sequence
atggagctgagcagcatgaagatctgcgccgccatccccaccagcagggctctacctgaagtggtaagacgcatgcctagaaaaagaatttccggtttggaatggctgttgcagcaggatcctggcttttcccttgtgaatacagtgaaggcaggtatgataattagttttccatccaacaacatttattccagcgtgtgttgctgtcagtccgaaatttttaagtatgagttctcaaattccaaaaagagctcatggatccaggaggaacgccacctcggcaaaaacaatgtgctgtattctgcccatgatgtttcacctgaaaaggtgacaagcgctctcaagaaaacgaataagcagacaacaaccatcaataacttccccctgcagtacctccctggttccaagctgctcgacaggtttctcagccttagccgcagcctcttatgtctcaacagctggagctcatcattgccgcttgccccccaggtcaagaaaaagtag

SEQ ID NO: 252127 - protein, 1011 aa, Artificial Sequence
  derived and/or modified sequence
MIENSMFEEEPDVVDLAKEPCLHPLEPDEVEYEPRGSRLLVRGLGEHEMEEDEEDYESSAKLLGMSFMNRSSGLRNSATGYRQSPDGACSVPSARTMVVCAFVIVVAVSVIMVIYLLPRCTFTKEGCHKKNQSIGLIQPFATNGKLFPWAQIRLPTAVVPLRYELSLHPNLTSMTFRGSVTISVQALQVTWNIILHSTGHNISRVTFMSAVSSQEKQAEILEYAYHGQIAIVAPEALLAGHNYTLKIEYSANISSSYYGFYGFSYTDESNEKKYFAATQFEPLAARSAFPCFDEPAFKATFIIKIIRDEQYTALSNMPKKSSVVLDDGLVQDEFSESVKMSTYLVAFIVGEMKNLSQDVNGTLVSIYAVPEKIGQVHYALETTVKLLEFFQNYFEIQYPLKKLDLVAIPDFEAGAMENWGLLTFREETLLYDSNTSSMADRKLVTKIIAHELAHQWFGNLVTMKWWNDLWLNEGFATFMEYFSLEKIFKELSSYEDFLDARFKTMKKDSLNSSHPISSSVQSSEQIEEMFDSLSYFKGSSLLLMLKTYLSEDVFQHAVVLYLHNHSYASIQSDDLWDSFNEVTNQTLDVKRMMKTWTLQKGFPLVTVQKKGKELFIQQERFFLNMKPEIQPSDTSYLWHIPLSYVTEGRNYSKYQSVSLLDKKSGVINLTEEVLWVKVNINMNGYYIVHYADDDWEALIHQLKINPYVLSDKDRANLINNIFELAGLGKVPLKRAFDLINYLGNENHTAPITEALFQTDLIYNLLEKLGYMDLASRLVTRVFKLLQNQIQQQTWTDEGTPSMRELRSALLEFACTHNLGNCSTTAMKLFDDWMASNGTQSLPTDVMTTVFKVGAKTDKGWSFLLGKYISIGSEAEKNKILEALASSEDVRKLYWLMKSSLNGDNFRTQKLSFIIRTVGRHFPGHLLAWDFVKENWNKLVQKFPLGSYTIQNIVAGSTYLFSTKTHLSEVQAFFENQSEATFRLRCVQEALEVIQLNIQWMEKNLKSLTWWL

SEQ ID NO: 252128 - protein, 502 aa, Artificial Sequence
  derived and/or modified sequence
MAWPKLPAPWLLLCTWLPAGCLSLLVTVQHTERYVTLFASIILKCDYTTSAQLQDVVVTWRFKSFCKDPIFDYYSASYQAALSLGQDPSNDCNDNQREVRIVAQRRGQNEPVLGVDYRQRKITIQNRADLVINEVMWWDHGVYYCTIEAPGDTSGDPDKEVKLIVLHWLTVIFIILGALLLLLLIGVCWCQCCPQYCCCYIRCPCCPAHCCCPEEDLSLPSSLPQMPMTQTTNQPPIANGVLEYLEKELRNLNLAQPLPPDLKGRFGHPCSMLSSLGSEVVERRIIHLPPLIRDLSSSRRTSDSLHQQWLTPIPSRPWDLREGRSHHHYPDFHQELQDRGPKSWALERRELDPSWSGRHRSSRLNGSPIHWSDRDSLSDVPSSSEARWRPSHPPFRSRCQERPRRPSPRESTQRHGRRRRHRSYSPPLPSGLSSWSSEEDKERQPQSWRAHRRGSHSPHWPEEKPPSYRSLDITPGKNSRKKGSVERRSEKDSSHSGRSVVI

SEQ ID NO: 252129 - DNA, 1509 bp, Artificial Sequence
  derived and/or modified sequence
atggcatggccaaagctgccagccccgtggctgttgctatgcacgtggctgcccgctggttgtctgtctcttctcgtgaccgtccaacatacggaaagatatgtgactctgtttgcatccattatcttgaagtgcgactatacaacatcagcccagttgcaggatgtggtggtgacatggcggttcaagtctttctgtaaagacccaatcttcgactattattcagcctcctaccaggccgctctcagcctggggcaagatcctagcaatgactgtaacgataatcagagagaggtgcgcatcgtggcccagcgcagaggccagaatgaacccgtcctgggcgttgattatagacagaggaagattacgattcagaatagggcagatctcgtgattaacgaagtaatgtggtgggatcatggggtatattattgcacgatcgaggcgcccggcgatacctcaggcgatcccgataaagaggtgaagctgatcgttctgcactggttaaccgttatttttattatactcggtgcactgctgctgcttctgctcatcggggtctgctggtgtcaatgctgccctcagtattgctgctgctacattcgctgcccatgctgtccagctcattgttgttgtccagaggaagatctgtccctgccaagttccctgccccagatgcctatgacccagaccactaatcagcctcccattgcaaatggagtactagagtacctggagaaggaactgcggaacttaaacctcgcccagccacttcccccagatcttaaaggccgcttcggccacccatgttcaatgctgagcagtctgggatcggaggtggtcgagcgccgtattattcacctgccacctctgatccgggatctgagcagctcaagaaggacatctgatagcctgcaccaacagtggttgactcccattccctcaaggccctgggacctccgggaaggaagatcccatcaccactatcccgactttcaccaggagctgcaagatagaggacccaaaagttgggctttagagagaagagagctcgatccctcctggtccggtcgccatagaagctcccgcctgaatggaagcccgattcattggtccgaccgagactccctctctgatgtaccctcgagtagcgaggcgagatggcggcccagccatcctccctttagatccaggtgccaagaacggccaagaagaccatcccctcgcgagtcaacacagagacatggtcgacgacggcggcatcgttcttacagtccacctctaccttctgggctatcttcatggtcaagtgaagaagacaaggagagacagccgcagtcctggcgcgcccaccggcgtggatcacatagccctcattggcctgaggagaagcccccgagctaccggtcgttagatattacccccggaaaaaattctaggaaaaaaggctccgtcgaacggcggtccgagaaagattcatctcatagcggcagatccgtggttatttag

SEQ ID NO: 252130 - DNA, 2659 bp, Artificial Sequence
  derived and/or modified sequence
ccgaggggttccttggagaaggtggtgcgtcctggggcggcagctgaggaagaaagacgcagtgccccgaagcccctgagctgaaaagggccagaaagggggcggcatggcatggcccaaactgcccgcaccttggctgctgctctgcacctggctcccagcagggtgcctgtccttgcttgtgacggtccagcacacagaacgctatgtcaccctgtttgcctctatcatcctcaaatgtgactacaccacctctgcccagctccaggacgtggtggtgacatggcgcttcaagtccttctgcaaggaccctatctttgactactactcagcgtcataccaggcagctttatccctgggccaggacccatccaatgactgcaacgacaaccagcgggaagttcgcatagtggcccagcggcgggggcagaatgagcccgtgctgggggtagattaccggcagcgcaagatcaccatccagaaccgagcagatctcgtgataaatgaagtgatgtggtgggaccatggagtgtattactgcaccattgaggctccaggggacacatcaggagaccccgataaggaagtaaagctcatcgtcctacactggctgacagtgatcttcatcatcctgggagccctcctcctcctgctgctgattggagtgtgctggtgccagtgctgtcctcagtattgctgctgctatatccgctgtccctgctgtcctgcccactgctgctgtcctgaggaagatttgtccctgccgtccagcctcccgcagatgccaatgacccagaccaccaatcagcctcccatcgccaatggtgtcctggagtatttggagaaagaactgcggaacctcaacctggcccagcctctgccccctgacctcaaaggcagatttggccatccctgcagcatgctgtcctccctgggctctgaggtcgtggaacgcagaatcatccacctgcccccactgatcagagacctgtcatcctcaaggaggaccagtgactccctgcaccagcagtggctcaccccaattccctccaggccctgggatctgagggaggggagaagccaccaccattaccctgatttccaccaggagctccaggaccgggggccaaagtcttgggcattggaaagaagggagttggacccatcgtggagtggaaggcaccgtagctctaggctgaatgggtcacccatacactggtcagacagggacagcctaagcgatgtcccctcatccagtgaggcacgctggcggccgagccaccctcctttcaggagccgctgtcaggagaggccccgcaggcccagcccccgggagagcactcagaggcacgggagacgacgcaggcaccgcagctactctcctcccttgccctccggcctcagttcctggagctctgaagaggacaaggagaggcagccccagagctggcgggcccaccgccgcggctcgcactccccacactggcccgaggagaagccgcctagctaccgctcacttgatatcactccaggcaagaatagcaggaaaaaagggagtgtggagaggcgctcggagaaagacagctctcatagtggaaggagtgtggtcatttagtcaccaagcacagcacaacttctgtggctacttctcggctcctgtgtgtcatcagcatcacctaggtttccagctgacttgggaactgcaagtctgagtctaacagtttttggcttagattctgagaatcaaatagaagaattttaaatacaagagtttgagattgggtatagtggctcacacctgtaatcacagcactttgggaggctaagaatcacttgagactaggagttcaagatcagcctgggaaacatagtgagaccccgtctctacaaaaaatataaaaattagttaggtgtggtggcatgcacttgtagtcccagctactcaagaggctgaggcagaaggatcccttgagcccaggagtgcaaggctgcaatgagccaggatcccatgatcacacatctgtattccagcctgggcaatagagcaagtccccattactaaaaaacccaaaaggccaaaaaacaaaaaagttagagttcgaggaattaccaactgtagttttagccttggttcatgctctcttgcatatttatataatctctgacttgtaatggaccctgactggaatgtgatccctcaggaacttagtagcctgagtctttcagtagactacactgcccagaaccctggccattctcaaaatgagaacttgggaatgtttaagaagaaatcaaacatgtttcaggaaaaggaaatctatggagtattatagggacattcccatgggaatgtatcttcctccatggcatgtcttgagggtcctttcttgttaggagtttatcctgccagcccataaatggactatttattgtaagtgtagaaaatcacagagaagcagttttgcaccagccttattcctgtgccttgttttcctcttgctctttttttacctgtatatctaatttatattttcatatatattgtgtattgattgaagtcactttaaatccttcttgggaatgacacagtatataaataaggaagaaagaaaacatgccaagctgagcatgctgctccaaataaatatctgctttccta

SEQ ID NO: 252131 - DNA, 1509 bp, Artificial Sequence
  derived and/or modified sequence
atggcctggcccaagctgcctgccccctggctgctgctgtgcacctggctgcctgctggctgcctgagcctgctggtgacagtgcagcacacagagcgctacgtgaccctgtttgccagcatcatcctgaagtgtgactacaccaccagcgcccagctgcaggatgtggtggtgacctggaggttcaagagcttctgcaaggaccccatctttgactactacagcgccagctaccaggccgccctgagcctgggccaggaccccagcaatgactgcaatgacaaccagcgggaggtgagaattgtggcccagaggcggggccagaatgaacctgtgctgggcgtggactaccggcagaggaagatcaccatccagaacagagctgacctggtgatcaatgaggtgatgtggtgggaccacggcgtgtactactgcaccatcgaggcccctggggacaccagcggggaccctgacaaggaggtgaagctgattgtgctgcactggctgaccgtcatcttcatcatcctgggcgccctgctgctgctgctgctgattggagtgtgctggtgccagtgctgcccccagtactgctgctgctacatccgctgcccctgctgcccagcccactgctgctgcccagaggaggacctgagcctgcccagcagcctgccccagatgcccatgacccagaccaccaaccagccccccatcgccaatggagtgctggagtacctggagaaggagctgaggaacctgaacctggcccagcccctgcccccagacctgaagggccgcttcggccacccctgcagcatgctgagcagcctgggcagcgaggtggtggagcggcgcatcatccacctgcccccactcatccgggacctgagcagcagcaggaggaccagtgacagcctgcaccagcagtggctgacccccatccccagccggccctgggacctgcgggagggccgcagccaccaccactacccagacttccaccaggagctgcaggaccggggccccaagtcctgggccctggagcggcgggagctggaccccagctggagcggccgccacaggagcagccggctgaatggcagccccatccactggagcgaccgggacagcctgagtgatgtgcccagcagcagcgaggcccgctggaggcccagccacccccccttccgcagccgctgccaggagcggccccggcggcccagcccccgggagagcacccagagacatggaagaagaagaagacacaggagctacagcccccccctgcccagcggcctgagctcctggagcagcgaggaggacaaggagcggcagccccagagctggagggcccaccggcggggcagccacagcccccactggccagaggagaagcccccatcctaccgcagcctggacatcaccccaggcaagaacagcaggaagaagggctctgtggagaggagaagtgagaaggacagcagccacagcggccgctctgtggtgatctag

SEQ ID NO: 252132 - DNA, 1509 bp, Artificial Sequence
  derived and/or modified sequence
atggcctggcccaagctgcccgccccctggctgctgctgtgcacctggttaccagccggttgtctgtcactgcttgtcaccgtgcagcacacagagaggtatgtgacattgttcgcctcaatcatcctcaagtgtgattacactacatcagcccagctgcaggatgtggtagtgacttggcggtttaaaagcttttgcaaggatcctatcttcgattattactcggctagttatcaggctgcccttagtttgggtcaggatcccagcaatgactgcaatgacaatcagagggaagtcagaatcgtggcacagcgccgaggtcaaaatgagcccgtgctcggcgtcgactaccggcaacgcaagattactatccaaaatagggctgatctcgtcattaacgaggtgatgtggtgggatcatggcgtgtattactgtacaatcgaagctcctggagacacctcaggcgaccccgacaaagaggtgaaactgatcgttctgcactggcttactgtcatctttattatcctgggagccctgctgctgcttcttctcattggcgtgtgctggtgccagtgttgcccgcagtactgctgctgctacatccgttgcccgtgctgccccgctcactgttgctgtcccgaggaggacctatcactacccagctcactccctcaaatgccaatgacccagaccacgaatcagcccccgattgccaatggcgttttggagtacttggaaaaagagctaaggaacctgaatttggcgcagcctcttccacccgacctcaaaggccgctttggccacccttgttcaatgctgagcagtttggggagcgaagtggtggagaggaggattattcacctgcccccattaatccgcgatttaagctccagtaggaggacaagcgattcgcttcaccagcaatggcttacgcctatccccagtcgaccgtgggatttgagggaaggacggtcccatcatcactaccctgactttcatcaggagctgcaggatagagggccgaagtcttgggccttggaaagacgcgagctggacccttcatggtcgggaagacaccgctcttctcgactaaacggatcccccattcactggtcagacagagacagcctctcagatgtgccctcttcttcagaggctcggtggagaccgtcacaccccccgtttcgctccaggtgtcaagaacgaccacgccgccccagtcccagggagagtacccagcgacacggacgtcgcagacgccatcggtcttatagcccccctttaccaagtggtcttagctcctggagctcagaagaggataaagagaggcaaccacagtcgtggcgggctcaccgcagaggaagccacagcccacactggcctgaggagaaacccccgtcctatcgatccttggatatcactcctgggaagaacagccggaaaaagggatcggtggaacggagatccgagaaggacagctctcacagcggcagatcagtcgtgatctag

SEQ ID NO: 252133 - DNA, 1509 bp, Artificial Sequence
  derived and/or modified sequence
atggcttggccaaagctgcctgccccttggctgctgctttgcacgtggctgcccgctggctgcctgtcacttttggtgactgtccagcatactgaaaggtacgtgactttattcgcctctatcatcttgaagtgtgattatacaacctctgcccaattacaggacgtggtggtgacatggaggttcaagagtttttgcaaggacccgattttcgactactactccgcctcgtatcaagccgctttatctctgggacaagatccttccaacgattgcaatgataaccagagggaagtacggatagttgcccagcggcgaggacagaatgagcctgtgctgggtgtcgactaccgacagcgaaaaatcactatccagaatagggctgatctggtgattaacgaggtgatgtggtgggaccatggggtgtactactgcactatcgaggccccaggagacactagtggggatccagataaggaggttaaactcatcgtgctacattggttgacagtaatattcattatcttgggagccctgcttctcttgcttctcattggcgtgtgttggtgtcagtgctgcccacagtattgctgctgctacattaggtgtccgtgctgccctgcacactgttgctgtcctgaggaggatcttagcctcccttccagccttccccagatgccaatgacgcaaacaacaaaccagccccctatagcgaacggcgttctcgaatacctcgagaaggaattgagaaatctcaacctggcccagcccctgcctcccgatcttaaagggagattcggccatccctgttcaatgctcagctcacttggcagcgaagtagtggagcgcagaattatccacctgccgcctcttatccgggacctgtccagttctcggcgtacaagcgactccctccaccagcagtggctgaccccaattccttccagaccctgggatctgagagaggggagatctcaccaccactaccctgactttcaccaggaattgcaggatcggggaccaaagagttgggccttagagagacgggagctggacccttcctggtccggcagacaccgatccagtcgcctaaacgggtcgcctatccattggagcgatcgagatagtttgagcgacgtgccttcatcctccgaagctcgatggagacccagtcaccccccatttcggagtaggtgccaggaaaggcctcggaggccatcaccacgggagagtacccagaggcacggacggcgacggcgtcacaggtcatatagtcccccacttccctcggggcttagttcctggtcctccgaggaagataaagagaggcagccacagtcatggcgggcacacaggcgcggtagccacagtccccactggcctgaggagaagccaccaagctaccgatccctagatattaccccaggcaaaaatagcagaaagaagggctcagtggaaaggcggagtgaaaaggacagttctcattcgggaaggtccgtcgtgatatag

SEQ ID NO: 252134 - DNA, 1509 bp, Artificial Sequence
  derived and/or modified sequence
atggcctggcccaagctgcccgccccctggctgctgctgtgcacctggctgcccgccggctgcctgagcctgctggtgaccgtgcagcacaccgagagatacgtgaccctgttcgccagcatcatcctgaagtgcgactacaccaccagcgcccagctgcaggacgtggtggtgacctggagattcaagagcttctgcaaggaccccatcttcgactactacagcgccagctaccaggccgccctgagcctgggccaggaccccagcaacgactgcaacgacaaccagagagaggtgagaatcgtggcccagagaagaggccagaacgagcccgtgctgggcgtggactacagacagagaaagatcaccatccagaacagagccgacctggtgatcaacgaggtgatgtggtgggaccacggcgtgtactactgcaccatcgaggcccccggcgacaccagcggcgaccccgacaaggaggtgaagctgatcgtgctgcactggctgaccgtgatcttcatcatcctgggcgccctgctgctgctgctgctgatcggcgtgtgctggtgccagtgctgcccccagtactgctgctgctacatcagatgcccctgctgccccgcccactgctgctgccccgaggaggacctgagcctgcccagcagcctgccccagatgcccatgacccagaccaccaaccagccccccatcgccaacggcgtgctggagtacctggagaaggagctgagaaacctgaacctggcccagcccctgccccccgacctgaagggcagattcggccacccctgcagcatgctgagcagcctgggcagcgaggtggtggagagaagaatcatccacctgccccccctgatcagagacctgagcagcagcagaagaaccagcgacagcctgcaccagcagtggctgacccccatccccagcagaccctgggacctgagagagggcagaagccaccaccactaccccgacttccaccaggagctgcaggacagaggccccaagagctgggccctggagagaagagagctggaccccagctggagcggcagacacagaagcagcagactgaacggcagccccatccactggagcgacagagacagcctgagcgacgtgcccagcagcagcgaggccagatggagacccagccacccccccttcagaagcagatgccaggagagacccagaagacccagccccagagagagcacccagagacacggcagaagaagaagacacagaagctacagcccccccctgcccagcggcctgagcagctggagcagcgaggaggacaaggagagacagccccagagctggagagcccacagaagaggcagccacagcccccactggcccgaggagaagccccccagctacagaagcctggacatcacccccggcaagaacagcagaaagaagggcagcgtggagagaagaagcgagaaggacagcagccacagcggcagaagcgtggtgatctag

SEQ ID NO: 252135 - protein, 252 aa, Artificial Sequence
  derived and/or modified sequence
MVKPVPLFRRTDFKLLLCNHKDLFFLRVSKLLDCFSPKSMWFLWNIFSKGTHMLQCLCGKSLKKNKNPTDPQLKGIVTRLYCRQGYYLQMHPDGALDGTKDDSTNSTLFNLIPVGLRVVAIQGVKTGLYIAMNGEGYLYPSELFTPECKFKESVFENYYVIYSSMLYRQQESGRAWFLGLNKEGQAMKGNRVKKTKPAAHFLPKPLEVAMYREPSLHDVGETVPKPGVTPSKSTSASAIMNGGKPVNKSKTT

SEQ ID NO: 252136 - DNA, 759 bp, Artificial Sequence
  derived and/or modified sequence
atggtgaagcccgtgcccctgttcagaagaaccgacttcaagctgctgctgtgcaaccacaaggacctgttcttcctgagagtgagcaagctgctggactgcttcagccccaagagcatgtggttcctgtggaacatcttcagcaagggcacccacatgctgcagtgcctgtgcggcaagagcctgaagaagaacaagaaccccaccgacccccagctgaagggcatcgtgaccagactgtactgcagacagggctactacctgcagatgcaccccgacggcgccctggacggcaccaaggacgacagcaccaacagcaccctgttcaacctgatccccgtgggcctgagagtggtggccatccagggcgtgaagaccggcctgtacatcgccatgaacggcgagggctacctgtaccccagcgagctgttcacccccgagtgcaagttcaaggagagcgtgttcgagaactactacgtgatctacagcagcatgctgtacagacagcaggagagcggcagagcctggttcctgggcctgaacaaggagggccaggccatgaagggcaacagagtgaagaagaccaagcccgccgcccacttcctgcccaagcccctggaggtggccatgtacagagagcccagcctgcacgacgtgggcgagaccgtgcccaagcccggcgtgacccccagcaagagcaccagcgccagcgccatcatgaacggcggcaagcccgtgaacaagagcaagaccacctag

SEQ ID NO: 252137 - DNA, 759 bp, Artificial Sequence
  derived and/or modified sequence
atggtaaagcctgtgcctctgttccggcgtacggattttaagctccttctttgcaatcacaaggacctgttttttcttagagtcagtaaactcctcgactgcttttctcccaagagcatgtggtttctgtggaatatattctcgaagggaacacacatgctgcagtgtctttgcggaaagtcactgaaaaaaaacaagaatcctaccgacccacagcttaaaggcattgttacccgactctattgcagacagggttactacctgcagatgcatcccgacggagcattggacggcaccaaggatgactctacgaatagtactctgtttaacctgattcccgtagggctgcgagtcgtcgctatacagggcgtgaagacaggattatacattgccatgaatggcgagggctacttataccctagcgagctgttcactccagagtgcaaattcaaggagtcagtgttcgaaaactattacgtgatttactccagtatgctctacaggcaacaggaaagcggaagggcctggtttttgggcctgaacaaggagggccaggcaatgaaggggaatagagttaaaaaaaccaagcccgccgcacactttttgcctaagccccttgaagtggcaatgtaccgcgaaccgtctctccacgatgtgggcgaaactgtccccaaacctggagtcacccctagcaaaagcacatccgcttcagccatcatgaatggaggtaaaccagtgaataaatccaagaccacatag

SEQ ID NO: 252138 - DNA, 759 bp, Artificial Sequence
  derived and/or modified sequence
atggtgaagcctgtgcccctcttcagaagaacagacttcaagctgctgctgtgcaaccacaaggacctcttcttcctgcgggtgtccaagctgctggactgcttcagccccaagtccatgtggttcctgtggaacatcttcagcaagggcacccacatgctgcagtgcctgtgtgggaagagcctgaagaagaacaagaaccccacagacccccagctgaagggcatcgtgacccggctgtactgccggcagggctactacctgcagatgcacccagatggagccctggatggcaccaaggatgacagcaccaacagcaccctcttcaacctgatccctgtgggcctgcgggtggtggccatccagggcgtgaagacaggcctgtacatcgccatgaatggagagggctacctgtaccccagcgagctgttcaccccagagtgcaagttcaaggagagcgtgtttgagaactactacgtgatctacagctccatgctgtaccggcagcaggagagcggccgggcctggttcctgggcctgaacaaggagggccaggccatgaagggcaacagagtgaagaagaccaagccagctgcccacttcctgcccaagcccctggaggtggccatgtaccgggagcccagcctgcatgatgtgggggagaccgtgcccaagccaggagtgacccccagcaagagcaccagcgccagcgccatcatgaatggaggcaagcctgtgaacaagagcaagaccacctag

SEQ ID NO: 252139 - DNA, 759 bp, Artificial Sequence
  derived and/or modified sequence
atggtgaagcccgtgcccctgttccggcggaccgacttcaagctgctgttgtgtaatcacaaggacctcttctttcttcgtgtaagcaagctgcttgattgctttagtccaaaaagcatgtggttcctgtggaacattttttctaaaggcacccatatgctgcaatgcctttgtgggaaatcactgaagaagaacaagaatcctaccgacccccagctaaaaggcattgtgacacgcctctattgcaggcagggctactacctgcagatgcatcctgacggtgccctcgatgggaccaaggacgattccacaaattccaccttgttcaacctgatcccggtaggtcttcgcgttgtcgctatacagggtgttaaaacgggactctatatcgcaatgaatggagaaggatatctgtaccccagtgagcttttcacacccgagtgcaagttcaaggagtctgtttttgagaactactatgtcatttacagtagtatgctgtacagacagcaagaatcaggtcgggcttggtttttgggcctgaacaaagaagggcaggccatgaaagggaacagagtgaagaagacaaaacctgcagcccactttctgcccaagcccctcgaagtcgcaatgtatagagagcctagtctccatgatgtgggagaaacagttcccaaacccggtgtgaccccaagtaagagcacctctgcgtcagccattatgaatggcgggaagcccgtgaacaaatctaaaacaacatag

SEQ ID NO: 252140 - DNA, 759 bp, Artificial Sequence
  derived and/or modified sequence
atggtcaaacctgtgcccctgtttcggagaactgattttaagcttctgctttgtaaccacaaggacctgttcttcctcagagtgtccaaattactggactgctttagccctaaatccatgtggtttctgtggaacattttctccaagggcacacatatgctgcagtgcctgtgtggcaaaagcctgaaaaagaacaaaaatcccacggacccccagctcaaaggaatcgtaacccgcctctattgtaggcagggctactacctacagatgcacccagatggggctctggacggaaccaaagatgactcaacaaattcgacactttttaatcttattccggttgggctgagggttgtggccatacagggagtgaaaactggactgtacatcgcaatgaacggagagggttacctttaccccagcgaactgttcaccccagagtgcaagttcaaggagtccgtgtttgagaattattacgtgatatattcatctatgctttatcgccagcaagaaagtggccgtgcatggtttttaggcctgaacaaagaagggcaggctatgaaaggcaacagagtaaaaaaaactaaacctgcggctcactttcttcccaagcccttagaggtcgctatgtacagagagccaagtctgcacgacgttggggaaactgtccccaaaccaggagtgacccccagtaaatctaccagcgcatcagccataatgaatggaggaaaacccgtgaacaagagtaagacaacctag

SEQ ID NO: 252141 - DNA, 1001 bp, Artificial Sequence
  derived and/or modified sequence
ctggccgaaaacaaacaatcactgagaagtctcaaagaaatataccacgtgaggggaaaaaactgggagaagatccggaatattatcgtttttcctatggtaaaaccggtgcccctcttcaggagaactgatttcaaattattattatgcaaccacaaggatctcttctttctcagggtgtctaagctgctggattgcttttcgcccaaatcaatgtggtttctttggaacattttcagcaaaggaacgcatatgctgcagtgtctttgtggcaagagtcttaagaaaaacaagaacccaactgatccccagctcaagggtatagtgaccaggttatattgcaggcaaggctactacttgcaaatgcaccccgatggagctctcgatggaaccaaggatgacagcactaattctacactcttcaacctcataccagtgggactacgtgttgttgccatccagggagtgaaaacagggttgtatatagccatgaatggagaaggttacctctacccatcagaactttttacccctgaatgcaagtttaaagaatctgtttttgaaaattattatgtaatctactcatccatgttgtacagacaacaggaatctggtagagcctggtttttgggattaaataaggaagggcaagctatgaaagggaacagagtaaagaaaaccaaaccagcagctcattttctacccaagccattggaagttgccatgtaccgagaaccatctttgcatgatgttggggaaacggtcccgaagcctggggtgacgccaagtaaaagcacaagtgcgtctgcaataatgaatggaggcaaaccagtcaacaagagtaagacaacatagccagatcctcacaggtgttgtgacttattcgtcctgagcacagttgagtgatttatcctcaccagacattcctgctccgtggctgaagagcagcaggaagtaagctaatgcttattctttgctgtctccgaacttctctgttgcaa

SEQ ID NO: 252142 - DNA, 2831 bp, Artificial Sequence
  derived and/or modified sequence
ctggccgaaaacaaacaatcactgagaagtctcaaagaaatataccacgtgaggggaaaaaactgggagaagatccggaatattatcgtttttcctatggtaaaaccggtgcccctcttcaggagaactgatttcaaattattattatgcaaccacaaggatctcttctttctcagggtgtctaagctgctggattgcttttcgcccaaatcaatgtggtttctttggaacattttcagcaaaggaacgcatatgctgcagtgtctttgtggcaagagtcttaagaaaaacaagaacccaactgatccccagctcaagggtatagtgaccaggttatattgcaggcaaggctactacttgcaaatgcaccccgatggagctctcgatggaaccaaggatgacagcactaattctacactcttcaacctcataccagtgggactacgtgttgttgccatccagggagtgaaaacagggttgtatatagccatgaatggagaaggttacctctacccatcagaactttttacccctgaatgcaagtttaaagaatctgtttttgaaaattattatgtaatctactcatccatgttgtacagacaacaggaatctggtagagcctggtttttgggattaaataaggaagggcaagctatgaaagggaacagagtaaagaaaaccaaaccagcagctcattttctacccaagccattggaagttgccatgtaccgagaaccatctttgcatgatgttggggaaacggtcccgaagcctggggtgacgccaagtaaaagcacaagtgcgtctgcaataatgaatggaggcaaaccagtcaacaagagtaagacaacatagccagatcctcacaggtgttgtgacttattcgtcctgagcacagttgagtgatttatcctcaccagacattcctgctccgtggctgaagagcagcaggaagtaagctaatgcttattctttgctgtctccgaacttctctgttgcaagtggataaatctcaacctgttgcaccccccacaacaagaagacacctggataaccagctaaactcagaccatggaatgccctaccagatatggaatgcctttttaatatcttttctgtgactgtgacacttcatgtgaatgacatacttcacaagtacactcgataccttgcctgctgacagctacccataatcctttttgagtcctgtttcagcgaaatctatgtgtttaagttcaattttgtagcacacaaataatattgagtaatttctagttagacgctgtaaacctgtgctattacggatttctcttcttcccatttttacagggctgctcgctccactgtctgtgaccttttgcagggattttgttcctctaaatcttaaatgttgcagttggcttaggtcggagagcaatcagggaatcaggaagccttctaaacctattattacaaattgcatctataaagaaagattaagaaagattgttgtctctggctcacactatcgattaaacacacatatacgctctgtccagtagcagatactgtgctcccaaggtcggcattgcctgggtgggaaatggctcaaacacaatccagggaagctctctatgatatgtgtttgacatccccctctagtttctttgtgtgtgtgtgttttatacatatcacaagcttactggtaatggtaacatttgccttgcccagcgagcaagacccactggtttttgagaaagtgggtccaaagatttctgtaggccttgtaggcctgattaaggttcatttttcatctattaattctcattatttggaaaaaaaaaaaaaggaaaatcagtaattataacctacaagaattgcgctacctaaatccatttcagatatactccgtcctgtttttaatgaaccaaacttaacgccatccccgtttctggctgcgttcccctcatactcagcagagcatgggcaagacggctgttgtgttctttcctgcagcagcaatgcaaacgttagttataaattaattagactttaatatttttggtgtttaatgacaagtttttaaactggacatattaggaaaaatattttttttagctcagcatgctgagtccggtactgtgtatttcaccagtacatgcctctagctcagcatctggggctcatgttgcccagtggctgggttagaggtgccttgccatgatctcagaatacagtctgttgaattatcctagatgaaaataaaggcaaaccaacacattcatccatgaggattttggtccattccatttattttcttttattttgcattcttaatttcctttttagtttaacactgtttgtttgagcttagggaagacaactaccaagaaaggccaggaacagttgactacacaatgaagattccatgcaaaatgttcaatattggatctaaaggggttcaaaatgtttcatactaaactgtttgggaatttatttgttaactctgtgtacacctaataaaattcaatgttttcttctcagaagagttcattgagaccaaactgaacctcatttattgaaaattatatgtgggatcaatgtactggcctcttgttattctttctatgtgggaggatgacccagtcatcattttccccatctgcactgtatttattgggaaattattttgtcactgctttcataaatcttcttcatgacagcccttgcccagcattaaaaaattctggcctgcttagctgattaaaggtttagtagaaatttaactgtttgtttatgcttatttcattttcatattggattctacttgaataaataaaaagttagcagaa

SEQ ID NO: 252143 - protein, 378 aa, Artificial Sequence
  derived and/or modified sequence
MKDVPGFLQQSQNSGPGQPAVWHRLEELYTKNFMKTLSVNLNTGKSLSSVFHFENECIDARRCSKAGGFYFRVNPLSLVEIILHVVRQMTDPNVALTFLEKTREKVKSSDEAVILCKTAIGALKLNIGDLQVTKETIEDVEEMLNNLPGVTSVHSRFYDLSSKYYQTIGNHASYYKDALRFLGCVDIKDLPVSEQQERAFTLGLAGLLGEGVFNFGELLMHPVLESLRNTDRQWLIDTLYAFNSGNVERFQTLKTAWGQQPDLAANEAQLLRKIQLLCLMEMTFTRPANHRQLTFEEIAKSAKITVNEVELLVMKALSVGLVKGSIDEVDKRVHMTWVQPRVLDLQQIKGMKDRLEFWCTDVKSMEMLVEHQAHDILT

SEQ ID NO: 252144 - protein, 311 aa, Artificial Sequence
  derived and/or modified sequence
MVSLRVNPLSLVEIILHVVRQMTDPNVALTFLEKTREKVKSSDEAVILCKTAIGALKLNIGDLQVTKETIEDVEEMLNNLPGVTSVHSRFYDLSSKYYQTIGNHASYYKDALRFLGCVDIKDLPVSEQQERAFTLGLAGLLGEGVFNFGELLMHPVLESLRNTDRQWLIDTLYAFNSGNVERFQTLKTAWGQQPDLAANEAQLLRKIQLLCLMEMTFTRPANHRQLTFEEIAKSAKITVNEVELLVMKALSVGLVKGSIDEVDKRVHMTWVQPRVLDLQQIKGMKDRLEFWCTDVKSMEMLVEHQAHDILT

SEQ ID NO: 252145 - DNA, 1137 bp, Artificial Sequence
  derived and/or modified sequence
atgaaggacgtgcccggcttcctgcagcagagccagaacagcggccccggccagcccgccgtgtggcacagactggaggagctgtacaccaagaacttcatgaagaccctgagcgtgaacctgaacaccggcaagagcctgagcagcgtgttccacttcgagaacgagtgcatcgacgccagaagatgcagcaaggccggcggcttctacttcagagtgaaccccctgagcctggtggagatcatcctgcacgtggtgagacagatgaccgaccccaacgtggccctgaccttcctggagaagaccagagagaaggtgaagagcagcgacgaggccgtgatcctgtgcaagaccgccatcggcgccctgaagctgaacatcggcgacctgcaggtgaccaaggagaccatcgaggacgtggaggagatgctgaacaacctgcccggcgtgaccagcgtgcacagcagattctacgacctgagcagcaagtactaccagaccatcggcaaccacgccagctactacaaggacgccctgagattcctgggctgcgtggacatcaaggacctgcccgtgagcgagcagcaggagagagccttcaccctgggcctggccggcctgctgggcgagggcgtgttcaacttcggcgagctgctgatgcaccccgtgctggagagcctgagaaacaccgacagacagtggctgatcgacaccctgtacgccttcaacagcggcaacgtggagagattccagaccctgaagaccgcctggggccagcagcccgacctggccgccaacgaggcccagctgctgagaaagatccagctgctgtgcctgatggagatgaccttcaccagacccgccaaccacagacagctgaccttcgaggagatcgccaagagcgccaagatcaccgtgaacgaggtggagctgctggtgatgaaggccctgagcgtgggcctggtgaagggcagcatcgacgaggtggacaagagagtgcacatgacctgggtgcagcccagagtgctggacctgcagcagatcaagggcatgaaggacagactggagttctggtgcaccgacgtgaagagcatggagatgctggtggagcaccaggcccacgacatcctgacctag

SEQ ID NO: 252146 - DNA, 1137 bp, Artificial Sequence
  derived and/or modified sequence
atgaaggacgtccccggattccttcaacaaagccagaactctggcccgggccagccagccgtctggcataggcttgaagagttgtatacaaaaaacttcatgaagactctcagcgtaaaccttaacactggtaaatccctctccagcgtgtttcattttgaaaatgagtgtattgacgctcggaggtgtagtaaggccggcggattctattttagggtgaaccctttgtcgctcgtcgagattatcctgcatgtcgtcagacagatgactgaccctaacgtagccttgacatttctcgaaaaaaccagagagaaagtgaaaagctctgacgaggctgtgatcctgtgcaagacagccatcggcgctttgaagttaaacatcggcgatctgcaggtcacaaaagaaacaatagaggatgtggaagaaatgcttaataatctgcccggggttacaagcgttcattcccgattctacgatctctcctccaagtactaccagaccatcgggaaccatgcgtcatattacaaggacgctctgaggttcctgggttgtgtcgacatcaaggacctgcccgtgagcgagcaacaggagagggcgttcacattaggactggccggcctgttgggagagggcgtttttaactttggagaactgcttatgcaccctgtcttggagtctctgaggaataccgacaggcaatggctgattgacacattgtatgcattcaactcaggcaacgtcgagcgttttcagaccttaaagacagcatgggggcagcagcccgatctggctgctaatgaggctcagctccttcggaagattcagcttctctgtctgatggagatgacttttactaggccagccaaccatagacaactcaccttcgaggagatcgccaagtccgccaagatcacggtgaatgaagtcgaactactggtgatgaaggctctttcagtcggcttagtgaaaggctccattgacgaggtcgataagcgcgtccatatgacgtgggtgcaacctcgggtcctggaccttcaacagattaagggaatgaaagatagattagaattctggtgcacggacgtaaagagtatggaaatgctcgtggaacaccaggcccatgatatacttacctag

SEQ ID NO: 252147 - DNA, 1137 bp, Artificial Sequence
  derived and/or modified sequence
atgaaggatgtgcccggcttcctgcagcagagccagaacagcggccctggccagcctgctgtgtggcaccggctggaggagctgtacaccaagaacttcatgaagaccctgtctgtgaacctgaacacaggcaagagcctgagctctgtgttccactttgaaaatgaatgtattgatgcccggcgctgcagcaaggccggcggcttctacttccgggtgaaccccctgagcctggtggagatcatcctgcacgtggtgcggcagatgacagaccccaacgtggccctgaccttcctggagaagacccgggagaaggtgaagagcagtgatgaggccgtcatcctgtgcaagacagccatcggggccctgaagctgaacattggagacctgcaggtgaccaaggagaccattgaagatgtggaggagatgctgaacaacctgcccggggtgacctctgtgcacagccgcttctatgacctgagcagcaagtactaccagaccatcggcaaccacgccagctactacaaggatgccctgcgcttcctgggctgtgtggacatcaaggacctgcctgtgtctgagcagcaggagcgggccttcaccctgggcctggccggcctgctgggggagggcgtcttcaactttggagagctgctgatgcaccctgtgctggagagcctgaggaacacagaccggcagtggctgattgacaccctgtatgccttcaacagcggaaatgtggagcgcttccagaccctgaagacagcctggggccagcagcctgacctggccgccaatgaggcccagctgctgaggaagatccagctgctgtgcctgatggagatgaccttcaccaggcctgccaaccaccggcagctgacctttgaggagatcgccaagagcgccaagatcaccgtgaatgaggtggagctgctggtgatgaaggccctgtctgtgggcctggtgaagggcagcattgatgaggtggacaagagggtgcacatgacctgggtgcagccccgggtgctggacctgcagcagatcaagggcatgaaggaccggctggagttctggtgcacagatgtgaagtccatggagatgctggtggagcaccaggcccatgacatcctgacctag

SEQ ID NO: 252148 - DNA, 1137 bp, Artificial Sequence
  derived and/or modified sequence
atgaaggacgtgcccggcttcctgcagcagagccagaacagcggcccgggccagccggcagtatggcatcgcctggaggagctttataccaaaaactttatgaagacgctgtctgtcaacctgaatactggtaagtctctgagctctgtcttccactttgagaacgaatgcatcgatgcaaggaggtgctctaaggctggtggattctacttcagggttaaccccctttccttggtggaaatcattttacacgtggtcaggcagatgactgaccccaatgtcgcactgacttttttagaaaaaacccgcgaaaaagtgaagagctccgacgaagcagtaatcctctgcaagacggccataggagccttgaagctcaatatcggggatttacaagtaacaaaggaaacgattgaggacgttgaagaaatgctgaataacctacccggagttacttccgttcacagcaggttctatgacttatcaagtaaatattaccagaccattgggaatcacgcaagctattacaaagacgccctgcgatttctaggttgcgtagatattaaagaccttcctgtaagtgaacagcaagagcgggctttcaccctgggtcttgctggcctcctgggggaaggggtgtttaattttggagagcttttgatgcacccggtgcttgaatccttgcgaaacacagatagacagtggctgattgatacactgtacgcttttaattctggaaacgtggagaggttccaaactcttaagaccgcatggggacagcagcccgatcttgccgccaacgaggcccagcttctgcggaaaatccaactactgtgcctgatggaaatgactttcacaaggcctgccaaccacagacagcttaccttcgaggagatcgctaagtccgccaagattactgtcaacgaagtggaactactggtgatgaaggccctgtcggttgggcttgtaaaggggtcaattgatgaggtagacaagcgggttcacatgacttgggtccagcctcgtgtgctcgacttacagcagatcaagggcatgaaagaccgcctcgaattctggtgcaccgacgttaaatccatggagatgctcgttgagcaccaagcacacgatatattgacttag

SEQ ID NO: 252149 - DNA, 1137 bp, Artificial Sequence
  derived and/or modified sequence
atgaaggacgtgcccggttttctgcaacagagccagaatagtggccctggtcaaccagctgtctggcacagactggaggaactgtataccaaaaatttcatgaaaacgctcagcgtgaatctaaatactggaaaatctctcagctccgtcttccactttgagaacgagtgcatcgacgccagacgatgcagtaaggcaggcggattctacttcagagtcaatccactgtctttggtcgaaatcatcctgcacgtggtgcggcagatgaccgacccgaatgtcgccctcacgtttctggaaaagacccgggaaaaagtaaaaagctcggacgaagcggtcattctctgcaaaaccgccatcggtgccctgaaactaaacatcggagacctgcaagtaaccaaggagaccattgaggatgtggaggaaatgctgaataatcttcccggtgtgacttctgtgcactctaggttttacgacttgtcatctaaatactatcagactatcggaaatcatgcttcgtattataaagatgccctcaggttcttaggatgtgtggacataaaggatctcccagtgtctgaacaacaagagcgagccttcacattgggcctagctgggctgctgggagaaggcgtgttcaattttggagagttactgatgcaccctgttctggagagcctgcggaacactgatcgacagtggcttatcgatacactgtacgctttcaacagcggcaatgttgagaggtttcagaccctgaaaaccgcatggggccagcagcctgatctagctgctaatgaagcacaacttctgagaaaaatccagctgctgtgcttgatggagatgacctttacacggccagctaaccaccgtcagttaacatttgaggaaatcgctaagtcagctaaaatcacagttaatgaggtggagctgctcgttatgaaagccctgtctgtcggactggttaagggctccatcgacgaggttgacaaaagggtgcatatgacctgggttcaacccagggttctggatcttcagcaaataaaagggatgaaagatcgtctggaattctggtgcacagatgtgaagagtatggaaatgctagtggagcaccaggcacacgatatcctgacatag

SEQ ID NO: 252150 - DNA, 1591 bp, Artificial Sequence
  derived and/or modified sequence
agcatttccggcagccatccccgcggtgctgacatcccggttgttcttctgtgccgggggtcttcctgctgtcatgaaggacgtaccgggcttcctacagcagagccagaactccgggcccgggcagcccgctgtgtggcaccgtctggaggagctctacacgaagaactttatgaaaactttatcagtgaatttgaacacaggtaaaagcctctcatccgtttttcactttgaaaatgagtgcattgatgctcggcggtgctcaaaggctggtggcttttatttcagggtgaaccctttgtccctcgtggaaatcattcttcatgtagttagacagatgactgatcctaatgtggctcttacttttctggaaaagactcgtgagaaggtgaaaagtagtgatgaggcagtgatcctgtgtaaaacagcaattggagctctaaaattaaacatcggggacctacaggttacaaaggaaacaattgaagatgttgaagaaatgctcaacaaccttcctggtgtgacatcggttcacagtcgtttctatgatctctccagtaaatactatcaaacaatcggaaaccacgcgtcctactacaaagatgctctgcggtttttgggctgtgttgacatcaaggatctaccagtgtctgagcagcaggagagagccttcacgctggggctagcaggacttctcggcgagggagtttttaactttggagaactcctcatgcaccctgtgctggagtccctgaggaatactgaccggcagtggctgattgacaccctctatgccttcaacagtggcaacgtagagcggttccagactctgaagactgcctggggccagcagcctgatttagcagctaatgaagcccagcttctgaggaaaattcagttgttgtgcctcatggagatgactttcacacgacctgccaatcacagacaactcacttttgaagaaattgccaaaagtgctaaaatcacagtgaatgaggtggagcttctggtgatgaaggccctttcggtggggctggtgaaaggcagtatagacgaggtggacaaacgagtccacatgacctgggtgcagccccgagtgttggatttgcaacagatcaagggaatgaaggaccgcctggagttctggtgcacggatgtgaagagcatggagatgctggtggagcaccaggcccatgacatcctcacctagggccccctggttccccgtcgtgtctcctttgactcacctgagagaggcgtttgcagccaatgaagctggctgctcagacggtcgacattgaatttgggtgggggttgggatcctgtctgaagtacagactgttcttgctctaaaaacaggactgtccctgatgggagccaggccacagggaggaggcttctttgtgggtctctcctgcagagggtgggggtctcagggtcttaggtgatacgggagagaaagaacgtgccaggcaggaggccccctgaagtctgtgtactccgaggtggatctccatccccatccacctgtacggacatcttttccgttgcggtttgagaatgttcctataataaacccctctgctttgtt

SEQ ID NO: 252151 - protein, 1551 aa, Artificial Sequence
  derived and/or modified sequence
MGFCLALAWTLLVGAWTPLGAQNPISWEVQRFDGWYNNLMEHRWGSKGSRLQRLVPASYADGVYQPLGEPHLPNPRDLSNTISRGPAGLASLRNRTVLGVFFGYHVLSDLVSVETPGCPAEFLNIRIPPGDPMFDPDQRGDVVLPFQRSRWDPETGRSPSNPRDPANQVTGWLDGSAIYGSSHSWSDALRSFSRGQLASGPDPAFPRDSQNPLLMWAAPDPATGQNGPRGLYAFGAERGNREPFLQALGLLWFRYHNLWAQRLARQHPDWEDEELFQHARKRVIATYQNIAVYEWLPSFLQKTLPEYTGYRPFLDPSISSEFVAASEQFLSTMVPPGVYMRNASCHFQGVINRNSSVSRALRVCNSYWSREHPSLQSAEDVDALLLGMASQIAEREDHVLVEDVRDFWPGPLKFSRTDHLASCLQRGRDLGLPSYTKARAALGLSPITRWQDINPALSRSNDTVLEATAALYNQDLSWLELLPGGLLESHRDPGPLFSTIVLEQFVRLRDGDRYWFENTRNGLFSKKEIEEIRNTTLQDVLVAVINIDPSALQPNVFVWHKGDPCPQPRQLSTEGLPACAPSVVRDYFEGSGFGFGVTIGTLCCFPLVSLLSAWIVARLRMRNFKRLQGQDRQSIVSEKLVGGMEALEWQGHKEPCRPVLVYLQPGQIRVVDGRLTVLRTIQLQPPQKVNFVLSSNRGRRTLLLKIPKEYDLVLLFNLEEERQALVENLRGALKESGLSIQEWELREQELMRAAVTREQRRHLLETFFRHLFSQVLDINQADAGTLPLDSSQKVREALTCELSRAEFAESLGLKPQDMFVESMFSLADKDGNGYLSFREFLDILVVFMKGSPEEKSRLMFRMYDFDGNGLISKDEFIRMLRSFIEISNNCLSKAQLAEVVESMFRESGFQDKEELTWEDFHFMLRDHNSELRFTQLCVKGVEVPEVIKDLCRRASYISQDMICPSPRVSARCSRSDIETELTPQRLQCPMDTDPPQEIRRRFGKKVTSFQPLLFTEAHREKFQRSCLHQTVQQFKRFIENYRRHIGCVAVFYAIAGGLFLERAYYYAFAAHHTGITDTTRVGIILSRGTAASISFMFSYILLTMCRNLITFLRETFLNRYVPFDAAVDFHRLIASTAIVLTVLHSVGHVVNVYLFSISPLSVLSCLFPGLFHDDGSELPQKYYWWFFQTVPGLTGVVLLLILAIMYVFASHHFRRRSFRGFWLTHHLYILLYVLLIIHGSFALIQLPRFHIFFLVPAIIYGGDKLVSLSRKKVEISVVKAELLPSGVTHLRFQRPQGFEYKSGQWVRIACLALGTTEYHPFTLTSAPHEDTLSLHIRAAGPWTTRLREIYSAPTGDRCARYPKLYLDGPFGEGHQEWHKFEVSVLVGGGIGVTPFASILKDLVFKSSVSCQVFCKKIYFIWVTRTQRQFEWLADIIREVEENDHQDLVSVHIYITQLAEKFDLRTTMLYICERHFQKVLNRSLFTGLRSITHFGRPPFEPFFNSLQEVHPQVRKIGVFSCGPPGMTKNVEKACQLINRQDRTHFSHHYENF

SEQ ID NO: 252152 - protein, 43 aa, Artificial Sequence
  derived and/or modified sequence
MGFCLALAWTLLVGAWTPLGAQNPISWEVQRFDGWYNNLMEHR

SEQ ID NO: 252153 - DNA, 4656 bp, Artificial Sequence
  derived and/or modified sequence
atgggcttctgcctcgcactcgcgtggacactactggtgggggcttggacacctctgggggcccagaacccaatttcatgggaggtccagaggtttgacgggtggtataacaatttgatggagcacagatgggggtcaaaaggctcaagactgcaaagactcgtccccgcctcatacgcagacggcgtgtaccagcctcttggcgaaccacatctgcccaatcctagggatctctccaacacaatttcccgtggccccgctggcttggctagcctacgcaatcgcactgtcctgggtgttttcttcgggtaccacgtcctgtctgatctggtgtcggtggaaacaccgggctgccccgcggagtttcttaatatcagaattccccctggcgatccaatgtttgatccagaccagcgcggtgacgtggtgttgcccttccagagatccaggtgggatcctgaaaccgggagaagcccgtccaaccctcgggaccccgccaatcaagttaccggctggttagacggaagcgctatttacggcagttctcactcttggagtgacgctctgagatccttttctcggggtcagctggcatccggcccagacccagctttcccgagagattcccaaaaccccctcttaatgtgggccgctccagatcccgcaactggccagaacggtccaagagggctctacgcgttcggcgcagaacggggtaacagagagcctttcctgcaggcactgggattactctggttccgctaccacaatttgtgggctcagagactggcaagacagcacccagattgggaggacgaggaactgtttcagcatgcgcgcaagcgggtcattgccacataccagaatatcgccgtttatgaatggctgccttcctttcttcagaaaaccctgccagagtacaccggctaccgtccttttcttgatccttcaattagtagtgaatttgtcgccgcatcggagcagttcctaagcactatggtcccgccaggcgtatacatgcggaacgctagctgccacttccaaggcgtgattaatcgtaacagtagtgtgagtagagccttgcgcgtctgtaacagttactggtctagagaacatccctccctacaaagtgccgaggacgtggatgcccttcttctgggtatggccagccagattgcagagagggaggatcacgttctggtcgaggatgttcgggacttctggcccggaccgcttaaatttagcagaacagaccacctggcctcttgtcttcagagaggccgtgacctaggtctgccgtcttataccaaggcacgcgccgccctgggcttgagtcccatcacccgctggcaggacattaaccctgctctgagccggagcaacgacaccgtgttggaggcaacagccgctctttacaatcaagatctctcatggcttgagctcctgccgggcggactgttggaaagtcacagagacccagggcccctcttcagcacaatcgtgctggagcagttcgtgagattacgagacggagacaggtactggttcgaaaatactagaaacggcttattctctaaaaaagaaatcgaagagatccgaaacaccacattgcaagatgtgctggtggccgtcatcaacatcgacccatcagctcttcaacctaacgtgttcgtgtggcataaaggcgacccctgcccccagccaagacagctgagcacagagggattacccgcgtgcgctccatcggtggtgagggactacttcgaaggctcagggtttggctttggtgtgacaattggtacactctgctgctttcctttggtgagcctgctgtcagcatggatagtggcccggcttagaatgagaaacttcaagcggctccagggccaggatcggcaatcaattgtctctgagaagttagtaggtgggatggaggcactcgagtggcaggggcacaaagaaccatgtaggcccgtactggtctacctccagcctgggcagattcgcgtagttgacggaaggttgactgtcttacggactatccagctgcagcccccccagaaagttaatttcgtgctctcaagtaatcgcggcaggagaactttactgctgaagatcccaaaagaatatgatcttgtgctgctgttcaaccttgaggaggagcggcaggctctggtggagaaccttcgaggagcactgaaagagagtggactgtcaatacaggaatgggaactgcgggagcaggaattgatgcgtgcagccgtcacacgcgaacagcgaaggcacctgcttgaaaccttttttcgacatcttttttctcaagttctcgacattaatcaggctgatgctggaacacttcctctagattcatctcagaaggtgagggaggcgctgacttgcgagctgagccgagccgaatttgcagagtccctgggactgaaaccacaggatatgttcgtggagtctatgttcagccttgccgacaaggatggtaatgggtacctgagcttccgtgagtttctggatatacttgtggtgtttatgaaagggagcccagaagaaaagagtagactgatgttccggatgtacgactttgacggcaatggtctcataagtaaagatgagttcatccggatgctgcgctcattcatcgagatcagcaataattgtctgagtaaggcccagctggccgaagtcgtcgagtccatgttcagggagtcaggatttcaggacaaagaagaactgacttgggaggacttccacttcatgcttagggaccataatagcgaactcagattcacccagctttgcgtgaagggcgtagaggtgcctgaagtaatcaaggacctgtgtaggcgtgcatcttatatctcccaggatatgatttgcccgtctccccgtgtgagcgcaaggtgtagccggtccgacatcgaaaccgaactcacgccccagagactccagtgccccatggatacagacccacctcaggaaatccgtagaagatttggaaagaaggttaccagcttccagcccctgctttttacagaggctcatcgtgagaaattccagaggagttgtttacaccagactgtccagcagtttaagaggttcattgagaactataggcggcacattggctgcgtcgccgtcttctatgctattgctggtggtcttttcttggagcgcgcatattattacgccttcgccgcacatcataccggcatcaccgacacaaccagagtgggaatcatactctccagaggcactgctgcttcaattagctttatgttctcgtacatcctcttgactatgtgtagaaacctcattaccttcctaagagaaaccttcctgaacaggtatgtcccctttgatgccgccgtggacttccatcgcctcattgcgagcacagctatcgtactcactgtcctgcatagtgtgggccatgttgtcaacgtatatctttttagcattagcccgttgagcgtcctgtcatgcctattccccggtctcttccatgatgatgggagcgaacttccgcagaaatactactggtggttctttcagactgtcccagggttgacaggtgttgtgctcctacttatcctggcgataatgtacgtctttgcctcccaccatttccgcagacgctcatttcgcggattttggctcacccaccacctatacattcttttgtatgtgctgctgatcatacacggtagcttcgctttgatccaactgccacggtttcatattttttttctcgtgcccgccataatatacggcggggataagctcgtgtcattatcccgcaagaaggtcgagatcagtgttgtcaaagctgagctactccccagcggagtgacacatctaaggttccagaggccccagggtttcgagtacaagtccggccaatgggtgcgtatcgcatgcctggcgctcggcacgaccgagtaccacccgttcacgttgacttctgcccctcatgaggacaccctttcactccacatcagagcagcaggcccgtggaccacccggcttagagagatctactctgccccaactggggatagatgcgcccgataccccaaactgtacctcgacggaccttttggtgagggtcaccaggagtggcacaagtttgaagtgtctgtgctcgtgggaggtggcatcggcgttacaccatttgcctccatcttgaaggatctggttttcaagtctagcgtgtcctgccaagtgttttgcaaaaagatctattttatttgggtgacaagaacccagcggcagttcgagtggctggccgacattatccgcgaggtggaggaaaacgatcatcaagatttggtatcagttcacatctatattactcagctcgccgaaaaatttgatttaaggactaccatgctctatatctgtgaaaggcacttccagaaggtgctcaaccgttcactgtttaccggacttcgttcaattacccacttcggccgacccccatttgagccattcttcaatagcctgcaggaggtccacccacaagtcaggaagatcggggtgttcagttgtgggcctccaggcatgacaaagaatgtggagaaagcttgccagctaattaaccgtcaggatcgcacccattttagtcaccactatgaaaacttttag

SEQ ID NO: 252154 - DNA, 4656 bp, Artificial Sequence
  derived and/or modified sequence
atggggttctgcctagctctcgcctggactcttctcgtcggagcatggacacctctgggggcccaaaacccaatctcatgggaagttcagagatttgatggttggtacaataatctgatggaacaccggtgggggagtaaaggatcccgcttgcagcgtttggtgccagcttcctacgcagatggtgtgtatcagcctctgggagagccacacctgcccaatccccgcgacttgtccaacacaatctctcggggtcccgctggcctggcttctctccgcaacagaaccgtattgggggtgttctttgggtaccatgtgctgtctgatctggtttctgtggaaacacccgggtgtcccgccgagtttctgaatattcgcataccccccggcgatccgatgtttgaccccgatcagagaggcgacgtagtcctcccgttccaaaggagccgctgggatccggaaacaggaaggagccctagcaaccctcgtgaccccgctaatcaagtgactggatggctggatgggtcagctatctatggttcctcccactcctggtcagacgcgctccggtccttctcgaggggacagcttgcctcagggcctgacccagcattcccccgggactcccagaaccctcttttgatgtgggcagcccccgacccagcaaccggccagaacggcccacgcggactgtatgcattcggggcagagagagggaaccgtgagcctttcttgcaggctctcggactgctgtggtttcgctaccacaatctctgggctcagcggctggccagacagcatcccgactgggaggatgaagagctctttcagcatgcacgcaaacgggtcatcgccacttatcaaaacatcgcagtatacgaatggctgcccagtttcctgcagaaaactctgcctgaatacactggctatcggccatttttagatccaagcatatcctccgaattcgtggccgcatctgagcagttcctgagtactatggtccctcccggtgtgtacatgcgtaacgccagctgccattttcaaggggtaatcaataggaattcgagcgtctcaagggctctcagagtgtgtaattcttactggagcagagagcatccaagtctgcagagcgctgaggacgtggatgccctgctgctcgggatggctagccagatcgcagaacgtgaagaccacgtgcttgtggaggatgtgagggacttctggcccggacctctaaagttctcacgcacagaccatttggcttcttgcctccagcggggccgcgatctcggtctgccctcttacacgaaagcccgcgcagcattaggactgagtccaattaccagatggcaggatatcaatcctgcgttgagtcgcagtaacgataccgtgcttgaagcaaccgcggccctttacaaccaagatctgtcctggctggagctgttgcctggcggactcctggagtcgcatagagaccctggacctctttttagcaccattgttctcgagcagttcgttagactgcgggatggagatcggtattggttcgaaaacacacgcaatggactgttctctaagaaggagatcgaagaaatcagaaataccaccctacaggacgttctggtagccgttattaatattgatccctctgctctacagcctaatgtttttgtgtggcataagggagatccatgcccccagccacgacagttatccaccgaaggactgcccgcctgcgctcctagcgttgtacgggattattttgaaggttccgggtttggattcggggtcactatcggtacactctgttgcttccctcttgtgagtctgctttctgcttggatagtggcccgcctcagaatgcgcaatttcaaacgactccagggccaggatcgccagagcattgtgagcgaaaaactggtgggcgggatggaggcactggagtggcagggccacaaggagccatgtagaccggttctagtctacctgcagcccggtcagattcgggttgttgacggacgcctgaccgtcctgaggactattcagctccaaccaccacagaaagtgaattttgtgctgtctagtaaccggggacgacgtaccctgttactgaaaatcccaaaagagtacgacctcgtactgctgttcaatctggaggaggagagacaggccctggtggagaaccttagaggcgccctgaaagagagcggcctctctattcaggaatgggagctaagggaacaagaactcatgcgagctgccgtgacacgagagcagaggcgccacttactggaaacttttttccgccacctcttttcccaggttctcgacataaaccaggccgacgccggaactctccctttagactcttctcagaaggtcagagaagcactgacatgtgagctctctagggctgaatttgccgagtccttgggactaaagccacaagacatgttcgtcgaatcaatgttttctttagcagacaaagacggcaatggttacctttcttttcgggagttcctggacatcctggttgtattcatgaaggggtccccagaggagaagtcacgactgatgtttagaatgtatgattttgatggaaatgggttgatttccaaagacgaatttattagaatgctacgctctttcatcgaaatttcgaataattgcctgtccaaagcccagctagccgaagttgtggaatctatgttccgtgaaagcggctttcaagacaaggaggaacttacgtgggaagactttcattttatgctgcgtgatcacaatagcgaactgaggtttacacagctgtgcgttaagggggtcgaggttccagaagtcatcaaagatctgtgtagacgggcgtcttatatcagccaggacatgatttgtccaagtcctcgcgtcagcgcacgctgttccaggagcgacattgaaaccgaactcacacctcaaagactgcagtgtcctatggataccgatcctccccaggagatccggcgccggttcggaaagaaagtgacctccttccagcctctgctcttcaccgaggcccatcgagaaaaatttcagagatcttgtttgcatcagaccgtccagcagtttaagagattcatcgagaattatcgccggcacattggctgcgtggcagtcttctacgcgattgctggggggctctttctggagagggcctattattacgcctttgccgcacaccacacaggaattaccgataccactagggtaggcattatactgtcccggggaaccgctgcgagcatttctttcatgtttagttacatcctcctgacaatgtgtcgcaacctcatcactttcctgagggagaccttcctgaacagatacgtgccatttgatgccgcggtcgactttcatcgactgatcgcgtctactgcgatcgttcttaccgtgctccatagcgtggggcatgtcgtgaatgtctacttattctccatcagccccttatcagtcctctcttgtctgttccccggccttttccacgacgatggcagcgagctgccacaaaagtactactggtggttcttccaaacagtccctgggctgaccggggttgttctgttgttgattttggccattatgtacgtgttcgcttctcaccactttcgcagacgaagctttcgtggtttttggctgacacatcatctgtacattctgttgtatgtgcttctaattatccatggatcatttgccctcatccaactgcccaggttccacatattctttctggttcccgccattatttacggaggcgacaagctagttagtctgagccgcaagaaggtggagatcagcgtggtgaaggctgaactcctgccatcaggggtcacacatctgagattccaaagaccacagggctttgaatacaagtccggtcagtgggtgagaatcgcttgcctggcgcttggcaccaccgagtatcatccatttaccctgacatctgcaccccacgaagacaccctgagcttgcacattcgcgccgccgggccctggacaactcggctccgggagatctattccgctccaacgggcgacagatgtgcacgttatccaaagctgtacctggatggtcctttcggagagggacatcaggagtggcacaaattcgaagttagtgtgcttgtaggcggtggaataggagtgacgcctttcgcgtctatcctaaaagatctggttttcaagagctccgttagctgtcaggtcttctgtaaaaagatctatttcatctgggtcaccaggacccagaggcaattcgagtggctggcagatatcatacgcgaagttgaggaaaatgatcaccaggacctggttagcgtgcatatttatataactcagctggccgagaagtttgatctaaggacgacaatgctatacatatgtgagcgtcattttcagaaggtccttaacaggagtctctttactggtctcaggtccatcacgcatttcggacgtcctccttttgaacctttctttaacagcttacaggaggtacacccacaagtccggaagatcggggtgttttcttgtgggccacccggcatgaccaaaaatgtggagaaagcctgtcagctgattaaccgccaagatcgcactcatttctcccatcactacgagaacttctag

SEQ ID NO: 252155 - DNA, 4656 bp, Artificial Sequence
  derived and/or modified sequence
atgggattctgtctggctctggcttggacgttactcgtgggggcatggacacccttaggagcccagaatccaataagctgggaggttcagaggttcgacggctggtataataacctgatggagcaccggtgggggtctaagggcagccggcttcaacgtttggtccctgcctcttatgcagatggcgtgtaccagccgctgggggagccccatctgccaaatcctcgggacctgagcaacacaatcagtagggggcccgccggattagcatccttgaggaacaggacagtgttgggtgtgtttttcggataccatgtactcagcgatctcgtatccgttgagacaccaggctgccccgcagagtttctgaatatcaggattccccctggagatcccatgtttgacccggatcagcgtggggacgtggttctgccatttcagcgatccaggtgggaccccgaaaccggacgcagtccaagcaatccgagggacccggccaatcaggttacaggatggttggacgggtcagccatctacgggtcctcccactcctggtcggacgccctgagaagctttagtcgaggacagttggcttcgggcccagatcccgctttccccagggattcacagaacccgctgctcatgtgggctgcgcctgacccagccaccggtcaaaacggccctcgcggactctacgccttcggggcagaacgaggtaacagagaaccttttctgcaggcgctcggactgctgtggtttcgctatcacaatctctgggctcagcgactagcccgccaacacccggactgggaggatgaggaactattccagcatgcccggaagagggtgattgcaacttatcagaatatcgctgtatatgagtggttgccctcttttctgcagaagactctcccagagtacactggctatcggcctttcctggatccctcaattagctccgagttcgtcgctgctagcgaacaattcctgtcaaccatggtgccccccggggtctatatgaggaacgcatcatgccactttcaaggagttataaataggaactcgagtgtgagtcgtgcactgcgggtgtgtaattcctactggagtcgcgagcacccgtccctgcagtctgctgaagacgttgatgctctcctgcttggaatggccagccagatcgcggagcgcgaagatcacgtgttagtggaagacgtaagagatttctggccaggaccgctcaagttctcaagaactgaccatcttgcaagctgcctgcagcggggtcgggatctgggcctgccctcctataccaaggctcgggcagctctcgggctgagtccgatcacaagatggcaggacatcaatcctgcactatcgcgttcaaacgataccgttttggaagcaactgctgcgctgtataaccaggatctttcttggctggaattgctgcccggcggcctcttggagtcccatcgcgatcccggacctctgttctccacaatcgtgcttgaacagttcgtgcgactgagagacggcgataggtactggtttgaaaacaccagaaatggtttattctctaagaaagagatagaggaaatcaggaacacaacattgcaggatgtgttggtagcagtgatcaacatagaccctagtgctctgcagcccaatgtattcgtctggcataagggagacccctgtcctcagccacggcagctctccaccgagggactgcctgcttgtgccccatcggttgtgcgggattacttcgaggggagtggattcggatttggagtcactataggcaccctctgctgctttccacttgtgtccttgctctccgcatggatagtagcccgcttacgcatgagaaacttcaagcggctgcaaggacaagatcgacaaagcatagtgtctgaaaaactggtcgggggaatggaggcgctggagtggcaggggcacaaggagccatgcaggcctgttctggtctatctccaaccaggacagattcgtgtggtcgacggtagacttaccgtgctgcggactattcagcttcagccacctcagaaagtcaacttcgtgctgagtagcaataggggtagacgcacactcctcctcaagattcccaaggagtacgatctggtgctcctgttcaacctggaagaggaacgccaagcgctagtggagaacctgcggggtgctttgaaggagtcaggcttatctatccaggaatgggagctacgggagcaagaattaatgcgggccgccgtgacacgggaacagcgccggcacttgctggaaaccttcttccggcaccttttcagccaggtactggatataaaccaagccgatgccggaactttgcccctagattccagtcaaaaagttagggaggccttaacatgtgagctctcacgggcagaatttgcggaatccttgggcctgaagccacaagacatgttcgtggagtccatgttttctttggccgacaaggacggtaacggctatctttctttccgagagtttttggacatactggtcgtgtttatgaagggctcacccgaagaaaaatcccggctgatgtttcgaatgtacgactttgatgggaatggtcttatttctaaagacgaattcatcagaatgctaaggtcatttattgagatctccaataattgcctgagcaaggcacagctggcagaagttgtcgaatctatgttcagagagagtggatttcaggacaaggaagaactgacgtgggaagactttcactttatgcttcgggaccacaattccgagctgcgtttcactcaactgtgcgtgaaaggtgtcgaggtcccagaggtaattaaggacctctgccgccgggcttcttatatttctcaggatatgatttgtccctctcctagagtgtccgcgagatgtagccggtcagatattgagacagaacttaccccccagaggttgcagtgcccaatggacactgacccaccccaggaaatcagaagacgtttcggcaagaaagtgacctcctttcagcccctcttattcacagaggcacatcgggagaaattccagcggtcttgtctgcaccagaccgtgcaacaattcaaacgtttcattgagaactacaggcgccacattggatgtgtggctgtcttttacgcaatcgccggtgggctgttcctcgagcgtgcctactattacgcgtttgccgctcaccacaccggcattaccgataccacacgcgtgggcatcatactttctcgaggcactgccgcctccattagtttcatgttctcgtacattcttctaacaatgtgtaggaatcttatcacattcctgcgggagacattccttaataggtacgtaccattcgacgccgctgtcgacttccatagattgattgcttccacagccatcgtgcttacagtcctccattccgtaggtcacgtggtcaacgtatacctgttcagcattagtcctctgtctgtgctcagctgcctttttcctgggctgtttcatgatgacgggagcgagctgcctcagaagtactactggtggttctttcagacagtgcccgggctgacaggtgtcgtgctcttgctgatattggccattatgtacgttttcgcgagccaccatttcaggcgcagatcttttagagggttctggctgactcatcatttatacattctgttgtatgtcctgctcatcatccatgggtccttcgcactgatacagctaccacgatttcatatcttttttttagtccctgcaattatctatggaggggacaaattagtcagtctgtcccgaaaaaaagtcgaaatctcggtggtgaaggctgagttgctgccatctggcgtgacccatttgagattccagcgtccccagggatttgaatataaatcaggccaatgggtgaggatcgcttgtctcgccctggggaccactgagtaccatccttttacactgacctccgcaccccacgaagataccctgagcctgcacattagagcagctggcccatggaccaccagactgagagaaatttatagtgcccctacaggcgatcgttgtgctaggtaccccaagctgtatctggatgggccatttggggaaggccaccaggaatggcacaagtttgaggtgtcggtcctagtgggaggtggtattggggttaccccttttgcaagcatcctgaaagacctcgtgttcaagtcctccgttagttgtcaggtgttttgtaagaaaatttactttatctgggttactagaacacaacgacaattcgaatggctcgccgacattattagagaagttgaagaaaacgatcaccaggatctggtttcagttcacatctatattacacagttagcagagaagtttgatctgcggaccactatgctgtacatctgtgagaggcacttccagaaggttctgaatcgctcgctcttcaccggactgaggtccatcacccatttcggacggccccccttcgagccatttttcaactcgctccaggaggtgcatcctcaggtcaggaagatcggggtgtttagctgcgggcccccagggatgacgaagaacgttgaaaaggcttgccagttgataaatcgacaggatcgcacacacttttcacatcattatgaaaatttttag

SEQ ID NO: 252156 - DNA, 132 bp, Artificial Sequence
  derived and/or modified sequence
atgggattctgcctcgcactggcatggacgctcctggttggagcctggacgccattgggcgcacagaacccaatctcgtgggaggttcagcgctttgatggctggtacaataacctcatggaacacaggtag

SEQ ID NO: 252157 - DNA, 4656 bp, Artificial Sequence
  derived and/or modified sequence
atgggcttctgcctggccctggcctggaccctgctggtgggcgcctggacccccctgggcgcccagaaccccatctcctgggaggtgcagagatttgatggctggtacaacaacctgatggagcaccgctggggcagcaagggcagccggctgcagaggctggtgcctgccagctatgcagatggagtgtaccagcccctgggggagccccacctgcccaacccccgggacctgagcaacaccatcagccggggccctgctggcctggccagcctgaggaacagaacagtgctgggcgtcttcttcggctaccacgtgctgagtgacctggtgtctgtggagaccccaggctgcccagctgagttcctgaacatccgcatccccccaggggaccccatgtttgatcctgaccagagaggagatgtggtgctgcccttccagaggagccgctgggaccctgagaccggccgcagccccagcaacccccgggaccctgccaaccaggtgacaggctggctggatggcagcgccatctacggcagcagccacagctggagcgatgccctgcgctccttcagccggggccagctggccagcggccctgaccctgccttcccccgggacagccagaaccccctgctgatgtgggccgccccagaccctgccaccggccagaatggcccccggggcctgtatgccttcggggctgagcggggcaaccgggagcccttcctgcaggccctgggcctgctgtggttccgctaccacaacctgtgggcccagaggctggcccggcagcacccagactgggaggatgaggagctgttccagcacgccaggaagagggtcatcgccacctaccagaacattgctgtgtatgagtggctgcccagcttcctgcagaagaccctgcctgagtacacaggctaccggcccttcctggaccccagcatcagcagcgagtttgtggccgccagcgagcagttcctgagcaccatggtgcccccaggagtgtacatgagaaatgccagctgccacttccagggcgtcatcaacagaaacagctctgtgtcccgggccctgcgggtgtgcaacagctactggagccgggagcaccccagcctgcagagcgcagaagatgtggatgccctgctgctgggcatggccagccagattgctgagcgggaggaccacgtgctggtggaggatgtgcgggacttctggccaggccccctgaagttcagcaggacagaccacctggccagctgcctgcagaggggccgggacctgggcctgcccagctacaccaaggcccgggccgccctgggcctgagccccatcacccgctggcaggacatcaacccagccctgagccgcagcaatgacacagtgctggaggccacagctgccctgtacaaccaggacctgtcctggctggagctgctgcccggcggcctgctggagagccaccgggaccccggccccctcttcagcaccatcgtgctggagcagtttgtgcggctgagagatggagaccgctactggtttgagaacaccagaaatggcctcttcagcaagaaggagattgaggagatccggaacaccaccctgcaggatgtgctggtggccgtcatcaacatcgaccccagcgccctgcagcccaacgtgtttgtgtggcacaagggggacccctgcccccagccccggcagctgagcacagagggcctgcctgcctgtgcccccagcgtggtgcgggactactttgagggcagcggctttggatttggagtgaccatcggcaccctgtgctgcttccccctggtgtccctgctgagcgcctggatcgtggcccggctgaggatgaggaacttcaagaggctgcagggccaggaccggcagagcatcgtgtctgagaagctggtgggcggcatggaggccctggagtggcagggccacaaggagccctgcaggcctgtgctggtgtacctgcagcccggccagatccgggtggtggatggccgcctgactgtgctgcggaccatccagctgcagcccccccagaaggtgaactttgtgctgagcagcaacagaggaagaaggaccctgctgctgaagatccccaaggagtatgacctggtgctgctcttcaacctggaggaggagcggcaggccctggtggagaacctgcggggggccctgaaggagagcggcctgagcatccaggagtgggagctgcgggagcaggagctgatgagagctgctgtgacccgggagcagaggaggcacctgctggagaccttcttccgccacctgttcagccaggtgctggacatcaaccaggctgatgctggcaccctgcccctggacagcagccagaaggtgcgggaggccctgacctgtgagctgagcagagctgagtttgctgagagcctgggcctgaagccccaggacatgtttgtggagagcatgttcagcctggccgacaaggatggaaatggctacctgtccttccgggagttcctggacatcctggtggtgttcatgaagggcagccctgaggagaagagccggctgatgttcaggatgtatgactttgatggaaatggcctcatcagcaaggatgagttcatccgcatgctgcggagcttcatcgagatcagcaacaactgcctgagcaaggcccagctggccgaggtggtggagagcatgttccgggagagcggcttccaggacaaggaggagctgacctgggaggacttccacttcatgctgcgggaccacaacagcgagctgcgcttcacccagctgtgtgtgaagggcgtggaggtgcctgaggtgatcaaggacctgtgccggcgggccagctacatcagccaggacatgatctgccccagcccccgggtgtctgcccgctgcagcagaagtgacattgaaacagagctgaccccccagaggctgcagtgccccatggacacagaccccccccaggagatcagaagaagatttgggaagaaggtgaccagcttccagcccctgctcttcacagaggcccaccgggagaagttccagaggagctgcctgcaccagacagtgcagcagttcaagcgcttcatcgagaactaccgccgccacatcggctgtgtggccgtgttctacgccatcgccggcggcctcttcctggagcgggcctactactatgcctttgctgcccaccacacaggcatcacagacaccaccagggtgggcatcatcctgagccggggcacagctgccagcatctccttcatgttctcctacatcctgctgaccatgtgcaggaacctgatcaccttcctgcgggagaccttcctgaaccgctacgtgccctttgatgctgctgtggacttccaccggctgattgccagcacagccatcgtgctgactgtgctgcacagcgtgggccacgtggtgaatgtgtacctgttcagcatcagccccctgtctgtgctgagctgcctcttccctggcctcttccatgatgatggcagcgagctgccccagaagtactactggtggttcttccagacagtgcccggcctgactggagtggtgctgctgctgatcctggccatcatgtatgtgtttgccagccaccacttcagaagaagaagcttccggggcttctggctgacccaccacctgtacatcctgctgtatgtgctgctgatcatccacggcagctttgccctgatccagctgccccgcttccacatcttcttcctggtgcctgccatcatctacggcggggacaagctggtgtccctgagcaggaagaaggtggagatctctgtggtgaaggccgagctgctgcccagcggcgtgacccacctgcgcttccagaggccccagggctttgagtacaagagcggccagtgggtgcgcatcgcctgcctggccctgggcaccacagagtaccaccccttcaccctgaccagcgcccctcatgaggacaccctgagcctgcacatccgggctgctggcccctggaccacccggctgcgggagatctacagcgcccccaccggggacagatgtgcccgctaccccaagctgtacctggatggcccctttggagagggccaccaggagtggcacaagtttgaggtgtctgtgctggtgggcggcggcatcggcgtgaccccatttgccagcatcctgaaggacctggtgttcaagagctctgtgtcctgccaggtgttctgcaagaagatctacttcatctgggtgaccaggacccagaggcagtttgagtggctggccgacatcatccgggaggtggaggagaatgaccaccaggacctggtgtctgtgcacatctacatcacccagctggccgagaagtttgacctgcggaccaccatgctgtacatctgtgagcggcacttccagaaggtgctgaacagaagcctcttcaccggcctgcggagcatcacccacttcggccggcccccatttgagcccttcttcaacagcctgcaggaggtgcacccccaggtgaggaagattggagtcttcagctgtggccccccaggcatgaccaagaatgtggagaaggcctgccagctgatcaaccggcaggacaggacccacttcagccaccactatgagaacttctag

SEQ ID NO: 252158 - DNA, 132 bp, Artificial Sequence
  derived and/or modified sequence
atgggcttctgcctggccctggcctggaccctgctggtgggcgcctggacccccctgggcgcccagaaccccatctcctgggaggtgcagagatttgatggctggtacaacaacctgatggagcacaggtag

SEQ ID NO: 252159 - DNA, 4656 bp, Artificial Sequence
  derived and/or modified sequence
atgggcttctgcctggccctggcctggaccctgctggtgggcgcctggacccccttgggggcccaaaacccgatcagctgggaggtgcagaggttcgacggatggtacaataatctcatggagcacaggtgggggtcaaagggcagtaggctccagagattagtgccagcaagttacgccgacggagtgtaccagcccctcggagagccacatctccccaatccgcgtgacctgagcaacacgataagcagggggcccgccggcctggcttccttacggaacagaaccgttttgggagtgttcttcggctaccacgttcttagcgacctggtgtcagtggagactcctggctgccccgccgaatttctaaatatccggatcccccctggcgaccctatgttcgatccagaccagcgcggtgatgtggtgctacctttccagcggtcaaggtgggatcccgagaccggacgttctccatcaaatccccgagaccctgctaaccaggtgacgggctggttagatggctccgcgatttatggatcttctcactcgtggtctgacgcccttcggagtttttcacgaggccagctggcaagcggccctgatcccgccttcccaagggattcccagaaccctttgctgatgtgggcagccccggatccggctacaggacagaatgggccaagagggctgtatgcgttcggggccgaaaggggcaatcgtgagccttttctgcaggcactagggcttctatggttccgctatcataacctgtgggcccagcggctcgcaaggcagcacccggactgggaagacgaagagctatttcagcacgctcggaagcgggtgatagccacttatcaaaacatagcagtctacgagtggctccccagctttctgcaaaagaccctcccagaatacaccggatatcgcccttttcttgacccaagtataagtagcgagtttgtggctgcatccgaacagttcctgtctacaatggtgccaccaggcgtttacatgcgaaacgccagctgtcatttccagggagttatcaataggaattcttcagtatctcgcgccctgcgggtgtgcaactcctactggtcccgcgagcacccatctctccaatccgcggaggacgtcgacgctctgctgttaggtatggcatcccagattgctgaaagagaagaccatgtgctcgtggaggacgttagagacttctggcccggtcccctgaagttttctcgaactgatcacctggcctcttgtcttcagcgcggaagagatctcggtctgccaagctacaccaaagcacgggcggccctggggttgagcccaataacaagatggcaggatatcaatccagctcttagccgcagtaatgacacagtgctggaagcaacagctgctctatacaaccaggacctctcatggctcgagttgctccccgggggacttctggaaagccaccgggatcctggccctttgttcagcaccatcgttttagaacaatttgttcgccttcgagacggagatcgttactggtttgagaacacgcggaacgggttgtttagtaagaaagaaatcgaggaaattcgcaacacgactttacaagacgtgctggtggccgtgatcaatattgaccctagcgcccttcagcccaacgtatttgtctggcacaagggagatccttgccctcagccaagacagctgagtaccgaagggctacccgcctgtgcaccctcagtggtacgtgattacttcgaagggagtgggttcgggtttggggtcacaatagggaccctatgttgctttccgctcgttagccttttgtcagcctggattgtggcccggctgcggatgcggaattttaagcgcctgcaggggcaggaccggcagtccatcgtcagcgagaaacttgtcggtggaatggaggctctggagtggcaaggccataaggagccttgtcggccagtgttggtctatctgcagccaggacaaattcgcgtggtcgacgggcggctcacagtgctccggacaattcagctgcagcctccacagaaagtaaatttcgtgctctctagcaaccgcggaaggagaacgctgttactgaagatacctaaagagtatgatctggtacttctgttcaacctcgaggaggagcgccaagccttggtggaaaatctcaggggtgccctcaaagagtccgggctctcgattcaggagtgggagttgcgagagcaggaactcatgagggccgccgtcacccgcgagcagcgccgccacctgctggagacattcttccgacatctgttttcacaagtgcttgatatcaaccaggccgacgctggcactttacctctcgactcatcacagaaggtcagagaggcgcttacttgcgagctctccagagccgaatttgcggagagcctgggcctcaagccccaggacatgttcgtggaaagcatgttttccctggcagacaaagacggcaatggctacctatcctttcgtgagttcctggatatccttgttgtcttcatgaagggcagtcccgaggagaagagtagattgatgttcagaatgtacgacttcgacggcaacggcctcattagtaaagatgagtttatcaggatgttgcgctcatttatcgaaattagcaacaactgcctgtcaaaggcgcagttggctgaggtagtggagtcaatgtttcgagaatccggcttccaagacaaagaggaactaacatgggaggatttccactttatgctgagagatcacaatagcgagctgcggttcacacagttatgcgtgaaaggcgtggaggtccccgaggtcatcaaagacctgtgccgccgagctagttacattagtcaggacatgatctgcccctctcctagagtctcagctcgctgctctaggagcgatattgaaacagaattgaccccacagcgattacagtgcccaatggacactgatcctccccaggaaatccggcgcagatttggcaagaaagtgacttcatttcagcccctgctcttcacagaggcccatcgagagaagtttcagagaagctgtttacaccagaccgtgcagcaattcaagcggttcatcgaaaactaccgacgccacattggatgcgtggcagtgttctacgcaatcgccgggggtctgttccttgagagggcttactactacgccttcgccgcccaccacaccggaattaccgacactacccgggtgggaattatcctgagcaggggcaccgcagcctcgatctcattcatgttctcttacatcttgctcaccatgtgtcgtaatcttattacattcctcagagagacttttctcaaccgttatgtgccctttgacgcagctgtggacttccaccggttaatcgctagtactgctatagtactcaccgtacttcactctgtggggcacgtcgtgaacgtgtatctctttagtatctccccgttgtctgtcctgtcttgccttttcccaggtttgtttcatgacgacggctccgagcttccccaaaagtactactggtggttcttccagactgtcccagggctcactggcgttgttttgctgcttatcttagcaattatgtacgtgtttgcctctcatcactttcgacgtagatcattcagaggtttttggctcacccaccacttgtacatactgttgtacgtgcttctgattatccacgggtctttcgcactcatccagctgcctaggtttcatatcttctttttagtacctgccataatttatggtggggacaagctggtgtccctatcgagaaaaaaggtcgagatatcagtggtgaaagctgagctcctgccctctggcgtcacacacctccggtttcagcggccccagggattcgaatataagtcgggacaatgggtgcgtatcgcatgtttggcactgggcactactgaatatcacccatttacgctgacctcagcaccccatgaggacaccctgtcgcttcatatccgcgctgcaggcccatggactacccggttgcgggaaatttacagtgcccccacgggcgaccggtgtgcaagatatccaaagctgtacctcgacggccctttcggcgagggccaccaggaatggcacaaattcgaggtgagcgtgctagtcggagggggaatcggcgtaactcccttcgcttcaatcctcaaagacctggtgttcaagtcctccgtctcttgccaggttttctgcaagaaaatttacttcatctgggtgaccaggactcaaagacagttcgaatggctggccgacataatccgcgaggtggaggagaatgatcaccaggatttagtgtcagttcacatctatataacccagttagcagagaaattcgacctccgtactaccatgctatacatctgcgagcgacatttccaaaaggtgttgaaccgatccctcttcaccggccttaggtccattacgcacttcgggagacctcccttcgagccatttttcaattcactgcaggaggtgcaccctcaggtgaggaaaattggagttttctcctgcggccccccgggtatgaccaaaaacgtcgagaaggcatgtcagcttattaataggcaggaccgcacccatttctctcatcattacgagaatttctag

SEQ ID NO: 252160 - DNA, 4656 bp, Artificial Sequence
  derived and/or modified sequence
atgggcttctgcctggccctggcctggaccctgctggtgggcgcctggacacccctaggtgcccagaacccaattagctgggaggttcagagattcgatggttggtacaacaatcttatggagcaccgttggggcagcaaagggtctagactacagcggctggtacctgcttcttatgcggacggcgtgtaccagcctttgggtgagcctcatcttcctaacccaagggatctcagtaataccatcagccgcgggcctgctggcttggcttccctccgcaatcggacggtgctgggggtcttttttggctatcatgtactgtctgatttggtgagcgtggagacccccggctgccctgctgagtttctcaatataagaatccctccaggagatcctatgtttgacccagaccaaagaggcgacgtagtcctgcccttccaaaggagcaggtgggaccccgaaactggacgatcgccctctaatccacgggaccccgctaatcaggtcacgggctggttggacgggtccgctatatatggaagctcgcactcatggtctgacgccctccgaagtttttcccgaggccagttggcatcaggaccagatccagccttcccccgagactcacagaacccacttctcatgtgggcagctcccgaccccgcgaccggacagaacgggccaaggggattgtatgccttcggcgccgagcgaggtaatcgggagcctttcctgcaggcacttgggcttttgtggtttcgctatcacaatctctgggcccaaaggctggctcgccagcaccctgactgggaagacgaggaactatttcaacatgccagaaagagagtgatagcaacttaccaaaacattgcagtgtatgaatggcttccttctttcttacagaaaacattaccggagtacaccggatacagaccatttctggacccctcgatcagcagtgagttcgtggcggcaagcgagcagttcctaagtactatggttcctcccggtgtctacatgagaaacgcctcttgccattttcagggggtgatcaatagaaacagcagcgtgtctcgcgctcttcgggtgtgtaactcatattggtcaagagagcatccgtcgctgcagagtgctgaagatgtggatgccctgcttctgggaatggcctcccagatcgctgaacgggaggatcatgtgctagtagaagatgtccgtgatttttggcccggccccttgaagttttctagaacagaccatttggctagctgtctgcagcgcgggagagacctcggcctgccctcttacaccaaggctagagccgccctgggcctttcaccaataacgagatggcaggatattaatcccgcgttgtcccggtcaaatgacacagttctagaggctactgctgcgctatataatcaggatctgagttggttggagctcctgccaggcggactactggaatctcatcgtgacccaggtccgctgttcagcactatcgttctagagcagttcgtgagactgagagatggagatcgctattggtttgagaacacccgcaacgggctgttttcgaagaaagagattgaggagataagaaacactacactgcaggacgttctcgtggcggtgatcaacattgacccctctgccctccagcctaacgtctttgtgtggcataaaggcgacccgtgcccccagcccagacagcttagcacggaggggctgcccgcatgcgcccctagcgttgtgagggattactttgaggggagcggctttggcttcggagtgacaataggcacattgtgctgctttcctcttgttagcctgctgagtgcctggattgtggccagactgcggatgaggaactttaaacgcctccagggacaggatagacagtcaattgtgtcagaaaagttggtgggggggatggaagcattagaatggcaagggcataaagagccatgccgccccgtgcttgtatacttgcaaccaggacagatccgagtggtggacgggcgcctgactgtgctgaggactatccaactccagcccccccagaaggtgaattttgttctgtcatccaacaggggacgccgcaccctgctcttgaagatcccaaaagagtatgacctggtgctgctgtttaacctggaggaagaaaggcaggcgctcgtggaaaatctccgaggggctctgaaagaaagtggtttgtccattcaggagtgggaactgagggagcaagagctgatgcgggccgccgttacccgagaacagcgccgccacctgctggagacgttctttagacacttatttagtcaggtcctggatattaatcaggccgacgcgggtactctgcccctggatagttctcagaaggttcgggaagctctgacctgtgaattgtccagagccgagttcgccgaatccctcggcttaaaaccccaagacatgttcgttgagagcatgttcagtttggccgacaaagatggtaacggatatctgtcattccgggagtttcttgacatactggtggtgtttatgaaaggatcaccggaagaaaaatccagactaatgtttcgtatgtacgacttcgatgggaacgggttgatcagcaaagacgagttcattcgtatgctccgaagctttattgagattagtaataattgtctgagcaaagcacagctggcggaggtcgtagaaagtatgtttagagagtccgggttccaggacaaagaggaattgacctgggaggatttccactttatgcttagggatcacaactctgaactgaggttcacccagctgtgcgtgaagggagtcgaggtacctgaggtgatcaaggatctatgcagaagagccagctatatcagccaggacatgatctgtccctcccctagagtctcagcccgctgctccaggtccgacattgaaactgaactcactccccagaggcttcagtgcccgatggatacagaccctccccaggaaataaggcggagatttggaaaaaaggttacgtctttccagcctctgttattcacagaagcccacagggagaaattccaaagaagttgcttgcaccagacagtgcaacagttcaaacgttttattgagaactatcgccggcatataggctgcgtagccgtcttttacgcaatagcaggcggcctgtttctggaacgggcttactactacgcctttgccgctcatcacaccggaataacagatacaactagggtcggtatcatcctgtctcgtggtacggcagcctctatttcttttatgttttcatatattctgctgaccatgtgccgtaatttaatcacttttcttcgcgagacgtttttgaacagatacgttccgttcgatgcggctgtcgattttcatcggttaatcgcaagtaccgcaattgtgctgacagtgctgcactccgtcggacatgtcgtcaacgtctatctgttctctatttctccactcagtgtcctgagctgtctgtttcccgggttgttccatgacgacggctctgagctgccccagaagtattattggtggtttttccagaccgtccccggccttacaggggtggtgctgctcctcattctcgctatcatgtacgtcttcgctagccaccacttcaggaggcgttcattccgcgggttctggctgacgcaccatctctatatcctgttatatgtgctgctgattattcatgggtcctttgctctgatccaactcccgaggttccacatctttttcctggtacctgctattatctatggaggcgacaagctggtctccctgagccgtaaaaaggttgagatcagcgtggtgaaagccgaactcttaccctcgggtgtgacacatctacgctttcagcggccacagggatttgagtacaagagcggtcagtgggttcggatcgcatgtttggcgcttgggaccacagagtaccatcctttcacgctcacttctgctcctcatgaggatacgctctctcttcatatacgcgctgcgggaccatggactacaagacttagagagatctatagcgcccccactggagatcggtgtgcaagatatcccaagctttacctagatgggccattcggggagggccaccaagagtggcacaaattcgaggtttccgtcctggtgggcggggggatcggcgttactccttttgcgagcatactgaaggatctggtgttcaaaagttctgtctcctgccaggtgttttgcaagaaaatctacttcatctgggtaactagaacccaacgccagtttgagtggctagccgacataattcgcgaggttgaagaaaatgaccaccaggaccttgtgagtgttcacatatatataacccaactagccgaaaaatttgatctccgaactaccatgctctacatttgcgaacggcatttccagaaggtgctgaatcgatcactgtttacaggtctccgcagcattacccactttggacgcccccccttcgaaccgttttttaatagtctgcaggaggttcatcctcaggtcagaaagattggggttttttcttgtggtcccccgggcatgaccaagaacgtggaaaaagcttgccaacttattaatcggcaggataggacacacttttcccaccattatgagaacttttag

SEQ ID NO: 252161 - DNA, 4656 bp, Artificial Sequence
  derived and/or modified sequence
atgggcttctgcctggccctggcctggaccctgctggtgggcgcctggacgcccctgggggcccaaaatcctatctcctgggaggtgcaacggtttgatggatggtataacaacctaatggagcataggtggggcagtaagggatcacgcctgcaaaggctcgtacccgcctcatacgccgacggcgtctaccagccactaggggagccccacctgccaaaccctcgagacctttctaacacaatcagcaggggtcctgctggattagcctcactcagaaaccgaaccgtgctgggagtttttttcgggtatcacgttctgtcagacttggtttcagttgagacaccagggtgccctgccgaattcctaaacatacgaatcccacccggcgatcccatgtttgaccccgatcaaagaggggacgttgtgttgccgttccagcgctcccgctgggaccctgagactggcaggtcccctagcaatccgagggaccctgcaaatcaggttacagggtggctcgacggcagcgctatatacggctcatcccacagttggtcagatgcactgcgttcattctctcgggggcagctggcgtcagggccagaccccgcattcccaagggatagtcagaatcccttactgatgtgggccgctccggatccagctactggacagaacgggccgagagggttatacgcctttggggctgaaagaggcaaccgagagcccttcttgcaggccttgggtttattgtggttcagatatcataatctgtgggcccagcgtttggcaagacaacacccagactgggaggacgaagagctctttcagcatgcccgcaagcgggtgatagcaacctaccagaacattgcagtttatgaatggctgccctcatttttacagaagaccctccctgagtacaccggctacagacctttcttagacccttccatcagttccgaattcgtggccgctagtgagcaatttttgtcaaccatggtgcctcctggcgtgtatatgagaaacgcttcttgccactttcagggagtcataaacaggaattccagcgtgtctcgggcactgcgggtgtgtaacagctattggagccgagaacatccttcccttcaatccgcagaagacgtggatgccttgctccttggtatggcctcccaaatcgccgaaagggaagatcacgtgcttgttgaagatgtacgagacttctggcctgggcctcttaaattctccagaaccgaccatttggcaagttgcctccagcgcggaagagatctcggattaccttcatacacgaaagccagagccgcactagggctgagcccaatcacaagatggcaagacatcaatccggccctctcccgtagcaacgacacggtcctcgaggcgactgccgcgctctataatcaggacctgagctggctggagctgcttccgggggggctcctggagtctcaccgtgaccctggaccactcttttcgaccattgtgctcgagcagtttgttcgcttgcgtgacggagacagatactggttcgagaatacacgcaacgggttgttctccaagaaagagatcgaggaaatccgcaacacaactctgcaggacgttctggtggctgtcattaacattgacccatcagcgctgcagccaaacgtttttgtgtggcacaagggcgatccttgtccacagccacgccaactaagcacggagggcctgcctgcttgcgccccatccgtggtgcgtgattatttcgaaggttcgggttttgggttcggcgtaaccattggaacactgtgttgctttccgctggtgagcttattatccgcttggatcgtggctcgactgcgaatgcggaatttcaagcggctccaggggcaggatcgacagtccatcgtctccgaaaaactcgttggaggcatggaggcacttgagtggcaaggtcataaagagccctgtcgccctgtgctagtttacctgcagcctggccagattcgcgtggtggacgggcgcctgacagtcctgcggactatacagctgcagccccctcaaaaggtaaattttgtcctgtcttcaaataggggccgtcgtacccttctgctgaagatccccaaggagtacgatcttgtgctactctttaacctggaagaagaaaggcaagcccttgtggaaaatctccggggtgctctgaaagaatccggtttaagtatccaggagtgggaacttcgggagcaagagctaatgagagcagccgtcacccgggaacagcgtcgacacctcctggagactttttttcgtcatttgttttctcaagtcctggatatcaatcaggccgatgcaggtacccttcctcttgactctagtcagaaggtgagggaagccctaacgtgcgaacttagccgggccgaattcgcagaatcacttggtctgaaaccgcaggacatgttcgtggagagcatgttcagtttagcagataaagacgggaacggctacctgtctttcagagagttcttggatatcctcgtagtgttcatgaagggatcaccggaggagaagagccggcttatgttcagaatgtatgattttgacggaaacgggttgatcagtaaggacgaattcatccggatgctgagatcattcatcgaaatatccaacaactgtctctcgaaggcccagctggctgaggtggtcgaaagcatgtttcgagagtcaggattccaggataaggaagaacttacatgggaggactttcacttcatgcttagggaccataattcagagctgaggttcacccagctttgtgtgaagggggtcgaggtacccgaggtgattaaagatctatgtcgtagagcctcttatatttcccaggacatgatctgcccaagtcccagagtgtccgcacgctgtagccgatcagacatagagactgaattaacccctcagagactacagtgccccatggacacggatccaccccaggaaataaggcgccggtttggaaagaaagtgaccagtttccagccgttgctgttcacagaagcccatcgcgagaagttccagcggtcgtgtttgcaccagaccgtccaacagttcaagcggttcatcgagaactaccggcgacacattgggtgtgttgcggtcttctacgcgattgccgggggcctgtttctggagagagcgtactattacgctttcgcagcccatcatacaggaataacagacaccactcgcgtcggaattattttgtctcgaggcacggcggccagtatcagctttatgttcagctacattctgctgactatgtgtcggaatctgatcacctttctgagggagaccttcttgaataggtatgtgcccttcgatgctgccgttgattttcaccgtttgattgcgtccacagctattgtcttgactgtgctacatagtgtgggccatgtagtaaatgtctacctcttttccataagtccactcagcgttctttcgtgtcttttccctggtctgttccacgatgatggctctgagcttccccagaagtattactggtggttctttcagactgtgccaggactgaccggagttgttttgctgctcattctcgcaataatgtacgtatttgcttcacatcacttcaggcgaagaagcttccgtggattctggctaacacaccacctctatatcctcctctatgtgctgttgattatccatgggtcgttcgctctaatacagctccctaggtttcacatattctttctcgtacccgcgatcatctatggcggtgataagctggtctctctcagccgaaaaaaggttgagatttctgtcgtgaaggctgaactcctaccctctggggtaactcacctgagatttcagcgcccacaaggcttcgaatacaaatctgggcaatgggtccggatcgcatgcttggctctggggactacagagtatcatccctttacactcacctcagccccccacgaggacaccttatcattacacatccgtgcggctggtccttggaccacaaggctgcgcgaaatttattctgctccgactggtgaccggtgtgcacgctatcctaagttgtatctcgacgggccatttggtgagggccaccaagaatggcataaattcgaggtgagtgtgttggtgggcgggggaataggggttaccccttttgccagcatcctgaaagatctggtgtttaaaagcagcgtgagctgtcaggttttctgcaaaaagatttactttatatgggtcacgcgcacgcagcggcaatttgagtggttggctgacatcatacgcgaggtagaagagaatgaccaccaggacctggtcagcgtacatatttatataacacagcttgccgaaaaattcgatctacgtacgactatgctgtacatctgtgaaagacacttccaaaaggttctgaaccgtagtctgttcaccggcctgcggtccatcacccattttggccgtccaccgttcgagccattcttcaattctctacaggaggtacacccacaggtccgcaagatcggtgtattctcctgtggccctcctgggatgacaaaaaacgtggagaaggcttgccaactgattaacagacaggataggactcacttctctcaccactatgagaacttctag

SEQ ID NO: 252162 - DNA, 132 bp, Artificial Sequence
  derived and/or modified sequence
atgggcttctgcctggccctggcctggaccctgctggtgggcgcctggactcctctaggtgcccagaacccaatatcctgggaagtgcaacgatttgacggatggtataacaacctgatggagcatagatag

SEQ ID NO: 252163 - DNA, 4656 bp, Artificial Sequence
  derived and/or modified sequence
atggggttctgcctggctctggcctggaccttgctcgtgggagcatggacacccctcggggctcagaatcccatatcctgggaggtccagagattcgatggatggtataataaccttatggaacacagatggggcagtaagggttcacgactgcagcggctagtgcctgcctcctacgccgatggcgtttatcagcctttgggggaaccacatttgccaaatccccgtgacctttccaacacaataagcagaggacccgcagggcttgcatccctgagaaatagaactgtgttaggggtcttcttcggatatcacgtcctctcggatctggttagcgtcgagacaccgggttgtcctgccgaattcttaaacatcagaattcccccaggcgaccccatgtttgacccagatcaacgaggcgatgtcgtcctgcccttccagcgcagtcggtgggaccccgaaacgggtagaagtccatcaaatccaagagaccctgccaaccaggtgaccggctggttggatggaagtgctatctatggaagcagccactcctggagcgacgccctgagatccttttctcgtggtcagctcgcgtctggcccagaccccgcattcccgagagactcacagaatcccctgctgatgtgggccgcaccagatcctgccactggccagaatggaccccgtggtctatatgctttcggtgccgaacgcggtaaccgagaaccatttttgcaggccctgggactgctgtggttccgataccacaacctctgggctcaacgactcgccaggcagcatccagactgggaagacgaggagctgtttcagcatgccaggaaacgggtgatcgccacctaccagaacatagccgtctatgagtggttgccctcgtttctgcaaaagactcttcccgaatatactggatataggccatttttggatccgtccattagttccgagttcgttgcggcatctgaacaatttctgtcaaccatggtgccacccggagtctacatgcgaaacgccagttgtcacttccaaggcgtgataaacaggaactcttcggtaagcagagccctgagggtgtgcaattcctattggagccgtgagcatcctagtctacagagcgccgaggatgtcgacgccctgctactgggtatggcgtctcagatagcagaacgagaagatcacgtgctggtcgaggacgttcgcgacttttggccaggtccactgaagttctctcggacagatcatttggcaagttgtttgcaacgtgggagggatctgggtctcccctcctataccaaggccagagccgcacttggcttatcccctatcacacgatggcaggatattaatccagcactaagccgaagcaacgacacagtgttggaggctaccgccgctctctataaccaggatctcagttggctggaactgctgccagggggactgctcgaaagccaccgagacccagggcctctcttctctacgattgtgttggagcagttcgtaaggctgagagatggtgacagatactggtttgagaacactcggaatggcctgtttagcaagaaagagatcgaagagattagaaatactactctgcaagatgtgctggtggccgtcatcaacatcgaccccagcgccttgcaaccaaatgtcttcgtttggcataaaggcgacccttgcccccagcctcggcagctgtcgacagagggccttcccgcttgcgctccttccgtcgtgagagactatttcgagggctccggcttcggctttggagtgaccataggaaccctgtgctgtttccccctagtttccttgctatctgcctggatcgttgcccgtctaagaatgagaaattttaagaggcttcagggacaggacaggcagagcatcgtttcagaaaagctcgtgggtggaatggaggctttagaatggcagggtcataaggagccctgcagaccagtgctggtgtacctgcaacccggacagatccgcgttgtcgacggccgtctgaccgttctgcgcaccattcaactccagcctccccaaaaagtgaactttgttctgagtagcaaccggggaaggaggacgctattgctaaagatacccaaggagtacgatctggtgcttctgttcaatctcgaggaggagagacaggcactggtggagaatcttaggggggctctgaaagaatccggtcttagcatccaagagtgggagttacgtgagcaggagctaatgagggctgcagtcacacgcgaacagagaagacacctcctcgagacattcttcaggcacctattcagtcaagttcttgacattaatcaggcggatgcaggcacattacccctggactcctcacaaaaggttagagaggcccttacttgcgagctgtctcgtgccgagtttgcagaaagcttgggattgaagccgcaggacatgttcgtcgagagtatgttctctcttgctgataaagacggcaacggctacctctcgttccgagaattcctggacatactggtcgtttttatgaaaggcagccccgaagagaagtccaggctgatgttcagaatgtatgactttgatgggaacggactgatttccaaggatgagtttatacgaatgctgcgatctttcatcgagatatctaataactgtctctcaaaggcccagctggccgaggtggtggagagtatgttcagggagtctggattccaggacaaagaggaactgacctgggaggatttccacttcatgctgcgcgatcataatagcgagcttcgattcacacagctgtgtgtgaaaggcgtcgaggtccctgaggtcatcaaggatctgtgtcggagggctagttatatatcccaggatatgatttgtccatcccccagggtttctgcaagatgcagccgatccgatatagaaactgagttgacccctcagcggctgcagtgccctatggacaccgaccccccacaagagataaggaggcgattcgggaagaaagtgacttcttttcagcctttgctgttcaccgaggcccatagagagaagttccaaagaagttgtctgcaccaaactgtgcagcagttcaagaggttcatagaaaattaccggcgacatatcgggtgcgtcgctgtcttctacgctatcgctggcggtttgttcctggaacgcgcttactattatgcttttgcggctcaccacaccggcataaccgacacaacacgggttggtataatcctgtccaggggtaccgccgcaagtatatcctttatgttctcctacatccttcttaccatgtgccgcaatctcatcacatttctgcgggagacatttctgaaccgctacgtgccatttgatgccgctgtggactttcaccggctgatcgcctcaacagcaatcgtactgacggttctgcactccgttggacatgtggtcaatgtttatctgttttctatctcgcctctttccgtgctatcatgcttgtttcctggtctgttccatgatgacggcagcgagctgccccagaagtactactggtggttcttccagacggtgccaggtttgactggcgtcgttttgcttctgatccttgctatcatgtacgtattcgcatcccaccacttcagacgccgttcattccggggattctggctcacacaccacttgtacatattactctatgtgctgctgatcatacatggctcttttgccctgatacagctgccaagatttcatatcttcttcttggttcccgctataatttatggaggtgataaactggttagtctgagtaggaaaaaggttgaaatttcggttgtgaaagcagagctactcccctccggcgtgacccacctgcgcttccagagacctcagggcttcgagtataagagcggccagtgggtcagaatcgcttgtctggccctgggcaccactgagtaccaccccttcactctgacctctgcccctcacgaggacacgctttctctccacatccgggctgctggcccttggacgaccagacttagggaaatatattcagctcccaccggtgatcgatgtgcaaggtacccaaagttgtacttggatggaccatttggcgagggccatcaggaatggcacaagtttgaggtttcagtgctggtggggggaggcatcggcgtaacaccatttgcatcaatccttaaagacctcgttttcaagtcctccgtgagttgccaggtgttctgcaagaagatctactttatatgggtgacaaggactcagaggcagtttgagtggctggctgacataattagggaggtggaagagaacgaccaccaggacttggtgagtgtgcatatttatattacccagcttgccgagaagttcgacctccggactactatgctttacatctgcgaacgtcacttccagaaggttctgaatcggtccttgtttacaggactaaggagcattacacattttggaagacctccattcgagcccttctttaattcactccaggaggtccacccccaggtgcggaagatcggcgtgttctcttgcggaccccctggaatgactaaaaatgtggaaaaagcttgtcagttaatcaaccgtcaggatcggacccacttttctcaccactacgagaatttttag

SEQ ID NO: 252164 - DNA, 4656 bp, Artificial Sequence
  derived and/or modified sequence
atgggattttgtttggctttggcttggaccctgctcgtgggcgcatggacgccattaggagcccagaatcccatctcctgggaagtccagcgattcgacggttggtataataatctgatggagcaccgctggggctccaaaggctctagactgcagagactcgttcctgcctcctacgccgatggcgtatatcaacccttgggcgagccccacctgccaaacccacgagacctgagtaacaccattagccgcggtccagctggattggcaagcctgaggaacagaacagtccttggggtctttttcggttaccacgtccttagcgacttggtctccgtagaaacccccggttgtcccgcagagttcctgaacataaggatccccccaggggaccctatgtttgatcctgaccagagaggagatgtcgttctcccttttcaacgctctcgctgggacccagaaacaggtcgaagcccgtccaatcctagggaccctgctaaccaagttacaggctggctcgacggcagtgctatctacgggtcatcacactcttggtccgatgcgctacgaagttttagccggggtcagctggcttctggcccagacccagcatttcccagagacagtcaaaacccacttctaatgtgggccgctcctgatccggctactggacagaacggccctagaggattgtatgctttcggagcggaacgaggaaacagggagccatttctgcaggcgctgggactgctgtggtttagataccataacttatgggcacaacggctagccagacagcatcctgactgggaggacgaagaactgttccaacatgccagaaagcgagtcattgctacttatcaaaatatcgcagtttatgaatggctgccctccttcctgcaaaaaaccctgcccgaatacaccggctatcggccattccttgaccctagcataagctccgagttcgtagcagcctccgagcagttcctgtctaccatggttcctcctggggtgtacatgaggaacgcatcttgtcactttcagggagtcatcaacaggaatagcagtgtttctagagccctgagagtttgcaacagctactggtcccgtgagcatccctccctgcagtccgcagaggacgtggacgcgctgctgctcggcatggccagtcaaattgctgaacgagaggatcacgtgctcgtagaggatgtcagggacttctggcccggacctctaaagttctcccggaccgaccacctggcgtcgtgtctgcagcgtggcagagatttaggcctgccatcttacacaaaggccagagctgcgctcggcctgagccctatcaccagatggcaggatattaaccccgcactgagtcggtccaatgatactgttttagaagcgacggctgctctatataatcaggacctcagctggcttgagctgctgcctgggggtttgttggagtcccacagagatccaggcccactgttttccactattgttctggagcagtttgtgcggcttcgagacggagatcgatattggtttgagaacacccgcaacggcctcttcagcaaaaaggagatcgaggagattcgtaacacaacacttcaggatgtgttagtcgccgtgatcaacattgacccttcagctctgcagcctaacgtattcgtctggcacaagggggacccctgcccacagcctagacagctgagtactgaaggcctccctgcctgcgcgccatccgtggtgagagactatttcgagggctctggattcggcttcggcgtaactatcggcactctgtgttgcttccccctggtatccctcctgtccgcatggatcgtcgcgcgactgaggatgagaaatttcaaacggctccaaggacaggacagacagtccatcgtgtccgagaaactagttgggggaatggaggccctcgaatggcagggacacaaggagccttgtagaccagtcctagtttacttgcagcccggtcagatccgcgtggtagacggacgtctgacagtgctgcggaccattcagctccagcccccacagaaagtgaatttcgtgctgagtagcaataggggaaggaggaccttgctgctgaagatacctaaagaatatgatcttgtcctcttatttaatttggaggaagaacgacaggcccttgttgaaaatctgcggggagccttaaaggagagcgggctctcaatccaagaatgggaactgcgggaacaagagttgatgcgggcagctgtcacgagagaacagaggcggcatctcctggaaacgttctttcgtcacctgttcagtcaggttctggacatcaaccaggcagacgccggtacactccctctggacagcagccaaaaagtgagggaggctttaacctgtgagctatcaagggcagagttcgccgaatctcttggactcaaaccacaagatatgttcgttgaaagcatgttctccctcgccgataaggatggcaatggttacctgtcattcagagaatttctcgatatcctcgtagtgttcatgaaaggaagtccagaggaaaagtcccggctgatgtttagaatgtatgacttcgacgggaacgggttgattagtaaggatgagttcatcaggatgctccgctcttttatcgagattagcaacaactgcctgtccaaagcccagcttgctgaggttgttgagtccatgtttagagaaagtggttttcaagacaaggaggagctgacgtgggaagatttccactttatgctcagagatcataactcggaactgcgttttacccagctgtgcgtgaaaggggtggaagtcccagaggtgattaaagatctctgtcgccgagcctcctacatctcacaggacatgatttgcccatccccaagggtgtctgccaggtgttctaggagtgacattgagacagaactgactccccagcggctccaatgtcccatggatactgacccgcctcaggagattagacgtaggttcggtaaaaaggtaacatcatttcagcccctgctgttcaccgaagcccaccgagagaagttccaaagaagttgtctgcatcaaaccgtccagcaattcaaaagatttatcgaaaactaccgcaggcacataggttgtgttgcagttttttatgcaatcgcaggtgggcttttcctagagcgagcctattactacgccttcgccgctcatcatacaggtatcactgacacaactcgcgtcggtatcattttgagcagaggcacagccgcatctataagctttatgttctcgtatattctcctgaccatgtgtaggaatctgatcacctttctgcgcgaaacctttctgaatagatatgttccattcgacgctgcagttgactttcaccggctcattgcatcgacagccattgtactgaccgtgttgcacagcgtcggtcacgttgttaatgtctatctgtttagcatttcaccattgagcgtgctgtcatgcctgttccctggtctgttccacgatgacggaagcgaattgccccagaagtattattggtggtttttccaaacagtcccagggctcactggagttgtgcttctgctcatcttagcgattatgtacgtgttcgcttcccatcattttcggagacggagtttccggggtttttggctcactcatcatctttatattctgctgtacgtactgttaataatccacggctcatttgccctaatccagctcccacgatttcacattttcttcctcgtgccggctattatctacggaggggacaaacttgttagcttatccagaaagaaggtcgagatctccgtcgtgaaagcagaactgctgccgtccggcgtcactcatctgaggtttcaaaggccacagggtttcgagtataagtcgggacagtgggtgaggatagcttgcctggccctcggcacaacggagtaccatccatttactcttacctctgccccacatgaagacacgttgtctctgcacattcgggcagcaggaccctggactacaagattgagagagatttacagcgctccaaccggagacaggtgcgcgaggtacccgaagctttacctggatggtcccttcggagaggggcaccaagagtggcacaagtttgaggtgagcgtcttggtgggaggaggcatcggcgtcacccccttcgcctctatcttgaaagatctcgtttttaaaagctcagtgtcatgccaggttttctgcaagaagatctacttcatatgggtaacacggacgcagagacagtttgaatggctggcagatattatccgagaagtggaggaaaatgatcatcaagacttggtttcggtacacatatacattacccagctggctgaaaaatttgaccttcggactacaatgctgtacatctgcgaacgtcactttcaaaaagtactcaataggtcactttttaccggcttgagatcaatcacacacttcggacgccctccattcgagcccttctttaatagtttacaggaggttcatccgcaggttaggaagatcggggtgttttcctgtggacccccaggcatgactaaaaacgtggaaaaagcctgccagttgatcaacagacaggacagaacacacttctcccaccactatgagaacttctag

SEQ ID NO: 252165 - DNA, 4656 bp, Artificial Sequence
  derived and/or modified sequence
atggggttttgcctggctctggcttggaccctgctagtcggtgcttggacacccctgggagcccagaatcccatcagctgggaggtgcagaggttcgatggttggtacaacaacctcatggaacaccggtgggggtccaaaggcagccgcttgcagcgcctggtgcctgcgtcctacgccgatggcgtgtatcaaccgctgggtgagcctcatctccccaatccaagagatctgagcaatacaatcagcagagggccagccggactagcttctctgcggaaccgaaccgttctgggggttttcttcggctaccacgtgttgtctgatttggtctccgtcgagacacctggctgtccagccgagtttctcaatatcagaattccgcctggggacccgatgttcgacccagaccaacgtggggatgtcgtattgccatttcagcgctctaggtgggatcccgaaaccggacgctcccccagtaaccccagagacccggcaaaccaggtaactggttggctggacggcagcgccatatatggcagtagccattcatggagcgacgcactgcggtccttttctcgagggcagctggccagcggtcccgacccggctttcccaagagatagtcaaaatcccctccttatgtgggctgcccctgatcctgccacgggccaaaatggccctaggggactatacgcatttggcgcagagaggggaaaccgggagcctttccttcaagccctcgggctgctgtggtttcggtaccacaatctctgggcacagcgcctcgcgagacaacatcccgattgggaagacgaagagctatttcagcatgcaaggaagagagtgatcgcaacataccagaacatagcagtgtatgaatggcttcccagctttctccaaaagactctgcctgaatataccggctaccggcctttcctggacccatctatttctagtgagttcgtcgcggctagtgaacaatttctgtcgacgatggtacccccaggtgtctacatgcgcaatgcaagctgtcacttccagggcgtcatcaatcggaattcctctgtcagcagagcgctccgggtttgtaatagctattggagcagagaacatccgtctctgcaatctgcagaagacgtggacgccctgctgttgggaatggcttctcagatagccgagcgggaagaccatgtgctcgtggaagacgttagagacttttggcctggcccactgaaattctccagaacagatcacctggcgtcttgcctgcagcggggacgggatctgggactcccaagctatactaaagccagagctgccctcggcctgtctcccatcacccggtggcaagatattaaccccgctctgtctaggtcgaatgatacagttttagaagccaccgcggcactttacaatcaggatctcagctggttggaactactgccgggaggactcttggaaagtcacagagaccctggccctttgttttccaccattgtcctcgagcagttcgtgcgactacgcgatggtgaccgttactggttcgagaacacccgaaatggacttttttcgaagaaggagatcgaggaaattagaaacactactctccaggatgtgctggtagctgtcatcaacatcgacccgagcgctctgcagccaaatgtttttgtgtggcacaaaggcgacccttgcccccagccgagacagctgagtacagaaggactccctgcatgcgcccctagcgtcgtgagggactactttgagggctctggttttgggttcggagttacaatcggaaccctgtgctgttttcccttggtgagtctgctttcggcctggatcgtggccagacttagaatgcgcaacttcaagaggctgcagggacaggatagacagagtattgtatccgagaagttagtgggcggaatggaagcccttgaatggcaaggccataaagagccatgccgccctgtcctggtgtatttacagccaggacaaattcgagtggtggacggcaggctcaccgtcctgcgaactatccagctgcagcccccacagaaagtcaattttgtgctcagttcaaatcgcggaagacgtaccctgctcctgaaaatcccaaaggaatacgatctggtgctcttgttcaacttggaggaggagcgccaagcacttgtggagaatctccgaggagcccttaaggagagtggtttgagcatccaggaatgggagttaagggaacaagagctgatgagagctgccgtgacacgcgagcaacgcagacacctgcttgaaacatttttccgccacctgttcagccaagtgcttgacatcaaccaggctgacgcagggactctgccactggattcctcacagaaggtgagggaagctcttacatgcgagctcagccgcgctgagttcgccgagagcctcgggcttaaacctcaggacatgtttgtggagagcatgttctccttggcagataaagacgggaacggatacctgtcattcagagaattcttggatattcttgttgtatttatgaaaggtagtcctgaagagaaatctcgcctgatgttccggatgtatgatttcgatggaaatggtttgatctctaaagatgaattcattcggatgttgagaagcttcatcgagatatctaacaactgtctttctaaagcacagctggctgaagtggtggaatctatgtttagggagagtggattccaggacaaagaagagctaacatgggaagatttccatttcatgctgagagatcacaatagcgagctgagattcacacagttgtgcgttaaaggggtcgaagtcccagaagtgatcaaggatctctgtaggcgtgcgtcatatatcagccaggatatgatttgtccctccccgcgtgtgagcgcccgatgcagccgcagcgatatcgagactgagttgaccccccaaagactccagtgccctatggataccgaccctcctcaagaaatacgcaggagattcggcaagaaagtcaccagctttcaaccactgctgttcacagaagcccaccgggaaaaattccagagatcttgcttgcaccaaaccgtgcagcagttcaagcggtttattgagaattacaggaggcacattggctgtgtagcagtgttctacgctatcgccggtggattattcctggaacgggcatactattacgctttcgcagctcaccataccgggataacagacactacacgcgtaggaatcattctcagccgagggacagcagcctccatctccttcatgttcagttatatcctccttacaatgtgtaggaatctcattacatttcttcgcgaaaccttcctcaacaggtatgtgccatttgacgccgcagtggactttcataggctgatagcctccacagcaatcgtgctcactgtcttgcactcagtcggccacgtggtgaacgtttatctgttttcaatcagccccttgtccgtgctgagttgcctttttccgggactctttcatgatgacggttcggaactcccacagaagtattactggtggtttttccagactgtaccgggactaacaggagtggtgttactcctcatactggctatcatgtatgtgttcgcgagtcaccactttaggcgcaggtcctttagaggcttttggcttacccaccacctttacatcttgttatatgtcttgttaattatccatggttcttttgcccttatacaactgcctaggttccacatcttctttctcgtgcccgctatcatttacggaggagacaaactggtatcactttccagaaagaaggtggaaattagcgtggttaaggctgagctgcttcccagcggtgttacgcacctgaggttccaaaggccacagggattcgaatacaagagtggccagtgggtgaggatagcctgtctggcgctaggcacaactgagtatcatccttttacccttacctccgctccccacgaggataccctgtccttacacatcagggctgccggaccctggaccacccgcctgcgagagatttactcagcgccaacgggggaccgctgcgctcgttaccctaagctgtacctcgacggacccttcggagaagggcatcaggaatggcataaattcgaggtgtcagtattagtggggggtgggattggtgtgaccccttttgcatctatcctcaaggatttggtctttaaatccagcgtgtcctgccaggtgttttgtaaaaagatttactttatttgggtgactcggacacagcggcagttcgagtggctggccgacattattcgggaggtagaagagaacgaccatcaggatctggtgagcgtgcacatatatattacccagttagccgagaaatttgatttaaggactaccatgctgtatatctgcgaaagacacttccagaaggtgctgaatcggtctctcttcacgggactgagatccatcacccactttggccgtcctccgttcgaaccgtttttcaactctctgcaggaggttcacccccaagtaagaaagattggggttttctcatgcggtccgcctggaatgacaaagaacgtagagaaagcctgtcagcttatcaacagacaggatcgtacccactttagtcatcattacgagaatttctag

SEQ ID NO: 252166 - DNA, 132 bp, Artificial Sequence
  derived and/or modified sequence
atggggttctgcttagctctggcctggactctgctggtgggagcttggacgccactgggcgctcagaaccccattagctgggaagtccagcgctttgacggttggtacaacaatctaatggaacaccgatag

SEQ ID NO: 252167 - DNA, 4656 bp, Artificial Sequence
  derived and/or modified sequence
atgggcttctgcctggccctggcctggaccctgctggtgggcgcctggacccccctgggcgcccagaaccccatcagctgggaggtgcagagattcgacggctggtacaacaacctgatggagcacagatggggcagcaagggcagcagactgcagagactggtgcccgccagctacgccgacggcgtgtaccagcccctgggcgagccccacctgcccaaccccagagacctgagcaacaccatcagcagaggccccgccggcctggccagcctgagaaacagaaccgtgctgggcgtgttcttcggctaccacgtgctgagcgacctggtgagcgtggagacccccggctgccccgccgagttcctgaacatcagaatcccccccggcgaccccatgttcgaccccgaccagagaggcgacgtggtgctgcccttccagagaagcagatgggaccccgagaccggcagaagccccagcaaccccagagaccccgccaaccaggtgaccggctggctggacggcagcgccatctacggcagcagccacagctggagcgacgccctgagaagcttcagcagaggccagctggccagcggccccgaccccgccttccccagagacagccagaaccccctgctgatgtgggccgcccccgaccccgccaccggccagaacggccccagaggcctgtacgccttcggcgccgagagaggcaacagagagcccttcctgcaggccctgggcctgctgtggttcagataccacaacctgtgggcccagagactggccagacagcaccccgactgggaggacgaggagctgttccagcacgccagaaagagagtgatcgccacctaccagaacatcgccgtgtacgagtggctgcccagcttcctgcagaagaccctgcccgagtacaccggctacagacccttcctggaccccagcatcagcagcgagttcgtggccgccagcgagcagttcctgagcaccatggtgccccccggcgtgtacatgagaaacgccagctgccacttccagggcgtgatcaacagaaacagcagcgtgagcagagccctgagagtgtgcaacagctactggagcagagagcaccccagcctgcagagcgccgaggacgtggacgccctgctgctgggcatggccagccagatcgccgagagagaggaccacgtgctggtggaggacgtgagagacttctggcccggccccctgaagttcagcagaaccgaccacctggccagctgcctgcagagaggcagagacctgggcctgcccagctacaccaaggccagagccgccctgggcctgagccccatcaccagatggcaggacatcaaccccgccctgagcagaagcaacgacaccgtgctggaggccaccgccgccctgtacaaccaggacctgagctggctggagctgctgcccggcggcctgctggagagccacagagaccccggccccctgttcagcaccatcgtgctggagcagttcgtgagactgagagacggcgacagatactggttcgagaacaccagaaacggcctgttcagcaagaaggagatcgaggagatcagaaacaccaccctgcaggacgtgctggtggccgtgatcaacatcgaccccagcgccctgcagcccaacgtgttcgtgtggcacaagggcgacccctgcccccagcccagacagctgagcaccgagggcctgcccgcctgcgcccccagcgtggtgagagactacttcgagggcagcggcttcggcttcggcgtgaccatcggcaccctgtgctgcttccccctggtgagcctgctgagcgcctggatcgtggccagactgagaatgagaaacttcaagagactgcagggccaggacagacagagcatcgtgagcgagaagctggtgggcggcatggaggccctggagtggcagggccacaaggagccctgcagacccgtgctggtgtacctgcagcccggccagatcagagtggtggacggcagactgaccgtgctgagaaccatccagctgcagcccccccagaaggtgaacttcgtgctgagcagcaacagaggcagaagaaccctgctgctgaagatccccaaggagtacgacctggtgctgctgttcaacctggaggaggagagacaggccctggtggagaacctgagaggcgccctgaaggagagcggcctgagcatccaggagtgggagctgagagagcaggagctgatgagagccgccgtgaccagagagcagagaagacacctgctggagaccttcttcagacacctgttcagccaggtgctggacatcaaccaggccgacgccggcaccctgcccctggacagcagccagaaggtgagagaggccctgacctgcgagctgagcagagccgagttcgccgagagcctgggcctgaagccccaggacatgttcgtggagagcatgttcagcctggccgacaaggacggcaacggctacctgagcttcagagagttcctggacatcctggtggtgttcatgaagggcagccccgaggagaagagcagactgatgttcagaatgtacgacttcgacggcaacggcctgatcagcaaggacgagttcatcagaatgctgagaagcttcatcgagatcagcaacaactgcctgagcaaggcccagctggccgaggtggtggagagcatgttcagagagagcggcttccaggacaaggaggagctgacctgggaggacttccacttcatgctgagagaccacaacagcgagctgagattcacccagctgtgcgtgaagggcgtggaggtgcccgaggtgatcaaggacctgtgcagaagagccagctacatcagccaggacatgatctgccccagccccagagtgagcgccagatgcagcagaagcgacatcgagaccgagctgaccccccagagactgcagtgccccatggacaccgaccccccccaggagatcagaagaagattcggcaagaaggtgaccagcttccagcccctgctgttcaccgaggcccacagagagaagttccagagaagctgcctgcaccagaccgtgcagcagttcaagagattcatcgagaactacagaagacacatcggctgcgtggccgtgttctacgccatcgccggcggcctgttcctggagagagcctactactacgccttcgccgcccaccacaccggcatcaccgacaccaccagagtgggcatcatcctgagcagaggcaccgccgccagcatcagcttcatgttcagctacatcctgctgaccatgtgcagaaacctgatcaccttcctgagagagaccttcctgaacagatacgtgcccttcgacgccgccgtggacttccacagactgatcgccagcaccgccatcgtgctgaccgtgctgcacagcgtgggccacgtggtgaacgtgtacctgttcagcatcagccccctgagcgtgctgagctgcctgttccccggcctgttccacgacgacggcagcgagctgccccagaagtactactggtggttcttccagaccgtgcccggcctgaccggcgtggtgctgctgctgatcctggccatcatgtacgtgttcgccagccaccacttcagaagaagaagcttcagaggcttctggctgacccaccacctgtacatcctgctgtacgtgctgctgatcatccacggcagcttcgccctgatccagctgcccagattccacatcttcttcctggtgcccgccatcatctacggcggcgacaagctggtgagcctgagcagaaagaaggtggagatcagcgtggtgaaggccgagctgctgcccagcggcgtgacccacctgagattccagagaccccagggcttcgagtacaagagcggccagtgggtgagaatcgcctgcctggccctgggcaccaccgagtaccaccccttcaccctgaccagcgccccccacgaggacaccctgagcctgcacatcagagccgccggcccctggaccaccagactgagagagatctacagcgcccccaccggcgacagatgcgccagataccccaagctgtacctggacggccccttcggcgagggccaccaggagtggcacaagttcgaggtgagcgtgctggtgggcggcggcatcggcgtgacccccttcgccagcatcctgaaggacctggtgttcaagagcagcgtgagctgccaggtgttctgcaagaagatctacttcatctgggtgaccagaacccagagacagttcgagtggctggccgacatcatcagagaggtggaggagaacgaccaccaggacctggtgagcgtgcacatctacatcacccagctggccgagaagttcgacctgagaaccaccatgctgtacatctgcgagagacacttccagaaggtgctgaacagaagcctgttcaccggcctgagaagcatcacccacttcggcagaccccccttcgagcccttcttcaacagcctgcaggaggtgcacccccaggtgagaaagatcggcgtgttcagctgcggcccccccggcatgaccaagaacgtggagaaggcctgccagctgatcaacagacaggacagaacccacttcagccaccactacgagaacttctag

SEQ ID NO: 252168 - DNA, 132 bp, Artificial Sequence
  derived and/or modified sequence
atgggcttctgcctggccctggcctggaccctgctggtgggcgcctggacccccctgggcgcccagaaccccatcagctgggaggtgcagagattcgacggctggtacaacaacctgatggagcacagatag

SEQ ID NO: 252169 - DNA, 5738 bp, Artificial Sequence
  derived and/or modified sequence
gtggctgagccgagccgggccgtgccttcccctcctcacccccagccccgcccgtcccggcgcagagctgcagaggcaccggacgagagagggctccgcgggcccagctggcagccaggccggagacaagttgcagtcccgggctctggtgacgccgtggccgcagctggaagaggaaaacaaggatcagattggagaagtgatttatctaagatcccacagtggactggcagcagcactgagacctcagcctagtctcctgatccccaagcagggccctgcctaaggaacacactctgcagagtgctgggccaaagcagggttttccaactaatcttagaaggtaaagtccatgaagggtctccattttgggacattctaatccctgagcccctattattttcatcatgggcttctgcctggctctagcatggacacttctggttggggcatggacccctctgggagctcagaaccccatttcgtgggaggtgcagcgatttgatgggtggtacaacaacctcatggagcacagatggggcagcaaaggctcccggctgcagcgcctggtcccagccagctatgcagatggcgtgtaccagcccttgggagaaccccacctgcccaacccccgagaccttagcaacaccatctcaaggggccctgcagggctggcctccctgagaaaccgcacagtgttgggggtcttctttggctatcacgtgctttcagacctggtgagcgtggaaactcccggctgccccgccgagttcctcaacattcgcatcccgcccggagaccccatgttcgaccccgaccagcgcggggacgtggtgctgcccttccagagaagccgctgggaccccgagaccggacggagtcccagcaatccccgggacccggccaaccaggtgacgggctggctggacggcagcgccatctatggttcctcgcattcctggagcgacgcgctgcggagcttctccaggggacagctggcgtcggggcccgaccccgcttttccccgagactcgcagaaccccctgctcatgtgggcggcgcccgaccccgccaccgggcagaacgggccccgggggctgtacgccttcggggcagagagagggaaccgggaacccttcctgcaggcgctgggcctgctctggttccgctaccacaacctgtgggcgcagaggctggcccgccagcacccagactgggaggacgaggagctgttccagcacgcacgcaagagggtcatcgccacctaccagaacatcgctgtgtatgagtggctgcccagcttcctgcagaaaacactcccggagtatacaggataccggccatttctggaccccagcatctcctcagagttcgtggcggcctctgagcagttcctgtccaccatggtgccccctggcgtctacatgagaaatgccagctgccacttccagggggtcatcaatcggaactcaagtgtctccagagctctccgggtctgcaacagctactggagccgtgagcacccaagcctacaaagtgctgaagatgtggatgcactgctgctgggcatggcctcccagatcgcagagcgagaggaccatgtgttggttgaagatgtgcgggatttctggcctgggccactgaagttttcccgcacagaccacctggccagctgcctgcagcggggccgggatctgggcctgccctcttacaccaaggccagggcagcactgggcttgtctcccattacccgctggcaggacatcaaccctgcactctcccggagcaatgacactgtactggaggccacagctgccctgtacaaccaggacttatcctggctagagctgctccctgggggactcctggagagccaccgggaccctggacctctgttcagcaccatcgtccttgaacaatttgtgcggctacgggatggtgaccgctactggtttgagaacaccaggaatgggctgttctccaagaaggagattgaagaaatccgaaataccaccctgcaggacgtgctggtcgctgttatcaacattgaccccagtgctctgcagcccaatgtctttgtctggcataaaggagacccctgtccgcagccgagacagctcagcactgaaggcctgccagcgtgtgctccctctgttgttcgtgactattttgagggcagtggatttggcttcggggtcaccatcgggaccctctgttgcttccctttggtgagcctgctcagtgcctggattgttgcccggctccggatgagaaatttcaagaggctccagggccaggaccgccagagcatcgtgtctgagaagctcgtgggaggcatggaagctttggaatggcaaggccacaaggagccctgccggcccgtgcttgtgtacctgcagcccgggcagatccgtgtggtagatggcaggctcaccgtgctccgcaccatccagctgcagcctccacagaaggtcaacttcgtcctgtccagcaaccgtggacgccgcactctgctgctcaagatccccaaggagtatgacctggtgctgctgtttaacttggaggaagagcggcaggcgctggtggaaaatctccggggagctctgaaggagagcgggttgagcatccaggagtgggagctgcgggagcaggagctgatgagagcagctgtgacacgggagcagcggaggcacctcctggagacctttttcaggcaccttttctcccaggtgctggacatcaaccaggccgacgcagggaccctgcccctggactcctcccagaaggtgcgggaggccctgacctgtgagctgagcagggccgagtttgccgagtccctgggcctcaagccccaggacatgtttgtggagtccatgttctctctggctgacaaggatggcaatggctacctgtccttccgagagttcctggacatcctggtggtcttcatgaaaggctctcctgaggaaaagtctcgccttatgttccgcatgtacgactttgatgggaatggcctcatttccaaggatgagttcatcaggatgctgagatccttcatcgagatctccaacaactgcctgtccaaggcccagctggctgaggtggtggagtccatgttccgggagtcgggattccaggacaaggaggaactgacatgggaagattttcacttcatgctgcgggaccacaatagcgagctccgcttcacgcagctctgtgtcaaaggggtggaggtgcctgaagtcatcaaggacctctgccggcgagcctcctacatcagccaggatatgatctgtccctctcccagagtgagtgcccgctgttcccgcagcgacattgagactgagttgacacctcagagactgcagtgccccatggacacagaccctccccaggagattcggcggaggtttggcaagaaggtaacgtcattccagcccttgctgttcactgaggcgcaccgagagaagttccaacgcagctgtctccaccagacggtgcaacagttcaagcgcttcattgagaactaccggcgccacatcggctgcgtggccgtgttctacgccatcgctggggggcttttcctggagagggcctactactacgcctttgccgcacatcacacgggcatcacagacaccacccgcgtgggaatcatcctgtcgcggggcacagcagccagcatctctttcatgttctcctacatcttgctcaccatgtgccgcaacctcatcaccttcctgcgagaaaccttcctcaaccgctacgtgcccttcgacgccgccgtggacttccatcgcctcattgcctccaccgccatcgtcctcacagtcttacacagtgtgggccatgtggtgaatgtgtacctgttctccatcagccccctcagcgtcctctcttgcctctttcctggcctcttccatgatgatgggtctgagctcccccagaagtattactggtggttcttccagaccgtaccaggcctcacgggggttgtgctgctcctgatcctggccatcatgtatgtctttgcctcccaccacttccgccgccgcagtttccggggcttctggctgacccaccacctctacatcctgctctatgtcctgctcatcatccatggtagctttgccctgatccagctgccccgtttccacatcttcttcctggtcccagcaatcatctatgggggcgacaagctggtgagcctgagccggaagaaggtggagatcagcgtggtgaaggcggagctgctgccctcaggagtgacccacctgcggttccagcggccccagggctttgagtacaagtcagggcagtgggtgcggatcgcttgcctggctctggggaccaccgagtaccaccccttcacactgacctctgcgccccatgaggacacgcttagcctgcacatccgggcagcagggccctggaccactcgcctcagggagatctactcagccccgacgggtgacagatgtgccagatacccaaagctgtaccttgatggaccatttggagagggccaccaggagtggcataagtttgaggtgtcagtgttagtgggagggggcattggggtcaccccttttgcctccatcctcaaagacctggtcttcaagtcatccgtcagctgccaagtgttctgtaagaagatctacttcatctgggtgacgcggacccagcgtcagtttgagtggctggctgacatcatccgagaggtggaggagaatgaccaccaggacctggtgtctgtgcacatctacatcacccagctggctgagaagttcgacctcaggaccactatgctgtacatctgtgagcggcacttccagaaggttctgaaccggagtctattcacaggcctgcgctccatcacccactttggccgtcccccctttgagcccttcttcaactccctgcaggaggtccacccccaggtccggaagatcggggtgtttagctgtggcccccctggcatgaccaagaatgtggaaaaggcctgtcagctcatcaacaggcaggaccggactcacttctcccaccattatgagaacttctaggcccctgcccgggggttctgcccactgcccagttgagcagaggtttgagcccacacctcacctctgttcttcctatttctggctgcctcagccttctctgatttcccacctcccaaccttgttccaggtggccatagtcagtcaccatgtgtgggctcagggacccccaggaccaggatgtgtctcagcctggagaaatggtgggggggcagtgtctagggactagagtgagaagtaggggagctactgatttggggcaaagtgaaacctctgcttccagacttcagaaacaaatctcagaagacaagctgacctgacaagtactatgtgtgtgcatgtctgtatgtgtgttggggcggtgagtgtaaggatgcagtgggagcatggatgctggcatcttagaaccctccctactcccatacctcctcctcttctgggctccccactgtcagacgggctggcaaatgccttgcaggaggtagaggctggacccatggcaagccatttacagaaacccactcggcaccccagtctaacaccacaactaatttcacccaaggttttaagcacgttctttcatcagaccctggcccaatacctatgtatgcaatgctcctcagccctcttctccctgctccagtagtctcccttccaaataaatcacttttctgcctt

SEQ ID NO: 252170 - DNA, 5483 bp, Artificial Sequence
  derived and/or modified sequence
gcagagctgcagaggcaccggacgagagagggctccgcgggcccagctggcagccaggccggagacaagttgcagtcccgggctctggtgacgccgtggccgcagggtctccattttgggacattctaatccctgagcccctattattttcatcatgggcttctgcctggctctagcatggacacttctggttggggcatggacccctctgggagctcagaaccccatttcgtgggaggtgcagcgatttgatgggtggtacaacaacctcatggagcacagatggggcagcaaaggctcccggctgcagcgcctggtcccagccagctatgcagatggcgtgtaccagcccttgggagaaccccacctgcccaacccccgagaccttagcaacaccatctcaaggggccctgcagggctggcctccctgagaaaccgcacagtgttgggggtcttctttggctatcacgtgctttcagacctggtgagcgtggaaactcccggctgccccgccgagttcctcaacattcgcatcccgcccggagaccccatgttcgaccccgaccagcgcggggacgtggtgctgcccttccagagaagccgctgggaccccgagaccggacggagtcccagcaatccccgggacccggccaaccaggtgacgggctggctggacggcagcgccatctatggttcctcgcattcctggagcgacgcgctgcggagcttctccaggggacagctggcgtcggggcccgaccccgcttttccccgagactcgcagaaccccctgctcatgtgggcggcgcccgaccccgccaccgggcagaacgggccccgggggctgtacgccttcggggcagagagagggaaccgggaacccttcctgcaggcgctgggcctgctctggttccgctaccacaacctgtgggcgcagaggctggcccgccagcacccagactgggaggacgaggagctgttccagcacgcacgcaagagggtcatcgccacctaccagaacatcgctgtgtatgagtggctgcccagcttcctgcagaaaacactcccggagtatacaggataccggccatttctggaccccagcatctcctcagagttcgtggcggcctctgagcagttcctgtccaccatggtgccccctggcgtctacatgagaaatgccagctgccacttccagggggtcatcaatcggaactcaagtgtctccagagctctccgggtctgcaacagctactggagccgtgagcacccaagcctacaaagtgctgaagatgtggatgcactgctgctgggcatggcctcccagatcgcagagcgagaggaccatgtgttggttgaagatgtgcgggatttctggcctgggccactgaagttttcccgcacagaccacctggccagctgcctgcagcggggccgggatctgggcctgccctcttacaccaaggccagggcagcactgggcttgtctcccattacccgctggcaggacatcaaccctgcactctcccggagcaatgacactgtactggaggccacagctgccctgtacaaccaggacttatcctggctagagctgctccctgggggactcctggagagccaccgggaccctggacctctgttcagcaccatcgtccttgaacaatttgtgcggctacgggatggtgaccgctactggtttgagaacaccaggaatgggctgttctccaagaaggagattgaagaaatccgaaataccaccctgcaggacgtgctggtcgctgttatcaacattgaccccagtgctctgcagcccaatgtctttgtctggcataaaggagacccctgtccgcagccgagacagctcagcactgaaggcctgccagcgtgtgctccctctgttgttcgtgactattttgagggcagtggatttggcttcggggtcaccatcgggaccctctgttgcttccctttggtgagcctgctcagtgcctggattgttgcccggctccggatgagaaatttcaagaggctccagggccaggaccgccagagcatcgtgtctgagaagctcgtgggaggcatggaagctttggaatggcaaggccacaaggagccctgccggcccgtgcttgtgtacctgcagcccgggcagatccgtgtggtagatggcaggctcaccgtgctccgcaccatccagctgcagcctccacagaaggtcaacttcgtcctgtccagcaaccgtggacgccgcactctgctgctcaagatccccaaggagtatgacctggtgctgctgtttaacttggaggaagagcggcaggcgctggtggaaaatctccggggagctctgaaggagagcgggttgagcatccaggagtgggagctgcgggagcaggagctgatgagagcagctgtgacacgggagcagcggaggcacctcctggagacctttttcaggcaccttttctcccaggtgctggacatcaaccaggccgacgcagggaccctgcccctggactcctcccagaaggtgcgggaggccctgacctgtgagctgagcagggccgagtttgccgagtccctgggcctcaagccccaggacatgtttgtggagtccatgttctctctggctgacaaggatggcaatggctacctgtccttccgagagttcctggacatcctggtggtcttcatgaaaggctctcctgaggaaaagtctcgccttatgttccgcatgtacgactttgatgggaatggcctcatttccaaggatgagttcatcaggatgctgagatccttcatcgagatctccaacaactgcctgtccaaggcccagctggctgaggtggtggagtccatgttccgggagtcgggattccaggacaaggaggaactgacatgggaagattttcacttcatgctgcgggaccacaatagcgagctccgcttcacgcagctctgtgtcaaaggggtggaggtgcctgaagtcatcaaggacctctgccggcgagcctcctacatcagccaggatatgatctgtccctctcccagagtgagtgcccgctgttcccgcagcgacattgagactgagttgacacctcagagactgcagtgccccatggacacagaccctccccaggagattcggcggaggtttggcaagaaggtaacgtcattccagcccttgctgttcactgaggcgcaccgagagaagttccaacgcagctgtctccaccagacggtgcaacagttcaagcgcttcattgagaactaccggcgccacatcggctgcgtggccgtgttctacgccatcgctggggggcttttcctggagagggcctactactacgcctttgccgcacatcacacgggcatcacagacaccacccgcgtgggaatcatcctgtcgcggggcacagcagccagcatctctttcatgttctcctacatcttgctcaccatgtgccgcaacctcatcaccttcctgcgagaaaccttcctcaaccgctacgtgcccttcgacgccgccgtggacttccatcgcctcattgcctccaccgccatcgtcctcacagtcttacacagtgtgggccatgtggtgaatgtgtacctgttctccatcagccccctcagcgtcctctcttgcctctttcctggcctcttccatgatgatgggtctgagctcccccagaagtattactggtggttcttccagaccgtaccaggcctcacgggggttgtgctgctcctgatcctggccatcatgtatgtctttgcctcccaccacttccgccgccgcagtttccggggcttctggctgacccaccacctctacatcctgctctatgtcctgctcatcatccatggtagctttgccctgatccagctgccccgtttccacatcttcttcctggtcccagcaatcatctatgggggcgacaagctggtgagcctgagccggaagaaggtggagatcagcgtggtgaaggcggagctgctgccctcaggagtgacccacctgcggttccagcggccccagggctttgagtacaagtcagggcagtgggtgcggatcgcttgcctggctctggggaccaccgagtaccaccccttcacactgacctctgcgccccatgaggacacgcttagcctgcacatccgggcagcagggccctggaccactcgcctcagggagatctactcagccccgacgggtgacagatgtgccagatacccaaagctgtaccttgatggaccatttggagagggccaccaggagtggcataagtttgaggtgtcagtgttagtgggagggggcattggggtcaccccttttgcctccatcctcaaagacctggtcttcaagtcatccgtcagctgccaagtgttctgtaagaagatctacttcatctgggtgacgcggacccagcgtcagtttgagtggctggctgacatcatccgagaggtggaggagaatgaccaccaggacctggtgtctgtgcacatctacatcacccagctggctgagaagttcgacctcaggaccactatgctgtacatctgtgagcggcacttccagaaggttctgaaccggagtctattcacaggcctgcgctccatcacccactttggccgtcccccctttgagcccttcttcaactccctgcaggaggtccacccccaggtccggaagatcggggtgtttagctgtggcccccctggcatgaccaagaatgtggaaaaggcctgtcagctcatcaacaggcaggaccggactcacttctcccaccattatgagaacttctaggcccctgcccgggggttctgcccactgcccagttgagcagaggtttgagcccacacctcacctctgttcttcctatttctggctgcctcagccttctctgatttcccacctcccaaccttgttccaggtggccatagtcagtcaccatgtgtgggctcagggacccccaggaccaggatgtgtctcagcctggagaaatggtgggggggcagtgtctagggactagagtgagaagtaggggagctactgatttggggcaaagtgaaacctctgcttccagacttcagaaacaaatctcagaagacaagctgacctgacaagtactatgtgtgtgcatgtctgtatgtgtgttggggcggtgagtgtaaggatgcagtgggagcatggatgctggcatcttagaaccctccctactcccatacctcctcctcttctgggctccccactgtcagacgggctggcaaatgccttgcaggaggtagaggctggacccatggcaagccatttacagaaacccactcggcaccccagtctaacaccacaactaatttcacccaaggttttaagcacgttctttcatcagaccctggcccaatacctatgtatgcaatgctcctcagccctcttctccctgctccagtagtctcccttccaaataaatcacttttctgcc

SEQ ID NO: 252171 - DNA, 5158 bp, Artificial Sequence
  derived and/or modified sequence
gtggctgagccgagccgggccgtgccttcccctcctcacccccagccccgcccgtcccggcgcagagctgcagaggcaccggacgagagagggctccgcgggcccagctggcagccaggccggagacaagttgcagtcccgggctctggtgacgccgtggccgcagctggaagaggaaaacaaggatcagattggagaagtgatttatctaagatcccacagtggactggcagcagcactgagacctcagcctagtctcctgatccccaagcagggccctgcctaaggaacacactctgcagagtgctgggccaaagcagggttttccaactaatcttagaaggtaaagtccatgaagggtctccattttgggacattctaatccctgagcccctattattttcatcatgggcttctgcctggctctagcatggacacttctggttggggcatggacccctctgggagctcagaaccccatttcgtgggaggtgcagcgatttgatgggtggtacaacaacctcatggagcacagatggggcagcaaaggctcccggctgcagcgcctggtcccagccagctatgcagatggcgtgtaccagcccttgggagaaccccacctgcccaacccccgagaccttagcaacaccatctcaaggggccctgcagggctggcctccctgagaaaccgcacagtgttgggggtcttctttggctatcacgtgctttcagacctggtgagcgtggaaactcccggctgccccgccgagttcctcaacattcgcatcccgcccggagaccccatgttcgaccccgaccagcgcggggacgtggtgctgcccttccagagaagccgctgggaccccgagaccggacggagtcccagcaatccccgggacccggccaaccaggtgacgggctggctggacggcagcgccatctatggttcctcgcattcctggagcgacgcgctgcggagcttctccaggggacagctggcgtcggggcccgaccccgcttttccccgagactcgcagaaccccctgctcatgtgggcggcgcccgaccccgccaccgggcagaacgggccccgggggctgtacgccttcggggcagagagagggaaccgggaacccttcctgcaggcgctgggcctgctctggttccgctaccacaacctgtgggcgcagaggctggcccgccagcacccagactgggaggacgaggagctgttccagcacgcacgcaagagggtcatcgccacctaccagaacatcgctgtgtatgagtggctgcccagcttcctgcagaaaacactcccggagtatacaggataccggccatttctggaccccagcatctcctcagagttcgtggcggcctctgagcagttcctgtccaccatggtgccccctggcgtctacatgagaaatgccagctgccacttccagggggtcatcaatcggaactcaagtgtctccagagctctccgggtctgcaacagctactggagccgtgagcacccaagcctacaaagtgctgaagatgtggatgcactgctgctgggcatggcctcccagatcgcagagcgagaggaccatgtgttggttgaagatgtgcgggatttctggcctgggccactgaagttttcccgcacagaccacctggccagctgcctgcagcggggccgggatctgggcctgccctcttacaccaaggccagggcagcactgggcttgtctcccattacccgctggcaggacatcaaccctgcactctcccggagcaatgacactgtactggaggccacagctgccctgtacaaccaggacttatcctggctagagctgctccctgggggactcctggagagccaccgggaccctggacctctgttcagcaccatcgtccttgaacaatttgtgcggctacgggatggtgaccgctactggtttgagaacaccaggaatgggctgttctccaagaaggagattgaagaaatccgaaataccaccctgcaggacgtgctggtcgctgttatcaacattgaccccagtgctctgcagcccaatgtctttgtctggcataaaggagacccctgtccgcagccgagacagctcagcactgaaggcctgccagcgtgtgctccctctgttgttcgtgactattttgagggcagtggatttggcttcggggtcaccatcgggaccctctgttgcttccctttggtgagcctgctcagtgcctggattgttgcccggctccggatgagaaatttcaagaggctccagggccaggaccgccagagcatcgtgtctgagaagctcgtgggaggcatggaagctttggaatggcaaggccacaaggagccctgccggcccgtgcttgtgtacctgcagcccgggcagatccgtgtggtagatggcaggctcaccgtgctccgcaccatccagctgcagcctccacagaaggtcaacttcgtcctgtccagcaaccgtggacgccgcactctgctgctcaagatccccaaggagtatgacctggtgctgctgtttaacttggaggaagagcggcaggcgctggtggaaaatctccggggagctctgaaggagagcgggttgagcatccaggagtgggagctgcgggagcaggagctgatgagagcagctgtgacacgggagcagcggaggcacctcctggagacctttttcaggcaccttttctcccaggtgctggacatcaaccaggccgacgcagggaccctgcccctggactcctcccagaaggtgcgggaggccctgacctgtgagctgagcagggccgagtttgccgagtccctgggcctcaagccccaggacatgtttgtggagtccatgttctctctggctgacaaggatggcaatggctacctgtccttccgagagttcctggacatcctggtggtcttcatgaaaggctctcctgaggaaaagtctcgccttatgttccgcatgtacgactttgatgggaatggcctcatttccaaggatgagttcatcaggatgctgagatccttcatcgagatctccaacaactgcctgtccaaggcccagctggctgaggtggtggagtccatgttccgggagtcgggattccaggacaaggaggaactgacatgggaagattttcacttcatgctgcgggaccacaatagcgagctccgcttcacgcagctctgtgtcaaaggggtggaggtgcctgaagtcatcaaggacctctgccggcgagcctcctacatcagccaggatatgatctgtccctctcccagagtgagtgcccgctgttcccgcagcgacattgagactgagttgacacctcagagactgcagtgccccatggacacagaccctccccaggagattcggcggaggtttggcaagaaggtaacgtcattccagcccttgctgttcactgaggcgcaccgagagaagttccaacgcagctgtctccaccagacggtgcaacagttcaagcgcttcattgagaactaccggcgccacatcggctgcgtggccgtgttctacgccatcgctggggggcttttcctggagagggcctactactacgcctttgccgcacatcacacgggcatcacagacaccacccgcgtgggaatcatcctgtcgcggggcacagcagccagcatctctttcatgttctcctacatcttgctcaccatgtgccgcaacctcatcaccttcctgcgagaaaccttcctcaaccgctacgtgcccttcgacgccgccgtggacttccatcgcctcattgcctccaccgccatcgtcctcacagtcttacacagtgtgggccatgtggtgaatgtgtacctgttctccatcagccccctcagcgtcctctcttgcctctttcctggcctcttccatgatgatgggtctgagctcccccagaagtattactggtggttcttccagaccgtaccaggcctcacgggggttgtgctgctcctgatcctggccatcatgtatgtctttgcctcccaccacttccgccgccgcagtttccggggcttctggctgacccaccacctctacatcctgctctatgtcctgctcatcatccatggtagctttgccctgatccagctgccccgtttccacatcttcttcctggtcccagcaatcatctatgggggcgacaagctggtgagcctgagccggaagaaggtggagatcagcgtggtgaaggcggagctgctgccctcaggagtgacccacctgcggttccagcggccccagggctttgagtacaagtcagggcagtgggtgcggatcgcttgcctggctctggggaccaccgagtaccaccccttcacactgacctctgcgccccatgaggacacgcttagcctgcacatccgggcagcagggccctggaccactcgcctcagggagatctactcagccccgacgggtgacagatgtgccagatacccaaagctgtaccttgatggaccatttggagagggccaccaggagtggcataagtttgaggtgtcagtgttagtgggagggggcattggggtcaccccttttgcctccatcctcaaagacctggtcttcaagtcatccgtcagctgccaagtgttctgtaagaagatctacttcatctgggtgacgcggacccagcgtcagtttgagtggctggctgacatcatccgagaggtggaggagaatgaccaccaggacctggtgtctgtgcacatctacatcacccagctggctgagaagttcgacctcaggaccactatgctgtacatctgtgagcggcacttccagaaggttctgaaccggagtctattcacaggcctgcgctccatcacccactttggccgtcccccctttgagcccttcttcaactccctgcaggaggtccacccccaggtccggaagatcggggtgtttagctgtggcccccctggcatgaccaagaatgtggaaaaggcctgtcagctcatcaacaggcaggaccggactcacttctcccaccattatgagaacttctaggcccctgcccgggggttctgcccactgttcttcctatttctggctgcctcagccttctctgatttcccacctcccaaccttgttccaggtggcca

SEQ ID NO: 252172 - DNA, 436 bp, Artificial Sequence
  derived and/or modified sequence
agagagggctccgcgggcccagctggcagccaggccggagacaagttgcagtcccgggctctggtgacgccgtggccgcagctggaagaggaaaacaaggatcagattggagaagtgatttatctaagatcccacagtggactggcagcagcactgagacctcagcctagtctcctgatccccaagcagggccctgcctaaggaacacactctgcagagtgctgggccaaagcagggttttccaactaatcttagaagggtctccattttgggacattctaatccctgagcccctattattttcatcatgggcttctgcctggctctagcatggacacttctggttggggcatggacccctctgggagctcagaaccccatttcgtgggaggtgcagcgatttgatgggtggtacaacaacctcatggagcacaga

SEQ ID NO: 252173 - DNA, 82 bp, Artificial Sequence
  derived and/or modified sequence
gcaaaacacaaacaacgccataaaaaactgggcaaaggatatgaacagacatttttcaaaacaaaacatacttatggccaac

SEQ ID NO: 252174 - protein, 506 aa, Artificial Sequence
  derived and/or modified sequence
MEDHQHVPIDIQTSKLLDWLVDRRHCSLKWQSLVLTIREKINAAIQDMPESEEIAQLLSGSYIHYFHCLRILDLLKGTEASTKNIFGRYSSQRMKDWQEIIALYEKDNTYLVELSSLLVRNVNYEIPSLKKQIAKCQQLQQEYSRKEEECQAGAAEMREQFYHSCKQYGITGENVRGELLALVKDLPSQLAEIGAAAQQSLGEAIDVYQASVGFVCESPTEQVLPMLRFVQKRGNSTVYEWRTGTEPSVVERPHLEELPEQVAEDAIDWGDFGVEAVSEGTDSGISAEAAGIDWGIFPESDSKDPGGDGIDWGDDAVALQITVLEAGTQAPEGVARGPDALTLLEYTETRNQFLDELMELEIFLAQRAVELSEEADVLSVSQFQLAPAILQGQTKEKMVTMVSVLEDLIGKLTSLQLQHLFMILASPRYVDRVTEFLQQKLKQSQLLALKKELMVQKQQEALEEQAALEPKLDLLLEKTKELQKLIEADISKRYSGRPVNLMGTSL

SEQ ID NO: 252175 - DNA, 1521 bp, Artificial Sequence
  derived and/or modified sequence
atggaggaccaccagcacgtacccatcgatatccagacctctaaactgctggactggttagtggaccgtcggcactgcagccttaagtggcagagtttagtacttacaatcagagaaaagatcaatgccgccattcaggacatgcccgagtctgaggagatcgctcaactccttagcggatcatacattcactactttcattgcctgaggatcctggatttgttgaagggcacagaggcttccaccaaaaacatcttcggccggtatagtagtcaacggatgaaagattggcaagagataatagcactttacgaaaaggacaacacatatcttgtggagctgtcctcactcctcgtaagaaacgtcaactatgagattcccagcctgaaaaaacagatcgcgaagtgtcagcagttgcagcaggaatatagccgtaaagaagaagagtgccaagccggcgcggctgagatgagggaacagttctaccatagctgtaagcaatatggcatcacaggagagaacgtgcgcggcgaactcctcgccttggtgaaggatttaccttcgcagttggccgagatcggggcggccgcccagcagtctctcggggaggcaattgacgtgtatcaggcctcagtgggcttcgtttgtgagagtcctacagaacaagtattgccaatgctcaggttcgtgcaaaagagaggaaacagtacagtctatgagtggcggactggcacggaaccctctgttgtcgagcgcccacacctggaggagttgcccgagcaggtggctgaggacgccatcgattggggggactttggcgtggaggcagttagcgagggaaccgattctggcatcagtgcagaagctgccggcatcgactggggcatctttcccgagtcagattctaaagaccctgggggggatggcatcgactggggtgatgacgcagtcgccttacagattacagtactagaagcagggacacaggcccccgagggagtagcacggggacctgatgctctcacactgttggagtacacggagacgcgaaatcagttcctggacgagctcatggagttggagatcttcctagcacagcgagccgtcgaactctccgaagaagcggacgtacttagtgtgtcccagtttcagctggccccggcaatcttgcagggacagacaaaggaaaagatggttaccatggtgagcgtgctggaggatctgatcggaaaattgacttctctgcagctgcagcacctgtttatgattttggcgagtccgcgctacgtcgatagagtgacagagtttctccaacagaagctgaaacagtctcagctgcttgccttaaagaaggaactaatggtacagaagcagcaagaagctcttgaggagcaggctgccttggagcctaagttggacctgcttcttgagaagacgaaggagttgcagaaattgatagaagcggacattagcaagaggtactccggacggcccgtcaacctgatgggcacgtccctgtag

SEQ ID NO: 252176 - DNA, 1521 bp, Artificial Sequence
  derived and/or modified sequence
atggaggaccaccagcacgtgcccatcgacatccagaccagcaagctgctggactggctggtggacagaagacactgcagcctgaagtggcagagcctggtgctgaccatccgggagaagatcaatgctgccatccaggacatgcctgagagcgaggagatcgcccagctgctgagcggcagctacatccactacttccactgcctgcgcatcctggacctgctgaagggcacagaggccagcaccaagaacatcttcggccgctacagcagccagaggatgaaggactggcaggagatcatcgccctgtatgagaaggacaacacctacctggtggagctgagcagcctgctggtgagaaatgtgaactatgagatccccagcctgaagaagcagatcgccaagtgccagcagctgcagcaggagtacagcaggaaggaggaggagtgccaggccggggctgctgagatgagggagcagttctaccacagctgcaagcagtatggcatcactggagaaaatgtgcggggggagctgctggccctggtgaaggacctgcccagccagctggccgagattggagctgctgcccagcagagcctgggggaggccattgatgtgtaccaggcctctgtgggctttgtgtgtgagagccccacagagcaggtgctgcccatgctgcgctttgtgcagaagaggggcaacagcacagtgtatgagtggaggactggaacagagcccagcgtggtggagcggccccacctggaggagctgcctgagcaggtggccgaggatgccatcgactggggagactttggagtggaggccgtgtctgagggcacagattctggcatctctgctgaggccgccggcatcgactggggcatcttccctgagagtgacagcaaggaccctggaggagatggcatcgactggggagatgatgctgtggccctgcagatcaccgtgctggaggccggcacccaggcccctgagggcgtggcccggggcccagatgccctgaccctgctggagtacacagagaccaggaaccagttcctggatgagctgatggagctggagatcttcctggcccagagagctgtggagctgtctgaggaggctgatgtgctgtctgtgtcccagttccagctggccccagccatcctgcagggccagaccaaggagaagatggtgaccatggtgtctgtgctggaggacctgattggcaagctgaccagcctgcagctgcagcacctgttcatgatcctggccagccccaggtatgtggacagagtgacagagttcctgcagcagaagctgaagcagagccagctgctggccctgaagaaggagctgatggtgcagaagcagcaggaggccctggaggagcaggccgccctggagcccaagctggacctgctgctggagaagaccaaggagctgcagaagctgattgaggccgacatcagcaagcgctacagcggccggcctgtgaacctgatgggcaccagcctgtag

SEQ ID NO: 252177 - DNA, 1521 bp, Artificial Sequence
  derived and/or modified sequence
atggaggaccaccagcacgtgcccatcgacatccagaccagcaagctgcttgactggctggtggacaggcgccattgctctctcaaatggcagagtttggtgctcacgattagggagaagatcaatgcggctatacaggacatgcctgagagtgaggaaattgcacaattgctgtccggcagctatattcactatttccattgtctgcgaattcttgacttgctgaaggggaccgaggcttcaaccaaaaacatctttggtcggtacagttcccagaggatgaaggactggcaggaaataatcgcactttacgaaaaggataatacatacctcgtggagctttcctccctgctggttcgaaatgttaactacgagatacctagcctcaaaaagcagattgcaaaatgtcaacaactgcagcaggagtacagcagaaaagaagaagaatgccaagccggggccgccgaaatgcgagaacagttctaccattcctgcaagcagtacgggatcactggtgagaacgtgcggggagagttactggctctggtcaaggatctgccatcccagctcgcggagataggagccgctgcacagcagagtctgggggaggctatcgacgtctaccaagcctctgtgggatttgtctgcgaatcccctactgaacaagtgttacccatgctgcgattcgtccagaaacgaggcaacagcaccgtttacgagtggagaaccggtactgagccttcagtggtggaacgaccccacctggaggagctacctgaacaggtggccgaagacgccattgattggggagacttcggggtggaagccgtgtccgaagggaccgacagcggaatatccgctgaagcggctggtattgattggggtattttccccgaatctgattcaaaggacccgggaggggacggcatagactggggggatgatgcggttgcgttgcagattaccgtcttggaagccgggactcaggctcctgagggagtggccaggggccctgatgcactaacactgctggaatacaccgagacccgtaaccagttcctggacgagttaatggagcttgagatttttctagcccaaagagccgtggagctgagtgaggaagccgatgtactgtcagtatctcagtttcagttggctcctgccatcctgcaaggacaaactaaggaaaagatggtaactatggtgtcggtgcttgaagatctgataggcaagttaacaagcctgcaactgcagcatttgttcatgatcttggcgagtccgcggtatgtggaccgggtgaccgagttcctgcagcagaagctgaaacagtctcagctgctggccctgaagaaggagctaatggtgcaaaaacagcaggaagccctagaggaacaggctgctctggaaccaaagctagacctattgctcgagaagaccaaagaattacaaaagctgattgaggccgacatctctaaacgatactctgggcgtccggtgaatctgatgggcacctctctgtag

SEQ ID NO: 252178 - DNA, 1521 bp, Artificial Sequence
  derived and/or modified sequence
atggaggatcatcaacacgtgcctattgacatacagacatctaagcttctggactggctcgtcgatcgtaggcactgttcgctgaaatggcagtctctggtactcaccattagagagaaaatcaacgctgccatccaggacatgccggagagtgaagaaattgcccagttactgagtggctcctacatccactactttcactgtcttcgtattctagacttactgaaaggcacggaagccagcaccaaaaacatctttgggaggtactctagccagagaatgaaggactggcaggaaatcatagcactgtatgaaaaagacaatacatacttggtagagctcagtagccttttggttcggaacgttaattatgaaattccaagtctcaaaaaacaaatagcgaaatgccagcagctgcaacaggagtactccaggaaggaagaggagtgccaggctggcgctgccgagatgagggaacagttttaccacagctgtaagcagtacggaattactggcgagaacgtacgcggagaactccttgctttggtgaaggacttgccatcacagctggccgaaatcggagctgctgctcagcagtcactaggggaggcaatagacgtgtaccaggcttccgttggatttgtgtgcgagagcccaaccgagcaggtgctgcccatgctgcgatttgtgcagaaacggggtaattctactgtctatgagtggagaactggcacagagccatccgtggtcgagagacctcacctcgaggaactcccagagcaagttgcggaagacgctatcgattggggcgacttcggtgttgaggccgttagtgagggaacggactccggcatcagcgctgaggcagccggaatcgattggggtattttccctgagtctgacagcaaagatccgggtggggatgggattgactggggcgacgacgcggtggcacttcagatcactgttctcgaggccggaacccaggctccagaaggggtggcacggggacctgacgcacttaccctcctggaatacacagagactcgcaaccagttcctggacgagctaatggagctggaaatctttttggcccaaagagcggtcgagctgagtgaagaggccgacgttcttagcgtgtcccagtttcaattggctccggcaatcctgcagggccaaacaaaagagaaaatggtcaccatggtgtctgtgttggaagacctcattgggaagctaacctctttgcagctacagcacctatttatgattctggcctccccccgttatgtcgatagagtaaccgagttcctgcagcagaaactgaagcagagccagctcctggccctgaagaaggagctcatggttcagaaacagcaggaagcattggaggagcaagccgctctcgaaccaaagttagatctgcttcttgagaagactaaggagctgcagaagctcatagaggcagacattagcaagagatattccggtcggcctgtgaacctcatgggaacttctctctag

SEQ ID NO: 252179 - DNA, 1884 bp, Artificial Sequence
  derived and/or modified sequence
cggaggctcggccacaacgccactggattggtggtagggcggggcgggccacagtctccagcctgaagcggaagtggaggaaagatggaggaccatcagcacgtgcccatcgacatccagaccagcaagctgctcgattggctggtggacagaaggcactgcagcctgaaatggcagagtctggtgctgacgatccgcgagaagatcaatgctgccatccaggacatgccagagagcgaagagatcgcccagctgctgtctgggtcctacattcactactttcactgcctaagaatcctggaccttctcaaaggcacagaggcctccacgaagaatatttttggccgatactcttcacagcggatgaaggattggcaggagattatagctctgtatgagaaggacaacacctacttagtggaactctctagcctcctggttcggaatgtcaactatgagatcccctcactgaagaagcagattgccaagtgccagcagctgcagcaagaatacagccgcaaggaggaggagtgccaggcaggggctgccgagatgcgggagcagttctaccactcctgcaagcagtatggcatcacgggcgaaaatgtccgaggagaactgctggccctggtgaaggacctgccgagtcagctggctgagattggggcagcggctcagcagtccctgggggaagccattgacgtgtaccaggcgtctgtggggtttgtgtgtgagagccccacagagcaggtgttgccaatgctgcggttcgtgcagaagcggggaaactcaacggtgtacgagtggaggacagggacagagccctctgtggtggaacgaccccacctcgaggagcttcctgagcaggtggcagaagatgcgattgactggggcgactttggggtagaggcagtgtctgaggggactgactctggcatctctgccgaggctgctggaatcgactggggcatcttcccggaatcagattcaaaggatcctggaggtgatgggatagactggggagacgatgctgttgctttgcagatcacagtgctggaagcaggaacccaggctccagaaggtgttgccaggggcccagatgccctgacactgcttgaatacactgagacccggaatcagttccttgatgagctcatggagcttgagatcttcttagcccagagagcagtggagttgagtgaggaggcagatgtcctgtctgtgagccagttccagctggctccagccatcctgcagggccagaccaaagagaagatggttaccatggtgtcagtgctggaggatctgattggcaagcttaccagtcttcagctgcaacacctgtttatgatcctggcctcaccaaggtatgtggaccgagtgactgaattcctccagcaaaagctgaagcagtcccagctgctggctttgaagaaagagctgatggtgcagaagcagcaggaggcacttgaggagcaggcggctctggagcctaagctggacctgctactggagaagaccaaggagctgcagaagctgattgaagctgacatctccaagaggtacagcgggcgccctgtgaacctgatgggaacctctctgtgacaccctccgtgttcttgcctgcccatcttctccgcttttgggatgaagatgatagccagggctgttgttttggggcccttcaaggcaaaagaccaggctgactggaagatggaaagccacaggaaggaagcggcacctgatggtgatcttggcactctccatgttctctacaagaagctgtggtgattggccctgtggtctatcaggcgaaaaccacagattctccttctagttagtatagcggacttaataaaagaggaaaaaactcttgcttcagta

SEQ ID NO: 252180 - DNA, 1521 bp, Artificial Sequence
  derived and/or modified sequence
atggaggaccaccagcacgtgcccatcgacatccagaccagcaagctgctggactggctggtggacagaagacactgcagcctgaagtggcagagcctggtgctgaccatcagagagaagatcaacgccgccatccaggacatgcccgagagcgaggagatcgcccagctgctgagcggcagctacatccactacttccactgcctgagaatcctggacctgctgaagggcaccgaggccagcaccaagaacatcttcggcagatacagcagccagagaatgaaggactggcaggagatcatcgccctgtacgagaaggacaacacctacctggtggagctgagcagcctgctggtgagaaacgtgaactacgagatccccagcctgaagaagcagatcgccaagtgccagcagctgcagcaggagtacagcagaaaggaggaggagtgccaggccggcgccgccgagatgagagagcagttctaccacagctgcaagcagtacggcatcaccggcgagaacgtgagaggcgagctgctggccctggtgaaggacctgcccagccagctggccgagatcggcgccgccgcccagcagagcctgggcgaggccatcgacgtgtaccaggccagcgtgggcttcgtgtgcgagagccccaccgagcaggtgctgcccatgctgagattcgtgcagaagagaggcaacagcaccgtgtacgagtggagaaccggcaccgagcccagcgtggtggagagaccccacctggaggagctgcccgagcaggtggccgaggacgccatcgactggggcgacttcggcgtggaggccgtgagcgagggcaccgacagcggcatcagcgccgaggccgccggcatcgactggggcatcttccccgagagcgacagcaaggaccccggcggcgacggcatcgactggggcgacgacgccgtggccctgcagatcaccgtgctggaggccggcacccaggcccccgagggcgtggccagaggccccgacgccctgaccctgctggagtacaccgagaccagaaaccagttcctggacgagctgatggagctggagatcttcctggcccagagagccgtggagctgagcgaggaggccgacgtgctgagcgtgagccagttccagctggcccccgccatcctgcagggccagaccaaggagaagatggtgaccatggtgagcgtgctggaggacctgatcggcaagctgaccagcctgcagctgcagcacctgttcatgatcctggccagccccagatacgtggacagagtgaccgagttcctgcagcagaagctgaagcagagccagctgctggccctgaagaaggagctgatggtgcagaagcagcaggaggccctggaggagcaggccgccctggagcccaagctggacctgctgctggagaagaccaaggagctgcagaagctgatcgaggccgacatcagcaagagatacagcggcagacccgtgaacctgatgggcaccagcctgtag

SEQ ID NO: 252181 - protein, 250 aa, Artificial Sequence
  derived and/or modified sequence
MAMLRVQPEAQAKVDVFREDLCTKTENLLGSYFPKKISELDAFLKEPALNEANLSNLKAPLDIPVPDPVKEKEKEERKKQQEKEDKDEKKKGEDEDKGPPCGPVNCNEKIVVLLQRLKPEIKDVIEQLNLVTTWLQLQIPRIEDGNNFGVAVQEKVFELMTSLHTKLEGFHTQISKYFSERGDAVTKAAKQPHVGDYRQLVHELDEAEYRDIRLMVMEIRNAYVRRQGQGRGGQRQLSQATHSLTLQARG

SEQ ID NO: 252182 - DNA, 753 bp, Artificial Sequence
  derived and/or modified sequence
atggctatgctgagggtccagcccgaggctcaggcaaaagtagacgtgttccgtgaggatctgtgcaccaagactgaaaaccttctggggagctattttccgaaaaaaatctctgagctcgacgcctttttgaaggaaccagcccttaatgaagctaatttaagtaacctgaaagcacctctggatatccccgtacctgaccctgtaaaggaaaaggaaaaggaagaaagaaagaaacaacaggagaaagaagataaggacgagaaaaagaagggcgaagatgaagacaaggggcctccctgtggcccagtcaactgcaatgaaaagattgtggtgttgctgcagagactgaaacctgagataaaggacgttattgaacagctgaacctggtaactacatggctacagcttcaaatccccagaatcgaagacggaaataatttcggcgtcgccgtccaggagaaggtgtttgaactgatgactagcttacacacgaagctggaaggttttcatacccagatttcaaagtactttagtgaaaggggagacgccgtgactaaggcggccaagcaacctcacgtcggcgattatcgccagttggtgcacgagcttgacgaggcggagtatcgcgacatccgacttatggtaatggaaattagaaacgcctacgtgagacgccagggccagggtcgcggcggccagagacagctgagccaagcaacccattctcttacactgcaggccagagggtag

SEQ ID NO: 252183 - DNA, 753 bp, Artificial Sequence
  derived and/or modified sequence
atggccatgctgcgggtgcagcctgaggcccaggccaaggtggatgtgttccgggaggacctgtgcaccaagacagagaacctgctgggcagctacttccccaagaagatcagcgagctggatgccttcctgaaggagcccgccctgaatgaggccaacctgagcaacctgaaggcccccctggacatccctgtgcctgaccctgtgaaggagaaggagaaggaggagaggaagaagcagcaggagaaggaggacaaggatgagaagaagaagggagaagatgaagataaaggaccaccctgtggccctgtgaactgcaatgagaagatcgtggtgctgctgcagaggctgaagccagagatcaaggatgtgattgagcagctgaacctggtgaccacctggctgcagctgcagatccccagaattgaagatggcaacaactttggagtggccgtgcaggagaaggtgtttgagctgatgaccagcctgcacaccaagctggagggcttccacacccagatcagcaagtacttcagcgagagaggagatgctgtgaccaaggccgccaagcagccccacgtgggggactaccggcagctggtgcatgagctggatgaagctgagtacagagacatccggctgatggtgatggagatcagaaatgcctacgtgcggcggcagggccagggccggggcggccagaggcagctgagccaggccacccacagcctgaccctgcaggcccggggctag

SEQ ID NO: 252184 - DNA, 753 bp, Artificial Sequence
  derived and/or modified sequence
atggccatgctgcgggtgcagcccgaggcccaggccaaggtggacgtgttcagggaggacctgtgcaccaagaccgaaaacctgttagggtcttactttcccaagaaaatctctgagctagacgcctttctgaaggaacccgctctcaacgaagcaaatttgtccaatttaaaagctcccctcgatattcctgtgccggaccctgtaaaggaaaaagagaaggaggagcgcaagaagcagcaggaaaaggaggacaaagacgagaaaaaaaaaggcgaagacgaggataaggggccaccatgcggtcctgtcaattgcaacgaaaaaatagtggtgctgctccaacgtctgaagccggagatcaaggatgtcatcgaacagctgaatctcgtaaccacgtggctgcaattgcagataccgaggattgaagacgggaataactttggcgtagctgtgcaagagaaagtgtttgaacttatgacttctctacacaccaaacttgagggctttcatactcaaattagtaaatacttctccgagagaggggacgcagttacaaaggccgcaaaacagccccatgttggcgattatcggcaattggtgcatgagctcgatgaggcagaataccgagatatacgcctcatggtcatggagatacgcaacgcttacgtgcgacggcaggggcagggaagagggggacagcgtcagctctcccaagctacccatagcctcaccctgcaggcgcggggttag

SEQ ID NO: 252185 - DNA, 753 bp, Artificial Sequence
  derived and/or modified sequence
atggccatgcttcgtgttcaacccgaggcacaagctaaggtggacgtcttccgcgaggatctgtgtaccaaaactgaaaacctgctgggatcctatttcccaaaaaagatttctgaattggacgccttcctgaaggagccagcccttaacgaagccaatcttagcaatcttaaggcccctctggacatacctgtccccgaccctgtgaaggaaaaggagaaagaggaaaggaagaaacaacaggaaaaagaggataaagatgagaaaaagaagggtgaggatgaggacaaaggcccaccctgtggtcctgttaattgcaacgaaaaaattgtggtcctcctccagaggcttaagccagaaattaaggacgttatcgaacagcttaacctggtgacgacctggctgcagctccagattcccaggatcgaggacggcaataactttggagtcgctgtgcaagaaaaagtgttcgagttgatgactagcctccatacaaagctggaaggatttcatacccaaatttcgaagtatttttcagaacggggagacgcggttacaaaagccgctaagcaaccacatgtgggggactatagacagctcgtgcacgaactcgatgaagccgaatatagggacatcaggctcatggtgatggagatccgtaacgcttatgtcaggagacagggccaggggagaggaggtcagcggcagctaagccaggctacccatagcctgacccttcaagccaggggctag

SEQ ID NO: 252186 - DNA, 1136 bp, Artificial Sequence
  derived and/or modified sequence
ttcgctttcccttcgcggtgcccactccactccttgtgcggcgctaggccccccgtcccggtcatggccatgctcagggtccagcccgaggcccaagccaaggtggatgtgtttcgtgaagacctctgtaccaagacagagaacctgctcgggagctatttccccaagaagatttctgagctggatgcatttttaaaggagccagctctcaatgaagccaacttgagcaatctgaaggccccattggacatcccagtgcctgatccagtcaaggagaaagagaaagaggagcggaagaaacagcaggagaaggaagacaaggatgaaaagaagaagggggaggatgaagacaaaggtcctccctgtggcccagtgaactgcaatgaaaagatcgtggtccttctgcagcgcttgaagcctgagatcaaggatgtcattgagcagctcaacctggtcaccacctggttgcagctgcagatacctcggattgaggatggtaacaattttggagtggctgtccaggagaaggtgtttgagctgatgaccagcctccacaccaagctagaaggcttccacactcaaatctctaagtatttctctgagcgtggtgatgcagtgactaaagcagccaagcagccccatgtgggtgattatcggcagctggtgcacgagctggatgaggcagagtaccgggacatccggctgatggtcatggagatccgcaatgcttatgtgaggaggcaagggcagggcaggggtgggcagaggcagctttcccaggccacccactccctgaccctgcaggctaggggttaagggtgacaaagctcagcttctccacaaggctagaaatggggcacagagccactggaggcctctgactgacctctactccctggccctgtaggctgtgttatatgacatcatcctgaagaacttcgagaagctcaagaagcccaggggagaaacaaagggaatgatctattgagagccctctctcccattctgtgatgagtacagcagagaccttcctgctttttactggggactccagattttccccaaacttgcttctgttgagatttttccctcaccttgcctctcaggcacaataaatatagttataccactgccca

SEQ ID NO: 252187 - DNA, 753 bp, Artificial Sequence
  derived and/or modified sequence
atggccatgctgagagtgcagcccgaggcccaggccaaggtggacgtgttcagagaggacctgtgcaccaagaccgagaacctgctgggcagctacttccccaagaagatcagcgagctggacgccttcctgaaggagcccgccctgaacgaggccaacctgagcaacctgaaggcccccctggacatccccgtgcccgaccccgtgaaggagaaggagaaggaggagagaaagaagcagcaggagaaggaggacaaggacgagaagaagaagggcgaggacgaggacaagggccccccctgcggccccgtgaactgcaacgagaagatcgtggtgctgctgcagagactgaagcccgagatcaaggacgtgatcgagcagctgaacctggtgaccacctggctgcagctgcagatccccagaatcgaggacggcaacaacttcggcgtggccgtgcaggagaaggtgttcgagctgatgaccagcctgcacaccaagctggagggcttccacacccagatcagcaagtacttcagcgagagaggcgacgccgtgaccaaggccgccaagcagccccacgtgggcgactacagacagctggtgcacgagctggacgaggccgagtacagagacatcagactgatggtgatggagatcagaaacgcctacgtgagaagacagggccagggcagaggcggccagagacagctgagccaggccacccacagcctgaccctgcaggccagaggctag

SEQ ID NO: 252188 - protein, 342 aa, Artificial Sequence
  derived and/or modified sequence
MPQTCDGTGQMHLGSNCCKNGQTLLQRTCHGVSCCGWWFQAARSILGKGPSAQSLAGWTLESEALRRDMGTWLLACICICTCVCLGVSVTGEGQGPRSRTFTCLTNNILRIDCHWSAPELGQGSSPWLLFTRLLAAHISASCGAVSAPSCCHLRQCSCHLTISPSLSTTACLGGSRSAWWTRSTCPGDTSNISSGHCILTWSISPALEPMTTLLSYELAFKKQEEAWEQAQHRDHIVGVTWLILEAFELDPGFIHEARLRVQMATLEDDVVEEERYTGQWSEWSQPVCFQAPQRQGPLIPPWGWPGNTLVAVSIFLLLTGPTYLLFKLSPRLGWGPTGPVCC

SEQ ID NO: 252189 - protein, 332 aa, Artificial Sequence
  derived and/or modified sequence
MHLGSNCCKNGQTLLQRTCHGVSCCGWWFQAARSILGKGPSAQSLAGWTLESEALRRDMGTWLLACICICTCVCLGVSVTGEGQGPRSRTFTCLTNNILRIDCHWSAPELGQGSSPWLLFTRLLAAHISASCGAVSAPSCCHLRQCSCHLTISPSLSTTACLGGSRSAWWTRSTCPGDTSNISSGHCILTWSISPALEPMTTLLSYELAFKKQEEAWEQAQHRDHIVGVTWLILEAFELDPGFIHEARLRVQMATLEDDVVEEERYTGQWSEWSQPVCFQAPQRQGPLIPPWGWPGNTLVAVSIFLLLTGPTYLLFKLSPRLGWGPTGPVCC

SEQ ID NO: 252190 - DNA, 1029 bp, Artificial Sequence
  derived and/or modified sequence
atgccccagacatgcgacgggaccgggcagatgcacctgggcagtaactgttgcaaaaacggtcagacgctgctgcaacggacctgccatggagtttcatgttgcggatggtggttccaagctgctcgctcgatacttggcaaaggtccatcagcccaatcactcgccggttggaccttggagagcgaagccctgagacgggatatgggcacctggctgctggcctgcatctgcatatgcacatgcgtatgcctgggcgtgtccgttacaggggagggacagggtccgcgaagccggaccttcacatgtcttaccaataacattctccggatcgattgccattggagtgcgcccgaattgggccaggggagcagcccttggctgctgttcacgcgacttctggccgcacacattagcgccagttgtggagctgtctcagccccctcgtgctgccatcttcggcaatgttcctgccacctcacgattagcccctcactgtccacgacagcgtgcctcgggggctctaggtctgcgtggtggacaaggagcacatgcccgggagatacgagcaacatttctagcggccactgtattctgacttggagtattagccctgctctggaaccgatgaccactctcctgagttatgagctagccttcaagaagcaggaagaggcatgggagcaggcccagcacagggatcacatagttggtgtgacttggctgattctcgaggccttcgaactggatcctggcttcatccacgaagctaggcttcgggtgcaaatggccaccctagaggatgatgtcgtcgaggaagaaagatacaccgggcaatggagcgagtggtctcagcccgtgtgctttcaggccccacagcgtcagggaccattaattcctccctggggctggcctggcaacacactggtggccgtgtcaatctttcttcttttgacaggtcccacttatttattatttaagctgtcccctcgacttggctggggtcctacaggacccgtgtgctgctag

SEQ ID NO: 252191 - DNA, 999 bp, Artificial Sequence
  derived and/or modified sequence
atgcaccttggttctaattgctgtaagaatggccagactctcctgcaacgcacatgtcacggggtatcatgctgcggctggtggtttcaagctgcgaggtctattttgggcaagggaccgagtgcacagtctcttgccggttggaccctggaatccgaagcacttagaagggatatggggacatggttgctcgcttgtatttgcatctgtacttgcgtgtgccttggagtctcagttaccggagaaggacagggccctcggtcccgtacattcacttgtctgactaataatattcttagaattgactgtcattggtcagcaccagaactgggccaaggctcaagcccgtggctgctgtttacaagattactggccgctcacataagtgcctcttgtggagcagtttccgccccttcgtgttgccatctgcggcaatgttcatgccatcttaccattagcccatctttatccacaaccgcctgtctgggagggagtcgttcagcttggtggacaaggtcaacatgtcctggagacacctccaatattagctcaggccactgtatcctaacctggagcataagtccagctttagaacctatgactactctgctgtcttatgagcttgcatttaaaaagcaagaggaggcatgggaacaggcacaacacagagaccatatagtcggcgtcacatggcttattctggaggccttcgagctcgatcctgggtttatacatgaggctcggttgcgggttcaaatggcaactctggaagatgatgttgttgaggaagagcgatacaccgggcaatggtctgaatggagccagcctgtatgcttccaagctccgcaacggcaggggcctctgattccaccttggggatggcccggcaacacactggtggccgtttctatttttcttctcctgactggacctacttacctgttgtttaagctgtcccctcgattgggctggggtcccacaggccccgtgtgctgttag

SEQ ID NO: 252192 - DNA, 1029 bp, Artificial Sequence
  derived and/or modified sequence
atgccccagacctgtgatggcaccggccagatgcacctgggcagcaactgctgcaagaatggccagaccctgctgcagaggacctgccacggcgtgtcctgctgcggctggtggttccaggccgcccggagcatcctgggcaagggccccagcgcccagagcctggccggctggaccctggagagcgaggccctgcggcgggacatgggcacctggctgctggcctgcatctgcatctgcacctgtgtgtgcctgggcgtgtctgtgactggagagggccagggccccaggagcaggaccttcacctgcctgaccaacaacatcctgagaattgactgccactggagcgcccctgagctgggccagggcagcagcccctggctgctcttcacccggctgctggccgcccacatcagcgccagctgtggggctgtgtctgcccccagctgctgccacctgcggcagtgcagctgccacctgaccatcagccccagcctgagcaccacagcctgcctgggcggcagccgcagcgcctggtggaccaggagcacctgccctggggacaccagcaacatcagcagcggccactgcatcctgacctggagcatcagccctgccctggagcccatgaccaccctgctgtcctatgagctggccttcaagaagcaggaggaggcctgggagcaggcccagcaccgggaccacatcgtgggcgtgacctggctgatcctggaggcctttgagctggaccccggcttcatccacgaggcccggctgcgggtgcagatggccaccctggaggatgatgtggtggaggaggagcgctacacaggccagtggagcgagtggagccagcctgtgtgcttccaggccccccagaggcagggccccctcatccccccctggggctggccaggcaacaccctggtggccgtgtccatcttcctgctgctgaccggccccacctacctgctcttcaagctgagcccccggctgggctggggccccactggacctgtgtgctgctag

SEQ ID NO: 252193 - DNA, 999 bp, Artificial Sequence
  derived and/or modified sequence
atgcacctgggcagcaactgctgcaagaatggccagaccctgctgcagaggacctgccacggcgtgtcctgctgcggctggtggttccaggccgcccggagcatcctgggcaagggccccagcgcccagagcctggccggctggaccctggagagcgaggccctgcggcgggacatgggcacctggctgctggcctgcatctgcatctgcacctgtgtgtgcctgggcgtgtctgtgactggagagggccagggccccaggagcaggaccttcacctgcctgaccaacaacatcctgagaattgactgccactggagcgcccctgagctgggccagggcagcagcccctggctgctcttcacccggctgctggccgcccacatcagcgccagctgtggggctgtgtctgcccccagctgctgccacctgcggcagtgcagctgccacctgaccatcagccccagcctgagcaccacagcctgcctgggcggcagccgcagcgcctggtggaccaggagcacctgccctggggacaccagcaacatcagcagcggccactgcatcctgacctggagcatcagccctgccctggagcccatgaccaccctgctgtcctatgagctggccttcaagaagcaggaggaggcctgggagcaggcccagcaccgggaccacatcgtgggcgtgacctggctgatcctggaggcctttgagctggaccccggcttcatccacgaggcccggctgcgggtgcagatggccaccctggaggatgatgtggtggaggaggagcgctacacaggccagtggagcgagtggagccagcctgtgtgcttccaggccccccagaggcagggccccctcatccccccctggggctggccaggcaacaccctggtggccgtgtccatcttcctgctgctgaccggccccacctacctgctcttcaagctgagcccccggctgggctggggccccactggacctgtgtgctgctag

SEQ ID NO: 252194 - DNA, 1029 bp, Artificial Sequence
  derived and/or modified sequence
atgccccagacctgcgacggcaccggccagatgcacctgggcagcaattgctgcaaaaatgggcagacgcttttgcaacgcacttgtcacggcgtgagttgctgcggctggtggttccaagctgcccgatctatactagggaaaggcccgtcagcgcaatctctcgccggatggacgctcgagtctgaagccctccggagagatatggggacatggctcctagcttgcatctgcatctgcacctgcgtctgcctcggagtctctgtgaccggggaaggacagggtccgcggtctcgcacctttacctgcttaactaataatatcctgcgcatcgattgtcactggagtgcacccgagctgggtcaagggagttcaccctggctactctttacaagactgcttgccgcgcatatcagcgccagctgcggcgcagtaagcgcccctagttgttgtcacctgcgccagtgctcctgccacttaaccatcagcccatccttgtcgactacagcatgcctcggaggatctaggtcagcctggtggacacggagcacgtgcccaggcgacacatcaaatatcagtagtggacattgcatcctgacatggtccattagtcccgcactcgaaccaatgactactctgcttagttacgagctcgcattcaagaagcaggaggaggcttgggagcaggctcagcatcgggatcacattgtgggtgtgacctggttgatactggaagcctttgaactggatccaggattcattcacgaggccaggctgcgcgtgcagatggcaactctagaggatgatgtagtcgaagaagaacgatatacgggccagtggtctgagtggtctcagcctgtgtgctttcaggctcctcagcggcaaggaccgttgatccctccttggggatggcccgggaatacccttgtcgccgtgagtatctttctcctcctgaccgggcccacctacttactgtttaaattgtctccccggctggggtggggccccacagggccagtgtgctgttag

SEQ ID NO: 252195 - DNA, 999 bp, Artificial Sequence
  derived and/or modified sequence
atgcacctgggcagcaactgctgcaagaacggccagaccctgctgcagcggacctgccacggggtctcctgctgtgggtggtggtttcaagcagccagaagcattctgggcaagggtcccagcgcgcagtcacttgctggttggactctagagagtgaagccctcagacgagatatgggtacttggcttctggcctgtatctgcatttgcacctgcgtctgtttgggcgtgtcagtgacaggtgagggacaaggccccagaagcaggacttttacctgcctgactaataatattctcagaatagattgtcactggtccgcaccagagttgggacagggtagcagtccatggctgctctttacccggctgctcgccgcacatatcagcgcttcctgcggagctgtctctgcaccaagctgctgtcatttgaggcagtgctcctgccacctcactatttcccctagtctctctacgaccgcatgtctgggtggttcacgcagcgcgtggtggaccaggtctacctgcccaggcgatacgtcgaacatctcatcaggccattgtatcctgacctggagcatttcgccggctcttgagcctatgaccaccctcttatcatacgagctcgcctttaagaagcaggaggaagcttgggagcaggcccagcatcgggaccatattgtaggcgtgacatggttaattctggaggccttcgagctggaccctgggttcatccacgaagcccgactgcgtgtgcagatggcaacgctggaggatgacgttgtcgaagaagagcggtataccgggcagtggagtgaatggagccagccagtctgttttcaggcgccgcagcggcagggtccccttattccaccatggggctggcccggaaacacgctggtagccgtgtcaatcttccttttattgacgggccccacctacctgctgtttaaactcagtccccggctaggctggggaccgaccggcccagtgtgctgctag

SEQ ID NO: 252196 - DNA, 1029 bp, Artificial Sequence
  derived and/or modified sequence
atgccacagacttgcgatggcaccggccagatgcacctcggtagcaactgttgcaagaacgggcaaaccctgctgcagcggacctgtcacggggtgagttgctgtggctggtggtttcaggcagcacggagtatattagggaaggggccatcagctcagtccctcgcgggatggactctggagtccgaagctctccgccgtgacatggggacctggcttctggcctgcatttgcatttgcacatgtgtgtgtctgggagttagcgtcactggcgagggacaaggaccacggagtagaacatttacatgtctgactaacaatattctgaggattgactgccattggtccgccccagagttaggccagggatcctcgccgtggcttttgttcactagactcctcgccgctcacattagcgcaagttgtggtgctgtgagtgctccgagctgttgccacctaaggcagtgcagctgccaccttacaatctcaccttctttatctacaacagcatgtttaggcggaagccgcagtgcgtggtggacaaggtcaacatgtcctggcgatacctctaacatcagcagtggacactgtattctgacctggagtatatctccagcactcgaaccaatgacaacactcctctcttacgagctcgcctttaagaaacaggaagaggcttgggagcaagcccagcacagagatcacatagttggcgttacttggttaatcttagaagcttttgagttggatccaggtttcatccatgaggctcgcctcagagtgcaaatggcgaccctcgaagacgacgtggttgaagaggaacgctatactggacagtggtctgagtggtcccagcccgtctgctttcaggctcctcagagacagggacctctgatccctccttggggttggcctggcaacacgttggtcgcggtgtcaatctttttgctgctgaccggtcctacatacctattgttcaagctttcaccgagacttggctggggcccaacagggccagtgtgctgctag

SEQ ID NO: 252197 - DNA, 999 bp, Artificial Sequence
  derived and/or modified sequence
atgcatctgggctcaaactgttgcaaaaatggacaaaccctgctacagcgcacctgtcatggggtcagttgctgcggttggtggtttcaagcggcacgttcaattctgggtaaaggcccttccgctcagtctctagcgggatggaccttagagagcgaggctcttcggcgagatatgggaacctggctgctcgcatgcatctgcatttgtacttgtgtgtgcctgggggttagtgtcacaggtgaggggcagggacctaggtcgcgcacatttacctgcctgaccaataatatcctacgcatcgattgtcattggtccgcacctgaactaggccaaggctccagtccttggctcctgtttacacgcctgctagcagctcacatctctgcgtcctgtggtgcagtgtcagccccatcatgctgtcatcttcgacagtgttcctgtcacctgacaatatctccaagcctatccactactgcctgtctgggaggcagccggtccgcttggtggactcggtcgacctgtccaggggatacatcaaacatctccagcggccactgcatcctgacatggagcatcagtccagctctggagcctatgacgacacttctgagttatgagctggctttcaagaagcaggaggaggcatgggaacaagcccagcatcgagatcatatagtcggcgtgacatggctgatactagaggccttcgaactggatccagggttcattcatgaagcccgtctgagagtgcagatggctacactagaggacgacgtggtcgaggaagagcgctataccggccaatggtctgaatggtctcagccagtctgctttcaagcccctcagagacagggaccactgatcccaccttggggctggcccggtaatacactagttgcggtctccatattcctgctactaaccggacctacttatcttctcttcaagctgtcacctcggttaggctggggacccactggccctgtctgttgctag

SEQ ID NO: 252198 - DNA, 1029 bp, Artificial Sequence
  derived and/or modified sequence
atgccccagacctgcgacggcaccggccagatgcacctgggcagcaactgctgcaagaacggccagaccctgctgcagagaacctgccacggcgtgagctgctgcggctggtggttccaggccgccagaagcatcctgggcaagggccccagcgcccagagcctggccggctggaccctggagagcgaggccctgagaagagacatgggcacctggctgctggcctgcatctgcatctgcacctgcgtgtgcctgggcgtgagcgtgaccggcgagggccagggccccagaagcagaaccttcacctgcctgaccaacaacatcctgagaatcgactgccactggagcgcccccgagctgggccagggcagcagcccctggctgctgttcaccagactgctggccgcccacatcagcgccagctgcggcgccgtgagcgcccccagctgctgccacctgagacagtgcagctgccacctgaccatcagccccagcctgagcaccaccgcctgcctgggcggcagcagaagcgcctggtggaccagaagcacctgccccggcgacaccagcaacatcagcagcggccactgcatcctgacctggagcatcagccccgccctggagcccatgaccaccctgctgagctacgagctggccttcaagaagcaggaggaggcctgggagcaggcccagcacagagaccacatcgtgggcgtgacctggctgatcctggaggccttcgagctggaccccggcttcatccacgaggccagactgagagtgcagatggccaccctggaggacgacgtggtggaggaggagagatacaccggccagtggagcgagtggagccagcccgtgtgcttccaggccccccagagacagggccccctgatccccccctggggctggcccggcaacaccctggtggccgtgagcatcttcctgctgctgaccggccccacctacctgctgttcaagctgagccccagactgggctggggccccaccggccccgtgtgctgctag

SEQ ID NO: 252199 - DNA, 999 bp, Artificial Sequence
  derived and/or modified sequence
atgcacctgggcagcaactgctgcaagaacggccagaccctgctgcagagaacctgccacggcgtgagctgctgcggctggtggttccaggccgccagaagcatcctgggcaagggccccagcgcccagagcctggccggctggaccctggagagcgaggccctgagaagagacatgggcacctggctgctggcctgcatctgcatctgcacctgcgtgtgcctgggcgtgagcgtgaccggcgagggccagggccccagaagcagaaccttcacctgcctgaccaacaacatcctgagaatcgactgccactggagcgcccccgagctgggccagggcagcagcccctggctgctgttcaccagactgctggccgcccacatcagcgccagctgcggcgccgtgagcgcccccagctgctgccacctgagacagtgcagctgccacctgaccatcagccccagcctgagcaccaccgcctgcctgggcggcagcagaagcgcctggtggaccagaagcacctgccccggcgacaccagcaacatcagcagcggccactgcatcctgacctggagcatcagccccgccctggagcccatgaccaccctgctgagctacgagctggccttcaagaagcaggaggaggcctgggagcaggcccagcacagagaccacatcgtgggcgtgacctggctgatcctggaggccttcgagctggaccccggcttcatccacgaggccagactgagagtgcagatggccaccctggaggacgacgtggtggaggaggagagatacaccggccagtggagcgagtggagccagcccgtgtgcttccaggccccccagagacagggccccctgatccccccctggggctggcccggcaacaccctggtggccgtgagcatcttcctgctgctgaccggccccacctacctgctgttcaagctgagccccagactgggctggggccccaccggccccgtgtgctgctag

SEQ ID NO: 252200 - protein, 931 aa, Artificial Sequence
  derived and/or modified sequence
MLLFFTLGLLIHFVFFASIFDIYFTSPLVHGMTPQFTPLPPPARRLVLFVADGLRADALYELDENGNSRAPFIRNIIMHEGSWGISHTRVPTESRPGHVALIAGFYEDVSAVAKGWKENPVEFDSLFNESKYTWSWGSPDILPMFAKGASGDHVYTYSYDAKREDFGAQDATKLDTWVFDNVKDFFHHARNNQSLFSKINEEKIVFFLHLLGIDTNGHAHRPSSRDYKHNIKKVDDGVKEIVSMFNHFYGNDGKTTFIFTSDHGMTDWGSHGAGHPSETLTPLVTWGAGIKYPQRVSAQQFDDAFLKEWRLENWKRLDVNQADIAPLMTSLIGVPFPLNSVGILPVDYLNNTDLFKAESMFTNAVQILEQFKVKMTQKKEVTLPFLFTPFKLLSDSKQFNILRKARSYIKHRKFDEVVSLCKELIHLALKGLSYYHTYDRFFLGVNVVIGFVGWISYASLLIIKSHSNLIKGVSKEVKKPSHLLPCSFVAIGILVAFFLLIQACPWTYYVYGLLPLPIWYAVLREFQVIQDLVVSVLTYPLSHFVGYLLAFTLGIEVLVLSFFYRYMLTAGLTAFAAWPFLTRLWTRAKMTSLSWTFFSLLLAVFPLMPVVGRKPDISLVMGAGLLVLLLSLCVVTSLMKRKDSFIKEELLVHLLQVLSTVLSMYVVYSTQSSLLRKQGLPLMNQIISWATLASSLVVPLLSSPVLFQRLFSILLSLMSTYLLLSTGYEALFPLVLSCLMFVWINIEQETLQQSGVCCKQKLTSIQFSYNTDITQFRQLYLDDIRRAFFLVFFLVTAFFGTGNIASINSFDLASVYCFLTVFSPFMMGALMMWKILIPFVLVMCAFEAVQLTTQLSSKSLFLIVLVISDIMALHFFFLVKDYGSWLDIGTSISHYVIVMSMTIFLVFLNGLAQLLTTKKLRLCGKPKSHFM

SEQ ID NO: 252201 - DNA, 2796 bp, Artificial Sequence
  derived and/or modified sequence
atgctgcttttctttacgttggggctgctgatccattttgtttttttcgcatccatttttgacatttattttacctccccccttgtacacggcatgacaccccaattcaccccactgcccccacccgctagacggctggtgttgttcgtggctgatggtctccgtgccgatgcactgtatgaactggatgaaaacgggaactcccgagccccctttatccgcaatattatcatgcacgagggctcgtggggaatctcccacacccgggtgcctacagagagccgaccaggtcatgtggcccttatcgccggattttatgaagacgtctctgccgtggccaaggggtggaaagaaaatcccgtcgagttcgactccctattcaatgaaagcaagtatacatggtcttggggctctcctgacatactgcccatgtttgccaagggcgccagcggggaccacgtgtacacttattcctatgatgccaagcgcgaagactttggtgcccaagacgccactaagctggacacatgggtgttcgataatgttaaggactttttccaccatgcacggaataaccagtctctattttcaaagattaatgaagagaagatagtttttttcctccacctactgggtattgatacaaacggacacgcgcataggccctctagccgtgactacaaacataacatcaaaaaggtcgatgacggagtaaaggaaattgtgagtatgttcaatcatttttacggcaatgacggtaagactacgtttatcttcacctccgatcatggtatgactgattgggggtcacatggggcaggccacccatctgagaccctgacacctctcgtgacctggggcgccggtatcaagtatcctcagcgcgtgtcagctcaacaattcgacgacgcctttcttaaggagtggaggctggaaaattggaagcgcttggacgtgaaccaagcggacattgcccctctgatgacaagtctaatcggcgtccctttccctttaaactcagtcggcattctacctgtcgactatttaaacaatacagacctgttcaaagcagaatccatgtttacaaacgccgtgcaaatcctggagcagttcaaagtcaaaatgacccagaagaaagaggtaaccctgccatttctgttcacaccatttaagctgttgtcagattcgaagcaatttaatattttaagaaaggctcgctcgtacatcaagcatcgcaagtttgatgaagttgtgtctctctgcaaagaacttatacatctggccctgaaggggctttcctactaccatacctacgatcggttctttctgggggtaaacgtggttatcgggttcgtcggctggatttcctatgccagtctgctaatcataaaaagccactccaacctcatcaagggtgtctcaaaagaggtcaaaaaaccttcccatctgctcccgtgttcttttgtcgctattgggattctcgtggctttcttcttgctgattcaagcttgcccatggacatactatgtgtatggcctgttgcctctaccgatctggtacgcagtcctgcgtgagtttcaggtcattcaggatcttgtggtctcggtattaacctatcccctgtcccactttgtcggctatctgctcgctttcacactgggaattgaggtgttagtgctgagttttttctatcggtatatgctgacagcaggtctaacggcctttgctgcttggccctttctgacacgtctttggacgagagccaagatgacctccctgtcatggacattcttttcactgctgctggcagtgtttccgctcatgcctgtagttggacggaagccagatatctctctggtaatgggagcaggcctccttgtcctacttctgagcctctgtgtcgtgacaagcctgatgaaacggaaggactcgttcattaaagaggagctgctcgtgcacctgcttcaagtcctcagcacggttctcagcatgtatgtggtctactcaacacaaagtagtctccttaggaagcaggggctgcctttgatgaaccagatcatctcttgggccacgctggcctcttcactggtagtccctctgctgagcagcccagtactgttccagcggctgttcagcatcttgctgagcctgatgtcaacttatctcctgcttagcacaggctatgaggcactgttcccactggttctgagctgcctgatgttcgtgtggatcaatattgagcaggaaacccttcagcagtcgggtgtttgctgtaaacagaaattgacatccattcagttctcctataatactgacataacccagtttagacagctgtaccttgacgacatccgaagggcgttttttttggtcttctttctggttacagcgttctttgggactgggaacatcgcgagcatcaactcctttgatctggcgtccgtctactgcttcctcacggttttttctccttttatgatgggggctctaatgatgtggaagattctgattccattcgtcctcgtaatgtgcgcgttcgaggcagtccaactgaccactcagctgtcatccaaaagtctcttcctgattgtgctggttatctccgacataatggcattgcattttttctttcttgtgaaggactacggatcttggctggacatcggcacttccatcagccactacgtgatcgtaatgagcatgactatctttctggtctttctgaacggactagcccagctcttgacgactaaaaaactcagactgtgcggcaaacctaagtcacactttatgtag

SEQ ID NO: 252202 - DNA, 2796 bp, Artificial Sequence
  derived and/or modified sequence
atgttactattctttaccctgggacttctgatccacttcgtcttctttgcctccattttcgacatctatttcacctcgccactggttcacggcatgacgccgcagtttactccactgcccccaccagcacgtagactggttctgtttgttgctgatggcctgcgcgccgacgcattgtatgagctcgacgagaatggcaatagccgcgccccatttattaggaatatcataatgcacgagggcagttgggggatcagtcatactagagtgcctactgagagccgcccaggccacgtggccctcatagcaggtttctacgaagatgtctctgcagtagcaaaggggtggaaggaaaaccctgttgagttcgactccctgttcaatgagtctaaatatacctggtcctgggggtcaccagatatcctgccaatgttcgcgaaaggcgcaagcggggaccatgtgtacacttattcctatgatgccaagcgggaggactttggggctcaggacgcaacaaagctggacacatgggtgtttgataatgtgaaggatttctttcatcatgcccgaaacaaccagtctctcttttccaagatcaatgaggaaaaaatcgtcttcttccttcacctgctgggcatcgataccaatggccatgcacacagacccagtagtcgggactataaacacaacattaaaaaggtggacgatggagttaaggagattgtctccatgtttaaccacttctacggtaatgatgggaaaacaacttttatcttcacatctgaccacggcatgaccgattggggcagtcatggcgctggccatccatcagaaacattgaccccactggtgacatggggagccgggatcaaatatcctcagcgcgtgagtgcccagcagtttgatgatgcgtttctgaaggagtggcgactcgagaactggaagagactggatgtgaaccaggcggatatcgctcccctgatgacatcactgattggtgtgccgttcccactgaactcagtggggatactccccgtagattatctcaataatacagatctctttaaagccgagagcatgttcaccaacgcagtgcaaatcctcgagcagtttaaagttaagatgacacaaaaaaaggaggtcaccttgccatttctctttacgccctttaaattgctgagtgactcgaagcagtttaacatcctccggaaagccaggtcttacattaagcatcggaaattcgatgaagtggtgagtctgtgtaaagagcttatccaccttgcccttaaggggctcagttactatcatacctacgataggttcttcctcggggttaatgttgtaattgggttcgttggatggatcagttacgcctccctgctcatcattaagagtcactcaaacctgattaagggcgtttccaaggaagttaaaaaaccttctcacctgctcccctgtagcttcgtcgctattggcatcctggtggccttcttcctgctgatccaggcgtgcccgtggacctattatgtttacgggctgttacctcttcccatatggtacgcagtccttcgcgaatttcaggtgattcaagatttggttgtgagcgtgctgacttatcccttatctcatttcgtggggtacctgctggctttcacgctgggtattgaggtgcttgttctgtcatttttttatcgttacatgcttacagccggccttacagcctttgccgcatggccctttctgactcgcttgtggacccgagcaaaaatgacttctctgagctggacattcttctctcttttgctggcagtgttccccctgatgccggtagtggggaggaagcctgacatttcgctcgtcatgggcgctggtcttcttgtgcttctcctctctctctgcgtcgttacctccctgatgaaacggaaggatagtttcatcaaggaggagctgctggtgcatctcttgcaggtcctgtctacggtgctgagcatgtacgttgtgtacagcacacagagctcccttcttagaaagcaggggttaccacttatgaatcagatcataagttgggccacactggcatcatctctcgtggttccgctcctgagcagtcctgtacttttccaacgcctcttctcaatcctactctccctgatgagcacttatctgttgctgagcacaggctacgaggccctcttccctctcgtactgagctgtctgatgttcgtctggatcaatatcgagcaagagactctgcagcagagtggcgtgtgctgcaagcagaaactgacgagtatccaattttcatataacactgacattacccagtttcgccagctctacctggatgacattagacgggcctttttcctagtgttttttctggtcaccgctttcttcggaacaggaaacatcgcttcaataaactcgtttgacttggccagcgtgtattgttttctgacagtgttttcaccctttatgatgggtgcgcttatgatgtggaagatcctgattcctttcgtgctagtgatgtgtgccttcgaggctgttcagctgacgacgcagctctcttccaagtctctttttctgatcgtgttggtaatttccgacataatggctctgcatttttttttcctcgtcaaagactacggatcatggttggacatcggaacgtccatatcacattatgttatcgtcatgtctatgacaatttttctggtgttccttaacggcctcgcacagttgctcacaaccaaaaagctcaggctgtgcggcaagccaaagagccatttcatgtag

SEQ ID NO: 252203 - DNA, 2796 bp, Artificial Sequence
  derived and/or modified sequence
atgctgctcttcttcaccctgggcctgctgatccactttgtgttctttgccagcatctttgacatctacttcaccagccccctggtgcacggcatgaccccccagttcacccccctgcccccaccagcccggcggctggtgctgtttgtggctgatggcctgcgggcagatgccctgtatgagctggatgaaaatggaaacagccgggcccccttcatccggaacatcatcatgcatgagggctcctggggcatcagccacaccagggtgcccacagagagccggcccggccacgtggccctgattgctggcttctatgaagatgtgtctgctgtggccaagggctggaaggagaaccctgtggagtttgacagcctcttcaatgaaagcaagtacacctggagctggggcagcccagacatcctgcccatgtttgccaagggggccagcggggaccacgtgtacacctacagctatgatgccaagcgggaggactttggagcccaggatgccaccaagctggacacctgggtgtttgacaacgtgaaggacttcttccaccacgccaggaacaaccagagcctcttcagcaagatcaatgaggagaagatcgtgttcttcctgcacctgctgggcatcgacaccaacggccacgcccaccggcccagcagccgggactacaagcacaacatcaagaaggtggatgatggagtgaaggagatcgtgtccatgttcaaccacttctatggaaatgatggcaagaccaccttcatcttcaccagtgaccacggcatgacagactggggcagccatggagctggccaccccagcgagaccctgacccccctggtgacctggggcgccggcatcaagtacccccagagggtgtctgcccagcagtttgatgatgccttcctgaaggagtggaggctggagaactggaagaggctggatgtgaaccaggccgacatcgcccccctgatgaccagcctcatcggcgtgcccttccccctgaacagcgtgggcatcctgcctgtggactacctgaacaacacagacctcttcaaggccgagagcatgttcaccaatgctgtgcagatcctggagcagttcaaggtgaagatgacccagaagaaggaggtgaccctgcccttcctgttcacccccttcaagctgctgagtgacagcaagcagttcaacatcctgaggaaggcccggagctacatcaagcacaggaagtttgatgaggtggtgtccctgtgcaaggagctgatccacctggccctgaagggcctgagctactaccacacctatgaccgcttcttcctgggcgtgaatgtggtgattggatttgtgggctggatctcctatgccagcctgctgatcatcaagagccacagcaacctgatcaagggcgtgtccaaggaggtgaagaagcccagccacctgctgccctgcagctttgtggccatcggcatcctggtggccttcttcctgctgatccaggcctgcccctggacctactacgtgtatggcctgctgcccctgcccatctggtatgctgtgctgcgggagttccaggtgatccaggacctggtggtgtctgtgctgacctaccccctgagccactttgtgggctacctgctggccttcaccctgggcatcgaggtgctggtgctgtccttcttctaccgctacatgctgacagctggcctgacagcctttgctgcctggcccttcctgacccggctgtggacccgggccaagatgaccagcctgtcctggaccttcttcagcctgctgctggccgtgttccccctgatgcctgtggtgggcaggaagccagacatcagcctggtgatgggcgccggcctgctggtgctgctgctgagcctgtgtgtggtgaccagcctgatgaagaggaaggacagcttcatcaaggaggagctgctggtgcacctgctgcaggtgctgagcacagtgctgtccatgtatgtggtgtacagcacccagagcagcctgctgaggaagcagggcctgcccctgatgaaccagatcatctcctgggccaccctggccagcagcctggtggtgcccctgctgagcagccctgtgctcttccagaggctcttcagcatcctgctgagcctgatgagcacctacctgctgctgagcacaggctatgaggccctcttccccctggtgctgagctgcctgatgtttgtgtggatcaacatcgagcaggagaccctgcagcagagcggcgtgtgctgcaagcagaagctgaccagcatccagttctcctacaacacagacatcacccagttccggcagctgtacctggatgacatcagaagagccttcttcctggtgttcttcctggtgacagccttctttggaactggaaacatcgccagcatcaacagctttgacctggcctctgtgtactgcttcctgaccgtcttcagccccttcatgatgggcgccctgatgatgtggaagatcctgatcccctttgtgctggtgatgtgtgcctttgaggccgtgcagctgaccacccagctgagcagcaagagcctcttcctgattgtgctggtgatcagtgacatcatggccctgcacttcttcttcctggtgaaggactatggctcctggctggacatcggcaccagcatcagccactacgtgattgtgatgtccatgaccatcttcctggtgttcctgaatggcctggcccagctgctgaccaccaagaagctgcggctgtgtgggaagcccaagagccacttcatgtag

SEQ ID NO: 252204 - DNA, 2796 bp, Artificial Sequence
  derived and/or modified sequence
atgctgctgttcttcaccctgggcctgctgatccacttcgtgttcttcgcaagtattttcgacatttattttacttctccgctagtccacggcatgacccctcagttcacacctctgcccccccccgcacgccggcttgttctcttcgttgcagatggtctgcgcgcagacgcactttacgagctggatgagaatggcaactcgcgcgctcctttcatacgcaatatcatcatgcatgagggttcttggggaatctcgcatactagagtgccaactgaaagcagacctgggcacgtcgcactcatagcaggcttctatgaagacgtttccgccgtggccaaaggctggaaagagaatccagtggaattcgacagtctctttaacgagagtaaatacacctggagctgggggagcccagacattctgcccatgttcgcgaaaggcgctagcggtgatcacgtctacacttacagttacgacgctaaaagagaggattttggtgcacaggacgccactaaattggatacctgggtcttcgacaatgtgaaagatttctttcatcacgctcgcaataaccaatccctgttcagtaagatcaacgaagagaagatagtatttttcctgcacctcctcggtattgacacgaatggccatgcccatcggccttctagtcgcgattacaaacataatatcaagaaagttgacgatggggtgaaggagatagtgagcatgttcaatcacttttacggcaacgacggtaaaacaacatttatatttactagcgatcacggtatgacagactggggctcccacggcgctggacacccaagcgagaccttaaccccactggttacttggggggccgggattaagtaccctcagagggtttctgctcagcagtttgacgatgccttcctaaaagagtggaggttggagaactggaagcgcctcgatgtaaatcaggctgatatcgccccgttaatgaccagtttgattggggtcccttttcctctaaattcagtgggaatcctgcccgtcgattacctaaacaacacggatctttttaaagcagaatcgatgttcactaacgctgttcaaatcttggaacagtttaaggtgaagatgactcagaaaaaagaggtcacactcccgtttctgttcactccttttaaactcctatctgacagcaagcagttcaatattctgcgcaaagcacgatcctacatcaagcatagaaagttcgacgaagttgtgtctctgtgtaaggagctaattcacctggcactgaaaggactgtcttactaccatacctacgataggttctttctgggcgtgaatgtggtgatcgggttcgtgggctggatcagttatgcatctctactcataatcaaatctcattccaatcttataaaaggcgtgtccaaggaagttaagaagccgagccacctgctgccatgctcattcgttgctatcggcattctagtcgctttcttcctgctgatccaggcatgtccgtggacttactatgtgtacgggttgcttccactgcccatttggtacgcagttctgcgggaattccaggtgattcaggatctggtcgtgtctgtgttgacatatcctctctcccactttgtcggctacctgcttgcctttactcttggaatcgaagtcttagtgttatcctttttttacaggtacatgctcacagcagggttaacagcatttgccgcctggccattcttgacacgattgtggactcgggctaaaatgacctctttgagctggaccttctttagtctgctcttggccgtctttccacttatgccggtagtgggccggaaaccagatattagcctcgtcatgggcgcaggcttactcgtgttacttctgtctctctgtgtcgtcacctccctcatgaagcggaaggattcttttattaaagaggagctactggtccatctcctccaggttctgagcacagtcctctccatgtacgtcgtgtacagcacccaatcatctctgttaagaaagcagggactgccattaatgaaccaaattatctcctgggctactctcgcttccagcttagtggttccactactgtcgtcacccgtactgttccagcgactgttctccattttgctttctctgatgtcaacttatctgctccttagcaccggttacgaagccctctttccattggttttaagttgcctgatgtttgtgtggataaacatcgagcaggagactcttcaacagtccggagtgtgctgcaagcagaagctgaccagtattcagttctcctacaatacggatatcacacaatttaggcaattgtacttggatgatataaggagagccttcttcctggtattctttctggtcactgcgttctttggtacaggtaacatcgcttctatcaactcattcgacttggcctccgtgtactgttttttaactgtcttttccccatttatgatgggagcactaatgatgtggaagattttaatccccttcgtgctagtgatgtgtgctttcgaagctgtgcagcttaccacccaattgtccagtaagtctcttttcctgattgtgctggttatatccgacattatggctctccattttttttttttggtcaaggactatggctcatggttggatatcggcacatccatcagccattacgttattgtcatgtccatgactattttcttagtgtttcttaatgggctcgcacagctgctaaccaccaagaagttgcggctgtgcgggaaacctaagagccactttatgtag

SEQ ID NO: 252205 - DNA, 2796 bp, Artificial Sequence
  derived and/or modified sequence
atgctgctgttcttcaccctgggcctgctgatccacttcgtgttctttgctagtatatttgatatatatttcacaagccctctcgtgcacgggatgacccctcagttcacccctttgcctccaccagcgcgccggctggtgctgtttgtcgctgacggactccgtgccgacgctctatatgagttggatgaaaacggaaactcaagggcgccttttattagaaatatcattatgcatgaggggagctgggggataagccataccagggttccgacagagtcgcgtcccgggcacgtggcgctgatcgctgggttttatgaggatgtcagcgccgtcgccaaaggatggaaggagaatccggtggagttcgatagcctgtttaacgagtccaagtacacatggagctggggcagccccgatatcctcccaatgtttgctaaaggtgccagcggtgaccatgtgtatacctactcttacgatgctaagcgcgaagactttggcgcacaagacgccaccaaattggacacatgggtatttgataacgtcaaagacttttttcaccacgcacgaaataatcagtcactgttctccaaaatcaacgaagagaaaattgtctttttcctgcatcttctgggaatcgataccaacggacacgcacaccggcctagctcaagggattataagcataatattaagaaagtagacgacggtgtgaaggagattgtctccatgtttaaccacttttatgggaacgacggtaagaccacctttatttttacctccgaccacggcatgactgactggggttcccatggagcgggacacccaagtgaaacgctcacgccattagtgacttggggtgcaggaatcaagtacccacagcgcgtctccgcccagcagtttgacgatgcttttcttaaagagtggcgactggagaattggaagcggttggacgtaaatcaggccgacatagcaccactaatgactagcctgattggggtgccgtttcccctcaatagcgttggaatcctaccagtggactaccttaataacaccgatctgtttaaagctgagtcaatgttcacgaatgctgtccagatcttagagcaatttaaggtgaagatgacgcagaagaaggaggtgacacttccattcctcttcacgcccttcaaactattgtccgactctaaacagttcaacatcctccgaaaagctagatcgtatattaaacaccggaaatttgacgaggtggtgagcctgtgtaaggagctaattcacctggcccttaaggggcttagctactaccacacttatgatcgatttttcctgggcgtgaacgtggttataggattcgtgggatggataagttatgcatccttactcatcataaagtcacatagtaacttgataaagggcgtctccaaggaggtgaagaagccgtcccatctgttgccctgtagtttcgttgcaattggaatactcgttgctttcttcctcctgatccaggcgtgtccctggacctactacgtatacgggctgctccctctgccaatctggtatgccgtattgagggagttccaggtgatccaggacctcgtcgtgagcgtcctgacttacccattgtcccactttgtcggctaccttctggcttttacactcggcatcgaagtgctagtgctgtccttcttctatagatatatgttgaccgccggcctgacagcgttcgccgcctggccatttctcacccggctgtggacacgggctaaaatgacatccctgtcttggacttttttttccttgctgctggccgtgtttcctctgatgccagtggtgggtcgcaagcctgatatctccctggtgatgggagctggcctactggtactgttgctctcgttgtgtgtagtgacttctctcatgaaaagaaaagatagctttatcaaggaggagttactcgtgcatctgctccaggtgctgtcaaccgttttgtccatgtacgtggtgtattccacacagtcttcactcctgcggaagcaaggcttacccctgatgaatcaaataatatcttgggccaccctggctagctcactggtggtaccgctgctatcctctcctgtcctgttccagaggctattttccattctgctgtccctgatgtcaacctacctgctcctcagtacggggtacgaggccctgttcccattagtgctgtcctgtctgatgtttgtctggataaacatcgaacaagaaaccctgcagcagtcaggagtatgctgtaagcagaaactgactagcattcaattctcatacaatacagatattacacagttcaggcagctctacctggatgacatacgcagggccttttttcttgtgttcttcctggtgaccgcgttttttggcaccggaaatatagcctctatcaatagtttcgatctggccagcgtgtattgctttctgacggtgttcagcccatttatgatgggcgccctgatgatgtggaaaattttgatccctttcgtcctggtaatgtgcgcttttgaagcagtgcagctcaccactcagttgagctcaaaatctctgtttttgattgttctcgtgatatccgacatcatggccctgcatttttttttcttagttaaggactacggctcctggctggacatcggaacgagcattagtcactacgttattgtcatgtcaatgactatctttctggtttttctgaacggcctcgcacaactactaacaacaaagaaactccggctctgcggtaagccaaagagtcattttatgtag

SEQ ID NO: 252206 - DNA, 4873 bp, Artificial Sequence
  derived and/or modified sequence
gagaattatcgcgatagcagcagcggccgggcaggtattgggggcgttccggaattgaggggtggttgtagtggtggcttaggaataccctcccggctatcgcttcagtgggtagaggggaccactgcccgagagctttaatggagctgggtcctgccttcgcgctgaggagccctcgttttcgagatcaggcctgaccgggataagctccagaaacagtattatgtctcagtcctgtgcaaagtgagatgagctgtagcctttggagacctataattttgaacatagatgttccttaaaagctaaatctttttgaacagatgatgataaacctggaagagattcaccaacaatagcaaattacacactggcttggaaagtactcccatgttccgtttgatcttggcaatttaatgctgttcttgaagactaattagttacactggatatgctgctgttctttactttgggattgcttatacattttgtgttcttcgcctccatctttgacatttattttacatctcctttggttcatggaatgactcctcagtttacaccattgcctcctccagcgagaagattagtgttgtttgttgctgatggccttcgagcagatgcactttacgaattagatgaaaatggaaactctagagcaccgtttattaggaatatcataatgcatgaaggcagctggggcatatctcatacacgtgtgccaacagaatctcggccaggtcatgtagctctgatagctgggttttatgaagatgtcagtgcagttgccaaaggatggaaggaaaatcctgtagagtttgattctctttttaatgaaagtaaatacacatggagctggggaagcccagatatcctgcctatgtttgccaaaggtgctagtggagaccacgtttatacatatagttatgatgctaaaagagaggattttggtgctcaagatgcaacaaaactggatacgtgggtttttgataatgttaaggacttctttcatcatgccagaaacaaccagtctttgttttctaaaataaatgaagagaaaatagtttttttcttacatttattaggaatagatacaaacggacatgctcatcgaccatcctcgagagactacaagcacaatattaaaaaagttgatgatggagttaaagaaatcgtgtctatgtttaaccacttctatggaaatgatgggaaaacaacatttatctttacctctgaccatggaatgacagactggggttcccatggggctggtcatccttcagagactttaactcctttagtcacttggggagctggaatcaagtatccccaaagagtatcagctcagcaatttgatgatgcatttttgaaagagtggagattggagaattggaagaggctagatgtcaatcaggctgatattgcaccattgatgacttcccttattggagttccctttcctcttaactcagtgggaatccttcctgtggattatcttaacaacactgatctcttcaaagcagagagcatgtttacaaatgcagtacagattcttgaacagttcaaggtgaaaatgactcagaagaaagaagttactttaccatttttgtttacaccatttaaactgctttctgattccaaacagttcaacattttaagaaaagcaagatcttatataaaacacagaaagtttgatgaagtggtctccctttgcaaggagctaattcatcttgcattgaaaggattgtcctattatcacacatatgacagattctttttgggcgtcaatgttgttattggttttgtgggatggatatcttatgcctctttgttgatcatcaagtctcattccaaccttataaaaggtgttagtaaagaagtgaagaaaccaagccatctcctgccttgtagttttgtagctattggcattttagtagcattttttctgctgattcaagcctgtccctggacatattatgtatatggtttgttgccactgccaatatggtatgcggttctaagagaatttcaagttattcaggaccttgttgtatcagtgttgacctatcctctgagccattttgttgggtacctgttagcctttaccctgggaattgaagtattagttctcagttttttctaccgctatatgcttaccgctggacttactgcctttgcagcttggccatttctcactcggctgtggactcgagcaaagatgacctcactgagttggactttcttctctttgctcctggcagtgttcccactgatgccggttgtaggtcgaaagccagacatctctctagtgatgggtgcaggcttgctggttcttctgttatccctgtgtgttgtaacatctctcatgaaaagaaaagatagctttataaaggaagagctattggtacatctgttacaggtgctgagcacagtgctctccatgtatgttgtgtatagcactcagagtagtctactcaggaagcaaggactgcctctcatgaatcaaattattagctgggcaacattagcctcttccttggttgtgccactactgagttctccagttctctttcagcgattgttcagcatacttctttcattgatgtcaacctacctacttctaagcacagggtatgaagctctctttccactagtgttgtcttgtttgatgtttgtctggataaacatagaacaagaaactctacaacaatctggtgtttgctgtaaacaaaagctcaccagtatccagttctcttataatactgatataactcagtttcgacagctatatctggatgacatccgtagggcctttttccttgttttcttcttagtgacagcattttttggaactggaaatatagcttctattaacagctttgatcttgcctctgtctattgctttctgactgtgttcagtccttttatgatgggagccctgatgatgtggaagattttaatcccctttgttcttgttatgtgtgcttttgaagcagttcagttgactactcagttatcgtcaaaaagcctttttctcattgttctcgtcatatcagacattatggctttgcattttttcttcttggtcaaggattatggcagctggcttgatattgggacaagcatcagccactatgtgattgtcatgtccatgaccatctttttggtgttcctcaatggcctggcccagctgctcacaacgaagaaactcagactatgtggcaaacccaaaagtcacttcatgtgaggttgctgaagcaccattcagcatctggatcctgattctccttttaagctaaaatctcatcaaggcttcaataagaagatggatatggatatatagtatattctactcctgtaaggaaaatggtatttggaattccgaattgacaggttatctggaacaaaggagcttctttttttttctaggttttgcaggcatgaaatagtgattatatctgtggaaaagcataggaaggcattctcctttttcatttttttcctttggctggcagctcttcccagtgatgttgagagcacctgcagcaatctggtccccagtcgcacaacttcccacatacccagaggagagcatatgcctgtgggggcagtgctgatggcatccagagtcattgctgtggctgagctggaaggaaatcaccaggtgccaccgtcaatatttatcagctttcagcactggttttgttagacagtcagggtgtattatttcaagagcttcaataaaaaaagtgtttgcaggtatttgtcatatttctttagtatgcaataatgctatcttatcctttttagtgctatttctcaggttttctcagtcaaccagctagatgcatgtgatgcatgtctatccttcactttttttttttcatttctggattttcctgggatttctgacaacacaaaagtagaaagtgcttggtatttctgtcttatacataggaaaacatttaaaataaatagtttttaattgtaggctcaacatctgttaccccatagctttttcgtatattgtttctttccctttgaatttctttttactgtcatctattattttaacaggagttaaaataactcctgttaaactttctgacaatatcataagaattcatattaaaggtgttattctttctggttgtgagattctagcacaaaggcctaaaatcatcaaattagatttccatttgtaaacaaattctaatgggcaaaatatcttgagagcagtttttatatggattatccataaaatgacctttacatatccctgcagagttggccttttgcccgtggtgtgctagtagctttggctgatgctaagctttcctggtatgcgccctatttttaagaagtaattgcttttgaattaagttatagcattactaattcatgttaatgactaggaaaccctctgtaatttacaagatttttcaaattggtggggagtgaataaatacaatttaaaagtcagaaatcagtttggcaaagtgtactttcttaatttctatttatgatgaagtatagtcataatttatttgtaatactactttatggtataccagtgaaagaactgtagtataaaaaagaggtattaatgttttatgaaatctcatgcatcagttcatagcataaaatctagctggacaactaagaagctatggtagcaaacagtgatgttgatggaatgagaatcatgaactttcatattacctcaaaggatttttttatcagtttttttcacacatcagaaaaaactgactgtataaacacttatcactgacctttttctatgtgtagttttgccttttatcttttcccaaatttttataaagagaaattaataaatattttattacaacattgt

SEQ ID NO: 252207 - DNA, 4796 bp, Artificial Sequence
  derived and/or modified sequence
gagaattatcgcgatagcagcagcggccgggcaggtattgggggcgttccggaattgaggggtggttgtagtggtggcttaggaataccctcccggctatcgcttcagtgggtagaggggaccactgcccgagagctttaatggagctgggtcctgccttcgcgctgaggagccctcgttttcgagatcaggcctgaccgggataagctccagaaacagtattatgtctcagtcctgtgcaaagtgagatgagctgtagcctttggagacctataattttgaacatagatgttccttaaaagctaaatctttttgaacagatgatgataaacctggaagctgttcttgaagactaattagttacactggatatgctgctgttctttactttgggattgcttatacattttgtgttcttcgcctccatctttgacatttattttacatctcctttggttcatggaatgactcctcagtttacaccattgcctcctccagcgagaagattagtgttgtttgttgctgatggccttcgagcagatgcactttacgaattagatgaaaatggaaactctagagcaccgtttattaggaatatcataatgcatgaaggcagctggggcatatctcatacacgtgtgccaacagaatctcggccaggtcatgtagctctgatagctgggttttatgaagatgtcagtgcagttgccaaaggatggaaggaaaatcctgtagagtttgattctctttttaatgaaagtaaatacacatggagctggggaagcccagatatcctgcctatgtttgccaaaggtgctagtggagaccacgtttatacatatagttatgatgctaaaagagaggattttggtgctcaagatgcaacaaaactggatacgtgggtttttgataatgttaaggacttctttcatcatgccagaaacaaccagtctttgttttctaaaataaatgaagagaaaatagtttttttcttacatttattaggaatagatacaaacggacatgctcatcgaccatcctcgagagactacaagcacaatattaaaaaagttgatgatggagttaaagaaatcgtgtctatgtttaaccacttctatggaaatgatgggaaaacaacatttatctttacctctgaccatggaatgacagactggggttcccatggggctggtcatccttcagagactttaactcctttagtcacttggggagctggaatcaagtatccccaaagagtatcagctcagcaatttgatgatgcatttttgaaagagtggagattggagaattggaagaggctagatgtcaatcaggctgatattgcaccattgatgacttcccttattggagttccctttcctcttaactcagtgggaatccttcctgtggattatcttaacaacactgatctcttcaaagcagagagcatgtttacaaatgcagtacagattcttgaacagttcaaggtgaaaatgactcagaagaaagaagttactttaccatttttgtttacaccatttaaactgctttctgattccaaacagttcaacattttaagaaaagcaagatcttatataaaacacagaaagtttgatgaagtggtctccctttgcaaggagctaattcatcttgcattgaaaggattgtcctattatcacacatatgacagattctttttgggcgtcaatgttgttattggttttgtgggatggatatcttatgcctctttgttgatcatcaagtctcattccaaccttataaaaggtgttagtaaagaagtgaagaaaccaagccatctcctgccttgtagttttgtagctattggcattttagtagcattttttctgctgattcaagcctgtccctggacatattatgtatatggtttgttgccactgccaatatggtatgcggttctaagagaatttcaagttattcaggaccttgttgtatcagtgttgacctatcctctgagccattttgttgggtacctgttagcctttaccctgggaattgaagtattagttctcagttttttctaccgctatatgcttaccgctggacttactgcctttgcagcttggccatttctcactcggctgtggactcgagcaaagatgacctcactgagttggactttcttctctttgctcctggcagtgttcccactgatgccggttgtaggtcgaaagccagacatctctctagtgatgggtgcaggcttgctggttcttctgttatccctgtgtgttgtaacatctctcatgaaaagaaaagatagctttataaaggaagagctattggtacatctgttacaggtgctgagcacagtgctctccatgtatgttgtgtatagcactcagagtagtctactcaggaagcaaggactgcctctcatgaatcaaattattagctgggcaacattagcctcttccttggttgtgccactactgagttctccagttctctttcagcgattgttcagcatacttctttcattgatgtcaacctacctacttctaagcacagggtatgaagctctctttccactagtgttgtcttgtttgatgtttgtctggataaacatagaacaagaaactctacaacaatctggtgtttgctgtaaacaaaagctcaccagtatccagttctcttataatactgatataactcagtttcgacagctatatctggatgacatccgtagggcctttttccttgttttcttcttagtgacagcattttttggaactggaaatatagcttctattaacagctttgatcttgcctctgtctattgctttctgactgtgttcagtccttttatgatgggagccctgatgatgtggaagattttaatcccctttgttcttgttatgtgtgcttttgaagcagttcagttgactactcagttatcgtcaaaaagcctttttctcattgttctcgtcatatcagacattatggctttgcattttttcttcttggtcaaggattatggcagctggcttgatattgggacaagcatcagccactatgtgattgtcatgtccatgaccatctttttggtgttcctcaatggcctggcccagctgctcacaacgaagaaactcagactatgtggcaaacccaaaagtcacttcatgtgaggttgctgaagcaccattcagcatctggatcctgattctccttttaagctaaaatctcatcaaggcttcaataagaagatggatatggatatatagtatattctactcctgtaaggaaaatggtatttggaattccgaattgacaggttatctggaacaaaggagcttctttttttttctaggttttgcaggcatgaaatagtgattatatctgtggaaaagcataggaaggcattctcctttttcatttttttcctttggctggcagctcttcccagtgatgttgagagcacctgcagcaatctggtccccagtcgcacaacttcccacatacccagaggagagcatatgcctgtgggggcagtgctgatggcatccagagtcattgctgtggctgagctggaaggaaatcaccaggtgccaccgtcaatatttatcagctttcagcactggttttgttagacagtcagggtgtattatttcaagagcttcaataaaaaaagtgtttgcaggtatttgtcatatttctttagtatgcaataatgctatcttatcctttttagtgctatttctcaggttttctcagtcaaccagctagatgcatgtgatgcatgtctatccttcactttttttttttcatttctggattttcctgggatttctgacaacacaaaagtagaaagtgcttggtatttctgtcttatacataggaaaacatttaaaataaatagtttttaattgtaggctcaacatctgttaccccatagctttttcgtatattgtttctttccctttgaatttctttttactgtcatctattattttaacaggagttaaaataactcctgttaaactttctgacaatatcataagaattcatattaaaggtgttattctttctggttgtgagattctagcacaaaggcctaaaatcatcaaattagatttccatttgtaaacaaattctaatgggcaaaatatcttgagagcagtttttatatggattatccataaaatgacctttacatatccctgcagagttggccttttgcccgtggtgtgctagtagctttggctgatgctaagctttcctggtatgcgccctatttttaagaagtaattgcttttgaattaagttatagcattactaattcatgttaatgactaggaaaccctctgtaatttacaagatttttcaaattggtggggagtgaataaatacaatttaaaagtcagaaatcagtttggcaaagtgtactttcttaatttctatttatgatgaagtatagtcataatttatttgtaatactactttatggtataccagtgaaagaactgtagtataaaaaagaggtattaatgttttatgaaatctcatgcatcagttcatagcataaaatctagctggacaactaagaagctatggtagcaaacagtgatgttgatggaatgagaatcatgaactttcatattacctcaaaggatttttttatcagtttttttcacacatcagaaaaaactgactgtataaacacttatcactgacctttttctatgtgtagttttgccttttatcttttcccaaatttttataaagagaaattaataaatattttattacaacattgt

SEQ ID NO: 252208 - DNA, 2796 bp, Artificial Sequence
  derived and/or modified sequence
atgctgcttttcttcaccctcggcctgctgatccattttgtattttttgcttctatcttcgacatctacttcacctccccgctggtgcacggaatgaccccacagtttacacccctgccccctcctgcacggaggctcgtcctctttgtggctgacggtttgagggccgatgccctctacgaactcgacgagaatgggaactcacgggcaccttttattcgtaacatcatcatgcatgagggctcgtgggggatcagccatacaagggttccaaccgaatccaggcctggacatgttgcacttatcgcgggattctatgaagacgtgtccgctgttgccaagggatggaaagaaaatccagtcgaattcgatagtctgttcaacgagtcaaagtacacatggtcgtggggtagtccagatattctccctatgtttgcgaaaggggcttcgggcgatcatgtgtacacatacagctacgacgcaaagcgggaggatttcggcgctcaggatgcgaccaaactggacacttgggttttcgacaacgtgaaggacttcttccatcacgcaagaaacaaccagtcactcttttccaagataaacgaggagaagattgtcttttttctgcacctgctaggaatagataccaatgggcacgcgcatagacccagctctagagattacaaacacaatatcaagaaggtggacgatggagtgaaagaaattgtttcaatgtttaaccacttctatggaaatgatgggaaaactactttcatatttacctccgatcacggtatgaccgattggggctcccatggagcaggccatccaagcgaaactcttaccccgcttgtcacatggggggcaggcattaaatacccacagagagtgtccgcacaacagttcgacgatgcgtttttgaaggagtggaggctcgagaattggaagaggctggacgtcaatcaggcagacatcgctccactcatgacatctttgatcggggtgccattccccttaaatagcgtcggtatcctgcctgtggactacttaaacaacacagatctcttcaaggctgagagcatgtttacaaatgccgtgcagattcttgaacagtttaaagtaaagatgactcaaaaaaaagaggtcacattgcctttcttgttcacacctttcaaactcttgtcagatagcaagcagttcaacattttgcgaaaagcaaggtcatacatcaaacacagaaagttcgacgaagtcgtgagcttgtgcaaagagttaattcatctcgcactcaaaggactcagctattatcacacatacgatcgcttcttcctgggagtgaacgtggttatcggcttcgtggggtggatttcctatgcctcactcttgattatcaagtcacactctaacctgatcaagggcgtaagcaaagaggtcaagaagccaagccacctcctgccctgtagttttgtggcaatagggatactggtggctttctttctgctgatccaagcttgtccctggacctattatgtatacgggctgctgccccttcccatttggtacgctgtgctccgggagtttcaagtgattcaggacctagtggtgtccgtacttacgtatccactgtcccacttcgtcggataccttctggcctttactttggggattgaggtgctcgtgctttcgttcttctatcgatacatgctaacagctggtttaacagcatttgcagcctggcccttcctgacccggctgtggaccagagccaaaatgacatctcttagctggacattttttagcctgctgctggctgtttttcctctaatgccagtggtgggccgtaagcctgacatctccctggtaatgggtgccggactgctggttcttttgttatcactatgcgtggtgacttctctgatgaagaggaaggattctttcatcaaagaagaactcctagtacacctacttcaggtcctctcaacggtcctgtccatgtacgtggtgtattccactcagtctagcttgctgcgaaaacagggcctgcccctgatgaatcaaattatttcatgggctacccttgcttcatctcttgtggttccgttactgagcagccctgtattgtttcagcgacttttttccattctgctctccctgatgtcgacatacctactgctgtctacaggctatgaggcattgtttcctctggtactgagctgcctgatgtttgtatggatcaatattgaacaagaaaccctgcagcaaagcggagtatgttgtaaacagaaattgacatcgatacagttctcttacaatactgacattacccagtttcgacagttgtatctagacgacatcaggagggcgttctttctggtattctttctagtgacagctttttttggaacaggcaatatcgcgagcattaatagttttgatctggcatctgtgtactgttttttgactgtattctccccatttatgatgggtgcgctcatgatgtggaagattctaattccttttgtcctagtgatgtgcgcgttcgaagcagttcaactaactactcagctctcttccaagtccctcttcttgatagttctcgtgatcagcgatataatggccctgcatttcttctttcttgttaaagattacggttcttggctggatatcggaaccagcatctcacactacgtgatagtaatgagcatgacaatcttcctcgtttttctgaacggtctcgctcagctgctgaccaccaagaagctgcgcttgtgcggcaaaccaaagtcacactttatgtag

SEQ ID NO: 252209 - DNA, 2796 bp, Artificial Sequence
  derived and/or modified sequence
atgctgcttttttttacgctgggtttgctcatacacttcgtatttttcgctagtatctttgacatctatttcacctcacctctcgtgcacggcatgacgccacagtttacccccctgccacctccggcaagaaggttggtgctgtttgtcgctgatggacttcgcgcagatgcattatacgagctggacgaaaatggtaacagtcgcgcaccatttattaggaatataatcatgcacgaagggtcctggggtataagccacaccagagtaccaaccgagagtaggcccggacatgtagcattgattgcagggttttatgaggacgtgagcgccgttgctaagggatggaaagagaaccctgtggagttcgacagccttttcaacgaatctaaatacacttggtcttggggcagccccgacatcctcccaatgtttgctaaaggggcaagcggggaccatgtgtacacatatagttatgacgccaagagagaagatttcggggcacaagatgctactaaattggatacctgggtgttcgacaatgtcaaggattttttccatcacgccaggaataatcagagcctgttttccaagattaatgaggaaaagatcgtttttttcctgcatctccttggaattgatacaaacggccacgcacatcgaccctcatcccgtgactacaagcacaatattaaaaaggtggacgacggtgtgaaggagatcgtgtccatgtttaatcatttttatggcaatgacggcaaaactacttttatctttacctctgaccatggaatgaccgactggggtagccatggcgcaggacatccttccgagaccttgacccccctcgttacttggggcgcagggattaagtacccgcagagggtcagtgcacaacagttcgatgatgccttcttgaaggaatggagactggaaaactggaaacgtttggacgttaaccaggctgatatagccccactgatgacctccttaatcggggtgccttttcctcttaatagtgttggaatcctgcctgtggattatcttaacaacaccgacctgttcaaagccgagtcgatgtttacaaacgcagtgcagattctagagcagttcaaagttaagatgacccagaagaaagaggttaccctgcccttcctcttcactccgttcaagctgctgagcgatagtaaacagttcaatatcctccgtaaggctagaagctacatcaagcatagaaagtttgacgaagtggtgagtctctgcaaagaactgatccacttagcgttgaaagggttgtcatactaccacacttacgaccgcttcttccttggagttaatgtcgttatcggattcgttgggtggattagttatgcctcactgctaattataaagagccactccaatctcatcaagggcgtatcaaaagaggtgaaaaagccatcccacctcctgccctgctcctttgtcgcaatcgggattctggtcgctttcttcctcctcatccaggcctgcccctggacgtactatgtgtacggtctactgcccttgccaatatggtatgccgttctacgagagtttcaagttatccaggacctggtggtgtccgttttgacttatcctttgagccatttcgtgggctacctgctcgcatttactctaggaatcgaggtgctggtgctttcattcttttaccgatatatgctcaccgcaggtctgaccgcttttgcagcatggccatttctcacccggctctggactcgggcaaaaatgacctccctgagctggacatttttttccctgctcttggctgtgtttcctctcatgccagttgtgggacgcaagccagacatcagcttagtgatgggcgctggcttattggttctgctgctaagcctttgcgttgttaccagtctgatgaaacgcaaggattctttcataaaggaagaactgctggtccacctgttgcaagttttgtcaaccgttctctccatgtacgtggtatactcaactcagtcaagcctccttcgcaaacaggggctccctttaatgaaccagattatctcttgggccacattggctagctctctcgtggtccctcttctgtcctcgcctgtgctgttccagcggctcttcagcattctcttatccttgatgtctacatatttactccttagtacaggttatgaggcactgttcccactcgtgctgagctgtctgatgttcgtgtggatcaatatagagcaagaaaccctccagcagtccggggtctgctgtaaacagaaactcacctccattcagtttagttacaataccgatattactcagtttaggcagctctatctggacgacatccggagagctttctttctggtatttttcttggtgactgcttttttcgggacaggcaacatagcatctatcaactccttcgacttggccagcgtatactgttttctgacagttttcagccccttcatgatgggggctttaatgatgtggaagattcttataccgttcgtgctcgtgatgtgcgcttttgaggccgtccagctgacaactcagctgtcaagtaagtctctttttctgatcgtgctagttatttcagatataatggccttacactttttttttctggtcaaagattacggctcttggctcgatattgggacatctattagccactacgttattgtgatgagcatgacaatcttcctggtgttcctcaatggccttgcccagctgctgacaacaaaaaagcttaggctgtgtgggaagccgaaaagccactttatgtag

SEQ ID NO: 252210 - DNA, 2796 bp, Artificial Sequence
  derived and/or modified sequence
atgctgctgttcttcaccctgggcctgctgatccacttcgtgttcttcgccagcatcttcgacatctacttcaccagccccctggtgcacggcatgaccccccagttcacccccctgcccccccccgccagaagactggtgctgttcgtggccgacggcctgagagccgacgccctgtacgagctggacgagaacggcaacagcagagcccccttcatcagaaacatcatcatgcacgagggcagctggggcatcagccacaccagagtgcccaccgagagcagacccggccacgtggccctgatcgccggcttctacgaggacgtgagcgccgtggccaagggctggaaggagaaccccgtggagttcgacagcctgttcaacgagagcaagtacacctggagctggggcagccccgacatcctgcccatgttcgccaagggcgccagcggcgaccacgtgtacacctacagctacgacgccaagagagaggacttcggcgcccaggacgccaccaagctggacacctgggtgttcgacaacgtgaaggacttcttccaccacgccagaaacaaccagagcctgttcagcaagatcaacgaggagaagatcgtgttcttcctgcacctgctgggcatcgacaccaacggccacgcccacagacccagcagcagagactacaagcacaacatcaagaaggtggacgacggcgtgaaggagatcgtgagcatgttcaaccacttctacggcaacgacggcaagaccaccttcatcttcaccagcgaccacggcatgaccgactggggcagccacggcgccggccaccccagcgagaccctgacccccctggtgacctggggcgccggcatcaagtacccccagagagtgagcgcccagcagttcgacgacgccttcctgaaggagtggagactggagaactggaagagactggacgtgaaccaggccgacatcgcccccctgatgaccagcctgatcggcgtgcccttccccctgaacagcgtgggcatcctgcccgtggactacctgaacaacaccgacctgttcaaggccgagagcatgttcaccaacgccgtgcagatcctggagcagttcaaggtgaagatgacccagaagaaggaggtgaccctgcccttcctgttcacccccttcaagctgctgagcgacagcaagcagttcaacatcctgagaaaggccagaagctacatcaagcacagaaagttcgacgaggtggtgagcctgtgcaaggagctgatccacctggccctgaagggcctgagctactaccacacctacgacagattcttcctgggcgtgaacgtggtgatcggcttcgtgggctggatcagctacgccagcctgctgatcatcaagagccacagcaacctgatcaagggcgtgagcaaggaggtgaagaagcccagccacctgctgccctgcagcttcgtggccatcggcatcctggtggccttcttcctgctgatccaggcctgcccctggacctactacgtgtacggcctgctgcccctgcccatctggtacgccgtgctgagagagttccaggtgatccaggacctggtggtgagcgtgctgacctaccccctgagccacttcgtgggctacctgctggccttcaccctgggcatcgaggtgctggtgctgagcttcttctacagatacatgctgaccgccggcctgaccgccttcgccgcctggcccttcctgaccagactgtggaccagagccaagatgaccagcctgagctggaccttcttcagcctgctgctggccgtgttccccctgatgcccgtggtgggcagaaagcccgacatcagcctggtgatgggcgccggcctgctggtgctgctgctgagcctgtgcgtggtgaccagcctgatgaagagaaaggacagcttcatcaaggaggagctgctggtgcacctgctgcaggtgctgagcaccgtgctgagcatgtacgtggtgtacagcacccagagcagcctgctgagaaagcagggcctgcccctgatgaaccagatcatcagctgggccaccctggccagcagcctggtggtgcccctgctgagcagccccgtgctgttccagagactgttcagcatcctgctgagcctgatgagcacctacctgctgctgagcaccggctacgaggccctgttccccctggtgctgagctgcctgatgttcgtgtggatcaacatcgagcaggagaccctgcagcagagcggcgtgtgctgcaagcagaagctgaccagcatccagttcagctacaacaccgacatcacccagttcagacagctgtacctggacgacatcagaagagccttcttcctggtgttcttcctggtgaccgccttcttcggcaccggcaacatcgccagcatcaacagcttcgacctggccagcgtgtactgcttcctgaccgtgttcagccccttcatgatgggcgccctgatgatgtggaagatcctgatccccttcgtgctggtgatgtgcgccttcgaggccgtgcagctgaccacccagctgagcagcaagagcctgttcctgatcgtgctggtgatcagcgacatcatggccctgcacttcttcttcctggtgaaggactacggcagctggctggacatcggcaccagcatcagccactacgtgatcgtgatgagcatgaccatcttcctggtgttcctgaacggcctggcccagctgctgaccaccaagaagctgagactgtgcggcaagcccaagagccacttcatgtag

SEQ ID NO: 252211 - protein, 170 aa, Artificial Sequence
  derived and/or modified sequence
MTEYKLVVVGAGGVGKSALTIQLIQNHFVDEYDPTIEDSYRKQVVIDGETCLLDILDTAGQEEYSAMRDQYMRTGEGFLCVFAINNTKSFEDIHQYREQIKRVKDSDDVPMVLVGNKCDLAARTVESRQAQDLARSYGIPYIETSAKTRQGSRSGSSSSSGTLWDPPGPM

SEQ ID NO: 252212 - DNA, 513 bp, Artificial Sequence
  derived and/or modified sequence
atgaccgagtacaagctggtggtggtgggcgccggcggcgtgggcaagagcgccctgaccatccagctgatccagaaccacttcgtggacgagtacgaccccaccatcgaggacagctacagaaagcaggtggtgatcgacggcgagacctgcctgctggacatcctggacaccgccggccaggaggagtacagcgccatgagagaccagtacatgagaaccggcgagggcttcctgtgcgtgttcgccatcaacaacaccaagagcttcgaggacatccaccagtacagagagcagatcaagagagtgaaggacagcgacgacgtgcccatggtgctggtgggcaacaagtgcgacctggccgccagaaccgtggagagcagacaggcccaggacctggccagaagctacggcatcccctacatcgagaccagcgccaagaccagacagggcagcagaagcggcagcagcagcagcagcggcaccctgtgggacccccccggccccatgtag

SEQ ID NO: 252213 - DNA, 228 bp, Artificial Sequence
  derived and/or modified sequence
atgaccgagtacaagctggtggtggtgggcgccggcggcgtgggcaagagcgccctgaccatccagctgatccagaaccacttcgtggacgagtacgaccccaccatcgagggcgtggacgacgccttctacaccctggtgagagagatcagaaagcacaaggagaagatgagcaaggacggcaagaagaagaagaagaagagcaagaccaagtgcgtgatcatgtag

SEQ ID NO: 252214 - DNA, 513 bp, Artificial Sequence
  derived and/or modified sequence
atgaccgagtacaaacttgtcgtcgtcggggcagggggagttgggaagtccgctttgaccattcaactgattcagaatcacttcgtggacgagtacgatcccaccatcgaggactcttaccgcaaacaagtggtaattgacggggagacctgtctcctggatattctggataccgctgggcaggaggagtactcagcaatgcgcgatcagtatatgaggacaggagagggatttctctgtgtcttcgctataaataatacaaaatcttttgaggatattcatcagtaccgcgagcaaatcaaacgcgtgaaggattcggacgatgtgcccatggtgctggtcggtaataaatgtgatctcgcagcgcgaaccgttgaatctaggcaagctcaggacctggcgcgatcatatgggattccatacatcgaaacctctgccaaaacacggcaaggatcccgctcagggtcaagctcctccagtggtacactgtgggacccgcctggacctatgtag

SEQ ID NO: 252215 - DNA, 513 bp, Artificial Sequence
  derived and/or modified sequence
atgactgaatacaaattagtggtggtgggggcaggcggggtgggtaagtccgccctcaccattcagctgattcagaaccactttgtggacgagtatgaccccaccattgaagactcctatagaaaacaagttgtcatcgacggcgagacctgccttttggatatcctcgatactgccgggcaagaagaatatagcgcaatgcgagaccagtacatgcgaaccggcgagggcttcctctgcgtatttgcaatcaacaatacaaagagtttcgaagatatacaccagtaccgagagcagatcaagcgggtgaaggattctgacgacgtccccatggttctcgtcggaaacaagtgcgatctcgcagcccggactgtggagagcaggcaagctcaagacctggcgcggagctatggaatcccctatatcgaaacctccgctaagactagacaggggtctcgtagcggatcatcttccagttcaggaacactctgggatcctcctggcccaatgtag

SEQ ID NO: 252216 - DNA, 513 bp, Artificial Sequence
  derived and/or modified sequence
atgactgaatacaaactcgtggtggtcggcgctggtggagtggggaagtctgcactaacaattcagctcattcagaaccactttgtggatgaatacgatcccaccatcgaggattcatatagaaagcaggtagtcattgacggggaaacctgtttgctggatattctcgatactgccgggcaggaagaatacagtgccatgcgggatcagtacatgcgcaccggagaaggtttcctgtgtgtgttcgcaattaataacacgaagagctttgaggacattcatcagtatagggagcagattaagagagtgaaagactcggacgacgtgccaatggtactggtggggaacaaatgcgatcttgcggcgagaacagtggagagccgtcaagctcaagacctggcgaggagctacggtatcccttacattgagacctccgcaaagacacggcaagggtctagatcaggtagtagttcctcaagtggaaccttgtgggatccccccggacctatgtag

SEQ ID NO: 252217 - DNA, 228 bp, Artificial Sequence
  derived and/or modified sequence
atgaccgagtacaagctcgtagtggtgggagccggcggcgtggggaagtcagcgctcacaatacagttgatacagaatcattttgtggatgagtacgatcccaccattgaaggggttgacgacgccttttatacgttggtgcgcgagatccggaaacacaaggagaagatgtcgaaggatgggaagaagaagaaaaagaagtcaaagactaaatgtgtgatcatgtag

SEQ ID NO: 252218 - DNA, 513 bp, Artificial Sequence
  derived and/or modified sequence
atgacagagtacaagctggtggtggtgggcgctgggggcgtgggcaagagcgccctgaccatccagctgatccagaaccactttgtggatgaatatgaccccaccattgaagattcctacaggaagcaggtggtgattgatggagagacctgcctgctggacatcctggacacagctggccaggaggagtacagcgccatgagggaccagtacatgaggactggagagggcttcctgtgtgtgtttgccatcaacaacaccaagagctttgaggacatccaccagtaccgggagcagatcaagagggtgaaggacagtgatgatgtgcccatggtgctggtgggcaacaagtgtgacctggccgccaggacagtggagagccggcaggcccaggacctggcccggagctatggcatcccctacatcgagaccagcgccaagacccggcagggcagccgcagcggcagcagcagcagcagcggcaccctgtgggaccccccaggccccatgtag

SEQ ID NO: 252219 - DNA, 228 bp, Artificial Sequence
  derived and/or modified sequence
atgacagagtacaagctggtggtggtgggcgctgggggcgtgggcaagagcgccctgaccatccagctgatccagaaccactttgtggatgaatatgaccccaccatcgagggcgtggatgatgccttctacaccctggtgcgggagatcaggaagcacaaggagaagatgagcaaggatggcaagaagaagaagaagaagagcaagaccaagtgtgtgatcatgtag

SEQ ID NO: 252220 - DNA, 513 bp, Artificial Sequence
  derived and/or modified sequence
atgaccgagtacaagctggtggtggtgggcgccggcggcgtgggcaagtctgccctgaccattcagctcatacagaatcacttcgtggacgaatacgaccccacaattgaagattcttaccgcaagcaggttgtaatcgacggagaaacctgtctgctagatatactcgacaccgccgggcaagaggaatactctgccatgcgagatcagtacatgagaaccggtgagggttttctgtgcgtctttgctatcaataacactaaaagctttgaagatatacaccaatatagggagcagattaagcgtgttaaggacagtgacgatgtgccaatggtgctggttggcaacaaatgcgacctggctgccaggaccgttgagtcaaggcaggcccaggaccttgcccgtagctacggcattccatacatcgagacttccgccaaaacaaggcaggggtcacgctccggctctagcagctcatcggggacgctctgggatcctcccggccccatgtag

SEQ ID NO: 252221 - DNA, 513 bp, Artificial Sequence
  derived and/or modified sequence
atgaccgagtacaagctggtggtggtgggcgccggcggcgtgggcaaatctgccctaaccattcagctaatccagaatcattttgtggacgaatacgatcctaccattgaggactcatacaggaaacaggtcgttattgacggggagacttgtttgctggatatcttagacactgccggtcaagaagagtacagtgctatgcgcgatcaatatatgcggactggagaaggctttctgtgcgtgtttgcaattaacaataccaaaagctttgaagatattcaccaataccgggagcagattaagcgcgtaaaagatagcgacgacgtcccgatggtcttagtggggaataaatgtgatctggccgcccgaacggtcgagagccgacaggcacaggacctcgctcggtcatatggcatcccttacatcgagacatcagccaaaacacgtcaggggtccaggagtgggtcctcttcatcctcggggactctgtgggatcctcccgggcctatgtag

SEQ ID NO: 252222 - DNA, 513 bp, Artificial Sequence
  derived and/or modified sequence
atgaccgagtacaagctggtggtggtgggcgccggcggcgtgggcaaatctgctctcaccattcagctgatccaaaaccattttgtcgacgagtatgatcctaccatcgaagactcttaccgaaaacaggtggtgatcgatggcgaaacatgtctgttggacatcctggacaccgccggccaggaagagtatagtgccatgagagaccagtatatgaggactggcgaaggcttcctgtgtgtgtttgccattaataacacaaaatcgtttgaagatattcatcagtatagagagcagattaaacgcgtgaaggatagtgatgatgtgccaatggtgctggtcggcaacaagtgtgacctggccgccagaacagtggagtctcggcaggcccaagatttggctcgatcttatggtatcccctatatagagacaagcgctaaaaccagacagggtagtagatccggatcatcctctagttccgggacactttgggacccgcccggccctatgtag

SEQ ID NO: 252223 - DNA, 228 bp, Artificial Sequence
  derived and/or modified sequence
atgaccgagtacaagctggtggtggtgggcgccggcggcgtgggcaagtctgccctgactattcagctcatccagaaccacttcgtcgatgaatacgatccaacaatcgaaggcgtggacgatgcattttacacactcgtgcgcgaaattcggaagcataaagagaagatgtccaaggacggaaaaaaaaagaaaaagaaaagcaaaaccaagtgcgtcatcatgtag

SEQ ID NO: 252224 - DNA, 513 bp, Artificial Sequence
  derived and/or modified sequence
atgaccgagtataaattggtagtggtaggtgccggtggcgtcggtaagtctgcgctcaccatacagcttatccagaaccacttcgtagatgaatatgaccccactatagaagacagttatcggaagcaagttgtcattgatggggaaacttgcttgttggatatcctcgacaccgccggtcaggaggagtatagcgccatgcgcgatcagtacatgaggactggggaaggtttcctttgcgtgttcgctattaataacacaaagtcattcgaggatattcaccagtacagagagcagatcaagagagtgaaagactctgacgacgttcccatggtgcttgtcgggaataagtgtgacttggcggctcggactgtagagagcaggcaagctcaagatttagcacggtcctatggcatcccctacattgagacttccgccaaaactaggcagggttcaaggtccgggagcagttcgagctctggaaccctctgggatccacctgggccaatgtag

SEQ ID NO: 252225 - DNA, 513 bp, Artificial Sequence
  derived and/or modified sequence
atgacagaatataaactcgtcgtggtaggtgccggtggggtgggcaaaagtgcacttaccatacagctgatacagaaccatttcgtcgacgagtacgatcccactatcgaggactcctacaggaagcaggtggtgatcgatggggagacctgcttactggacatcctcgataccgccggacaggaggaatactccgccatgcgggatcagtacatgagaaccggcgaaggctttctatgtgtgttcgccattaataataccaagtccttcgaggacattcatcaatacagggagcagattaagagggttaaggactcagacgatgtgccgatggtgcttgtgggaaataaatgtgatctggctgcccgaacagtggagtcaagacaagcccaggacctcgccaggtcgtatggcatcccatacatcgagacgagcgccaaaacccggcagggaagcagatccggtagcagctctagcagtggaactctctgggatccccctgggcctatgtag

SEQ ID NO: 252226 - DNA, 513 bp, Artificial Sequence
  derived and/or modified sequence
atgactgagtacaagctggtcgtggtgggagctggaggcgtgggaaaaagcgcactgaccatacagcttatacaaaaccattttgtagacgaatacgaccctaccattgaggactcctaccggaagcaagtggtaatcgacggggagacctgcctgcttgatattttggacacagctggccaggaagagtattctgctatgcgcgaccagtatatgcgaaccggagaaggattcctctgcgtctttgctataaataacactaagtctttcgaggatattcatcagtatagggaacagattaagagagtaaaggattcggatgatgtacccatggtcctggtaggcaacaagtgcgatctggcagcacgcacagtggagagcaggcaggctcaggatctggcccgtagctatgggattccatacatagagacaagcgctaaaactcgccagggctcccgctcagggtcatccagttcctccggaaccttatgggatcctcctggcccaatgtag

SEQ ID NO: 252227 - DNA, 228 bp, Artificial Sequence
  derived and/or modified sequence
atgactgaatacaagttggtcgtggtaggcgctggcggagtaggcaagtctgctctaactatccagctgattcagaaccactttgtcgatgaatacgatcccacaattgagggcgttgacgacgctttttatactctcgtgagagagattcgaaaacataaagaaaagatgtcaaaggatggaaaaaagaagaagaagaaaagcaagaccaaatgtgtgatcatgtag

SEQ ID NO: 252228 - DNA, 1099 bp, Artificial Sequence
  derived and/or modified sequence
gtggggcaggagaccctgtaggaggaccccgggccgcaggcccctgaggagcgatgacggaatataagctggtggtggtgggcgccggcggtgtgggcaagagtgcgctgaccatccagctgatccagaaccattttgtggacgaatacgaccccactatagaggattcctaccggaagcaggtggtcattgatggggagacgtgcctgttggacatcctggataccgccggccaggaggagtacagcgccatgcgggaccagtacatgcgcaccggggagggcttcctgtgtgtgtttgccatcaacaacaccaagtcttttgaggacatccaccagtacagggagcagatcaaacgggtgaaggactcggatgacgtgcccatggtgctggtggggaacaagtgtgacctggctgcacgcactgtggaatctcggcaggctcaggacctcgcccgaagctacggcatcccctacatcgagacctcggccaagacccggcagggcagccgctctggctctagctccagctccgggaccctctgggaccccccgggacccatgtgacccagcggcccctcgcgctggagtggaggatgccttctacacgttggtgcgtgagatccggcagcacaagctgcggaagctgaaccctcctgatgagagtggccccggctgcatgagctgcaagtgtgtgctctcctgacgcaggtgagggggactcccagggcggccgccacgcccaccggatgaccccggctccccgcccctgccggtctcctggcctgcggtcagcagcctcccttgtgccccgcccagcacaagctcaggacatggaggtgccggatgcaggaaggaggtgcagacggaaggaggaggaaggaaggacggaagcaaggaaggaaggaagggctgctggagcccagtcaccccgggaccgtgggccgaggtgactgcagaccctcccagggaggctgtgcacagactgtcttgaacatcccaaatgccaccggaaccccagcccttagctcccctcccaggcctctgtgggcccttgtcgggcacagatgggatcacagtaaattattggatggtcttga

SEQ ID NO: 252229 - DNA, 1233 bp, Artificial Sequence
  derived and/or modified sequence
tgccctgcgcccgcaacccgagccgcacccgccgcggacggagcccatgcgcggggcgaaccgcgcgcccccgcccccgccccgccccggcctcggccccggccctggccccgggggcagtcgcgcctgtgaacggtggggcaggagaccctgtaggaggaccccgggccgcaggcccctgaggagcgatgacggaatataagctggtggtggtgggcgccggcggtgtgggcaagagtgcgctgaccatccagctgatccagaaccattttgtggacgaatacgaccccactatagaggattcctaccggaagcaggtggtcattgatggggagacgtgcctgttggacatcctggataccgccggccaggaggagtacagcgccatgcgggaccagtacatgcgcaccggggagggcttcctgtgtgtgtttgccatcaacaacaccaagtcttttgaggacatccaccagtacagggagcagatcaaacgggtgaaggactcggatgacgtgcccatggtgctggtggggaacaagtgtgacctggctgcacgcactgtggaatctcggcaggctcaggacctcgcccgaagctacggcatcccctacatcgagacctcggccaagacccggcagggcagccgctctggctctagctccagctccgggaccctctgggaccccccgggacccatgtgacccagcggcccctcgcgctggagtggaggatgccttctacacgttggtgcgtgagatccggcagcacaagctgcggaagctgaaccctcctgatgagagtggccccggctgcatgagctgcaagtgtgtgctctcctgacgcaggtgagggggactcccagggcggccgccacgcccaccggatgaccccggctccccgcccctgccggtctcctggcctgcggtcagcagcctcccttgtgccccgcccagcacaagctcaggacatggaggtgccggatgcaggaaggaggtgcagacggaaggaggaggaaggaaggacggaagcaaggaaggaaggaagggctgctggagcccagtcaccccgggaccgtgggccgaggtgactgcagaccctcccagggaggctgtgcacagactgtcttgaacatcccaaatgccaccggaaccccagcccttagctcccctcccaggcctctgtgggcccttgtcgggcacagatgggatcacagtaaattattggatggtcttg

SEQ ID NO: 252230 - DNA, 1114 bp, Artificial Sequence
  derived and/or modified sequence
gcaacccgagccgcacccgccgcggacggagcccatgcgcggggcgaaccgcgcgcccccgcccccgccccgccccggcctcggccccggccctggccccgggggcagtcgcgcctgtgaacggtggggcaggagaccctgtaggaggaccccgggccgcaggcccctgaggagcgatgacggaatataagctggtggtggtgggcgccggcggtgtgggcaagagtgcgctgaccatccagctgatccagaaccattttgtggacgaatacgaccccactatagaggattcctaccggaagcaggtggtcattgatggggagacgtgcctgttggacatcctggataccgccggccaggaggagtacagcgccatgcgggaccagtacatgcgcaccggggagggcttcctgtgtgtgtttgccatcaacaacaccaagtcttttgaggacatccaccagtacagggagcagatcaaacgggtgaaggactcggatgacgtgcccatggtgctggtggggaacaagtgtgacctggctgcacgcactgtggaatctcggcaggctcaggacctcgcccgaagctacggcatcccctacatcgagacctcggccaagacccggcagggcagccgctctggctctagctccagctccgggaccctctgggaccccccgggacccatgtgacccagcggcccctcgcgctggagtggaggatgccttctacacgttggtgcgtgagatccggcagcacaagctgcggaagctgaaccctcctgatgagagtggccccggctgcatgagctgcaagtgtgtgctctcctgacgcagcacaagctcaggacatggaggtgccggatgcaggaaggaggtgcagacggaaggaggaggaaggaaggacggaagcaaggaaggaaggaagggctgctggagcccagtcaccccgggaccgtgggccgaggtgactgcagaccctcccagggaggctgtgcacagactgtcttgaacatcccaaatgccaccggaaccccagcccttagctcccctcccaggcctctgtgggcccttgtcgggcacagatgggatcacagtaaattattggatggtcttga

SEQ ID NO: 252231 - DNA, 1052 bp, Artificial Sequence
  derived and/or modified sequence
gattttcctaggcggcggccgcggcggcggaggcagcagcggcggcggcagtggcggcggcgaaggtggcggcggctcggccagtactcccggcccccgccatttcggactgggagcgagcgcggcgcaggcactgaaggcggcggcggggccagaggctcagcggctcccaggtgcgggagagaggcctgctgaaaatgactgaatataaacttgtggtagttggagctggtggcgtaggcaagagtgccttgacgatacagctaattcagaatcattttgtggacgaatatgatccaacaatagagggtgttgatgatgccttctatacattagttcgagaaattcgaaaacataaagaaaagatgagcaaagatggtaaaaagaagaaaaagaagtcaaagacaaagtgtgtaattatgtaaatacaatttgtacttttttcttaaggcatactagtacaagtggtaatttttgtacattacactaaattattagcatttgttttagcattacctaatttttttcctgctccatgcagactgttagcttttaccttaaatgcttattttaaaatgacagtggaagtttttttttcctctaagtgccagtattcccagagttttggtttttgaactagcaatgcctgtgaaaaagaaactgaatacctaagatttctgtcttggggcttttggtgcatgcagttgattacttcttatttttcttaccaattgtgaatgttggtgtgaaacaaattaatgaagcttttgaatcatccctattctgtgttttatctagtcacataaatggattaattactaatttcagttgagaccttctaattggtttttactgaaacattgagggaacacaaatttatgggcttcctgatgatgattcttctaggcatcatgtcctatagtttgtcatccctgatgaatgtaaagttacactgttcacaaaggttttgtctcctttccactgctattagtcatggtcactctccccaaaatattatattttttctataaaaagaaaaaaatggaaaaaaa

SEQ ID NO: 252232 - protein, 662 aa, Artificial Sequence
  derived and/or modified sequence
MNGDSRAAVVTSPPPTTAPHKERYFDRVDENNPEYLRERNMAPDLRQDFNMMEQKKRVSMILQSPAFCEELESMIQEQFKKGKNPTGLLALQQIADFMTTNVPNVYPAAPQGGMAALNMSLGMVTPVNDLRGSDSIAYDKGEKLLRCKLAAFYRLADLFGWSQLIYNHITTRVNSEQEHFLIVPFGLLYSEVTASSLVKINLQGDIVDRGSTNLGVNQAGFTLHSAIYAARPDVKCVVHIHTPAGAAVSAMKCGLLPISPEALSLGEVAYHDYHGILVDEEEKVLIQKNLGPKSKVLILRNHGLVSVGESVEEAFYYIHNLVVACEIQVRTLASAGGPDNLVLLNPEKYKAKSRSPGSPVGEGTGSPPKWQIGEQEFEALMRMLDNLGYRTGYPYRYPALREKSKKYSDVEVPASVTGYSFASDGDSGTCSPLRHSFQKQQREKTRWLNSGRGDEASEEGQNGSSPKSKTKVWTNITHDHVKPLLQSLSSGVCVPSCITNCLWTKEDGHRTSTSAVPNLFVPLNTNPKEVQEMRNKIREQNLQDIKTAGPQSQVLCGVVMDRSLVQGELVTASKAIIEKEYQPHVIVSTTGPNPFTTLTDRELEEYRREVERKQKGSEENLDEAREQKEKSPPDQPAVPHPPPSTPIKLEEGDGCAREYLLP

SEQ ID NO: 252233 - DNA, 1989 bp, Artificial Sequence
  derived and/or modified sequence
atgaacggcgattcaagagctgctgtggtgacaagtccaccaccaaccactgccccccataaggagcgctattttgaccgcgtggacgagaataatcccgaatatttgcgcgaaagaaatatggcgcccgatctgcgccaagacttcaacatgatggaacaaaaaaaacgggttagtatgatcctgcaaagccccgccttctgcgaggaactcgagtctatgatacaggaacagtttaagaaaggcaaaaatcctaccgggctgcttgccctgcagcaaatcgcggacttcatgacaaccaacgttcccaatgtttaccctgctgcaccccagggcggaatggccgcactgaacatgagtctggggatggttactccagtaaacgatctcagggggagcgacagcatagcatacgacaagggggaaaaactgcttcggtgtaagctggcagccttctaccggttggccgaccttttcggctggtcccagctcatatataatcacattactacacgcgtaaactccgaacaggaacattttctgatcgtcccgttcgggcttctgtactccgaggtgactgcctcctcactggtgaaaattaacctccagggagatatagtggacagaggttccaccaacctaggggtgaatcaggctgggttcaccctgcattccgctatatacgcagcccgccctgacgtcaagtgcgtggtccacatccacacccctgcaggggcagctgttagcgctatgaaatgcggcctgcttcccattagtcccgaggctctgtcattaggagaagtcgcttaccacgattaccatggcattctcgtcgatgaggaggagaaagtgctgattcaaaagaatttgggtcctaaatctaaagtcctgatactccggaatcacggactcgtctctgtcggcgagtctgttgaagaagcattctattatatccataacctcgtcgtcgcctgcgagatccaggtccgaactctcgccagtgccggtgggcccgacaacttggtgctgctgaaccctgagaaatataaagctaaaagcagatccccaggatcccctgtgggcgaggggactggctctcccccgaaatggcagatcggagagcaggagttcgaagctcttatgcgcatgctggataacttaggctacagaacaggatacccatacagatatccagctctgagggaaaagtctaaaaaatacagcgatgttgaggtcccagccagcgtaaccgggtactcctttgcctcagacggagactctggcacctgttctccactcaggcactcatttcagaagcagcaacgcgaaaagactcgctggctgaactcaggaaggggcgacgaggcatccgaggaaggacagaacggctccagccccaaatccaaaaccaaggtttggacaaatatcacccacgaccacgtgaagccgctgctgcagagtctctcctctggggtttgcgttccaagttgcatcaccaattgtctctggacaaaggaggatggccatcggacttccacatccgcagtgcccaacctttttgttccgcttaacactaatccaaaggaagtccaagagatgaggaataagatacgtgagcaaaatctgcaggatattaagaccgccgggccccaatctcaggtgctgtgcggagtggttatggaccgctcattggtccagggcgaacttgttactgccagcaaagccattattgagaaagagtaccagccccacgtaattgtcagcactacaggccctaacccatttaccacactgacagatagagagctggaggagtaccgtagagaagtcgagaggaagcagaaagggtccgaggagaaccttgacgaagccagagaacagaaggaaaagagccctcccgaccagcccgcggttccgcacccccccccgtctacccccatcaagctggaggagggtgatgggtgtgcccgagagtatctgcttccctag

SEQ ID NO: 252234 - DNA, 1989 bp, Artificial Sequence
  derived and/or modified sequence
atgaacggggacagccgggccgctgtggtcacaagtcccccccctaccacagctccccacaaagagcgctatttcgatagagtggatgagaataatcccgagtacctgagagaacggaacatggcccccgatctccgccaggattttaacatgatggagcagaaaaagagggtgtccatgatcctgcaatctccagccttttgtgaggagctggaatccatgatccaggagcagttcaagaaggggaaaaatcccactggtcttctggctctgcagcagattgctgacttcatgacaaccaatgtgcctaatgtctatcctgccgccccccaggggggaatggccgctctgaatatgtcactggggatggtgactccagtgaatgacctccgtggaagcgacagtatcgcttatgacaaaggggagaagctactgcggtgtaagctggccgctttctataggctcgcagacctgttcggctggagccagctaatctacaaccatatcaccactcgtgtgaatagtgaacaggagcacttcttgatcgtcccatttggcctgctttactcagaggtgacagccagcagcctcgtaaagattaacttgcagggagatattgtcgaccgcggaagcacaaacttgggggtcaatcaagccgggtttactcttcactccgccatctatgcagccaggccagatgttaagtgtgtggtccatatccacactccagccggagcggcagtatcagcaatgaagtgcggcttgctgccgatctctcccgaggcactcagcctcggagaagttgcatatcatgattaccacggcattctcgtcgatgaggaggaaaaagttctcatccagaaaaacctgggaccaaagtcaaaggtgctgatcctgaggaaccacgggttggtgagcgttggcgaatcggtggaggaagccttctactacattcacaacttagtggtggcctgcgagattcaggttcggacactggcgagcgcgggaggcccggacaatctggtcctgcttaatccggaaaagtacaaggccaagtcacgcagccctggttcaccagttggcgagggaactggaagcccgcccaagtggcagatcggggagcaggagtttgaggcactcatgcgtatgctcgataacctggggtacaggacaggctacccttacaggtacccggccctcagagaaaaatctaagaagtactctgatgttgaggtccccgcttccgtgacaggctattctttcgcttcagatggagactctggcacatgctcccccttaagacacagcttccagaagcaacagcgcgagaaaacgagatggctgaactccggtcggggcgatgaggcttccgaagagggccagaatggctcaagccccaaaagcaagaccaaagtctggaccaatattactcacgatcatgtgaagccactgcttcagagcctgtcctccggcgtgtgcgtgccaagctgcatcacaaactgcctgtggaccaaagaggatgggcatcgtacatcaacaagtgctgtgccgaacctgttcgtacctttaaacaccaatcccaaagaagtgcaagaaatgaggaacaagatcagagagcagaacctccaggatatcaaaaccgccggtcctcagtcacaggtgctgtgtggggttgtcatggataggtccctggtgcaaggcgagctggtgaccgcgtctaaagcaatcatcgagaaagagtaccagccccatgtaatcgtgtccaccacaggtcctaatccctttaccacgctgaccgaccgcgagttggaggagtaccggagagaagtggaacgcaaacaaaaagggtctgaggagaatctggacgaggcacgcgaacagaaggaaaagtcaccaccagaccagcctgctgtcccccaccctccgccttccacacccatcaagttagaagagggcgacgggtgcgcgcgcgagtacctgctgccatag

SEQ ID NO: 252235 - DNA, 2361 bp, Artificial Sequence
  derived and/or modified sequence
gaacctagaaagattgtacaatgaatggtgattctcgtgctgcggtggtgacctcaccacccccgaccacagcccctcacaaggagaggtacttcgaccgagtagatgagaacaacccagagtacttgagggagaggaacatggcaccagaccttcgccaggacttcaacatgatggagcaaaagaagagggtgtccatgattctgcaaagccctgctttctgtgaagaattggaatcaatgatacaggagcaatttaagaaggggaagaaccccacaggcctattggcattacagcagattgcagattttatgaccacgaatgtaccaaatgtctacccagcagctccgcaaggagggatggctgccttaaacatgagtcttggtatggtgactcctgtgaacgatcttagaggatctgattctattgcgtatgacaaaggagagaagttattacggtgtaaattggcagcgttttatagactagcagatctctttgggtggtctcagcttatctacaatcatatcacaaccagagtgaactccgagcaggaacacttcctcattgtcccttttgggcttctttacagtgaagtgactgcatccagtttggttaagatcaatctacaaggagatatagtagatcgtggaagcactaatctgggagtgaatcaggccggcttcaccttacactctgcaatttatgctgcacgcccggacgtgaagtgcgtcgtgcacattcacaccccagcaggggctgcggtctctgcaatgaaatgtggcctcttgccaatctccccggaggcgctttcccttggagaagtggcttatcatgactaccatggcattctggttgatgaagaggaaaaagttttgattcagaaaaatctggggcctaaaagcaaggttcttattctccggaaccatgggctcgtgtcagttggagagagcgttgaggaggccttctattacatccataaccttgtggttgcctgtgagatccaggttcgaactctggccagtgcaggaggaccagacaacttagtcctgctgaatcctgagaagtacaaagccaagtcccgttccccagggtctccggtaggggaaggcactggatcgcctcccaagtggcagattggtgagcaggaatttgaagccctcatgcggatgctcgataatctgggctacagaactggctacccttatcgataccctgctctgagagagaagtctaaaaaatacagcgatgtggaggttcctgctagtgtcacaggttactcctttgctagtgacggtgattcgggcacttgctccccactcagacacagttttcagaagcagcagcgggagaagacaagatggctgaactctggccggggcgacgaagcttccgaggaagggcagaatggaagcagtcccaagtcgaagactaaggtgtggacgaacattacacacgatcacgtgaaacccttgctgcagtctctctcgtccggtgtctgcgtgccaagctgtattaccaactgcttgtggactaaagaggatggacatagaacttccacctctgctgtccctaacctgtttgttccattgaacactaacccaaaagaggtccaggagatgaggaacaagatccgagagcagaatttacaggacattaagacggctggccctcagtcccaggttttgtgtggtgtagtgatggacaggagcctcgtccagggagagctggtgacggcctccaaggccatcattgaaaaggagtaccagccccacgtcattgtgagcaccacgggccccaaccccttcaccacactcacagaccgtgagctggaggagtaccgcagggaggtggagaggaagcagaagggctctgaagagaatctggacgaggctagagaacagaaagaaaagagtcctccagaccagcctgcggtcccccacccgcctcccagcactcccatcaagctggaggaaggagacggatgcgctagagagtacctgttaccctaaccttgtgccggagccgactactggagatgacagtgatgctgccacctttaagccaactctccccgatctgtcccctgatgaaccttcagaagcactcggcttcccaatgttagagaaggaggaggaagcccatagacccccaagccccactgaggcccctactgaggccagccccgagccagccccagacccagccccggtggctgaagaggctgccccctcagctgtcgaggagggggccgccgcggaccctggcagcgatgggtctccaggcaagtccccgtccaaaaagaagaagaagttccgtaccccgtcctttctgaagaagagcaagaagaagagtgactcctga

SEQ ID NO: 252236 - DNA, 4068 bp, Artificial Sequence
  derived and/or modified sequence
gcacccaggtcgggcggtgggggcgagcggaggggctgaggggcggagaggcctggcgggccgctgctgcgggccaggggacgggggcggagccggagccggagccgacgggcggtggccgcactgggaccccggaatcccgcgcgctgcccacgattcgcttctgaggaacctagaaagattgtacaatgaatggtgattctcgtgctgcggtggtgacctcaccacccccgaccacagcccctcacaaggagaggtacttcgaccgagtagatgagaacaacccagagtacttgagggagaggaacatggcaccagaccttcgccaggacttcaacatgatggagcaaaagaagagggtgtccatgattctgcaaagccctgctttctgtgaagaattggaatcaatgatacaggagcaatttaagaaggggaagaaccccacaggcctattggcattacagcagattgcagattttatgaccacgaatgtaccaaatgtctacccagcagctccgcaaggagggatggctgccttaaacatgagtcttggtatggtgactcctgtgaacgatcttagaggatctgattctattgcgtatgacaaaggagagaagttattacggtgtaaattggcagcgttttatagactagcagatctctttgggtggtctcagcttatctacaatcatatcacaaccagagtgaactccgagcaggaacacttcctcattgtcccttttgggcttctttacagtgaagtgactgcatccagtttggttaagatcaatctacaaggagatatagtagatcgtggaagcactaatctgggagtgaatcaggccggcttcaccttacactctgcaatttatgctgcacgcccggacgtgaagtgcgtcgtgcacattcacaccccagcaggggctgcggtctctgcaatgaaatgtggcctcttgccaatctccccggaggcgctttcccttggagaagtggcttatcatgactaccatggcattctggttgatgaagaggaaaaagttttgattcagaaaaatctggggcctaaaagcaaggttcttattctccggaaccatgggctcgtgtcagttggagagagcgttgaggaggccttctattacatccataaccttgtggttgcctgtgagatccaggttcgaactctggccagtgcaggaggaccagacaacttagtcctgctgaatcctgagaagtacaaagccaagtcccgttccccagggtctccggtaggggaaggcactggatcgcctcccaagtggcagattggtgagcaggaatttgaagccctcatgcggatgctcgataatctgggctacagaactggctacccttatcgataccctgctctgagagagaagtctaaaaaatacagcgatgtggaggttcctgctagtgtcacaggttactcctttgctagtgacggtgattcgggcacttgctccccactcagacacagttttcagaagcagcagcgggagaagacaagatggctgaactctggccggggcgacgaagcttccgaggaagggcagaatggaagcagtcccaagtcgaagactaaggtgtggacgaacattacacacgatcacgtgaaacccttgctgcagtctctctcgtccggtgtctgcgtgccaagctgtattaccaactgcttgtggactaaagaggatggacatagaacttccacctctgctgtccctaacctgtttgttccattgaacactaacccaaaagaggtccaggagatgaggaacaagatccgagagcagaatttacaggacattaagacggctggccctcagtcccaggttttgtgtggtgtagtgatggacaggagcctcgtccagggagagctggtgacggcctccaaggccatcattgaaaaggagtaccagccccacgtcattgtgagcaccacgggccccaaccccttcaccacactcacagaccgtgagctggaggagtaccgcagggaggtggagaggaagcagaagggctctgaagagaatctggacgaggctagagaacagaaagaaaagagtcctccagaccagcctgcggtcccccacccgcctcccagcactcccatcaagctggaggaaggagacggatgcgctagagagtacctgttaccctaaccttgtgccggagccgactactggagatgacagtgatgctgccacctttaagccaactctccccgatctgtcccctgatgaaccttcagaagcactcggcttcccaatgttagagaaggaggaggaagcccatagacccccaagccccactgaggcccctactgaggccagccccgagccagccccagacccagccccggtggctgaagaggctgccccctcagctgtcgaggagggggccgccgcggaccctggcagcgatgggtctccaggcaagtccccgtccaaaaagaagaagaagttccgtaccccgtcctttctgaagaagagcaagaagaagagtgactcctgaaagccctgcgctaacactgtcctgtccggagcgaccctggctctgccagcgtccccggccacgtctgtgctctgtccttgtgtaatggaatgcaaaaaagccaagccctccgcctagaggtcccctcacgtgaccagccccgtgtagccccgggctgacccagtgtgtgctcagcagccccaccccaccctgccccttgtcctctcagagcctcagcttctgggggagacatgctctccccacaggggggaggcactaagtcatggtcctggctggaaggtactgaaggcttctgcagctttggctgcacgtcaccctcctgagcctcacctttcctgccgtccctcctgttgtgaaatcaccacattctgtctctgcttggcttcccctccaccctaaagtctcaggtgacggactcagactcctggcttcatgtggcattctctctgctcagtgatctcacttaaatctatatacaaagccttggtcccgtgaaaacactcgtgtgcccaccagcggccttgaagaggcaggtctgggccagatgctgggcaggaaaccccagcggcagatgggcctgtgtgcacccaacgtgatgctatgcatgtctgaccgacgatccctcgaccagaatcagattcaggagctcagtttctttttcacttgggtctctggattcctgtcatagggaaggtatatcaggaggggaagaggcctttctagaattttctttgagcaggtttacaatttagcttacatttttcgactgtgaacgtgaataggctgctttttgctttcttctttccagaccccacagtagagcacttttcacttatttgggggaggcttcaggggactgttctcaccttaactcagccagaaagatgccctagttgtgatcaaaggtaactcgaggtggagggtagccctggggcccctcgacatcaccgtcattgatggagcctgaaccgtgtgctcctcggcagatgctgttgttgttacttccctccaagaggctggaaaagggctcagagctgctgagcaggaaccggagggtgacccatttcaggaggtgccggtaccagcctgactaggtacaggcaagcttgtgtgggcccaacaggcccttggtagagctggtgccagatgtgggctcagatcctgggcatgatgggccgagccacctcggatcccactgattggccagccgagcgagaaccaggctgctgcatggcactgaccgccgcttccagcttcctctgagccgcagggcctgctacgcgggcaagcgtgctgcctctcttctgtgtcgttttgttgccaaggcagaatgaaaagtccttaaccgtggactcttcctttatcccctcctttaccccacatatgcaatgacttttaattttcacttttgtagtttaatcctttgtattacaacatgaaatatagttgcatatatggacaccgacttgggaggacaggtcctgaatgtcctttctccagtgtaacatgttttactcacaaataaaattctttcagcaa

SEQ ID NO: 252237 - DNA, 1989 bp, Artificial Sequence
  derived and/or modified sequence
atgaatggagacagcagagctgctgtggtgaccagccccccacccaccacagccccccacaaggagcgctactttgacagagtggatgagaacaaccctgagtacctgcgggagaggaacatggccccagacctgcggcaggacttcaacatgatggagcagaagaagagggtgtccatgatcctgcagagccctgccttctgtgaggagctggagagcatgatccaggagcagttcaagaagggcaagaaccccaccggcctgctggccctgcagcagattgctgacttcatgaccaccaacgtgcccaacgtgtacccagctgccccccagggcggcatggccgccctgaacatgagcctgggcatggtgacccctgtgaatgacctgcggggcagtgacagcatcgcctatgacaagggggagaagctgctgcgctgcaagctggccgccttctaccgcctggccgacctgtttggctggagccagctgatctacaaccacatcaccaccagggtgaacagcgagcaggagcacttcctgattgtgcccttcggcctgctgtacagcgaggtgacagccagcagcctggtgaagatcaacctgcagggcgacatcgtggaccggggcagcaccaacctgggcgtgaaccaggccggcttcaccctgcacagcgccatctatgctgcccggccagatgtgaagtgtgtggtgcacatccacaccccagctggagctgctgtgtctgccatgaagtgtggcctgctgcccatcagccctgaggccctgagcctgggggaggtggcctaccatgactaccacggcatcctggtggatgaggaggagaaggtgctgatccagaagaacctgggccccaagagcaaggtgctgatcctgaggaaccacggcctggtgtctgtgggggagagcgtggaggaggccttctactacatccacaacctggtggtggcctgtgagatccaggtgaggaccctggccagcgctgggggccctgacaacctggtgctgctgaaccctgagaagtacaaggccaagagccgcagccctggcagccctgtgggggagggcaccggcagcccccccaagtggcagatcggggagcaggagtttgaggccctgatgaggatgctggacaacctgggctacagaacaggctacccctaccgctacccagccctgcgggagaagagcaagaagtacagtgatgtggaggtgcctgcctctgtgacaggctacagctttgccagtgatggagacagcggcacctgcagccccctgcggcacagcttccagaagcagcagcgggagaagacccgctggctgaacagcggcagaggagatgaggccagcgaggagggccagaatggcagcagccccaagagcaagaccaaggtgtggaccaacatcacccatgaccacgtgaagcccctgctgcagagcctgagcagcggcgtgtgtgtgcccagctgcatcaccaactgcctgtggaccaaggaggatggccacaggaccagcaccagcgctgtgcccaacctgtttgtgcccctgaacaccaaccccaaggaggtgcaggagatgaggaacaagatccgggagcagaacctgcaggacatcaagacagctggcccccagagccaggtgctgtgtggggtggtgatggacaggagcctggtgcagggcgagctggtgacagccagcaaggccatcatcgagaaggagtaccagccccacgtgattgtgtccaccaccggccccaaccccttcaccaccctgacagaccgggagctggaggagtacagaagagaggtggagaggaagcagaagggcagcgaggagaacctggatgaggcccgggagcagaaggagaagagccccccagaccagcctgctgtgccccaccccccacccagcacccccatcaagctggaggagggagatggctgtgcccgggagtacctgctgccctag

SEQ ID NO: 252238 - DNA, 1989 bp, Artificial Sequence
  derived and/or modified sequence
atgaacggcgacagccgggccgccgtggtgaccagccccccccccaccacagcgccgcacaaggagagatactttgatcgtgtagacgagaataaccccgagtaccttagagaacggaatatggcacctgacctgcgccaggacttcaacatgatggaacagaaaaagagggtcagtatgatcctgcaaagtcctgctttttgtgaggagctggagagcatgatccaggagcagtttaagaagggtaaaaatcccactggccttctggctctgcagcaaattgccgatttcatgaccactaacgtgcctaatgtctacccagcggcccctcaaggaggaatggccgccctcaacatgtcactgggaatggttactccagtcaacgaccttcgcggctcagattctatcgcgtacgacaagggcgagaagctgttgcggtgcaaattggcggcattttacagactagcagatctgttcggatggtcacagctcatttataaccatatcacaacgagggtcaacagcgaacaggaacatttccttatagtcccattcggactgctatactctgaggtaactgctagcagtttggtgaagattaatttacagggcgacatcgtggatcggggctctaccaatctgggggtcaatcaggccgggtttactttgcatagcgccatctatgctgcccgacccgacgtgaagtgcgtagtacatatacatactcctgccggggctgcagtgagtgctatgaaatgtggacttctgcccatctcacctgaagctctgtccttgggcgaggtagcctatcacgactatcacgggattctggttgatgaagaagagaaggtactgatccagaaaaatttgggaccaaagagtaaagtactgattttgcgaaatcacggacttgtttctgtgggggaatcagtggaagaagccttctattacattcacaacctcgttgtggcatgcgaaatccaagtgagaacgttagctagtgccggcgggccagataatctcgtacttttaaacccagaaaagtacaaagccaagtcacgatcccctggttcccctgttggggaggggactgggtcccccccgaaatggcagatcggcgagcaggagtttgaggcactgatgcgtatgctggataatctgggctacagaacaggctatccgtacaggtaccctgcccttcgagaaaaatccaagaagtattctgacgtggaagttccggcatcggtcaccggttatagcttcgctagtgacggcgactctggcacgtgctcacccttgaggcactcgtttcagaagcaacagagggaaaaaaccagatggctgaattccggtagaggagacgaggcttctgaggagggacagaacggttccagtccgaaaagtaaaaccaaggtctggaccaacattactcatgaccacgtcaagccattgctacagtccttgtcttccggagtatgtgtgccatcatgtataactaattgcctatggactaaggaggatggacatcggacatcaacgtcggctgttccaaatcttttcgttcccctgaacactaatcccaaagaagtccaggagatgaggaataagatccgtgagcagaacctgcaggacatcaaaactgcgggccctcagagccaggtgctctgtggagtcgtcatggatcggtcacttgttcagggcgagctagtcactgcctcaaaggctatcattgagaaggagtaccaaccacatgtcattgtatccaccacagggcccaacccattcacaaccctaacagatcgggagcttgaggagtacagaagagaggtcgagagaaagcagaagggcagtgaggagaacttggacgaagctcgggaacagaaagagaaatcgccgcctgaccagcccgctgtaccccatccacccccctcgactccaatcaaactcgaggagggagatggctgtgcacgggagtatctcctgccatag

SEQ ID NO: 252239 - DNA, 1989 bp, Artificial Sequence
  derived and/or modified sequence
atgaacggcgacagccgggccgccgtggtgaccagccccccccccacaaccgctccccacaaggagaggtactttgacagagtcgacgagaataacccggagtaccttagagagcgtaacatggcgccagatctccgccaggacttcaatatgatggagcagaaaaaaagagtgtcgatgattctccaatcccctgctttctgtgaagagctggagtcaatgatccaagagcaattcaagaaaggaaaaaaccccaccggcttgctggccctgcagcagatagctgattttatgaccactaatgttccaaatgtgtaccctgccgcccctcagggcgggatggcagcccttaacatgtctctgggtatggtgactcccgtaaatgatctcagaggatcagactcaatcgcctatgataagggtgagaaattgctaaggtgtaagctggccgctttctacagactcgccgacctttttggttggtctcagctgatttacaaccacattactacccgggtgaactccgaacaagaacacttcctcatcgtcccatttggcctgctatacagcgaggtcaccgcttccagcctggttaagatcaatctgcagggagatattgtggacaggggatccacgaacttaggcgtgaatcaggctgggttcacactgcatagcgctatttacgcggcccggccagacgttaagtgcgttgtccacatccacacccccgcaggcgctgcagtgagcgctatgaagtgtggtctcctgcccatctcacccgaagctcttagtttaggagaggtggcctatcatgattaccacggaatacttgtggatgaagaagagaaggtgttgatccagaagaacctagggccgaagtccaaggtgttaatccttcgtaaccacggactggtgtcagtgggagaaagcgtggaggaggctttttactatatccacaacctggtggtggcatgcgagatacaagtgcggactctggccagcgccggaggcccggataacctggtcttgttgaacccggagaaatataaagcaaaatctagaagtccagggagccctgttggcgagggaacagggtcgccaccaaagtggcagatcggcgaacaggagtttgaggcactaatgaggatgctggataacctcggctatcggaccggctatccttataggtacccggcattaagagagaaaagcaaaaagtactccgacgtcgaggtgccagcctcagtgactggttattccttcgcctctgatggcgatagtggcacatgctcccccctgagacattcgttccagaagcagcagcgcgagaagacccgctggctgaacagcgggagaggggacgaggccagtgaggaaggtcagaatgggtctagccccaaaagcaaaactaaggtgtggacgaacatcacacacgatcatgttaaacctttactccagagcctgtcctccggggtatgcgtgccctcttgcattaccaactgtttgtggaccaaggaggacggccataggacatcgactagtgccgtacctaatctgttcgtccctttaaataccaatccaaaagaagtccaggagatgcgtaataaaatcagggaacagaacctgcaggacattaaaaccgccggcccccagtctcaggtattatgtggcgtggtgatggatcggtcactagtccagggggagctggtgaccgcaagtaaagctattatcgaaaaggaataccaacctcacgtgatagtcagcacgacagggccaaaccccttcacaactctgaccgatcgggagctggaggaatacaggagagaggtagagcgaaagcaaaaggggagcgaagagaatctggacgaagctagggagcagaaggagaagagccccccagaccagccggctgtgcctcaccctccaccctccacaccaattaaactggaggagggagatgggtgcgctagggagtacctgctcccctag

SEQ ID NO: 252240 - DNA, 1989 bp, Artificial Sequence
  derived and/or modified sequence
atgaatggcgattcaagagccgctgtggttacatcaccacctccaactactgctccacacaaggagagatacttcgatcgcgtggatgagaacaaccccgaatatctgcgcgagcgcaacatggctcccgacctccgccaagactttaatatgatggaacaaaagaagagagtttctatgattcttcaatcccctgcattttgcgaggagctggagtccatgattcaagaacaattcaaaaagggaaagaatcccacagggctgctcgcgctgcagcagatcgcagacttcatgaccactaatgtgcccaatgtctaccctgcagcaccccagggtggcatggccgcactcaatatgtcacttggaatggtgaccccagtgaatgatttacgaggcagtgactcgatcgcatacgacaagggagagaaacttctgcggtgtaaactcgccgctttttaccggctcgcagacttattcgggtggagtcagctcatttataaccacataacaactcgcgtgaacagcgaacaggaacatttcctgatcgtgccctttgggttactctactccgaggttacggcgtctagcctggtcaaaattaatctgcagggcgatatcgtggaccggggttcaacgaatctgggagtgaatcaggccggtttcacactacactctgctatctacgccgctaggcctgacgttaaatgtgtggtgcatatacataccccggctggcgctgccgtatcagcaatgaagtgcggtctgctacctatatcccctgaggctttgtcactgggcgaagtggcataccatgactaccacggtatcctcgtggacgaagaggaaaaagtacttatccagaaaaatttagggccaaagagcaaagtactgatactgaggaatcacggtctagtcagcgttggcgagtctgtcgaggaagcattctattacatacataatttggtagttgcgtgcgaaatccaggtgaggacactggcttccgctggtggccctgataatcttgtcctgttaaatccagaaaagtataaggccaagagcagaagccctggaagtcctgtcggtgaaggaacaggatctccccctaaatggcagattggtgagcaagagtttgaagcactgatgaggatgctggataatttagggtaccggactgggtacccctatcggtatccagccctcagggagaagtccaaaaaatactctgacgtagaggttcctgcttctgtaaccgggtactcttttgcctcggatggagacagcggtacctgttcacccctaaggcactccttccaaaagcagcagcgtgagaagacccggtggctcaactccgggaggggcgatgaagcttccgaagaagggcagaatggctcctcacctaagtcaaagactaaggtctggactaatatcactcacgatcacgtgaagcctctgctccaaagtctgagctccggagtctgtgtgccctcttgcatcacaaattgtttgtggacgaaggaggatggacataggacatctacatcagctgttcccaacctattcgttcctttaaacaccaatccaaaggaagtgcaggaaatgcgcaataagatcagagagcagaacttacaagacattaagaccgccggaccacagtctcaggtgttatgtggggttgttatggataggtccttggtgcagggcgagctcgtgactgcgtcaaaggcaataatcgaaaaagagtatcaacctcacgtgattgtttcgacaaccggtcctaacccctttacaacacttacagacagagagctcgaggagtacagaagggaggttgaaaggaagcaaaaaggcagtgaggaaaacttagatgaggcgagggagcagaaagaaaagtcaccgcctgaccagcccgcagttcctcaccctcccccttccacacccattaaactggaggaaggtgacggatgcgccagggagtacttgttaccatag

SEQ ID NO: 252241 - DNA, 1989 bp, Artificial Sequence
  derived and/or modified sequence
atgaatggagacagtcgggcagcagtggtcacctctccccctcctacaaccgctccccataaggaacgatactttgaccgtgttgatgaaaacaaccctgagtatcttcgcgaacgcaacatggctccggatcttcggcaagatttcaatatgatggagcagaaaaaacgggtctcaatgatacttcagagcccagccttttgtgaggaactggagtctatgattcaggaacagtttaagaagggcaagaaccccacaggattgcttgcactgcaacaaatagcagatttcatgacaactaatgttccgaacgtatatccagccgctccccagggcggaatggctgcactaaacatgagcttaggcatggtcacaccggtgaacgatttgagaggcagcgattccatagcctatgataaaggagaaaaactactcaggtgtaaactagccgcattttatcgcctggccgacctttttgggtggtcccagcttatttacaaccacattaccacgcgcgtcaattctgagcaagaacacttcctgatagtccctttcggcctcttatattcagaggtgaccgccagctcgctcgtgaagatcaatctgcagggggacatcgtggatcgtggaagtaccaacctcggcgttaatcaagcaggctttacactacacagcgccatctatgcggctcgccctgatgtaaagtgcgtagtgcatattcatacccccgcaggagctgccgtgtcagctatgaagtgcggcctattgccaattagtccagaagcactcagccttggcgaagtggcttaccatgactaccacgggatcctggtggatgaggaggagaaagtgctgattcaaaagaatctgggcccaaaaagtaaagtgctaattttacgaaaccatgggcttgtctccgttggagaatcggtcgaagaggcattctattatattcataatctcgtggtagcctgtgagatccaggtgaggaccctcgcatcagcaggtgggccagacaatctggtcctactgaatcctgagaaatataaagccaagtcccggagccctggtagccccgtgggcgaaggcacggggtcaccacccaagtggcagatcggcgagcaggagtttgaggcactgatgagaatgttggataatctgggctacagaaccggatacccttacaggtaccccgctctgcgcgagaaatctaaaaagtacagcgatgtggaagtgccggcaagcgtcacaggatattcatttgcatctgatggcgacagcggcacatgttcaccactgagacactcgttccagaaacagcagagagaaaagacaaggtggctcaatagtggaagaggagatgaggccagcgaagaaggccagaatgggtcatccccaaaaagcaaaacaaaagtgtggacgaatatcacccacgatcacgttaagcctctgctgcagagccttagttccggtgtatgcgtgcctagctgcatcactaattgtctgtggacgaaggaggatgggcaccgcacctcaacaagcgcagttcccaacctgttcgtacctttgaacactaacccaaaggaggtgcaggagatgaggaacaagatacgcgaacagaacttgcaagacattaagactgctggacctcagtcgcaggtgttgtgcggcgtcgtgatggatcggtctctcgtgcagggggaacttgtgaccgcctccaaggccatcattgagaaggagtatcaaccacacgttatcgtgagcaccacgggacctaaccctttcaccaccctcaccgatagggagcttgaggagtataggagggaggtagagcggaagcagaagggcagcgaggagaacctggacgaggcgcgtgagcagaaggagaaatcccctcctgaccagccggctgtgccgcacccgcctcccagcactcccatcaagctcgaagaaggggatgggtgtgctagggagtatctgttgccctag

SEQ ID NO: 252242 - DNA, 1989 bp, Artificial Sequence
  derived and/or modified sequence
atgaacggcgacagcagagccgccgtggtgaccagccccccccccaccaccgccccccacaaggagagatacttcgacagagtggacgagaacaaccccgagtacctgagagagagaaacatggcccccgacctgagacaggacttcaacatgatggagcagaagaagagagtgagcatgatcctgcagagccccgccttctgcgaggagctggagagcatgatccaggagcagttcaagaagggcaagaaccccaccggcctgctggccctgcagcagatcgccgacttcatgaccaccaacgtgcccaacgtgtaccccgccgccccccagggcggcatggccgccctgaacatgagcctgggcatggtgacccccgtgaacgacctgagaggcagcgacagcatcgcctacgacaagggcgagaagctgctgagatgcaagctggccgccttctacagactggccgacctgttcggctggagccagctgatctacaaccacatcaccaccagagtgaacagcgagcaggagcacttcctgatcgtgcccttcggcctgctgtacagcgaggtgaccgccagcagcctggtgaagatcaacctgcagggcgacatcgtggacagaggcagcaccaacctgggcgtgaaccaggccggcttcaccctgcacagcgccatctacgccgccagacccgacgtgaagtgcgtggtgcacatccacacccccgccggcgccgccgtgagcgccatgaagtgcggcctgctgcccatcagccccgaggccctgagcctgggcgaggtggcctaccacgactaccacggcatcctggtggacgaggaggagaaggtgctgatccagaagaacctgggccccaagagcaaggtgctgatcctgagaaaccacggcctggtgagcgtgggcgagagcgtggaggaggccttctactacatccacaacctggtggtggcctgcgagatccaggtgagaaccctggccagcgccggcggccccgacaacctggtgctgctgaaccccgagaagtacaaggccaagagcagaagccccggcagccccgtgggcgagggcaccggcagcccccccaagtggcagatcggcgagcaggagttcgaggccctgatgagaatgctggacaacctgggctacagaaccggctacccctacagataccccgccctgagagagaagagcaagaagtacagcgacgtggaggtgcccgccagcgtgaccggctacagcttcgccagcgacggcgacagcggcacctgcagccccctgagacacagcttccagaagcagcagagagagaagaccagatggctgaacagcggcagaggcgacgaggccagcgaggagggccagaacggcagcagccccaagagcaagaccaaggtgtggaccaacatcacccacgaccacgtgaagcccctgctgcagagcctgagcagcggcgtgtgcgtgcccagctgcatcaccaactgcctgtggaccaaggaggacggccacagaaccagcaccagcgccgtgcccaacctgttcgtgcccctgaacaccaaccccaaggaggtgcaggagatgagaaacaagatcagagagcagaacctgcaggacatcaagaccgccggcccccagagccaggtgctgtgcggcgtggtgatggacagaagcctggtgcagggcgagctggtgaccgccagcaaggccatcatcgagaaggagtaccagccccacgtgatcgtgagcaccaccggccccaaccccttcaccaccctgaccgacagagagctggaggagtacagaagagaggtggagagaaagcagaagggcagcgaggagaacctggacgaggccagagagcagaaggagaagagcccccccgaccagcccgccgtgccccaccccccccccagcacccccatcaagctggaggagggcgacggctgcgccagagagtacctgctgccctag

SEQ ID NO: 252243 - protein, 161 aa, Artificial Sequence
  derived and/or modified sequence
MQAVRNAGSRFLRSWTWPQTAGRVVARTPAGTICTGARQLQDAAAKQKVEQNAAPSHTKFSTQIQVVSASNEPLAFASCGTEGFRNAKKGTGIAAQTAGIAAAARAKQKGVIHIRVVVKGLGPGRLSAMHGLIMGGLEVISITDNTPIPHNGCRPRKARKL

SEQ ID NO: 252244 - DNA, 486 bp, Artificial Sequence
  derived and/or modified sequence
atgcaggctgtcaggaatgcagggtcgcggtttttgcgatcctggacctggccacaaacggcaggacgggttgttgcccgcacgccggcgggtacaatttgcaccggagctcgccaactgcaggacgccgcggctaagcagaaggtcgaacagaacgcggctccctctcatacaaagttttccacgcagattcaggtcgtgtccgcaagcaacgagccacttgcctttgcatcgtgcgggacagagggcttccgcaatgccaaaaagggcacaggcatagcggcccagaccgcaggtatcgcagccgctgctagggcgaaacagaagggcgttatacacattagggtggtggtaaaagggttaggtccaggccgtctgtccgcgatgcacgggttgatcatgggtggactggaggtcatttctataaccgataacactcccatacctcacaacggatgcagacccagaaaggcacggaaactctag

SEQ ID NO: 252245 - DNA, 486 bp, Artificial Sequence
  derived and/or modified sequence
atgcaggccgtgagaaatgccggcagccgcttcctgcgctcctggacctggccccagacagctggccgggtggtggcccggaccccagctggcaccatctgcacaggagcccggcagctgcaggatgctgctgccaagcagaaggtggagcagaatgctgcccccagccacaccaagttcagcacccagatccaggtggtgtctgccagcaatgagcccctggcctttgccagctgtggcacagagggcttcagaaatgccaagaagggcactggaattgctgcccagacagctggcattgctgctgctgcccgggccaagcagaagggcgtcatccacatccgggtggtggtgaagggcctgggccctggccgcctgagcgccatgcacggcctcatcatgggcggcctggaggtgatcagcatcacagacaacacccccatcccccacaacggctgccggcccaggaaggccaggaagctgtag

SEQ ID NO: 252246 - DNA, 766 bp, Artificial Sequence
  derived and/or modified sequence
atgcaggctgtgagaaacgcggggtcgcggttcctgcggtcctggacttggccccagacagccggcagggtcgtggccagaacgccggccgggaccatctgcacaggcgctcgacagctccaagacgctgcggccaagcagaaagttgaacagaacgcggctcccagccacaccaagttcagcacacagatccaggtagtctctgctagtaatgagccccttgcctttgcttcctgtggcacagagggatttcggaatgccaagaagggcacaggcatcgcagcacagacagcaggcatagccgcagcggcgagagctaaacaaaagggcgtgatccacatccgagttgtggtgaaaggcctggggccaggacgcttgtctgccatgcacggactgatcatgggcggcctggaagtgatctcaatcacagacaacaccccaatcccacacaacggctgccgccccaggaaggctcggaagctgtgatgggaaggaggcctgcacttggacctgacctcaagcctcagctccagtgggaccttgtaaaatgctccctgtcagagctctccagaatatgcttgttggagatccttcaggcagtaagggagagttttgcctccttacacagtggcctttgcttgcacctccagctggagatgggtgtgccccagaagtaagctttgcatctcttacaagaggggagctacaggggcagccgtggcctaggcccaaactctgctctgagaaaataaatatctgtaccacc

SEQ ID NO: 252247 - DNA, 486 bp, Artificial Sequence
  derived and/or modified sequence
atgcaggccgtgcggaacgccggcagccggttcctgcggagctggacgtggccccagacagcggggcgggtagttgctagaacacccgccggcactatttgtaccggggcaagacagctgcaggatgcagccgccaagcaaaaggtagaacagaacgcagcaccttctcacaccaagttcagcacacaaattcaagtggtgtcagcgtccaatgaacctctggcttttgcctcttgtgggacagagggcttccgcaacgcaaagaaaggaaccggcattgcggcgcagacagcaggcattgcggctgctgcccgggccaagcaaaagggagtgatacatatccgagtggtcgtgaagggattaggccctggcaggcttagtgcgatgcatggcctgatcatgggtggcctggaagtcatctcaatcacggacaacacccctattccccataatggttgccgtcccagaaaggctaggaaattgtag

SEQ ID NO: 252248 - DNA, 486 bp, Artificial Sequence
  derived and/or modified sequence
atgcaggccgttcgaaacgccggatcacggttcctcagaagttggacatggccgcagactgccggacgtgtcgtggcccgaactccagcgggtaccatttgcactggcgctcggcagctgcaggatgcagcagccaagcaaaaggttgaacagaatgcagccccatctcacacaaaatttagtacacaaatccaggtggtcagcgcgagtaacgagcccctggccttcgcttcgtgtggaacagaggggtttcggaacgccaagaaaggcaccggcatagcagcacaaacagcaggtatcgcggcagcggctagggcaaagcagaagggagtgattcacatccgggtggtggtcaagggcctcggcccaggtagacttagcgccatgcatggcctgattatgggaggcctggaggtgatttcaattacggataatacccctatccctcacaacggatgcagaccacgaaaagcgaggaaattgtag

SEQ ID NO: 252249 - DNA, 486 bp, Artificial Sequence
  derived and/or modified sequence
atgcaggccgtgagaaacgccggcagcagattcctgagaagctggacctggccccagaccgccggcagagtggtggccagaacccccgccggcaccatctgcaccggcgccagacagctgcaggacgccgccgccaagcagaaggtggagcagaacgccgcccccagccacaccaagttcagcacccagatccaggtggtgagcgccagcaacgagcccctggccttcgccagctgcggcaccgagggcttcagaaacgccaagaagggcaccggcatcgccgcccagaccgccggcatcgccgccgccgccagagccaagcagaagggcgtgatccacatcagagtggtggtgaagggcctgggccccggcagactgagcgccatgcacggcctgatcatgggcggcctggaggtgatcagcatcaccgacaacacccccatcccccacaacggctgcagacccagaaaggccagaaagctgtag

SEQ ID NO: 252250 - protein, 88 aa, Artificial Sequence
  derived and/or modified sequence
MVPLCQVEVLYFAKSAEITGVRSETISVPQEIKALQLWKEIETRHPGLADVRNQIIFAVRQEYVELGDQLLVLQPGDEIAVIPPISGG

SEQ ID NO: 252251 - DNA, 267 bp, Artificial Sequence
  derived and/or modified sequence
atggttcctctctgtcaggtggaagtgttatactttgcaaaatccgctgagataaccggcgtccgcagtgagaccatcagcgtccctcaggagatcaaggccctccagttgtggaaggaaattgagaccaggcacccagggcttgctgatgtgcgaaaccagataatcttcgctgtgaggcaggagtacgtggagctgggggaccagctcctggttcttcagcctggcgacgaaattgcagtcataccccctattagtggagggtag

SEQ ID NO: 252252 - DNA, 267 bp, Artificial Sequence
  derived and/or modified sequence
atggtgccactgtgtcaggtagaagttttatactttgccaaatcagccgaaattactggagtgcggagtgagacaatatccgttcctcaggagattaaggcgttgcagctgtggaaggagattgagacgagacaccccgggctggccgacgttcgcaatcaaattatcttcgcagtccgacaggagtacgtggagctcggcgaccaactgttggtgctgcagccaggtgatgagattgctgttataccacccataagcggaggttag

SEQ ID NO: 252253 - DNA, 267 bp, Artificial Sequence
  derived and/or modified sequence
atggtgcccttatgtcaggtggaggttttatacttcgccaaaagtgccgagatcaccggcgtgagatcggaaactatttctgtgccacaagaaattaaggctctgcaactgtggaaggaaatcgaaacacgacacccaggtcttgccgatgttcggaaccagattatctttgcagtccgccaggagtatgttgaactaggggatcagcttttggtactgcagcccggtgatgagatcgccgtgattccgcctatatcaggtgggtag

SEQ ID NO: 252254 - DNA, 267 bp, Artificial Sequence
  derived and/or modified sequence
atggtcccgctgtgtcaggtcgaagttctctacttcgctaagagtgccgagatcacaggtgtgcggtctgagaccatctccgttccacaggaaataaaagcactgcagctctggaaggagatcgaaacccgtcatcccggtctcgctgacgtacgaaaccaaattatttttgctgtgcggcaggagtacgtggagttgggcgatcaactgctggttctgcagccaggagatgaaattgccgtcatcccaccaatcagcggagggtag

SEQ ID NO: 252255 - DNA, 267 bp, Artificial Sequence
  derived and/or modified sequence
atggtgcccctgtgccaggtggaggtgctgtactttgccaagtctgctgagatcactggagtgcgctctgagaccatctctgtgccccaggagatcaaggccctgcagctgtggaaggagattgagaccaggcaccctggcctggctgatgtgaggaaccagatcatctttgctgtgcggcaggagtatgtggagctgggggaccagctgctggtgctgcagcctggagatgaaattgctgtgattcctcccatcagcggcggctag

SEQ ID NO: 252256 - DNA, 3549 bp, Artificial Sequence
  derived and/or modified sequence
gattcggtcccgctgtcctaggcgggatggtgccgctgtgccaggttgaagtattgtattttgcaaaaagtgctgaaataacaggagttcgttcagagaccatttctgtgcctcaagaaataaaagcgttgcagctgtggaaggagatagaaactcgacatcctggattggctgatgttagaaatcagataatatttgctgttcgtcaagaatatgtcgagcttggagatcagctcctcgtgcttcagcctggagacgaaattgccgttatcccccccattagtggaggatagtgcttttgagccatctaggaaagatatggatgaagttgaagagaaatctaaagatgttataaactttactgccgagaaactttcagtagatgaagtctcacagttggtgatttctccgctctgtggtgcaatatccctatttgtagcttggttccagtgtcagaagcaagcataatcattgctgtgtcctcagcccacagagctgcatctcttgaagctgtgagctatgccattgatactttaaaagccaaggtgcccatatggaaaaaggaaatatacgaagagtcatcaacttggaaaggaaacaaagagtgcttttgggcatccaacagttaatcacttatgtttttagagcatgcaatcttaactttgttaaactattattattgatcacattttgatttttttctctccacatcaggatagtttactgaagcacaatctcttatactagtgggacaaaagggagaaaaaggaagcaagataaatgggtatgtaggatgaagggttatttaaaatggaactaaagatagaaggaggactgtaggaagaaatggaataatttaaatgtgaggaaagatatctgtggtagacatgtccttccatgactaatttctaattgtaactcaacacacattgaggtatgggccctcctcagtgactttaactagctcagaaacgtactcccccaccaaccccacctcaccgccccccatcccggttctgggagagcattgttattaaggatgcatgacaggaatgttggcagaactggaaagtattaaaaaagcattatcagacagtcttgatattatacattttcagaaatatattaaaaataataaactaaaacccatgatttcaaaagtttaaaaagagtattttctttttttttaaattgcctaaaatagttctcattatggagatttctgggatttcagaatctataatcttaccagaaaactttttgttgttttttattagttgttaattttgtatcaatatacaaatcagcacaaaattgtcataaagctaactagcaacaaggtggtttgtgttgaaatgtttaggtaaacaatgccccaatttttaactggttaagctttatagtattttgatagacttgtacatataagtcccatatagttcttaaatttttttttccagctttatttaggtatacttgacaaaaattgtatgtatttaaagtatacaatgtgatttttgatacacatatacattgtgaggtgattaccataatccaactaattaacatattcctcagctcacatagtcccctcttctgtgtggtgagaatatttaaggtctactctcagcaaatttcaggtaaacacatagctcataaaataataaaatacaggcaaaatttgggcagtcggcatcatcacaaaatttgcattatgcatattaagaacaaaagctatactttcagacacttagattgaaggatttttttcttatgtctgggacaaataagaaacgtagtaatcctatttgttatatgtagtgaaaacatcttttacctaaggaacccatttattcaacaaatatttattgaatgcctgttttgtgccaggcacccacccagtgatctttttctgccaacctaaaataccttgaggaacactctgcatcttatctgtggctgggacccataggacagccacactgactttaggaatcacctggttacatcagttgatgcttgttcattagtccgtctggagagattgggccagaaggatactggaagggcagacaaaccctccgcctacttcctctgccgggttcgggttgcctgtttggtctcagccttaccttcacagttcagtgtcactctggcttgccatcgagcttccgcctgtccccattggagagaaggggtgggtgttggctgttgcattatatctaaaagcacattatcatggggttactgggtcactggacatttctaggattttggacataggttgttaaatggatgttatgtcatatgcaatgttgataggtatatgtggatttcaagactttcctacttagatatttctttagaagttccttattgagggtaatgatgtttttaaagaacatagaacattctttatgttttaaaagaatcatgccttcattaagtaggctttattctaagtttggaactgagactgttatgcttttaaagtctccaacagagaggttaaggagttaacctggggcatgccagaactgggatggaatggccttgaaagattttagtgcattgcacttgacttagataggatctttactgacccttgcttacttaggagtggcagagttaattggtggttcagatattaaggggctactgtcactctgatatgtagcttttctatcatctctgtaacttagcttcaagtaactagaagagtaatctaaaaaaaataattagcctttaatcagattgcctgcagtgtttcttggtcactttaaagccgtgactttgcatgattgctaggtaagttcacttaagaaataggaaattcaaattatttatgtttcaagtatttttgaacaggtggtaaaatgaaattgatttttatcatctttgaatgaaagtaacagcagatattcaatgagtgacttattttgtggacatttttgtcctttggatatgatgtatagagtcacaatatattttcagccttttttgagaaataagtgatttagacatcttacacagttactgagcacctggtacagtgaagatctctcaagaatgatttgtgtgatgtagttcggtggatcatccagcagagggcagtagagccagagccatagtaaaagttatagtaaagttgctcttagcaacttgagtcttacttagatttaattttgcatagaaccaaaagttcagtttagtagccattttctttaaagtcaggctgtagtggttccgaaatgaaaattaggccctgattttatgtaagatgatgtccaatctttaattgacaccttaaaaatattaaaagattatgataggatcaggaaggagtttttgaaaatgcaatttgtagtttttaacaagtgatgtagaataaataaaaagaagtactttttaaaaagtaagtataaaattattttccagttaactatgggatataaatgattgctttaatacaggtcttcctaacctgtacagcatttcctaacctgctctgtgaaaaacaaagaaataaaacttagtgctctctttctc

SEQ ID NO: 252257 - DNA, 267 bp, Artificial Sequence
  derived and/or modified sequence
atggtgcccctgtgccaggtggaggtgctgtacttcgccaagagcgccgaaattacaggggtgagatcggaaaccatttcagtcccccaggaaatcaaagcccttcagctgtggaaagagatcgagacccgccatcctggacttgcagacgtgcggaaccagatcatattcgctgtccgccaggagtacgtagagctcggcgatcagctccttgttctgcagcccggagacgagattgcagtcatccccccaatcagtggaggctag

SEQ ID NO: 252258 - DNA, 267 bp, Artificial Sequence
  derived and/or modified sequence
atggtgcccctgtgccaggtggaggtgctgtacttcgccaagagcgccgagataaccggagtgcggagcgaaaccatttctgttccacaggagataaaggcgctgcaactctggaaagagattgagactaggcaccccggacttgctgatgttaggaatcagatcattttcgcagtgaggcaggaatatgttgagctgggcgaccagcttctggtcctgcaaccaggagatgagattgcagtcatcccacccatttcagggggttag

SEQ ID NO: 252259 - DNA, 267 bp, Artificial Sequence
  derived and/or modified sequence
atggtgcccctgtgccaggtggaggtgctgtacttcgccaagagcgctgaaataacaggggtacgctctgaaactatttcagtgccacaagagattaaggccttgcagctgtggaaggagattgaaactcgtcatcccgggctggccgatgtgcgcaaccagataatcttcgccgtgaggcaggagtacgtcgagcttggcgaccagctcctggttctgcagccaggggacgaaatcgccgtaatcccccccatttcaggaggctag

SEQ ID NO: 252260 - DNA, 267 bp, Artificial Sequence
  derived and/or modified sequence
atggtgcccctgtgccaggtggaggtgctgtacttcgccaagagcgcagagatcactggagtgaggagcgagaccatttcagtgccccaggaaatcaaggcattacagttgtggaaagaaattgaaacacgtcaccccgggttagcagacgttcgcaatcagattattttcgccgttcggcaggagtacgttgagctgggggatcaactgctagtgctgcagccgggcgatgaaatagccgttatacctcctatttctggtgggtag

SEQ ID NO: 252261 - DNA, 267 bp, Artificial Sequence
  derived and/or modified sequence
atggtgcccctgtgtcaggtggaagtactatattttgccaagagtgctgagatcaccggagtgaggtcagaaactattagcgtgccccaggagatcaaggcgctgcaactctggaaggagattgagacacggcatcccggtttggctgacgtcaggaaccagatcatatttgccgtgagacaggagtatgtggaactgggtgaccaactgctcgtgttgcagccaggtgacgagatcgcggtgataccccctataagcggcggatag

SEQ ID NO: 252262 - DNA, 267 bp, Artificial Sequence
  derived and/or modified sequence
atggtccctctgtgtcaagtggaagtactgtatttcgccaagtccgccgagataaccggcgtgagatcagaaacaatttctgtgcctcaggagatcaaggccctccagttgtggaaagaaattgagactcggcatccgggtctggctgatgtgcgcaatcagattatttttgcagtccgccaagaatatgttgaattgggcgaccagctcctcgtattgcagcctggagacgaaattgccgtgataccaccgatttcgggcggttag

SEQ ID NO: 252263 - DNA, 267 bp, Artificial Sequence
  derived and/or modified sequence
atggtgcccctttgtcaggtggaggttctgtatttcgccaagagcgccgaaatcacgggagttcgctccgaaactatatccgttccacaggagatcaaagcactccagctgtggaaggagatagaaaccaggcaccctgggctggctgacgtgcgcaatcagattatctttgcagtgcgacaagagtacgttgaactcggggatcagttgctcgtgctgcaacccggagacgagattgccgtcatacctccaatttctgggggatag

SEQ ID NO: 252264 - DNA, 267 bp, Artificial Sequence
  derived and/or modified sequence
atggtgcccttgtgtcaggtggaggtgctctattttgctaagagtgcagagattacgggggttagaagcgaaacaattagtgtgcctcaggaaataaaagcactacagttatggaaggagatcgaaacgcggcatccgggactggcagacgtcaggaatcagatcatttttgcagtaagacaggaatacgttgagctgggggatcagctactggtgttgcagcctggagacgagattgcagttatccctccgatctccggcggatag

SEQ ID NO: 252265 - DNA, 267 bp, Artificial Sequence
  derived and/or modified sequence
atggtgcccctgtgccaggtggaggtgctgtacttcgccaagagcgccgagatcaccggcgtgagaagcgagaccatcagcgtgccccaggagatcaaggccctgcagctgtggaaggagatcgagaccagacaccccggcctggccgacgtgagaaaccagatcatcttcgccgtgagacaggagtacgtggagctgggcgaccagctgctggtgctgcagcccggcgacgagatcgccgtgatcccccccatcagcggcggctag

SEQ ID NO: 252266 - protein, 1043 aa, Artificial Sequence
  derived and/or modified sequence
MNFSVITCPNGGTNQGLLPYLMALDQYQLEEFKLCLEPQQLMDFWSAPQGHFPRIPWANLRAADPLNLSFLLDEHFPKGQAWKVVLGIFQTMNLTSLCEKVRAEMKENVQTQELQDPTQEDLEMLEAAAGNMQTQGCQDPNQEELDELEEETGNVQAQGCQDPNQEEPEMLEEADHRRKYRENMKAELLETWDNISWPKDHVYIRNTSKDEHEELQRLLDPNRTRAQAQTIVLVGRAGVGKTTLAMQAMLHWANGVLFQQRFSYVFYLSCHKIRYMKETTFAELISLDWPDFDAPIEEFMSQPEKLLFIIDGFEEIIISESRSESLDDGSPCTDWYQELPVTKILHSLLKKELVPLATLLITIKTWFVRDLKASLVNPCFVQITGFTGDDLRVYFMRHFDDSSEVEKILQQLRKNETLFHSCSAPMVCWTVCSCLKQPKVRYYDLQSITQTTTSLYAYFFSNLFSTAEVDLADDSWPGQWRALCSLAIEGLWSMNFTFNKEDTEIEGLEVPFIDSLYEFNILQKINDCGGCTTFTHLSFQEFFAAMSFVLEEPREFPPHSTKPQEMKMLLQHVLLDKEAYWTPVVLFFFGLLNKNIARELEDTLHCKISPRVMEELLKWGEELGKAESASLQFHILRLFHCLHESQEEDFTKKMLGRIFEVDLNILEDEELQASSFCLKHCKRLNKLRLSVSSHILERDLEILETSKFDSRMHAWNSICSTLVTNENLHELDLSNSKLHASSVKGLCLALKNPRCKVQKLTCKSVTPEWVLQDLIIALQGNSKLTHLNFSSNKLGMTVPLILKALRHSACNLKYLCLEKCNLSAASCQDLALFLTSIQHVTRLCLGFNRLQDDGIKLLCAALTHPKCALERLELWFCQLAAPACKHLSDALLQNRSLTHLNLSKNSLRDEGVKFLCEALGRPDGNLQSLNLSGCSFTREGCGELANALSHNHNVKILDLGENDLQDDGVKLLCEALKPHRALHTLGLAKCNLTTACCQHLFSVLSSSKSLVNLNLLGNELDTDGVKMLCKALKKSTCRLQKLG

SEQ ID NO: 252267 - DNA, 3132 bp, Artificial Sequence
  derived and/or modified sequence
atgaacttcagcgtgatcacctgccccaacggcggcaccaaccagggcctgctgccctacctgatggccctggaccagtaccagctggaggagttcaagctgtgcctggagccccagcagctgatggacttctggagcgccccccagggccacttccccagaatcccctgggccaacctgagagccgccgaccccctgaacctgagcttcctgctggacgagcacttccccaagggccaggcctggaaggtggtgctgggcatcttccagaccatgaacctgaccagcctgtgcgagaaggtgagagccgagatgaaggagaacgtgcagacccaggagctgcaggaccccacccaggaggacctggagatgctggaggccgccgccggcaacatgcagacccagggctgccaggaccccaaccaggaggagctggacgagctggaggaggagaccggcaacgtgcaggcccagggctgccaggaccccaaccaggaggagcccgagatgctggaggaggccgaccacagaagaaagtacagagagaacatgaaggccgagctgctggagacctgggacaacatcagctggcccaaggaccacgtgtacatcagaaacaccagcaaggacgagcacgaggagctgcagagactgctggaccccaacagaaccagagcccaggcccagaccatcgtgctggtgggcagagccggcgtgggcaagaccaccctggccatgcaggccatgctgcactgggccaacggcgtgctgttccagcagagattcagctacgtgttctacctgagctgccacaagatcagatacatgaaggagaccaccttcgccgagctgatcagcctggactggcccgacttcgacgcccccatcgaggagttcatgagccagcccgagaagctgctgttcatcatcgacggcttcgaggagatcatcatcagcgagagcagaagcgagagcctggacgacggcagcccctgcaccgactggtaccaggagctgcccgtgaccaagatcctgcacagcctgctgaagaaggagctggtgcccctggccaccctgctgatcaccatcaagacctggttcgtgagagacctgaaggccagcctggtgaacccctgcttcgtgcagatcaccggcttcaccggcgacgacctgagagtgtacttcatgagacacttcgacgacagcagcgaggtggagaagatcctgcagcagctgagaaagaacgagaccctgttccacagctgcagcgcccccatggtgtgctggaccgtgtgcagctgcctgaagcagcccaaggtgagatactacgacctgcagagcatcacccagaccaccaccagcctgtacgcctacttcttcagcaacctgttcagcaccgccgaggtggacctggccgacgacagctggcccggccagtggagagccctgtgcagcctggccatcgagggcctgtggagcatgaacttcaccttcaacaaggaggacaccgagatcgagggcctggaggtgcccttcatcgacagcctgtacgagttcaacatcctgcagaagatcaacgactgcggcggctgcaccaccttcacccacctgagcttccaggagttcttcgccgccatgagcttcgtgctggaggagcccagagagttccccccccacagcaccaagccccaggagatgaagatgctgctgcagcacgtgctgctggacaaggaggcctactggacccccgtggtgctgttcttcttcggcctgctgaacaagaacatcgccagagagctggaggacaccctgcactgcaagatcagccccagagtgatggaggagctgctgaagtggggcgaggagctgggcaaggccgagagcgccagcctgcagttccacatcctgagactgttccactgcctgcacgagagccaggaggaggacttcaccaagaagatgctgggcagaatcttcgaggtggacctgaacatcctggaggacgaggagctgcaggccagcagcttctgcctgaagcactgcaagagactgaacaagctgagactgagcgtgagcagccacatcctggagagagacctggagatcctggagaccagcaagttcgacagcagaatgcacgcctggaacagcatctgcagcaccctggtgaccaacgagaacctgcacgagctggacctgagcaacagcaagctgcacgccagcagcgtgaagggcctgtgcctggccctgaagaaccccagatgcaaggtgcagaagctgacctgcaagagcgtgacccccgagtgggtgctgcaggacctgatcatcgccctgcagggcaacagcaagctgacccacctgaacttcagcagcaacaagctgggcatgaccgtgcccctgatcctgaaggccctgagacacagcgcctgcaacctgaagtacctgtgcctggagaagtgcaacctgagcgccgccagctgccaggacctggccctgttcctgaccagcatccagcacgtgaccagactgtgcctgggcttcaacagactgcaggacgacggcatcaagctgctgtgcgccgccctgacccaccccaagtgcgccctggagagactggagctgtggttctgccagctggccgcccccgcctgcaagcacctgagcgacgccctgctgcagaacagaagcctgacccacctgaacctgagcaagaacagcctgagagacgagggcgtgaagttcctgtgcgaggccctgggcagacccgacggcaacctgcagagcctgaacctgagcggctgcagcttcaccagagagggctgcggcgagctggccaacgccctgagccacaaccacaacgtgaagatcctggacctgggcgagaacgacctgcaggacgacggcgtgaagctgctgtgcgaggccctgaagccccacagagccctgcacaccctgggcctggccaagtgcaacctgaccaccgcctgctgccagcacctgttcagcgtgctgagcagcagcaagagcctggtgaacctgaacctgctgggcaacgagctggacaccgacggcgtgaagatgctgtgcaaggccctgaagaagagcacctgcagactgcagaagctgggctag

SEQ ID NO: 252268 - DNA, 3132 bp, Artificial Sequence
  derived and/or modified sequence
atgaacttcagtgtcataacctgtcctaatggaggaacaaatcagggattgctgccatacttgatggcgttagaccagtaccagctcgaagaatttaagctgtgtctggaaccccagcaacttatggacttctggtccgcaccccagggccactttccaaggattccatgggcgaatctccgtgcggctgatcccctgaatctgagtttcttgctggatgaacactttcccaaaggccaggcatggaaagtggtgctggggatcttccagacaatgaacctgacctctttgtgtgaaaaagtacgagccgagatgaaagaaaatgtgcaaacacaagagttgcaggaccctacgcaggaggatctcgaaatgctggaggcagccgcgggaaacatgcagacccaaggttgccaggatcccaatcaggaggaattggatgagctggaggaggaaactggcaacgtacaggcgcagggttgtcaggatcccaaccaggaagaaccagagatgctggaagaagcagatcaccggaggaagtacagagaaaatatgaaagctgagctgttagaaacctgggacaatatcagttggcctaaagatcacgtctatattagaaatacttcgaaggacgaacatgaggagctccagcgtttgcttgacccaaatcggacccgcgctcaagcccagactattgtgctggtcgggagggcaggcgtcgggaagactacacttgcaatgcaggcgatgctgcactgggccaacggtgtgctgttccagcagaggttcagctacgtgttctatctctcctgccacaaaattcggtatatgaaagagaccaccttcgccgagctgatctccctcgactggcccgacttcgacgcccctattgaggagtttatgagccaaccagagaaactgttgttcattatcgatggcttcgaggaaatcattatatccgagagcaggtcagaaagtctggacgatggtagcccttgcactgattggtatcaggaacttcctgttaccaaaatactgcatagcctgcttaaaaaggagttggtcccgctggcaaccctcctgattactatcaaaacgtggttcgtccgggatctgaaggcctctctagtgaatccttgttttgttcaaataacgggatttactggggatgatttaagggtatatttcatgcggcactttgacgactcttctgaagttgaaaagatcctacagcagctcaggaagaatgagacactttttcactcctgcagcgccccaatggtgtgttggactgtgtgctcatgtctcaagcagcccaaagtgagatattacgatctgcagtctattactcagacaactacttcgctgtatgcgtacttcttttcaaatctgttcagcactgctgaggttgatctggctgacgatagctggcctggccagtggagagcgctgtgcagtctggccattgaaggcctgtggtctatgaattttacatttaataaggaagataccgagatagaaggactggaggttcccttcattgattccctttatgagttcaacattctgcagaagattaatgattgtggcggatgcaccactttcactcacctgtccttccaggagtttttcgcggccatgtcttttgtattggaggagccgcgggagtttccacctcacagcacaaagcctcaggagatgaaaatgctcctgcaacatgtgttgctagacaaagaagcttactggacacctgtcgtgctgttcttcttcggattactgaacaagaacatagcacgcgagcttgaagacactctacactgtaagatcagcccccgggtcatggaagaattgttgaaatggggagaagagcttggtaaagccgaatccgcctcactccagttccacatactccgcctatttcattgtctgcacgaatcccaagaagaagactttactaagaagatgctgggtaggatctttgaggttgacctgaacatactagaggatgaggaactccaggcatccagcttctgtctcaagcactgtaagcggcttaacaagctgcgcctctcggtgtctagccatatcttggaaagggatctggagattctggaaaccagcaagtttgatagccggatgcatgcatggaattctatctgtagtaccttagtcacaaatgagaaccttcatgaactcgacctgtccaacagcaaactgcatgcaagctccgtgaagggtctttgtctcgcacttaaaaaccctcgatgcaaggtgcagaaactcacttgtaaaagcgtcactccagaatgggtgctccaggatttgatcatagcgctgcagggaaactctaaacttactcaccttaatttctcttccaataaactgggcatgacagtgcccttgattctgaaggcccttaggcattccgcctgtaatctgaaatacctgtgcctggagaagtgcaacctttccgccgctagctgtcaggatctggcactgtttctgacctcaatccagcacgtaactcgactatgtctcggatttaataggcttcaagacgacgggattaaactcctgtgtgcagccttgacacaccctaaatgcgctctggaaaggctggagctctggttctgtcaactcgcggctcccgcctgcaagcatctgagcgacgccttactgcaaaacagatcattgacacacctcaacctgagcaagaactcactcagagatgaaggagtgaaattcttgtgcgaggccttagggaggcccgacggcaacttgcagtctctcaatttatccgggtgctcttttaccagggaaggctgcggcgaactggcaaacgctctctcacacaaccacaatgttaagatcctggacctgggggagaacgatttacaggacgacggcgtgaagctgctgtgtgaggcacttaaacctcatcgggctctccacacgttaggcctggccaaatgcaatctgaccacagcttgctgccaacacctgttctctgtcctgagctcaagtaagtccctggtcaatctgaacctgcttggcaacgagctggacactgacggcgtcaagatgctctgtaaggcgctgaagaagtctacttgccggctgcaaaagctgggatag

SEQ ID NO: 252269 - DNA, 3132 bp, Artificial Sequence
  derived and/or modified sequence
atgaacttcagcgtcatcacctgccccaacggcggcaccaaccagggcctgctgccctacctgatggccctggaccagtaccagctggaggagttcaagctgtgcctggagccccagcagctgatggacttctggagcgccccccagggccacttcccccgcatcccctgggccaacctgcgggctgctgaccccctgaacctgtccttcctgctggatgagcacttccccaagggccaggcctggaaggtggtgctgggcatcttccagaccatgaacctgaccagcctgtgtgagaaggtgcgggcagagatgaaggaaaatgtgcagacccaggagctgcaggaccccacccaggaggacctggagatgctggaggccgctgctggcaacatgcagacccagggctgccaggaccccaaccaggaggagctggatgagctggaggaggagactggaaatgtgcaggcccagggctgccaggaccccaaccaggaggagcctgagatgctggaggaggccgaccacaggaggaagtaccgggagaacatgaaggccgagctgctggagacctgggacaacatctcctggcccaaggaccacgtgtacatccggaacaccagcaaggatgagcacgaggagctgcagaggctgctggaccccaacagaacccgggcccaggcccagaccatcgtgctggtgggccgggccggcgtgggcaagaccaccctggccatgcaggccatgctgcactgggccaacggggtgctcttccagcagcgcttctcctatgtgttctacctgagctgccacaagatccgctacatgaaggagaccacctttgctgagctgatcagcctggactggccagactttgatgcccccatcgaggagttcatgagccagcctgagaagctgctcttcatcattgatggctttgaggagatcatcatcagcgagagccgctctgagagcctggatgatggcagcccctgcacagactggtaccaggagctgcctgtgaccaagatcctgcacagcctgctgaagaaggagctggtgcccctggccaccctgctgatcaccatcaagacctggtttgtgcgggacctgaaggccagcctggtgaacccctgctttgtgcagatcaccggcttcaccggagatgacctgcgggtgtacttcatgaggcactttgatgacagcagcgaggtggagaagatcctgcagcagctgaggaagaatgagaccctcttccacagctgcagcgcccccatggtgtgctggacagtgtgcagctgcctgaagcagcccaaggtgcgctactatgacctgcagagcatcacccagaccaccaccagcctgtatgcctacttcttcagcaacctcttcagcacagctgaggtggacctggctgatgacagctggccaggccagtggagggccctgtgcagcctggccatcgagggcctgtggagcatgaacttcaccttcaacaaggaggacacagaaattgagggcctggaggtgcccttcatcgacagcctgtatgagttcaacatcctgcagaagatcaatgactgtggcggctgcaccaccttcacccacctgtccttccaggagttctttgctgccatgagctttgtgctggaggagccccgggagttccccccccacagcaccaagccccaggagatgaagatgctgctgcagcacgtgctgctggacaaggaggcctactggacccctgtggtgctcttcttcttcggcctgctgaacaagaacatcgcccgggagctggaggacaccctgcactgcaagatcagcccccgggtgatggaggagctgctgaagtggggcgaggagctgggcaaggccgagagcgccagcctgcagttccacatcctgcggctcttccactgcctgcacgagagccaggaggaggacttcaccaagaagatgctgggccgcatctttgaggtggacctgaacatcctggaggatgaggagctgcaggccagcagcttctgcctgaagcactgcaagaggctgaacaagctgcggctgtctgtgagcagccacatcctggagcgggacctggagatcctggagaccagcaagtttgacagcaggatgcacgcctggaacagcatctgcagcaccctggtgaccaatgaaaacctgcacgagctggacctgagcaacagcaagctgcacgccagctctgtgaagggcctgtgcctggccctgaagaacccccgctgcaaggtgcagaagctgacctgcaagtctgtgaccccagagtgggtgctgcaggacctgatcatcgccctgcagggcaacagcaagctgacccacctgaacttcagcagcaacaagctgggcatgacagtgcccctcatcctgaaggccctgcggcacagcgcctgcaacctgaagtacctgtgcctggagaagtgcaacctgtctgctgccagctgccaggacctggccctcttcctgaccagcatccagcacgtgacccggctgtgcctgggcttcaaccggctgcaggatgatggcatcaagctgctgtgtgccgccctgacccaccccaagtgtgccctggagcggctggagctgtggttctgccagctggccgccccagcctgcaagcacctgagtgatgccctgctgcagaacagaagcctgacccacctgaacctgagcaagaacagcctgagagatgaaggagtgaagttcctgtgtgaggccctgggccgcccagatggcaacctgcagagcctgaacctgagcggctgcagcttcacccgggagggctgtggggagctggccaatgccctgagccacaaccacaacgtgaagatcctggacctgggagaaaatgacctgcaggatgatggagtgaagctgctgtgtgaggccctgaagccccaccgggccctgcacaccctgggcctggccaagtgcaacctgaccacagcctgctgccagcacctgttctctgtgctgagcagcagcaagagcctggtgaacctgaacctgctgggcaatgagctggacacagatggagtgaagatgctgtgcaaggccctgaagaagagcacctgccgcctgcagaagctgggctag

SEQ ID NO: 252270 - DNA, 3132 bp, Artificial Sequence
  derived and/or modified sequence
atgaacttcagcgtgatcacctgccccaacggcggcaccaaccaggggctgttgccttatcttatggcattggatcagtaccagctggaggagttcaagctctgtctggagccacagcagctgatggacttttggtcagcaccccaggggcactttcctaggataccttgggctaacctgcgcgcggcggatcctctcaacctctcattcctgttggacgagcatttccctaaagggcaagcttggaaagttgttctgggaatctttcaaactatgaatctgacctctctttgcgagaaagttagagccgagatgaaagaaaatgtccaaactcaggagctgcaggaccccacccaggaggatttagagatgctggaggctgccgctggcaacatgcagactcaaggatgtcaggatcccaatcaagaggagctggacgaactcgaggaggagacgggcaacgttcaggcgcaggggtgccaagatcctaatcaggaagaacccgagatgttggaggaggcagaccataggcggaagtaccgggaaaatatgaaggcggagctactggagacttgggataacatttcctggccaaaagatcatgtctatattcgcaataccagcaaagatgaacatgaggaactgcaacgccttctggacccaaaccgtacaagggcacaggcccagactatcgtcctggtgggccgggccggggtgggcaagaccactctcgcgatgcaagcgatgttgcattgggcaaacggtgtgctgttccagcagcgcttttcctatgtgttttacctgagctgccataaaatccgatatatgaaggagacaacctttgccgaattgatttctcttgattggcctgacttcgatgctcctattgaagaattcatgtctcaacccgaaaaacttttattcataattgatgggtttgaagagataattatcagcgagtcccggtcagaaagtctggatgacggcagtccttgcactgattggtaccaggagctccccgtgacgaagatattgcatagcctcctgaaaaaggaactggtgcctctcgcaacccttctgattaccatcaagacctggtttgtgcgcgaccttaaagcatcgctcgttaacccgtgcttcgtccaaattaccggttttaccggggacgacctccgcgtgtattttatgcgccactttgatgattcctcagaggtggagaaaattttgcagcagttgaggaagaacgaaacacttttccattcctgctctgctcccatggtttgctggaccgtgtgtagctgtttaaagcagccaaaggttcgatattacgatctgcaaagcatcacacaaacgacaacttccctgtacgcatacttcttcagcaatctattctcaacagcagaagtggacctggccgacgatagttggcctgggcagtggagggctctctgctcactcgccatcgaaggcctgtggtccatgaacttcacatttaataaggaagacactgagatcgagggtctcgaggtgccttttatcgatagcttgtacgagttcaacatactccagaagatcaatgactgtggcggctgtacaacatttacgcacttgagctttcaggagttttttgcagcaatgtctttcgttctcgaggagccccgggaatttccacctcattccacgaagcctcaggagatgaagatgcttttgcagcatgttctgctggacaaggaggcctactggacaccagtggtccttttcttctttggcttactgaataaaaatatcgcacgcgaattggaggataccttgcactgtaaaatttccccccgagtgatggaagaattgcttaagtggggcgaagagcttggcaaggcggaatccgcctctctgcagttccacattctgagactgtttcactgtctccacgagtcacaggaagaagactttactaaaaaaatgctgggccgcatttttgaagtggacctgaacattcttgaagatgaggaactgcaggcatccagcttctgccttaagcactgtaaacgcttgaataagctgagactctcagtgagcagtcacatcttggaacgtgacctcgaaatcctggagacctccaaattcgatagccgcatgcatgcctggaactccatttgctcaactcttgtcacaaatgagaatctgcacgaactggatctgagcaactccaaactgcatgccagctcagtgaagggcctgtgtctggcacttaaaaaccccaggtgtaaggttcagaaacttacctgcaaatccgtgacgccggagtgggtgcttcaggaccttatcattgcactgcagggtaattccaaactcacacacttgaatttcagctctaacaagctgggaatgaccgtgcctctcattttgaaggccctgcgacattctgcctgtaatttgaagtacctgtgtctagagaagtgtaacctgagcgcagcgagctgccaggacctggccctcttcctgacatccattcagcacgtaacgcggctctgcctgggtttcaacagattgcaggacgatggcattaagttgctgtgtgcggcccttacccaccctaaatgcgcgctggaacgcctggagctgtggttttgccagcttgccgccccggcatgtaagcacctgtccgacgcactgttacagaatcgttcactgacccaccttaatttgtctaaaaattccctgagggatgagggcgtgaagtttttgtgtgaggcccttgggcgcccggacggaaacctacagtccttgaacctgagcgggtgctcttttacacgtgaagggtgtggggagcttgccaatgctctgtcacacaaccacaatgtgaagattctggacctgggggaaaatgacctgcaggatgatggggtaaaactactgtgcgaggcactgaagcctcatagagctctgcatacgctcgggctggcaaagtgtaatctaacgacggcttgttgccagcacctgtttagcgtgttaagctctagcaagtcactggtcaatttgaatctactgggcaacgaacttgataccgacggcgttaaaatgttgtgtaaagcattgaaaaaatccacatgccgactgcagaaactggggtag

SEQ ID NO: 252271 - DNA, 3132 bp, Artificial Sequence
  derived and/or modified sequence
atgaacttttctgtaatcacctgccccaacggtggtaccaaccaagggcttctgccttacctgatggccctggatcagtatcagctggaggaattcaagctttgcttggaaccccagcagctgatggacttctggtcggccccccaggggcacttcccgcgtatcccctgggcaaacttgagagctgccgaccctttgaatctgtcctttcttttggatgaacacttcccaaaaggtcaggcatggaaagtggtcctcggcatcttccagacaatgaatctgacctcactgtgtgagaaagttagagccgagatgaaagagaatgtgcagacccaagagctgcaagatccaacccaggaagatctagagatgctagaagcagcagcagggaatatgcagacccagggatgccaagatccaaaccaagaagaactagacgagctagaagaagaaacagggaatgtacaggcccagggatgccaagatccaaaccaagaagaaccagagatgctagaggaagcagaccacagaagaaaatacagagagaacatgaaggctgaactactggagacatgggacaacatcagttggcctaaagaccacgtatatatccgtaatacatcaaaggacgaacatgaggaactgcagcgcctactggatcctaataggactagagcccaggcccagacgatagtcttggtggggagggcaggggttgggaagaccaccttggcaatgcaggctatgctgcactgggcaaatggagttctctttcagcaaaggttctcctatgttttctatctcagctgccataaaataaggtacatgaaggaaactacctttgctgaattgatttctttggattggcccgattttgatgcccccattgaagagttcatgtctcaaccagagaagctcctgtttattattgatggctttgaggaaataatcatatctgagtcacgctctgagagcttggatgatggctcgccatgtacagactggtaccaggagctcccagtgaccaaaatcctacacagcttgttgaagaaagaattggttcccctggctaccttactgatcacgatcaagacctggtttgtgagagatcttaaggcctcattagtgaatccatgctttgtacaaattacagggttcacaggggacgacctacgggtatatttcatgagacactttgatgactcaagtgaagttgagaaaatcctgcagcagctaagaaaaaacgaaactctctttcattcctgcagtgcccccatggtgtgttggaccgtatgttcctgtctgaagcagccgaaggtgaggtattacgatctccagtcaatcactcagactaccaccagtctgtatgcctattttttctccaacttgttctccacagcagaggtagatttggcagatgacagctggccaggacaatggagggccctctgcagtctggccatagaagggctgtggtctatgaacttcacgtttaacaaagaagacactgagatcgagggcctggaagtgcctttcattgattctctctacgagttcaatattcttcaaaagatcaatgactgtgggggttgcactactttcacccacctaagtttccaggagttttttgcagccatgtcctttgtgctagaggaacctagagaattccctccccattccacaaagccacaagagatgaagatgttactgcaacacgtcttgcttgacaaagaagcctactggactccagtggttctgttcttctttggtcttttaaataaaaacatagcaagagaactggaagatactttgcattgtaaaatatctcccagggtaatggaggaattattaaagtggggagaagagttaggtaaggctgaaagtgcctctctccaatttcacattctacgactttttcactgcctacacgagtcccaggaggaagacttcacaaagaagatgttgggtcgtatctttgaagttgaccttaatattttggaggacgaagaactccaagcttcttcattttgcctaaagcactgtaaaaggttaaataagctaaggctttctgttagcagtcacatccttgaaagggacttggaaattctggagacaagcaagtttgattccaggatgcacgcatggaacagcatttgctctacgttggtcacaaatgagaatctgcatgagctagacctgagtaacagcaaacttcatgcttcctctgtgaagggtctctgtcttgcactgaaaaatccaagatgcaaagtccagaaactgacgtgcaaatcggtaactcctgagtgggttctgcaggacctcattattgcccttcagggtaacagcaagctgacccatctgaacttcagctctaacaagctgggaatgactgtccccctgattcttaaagctttgagacactcagcttgcaacctcaagtatctgtgcctggagaaatgcaacttgtcggcagccagctgtcaggacctagccttgtttctcaccagcatccaacacgtaactcgattgtgcctgggatttaatcggctccaagatgatggcataaagctattgtgtgcggccctgactcaccccaagtgtgccttagagagactggagctctggttttgccagctggcagcacccgcttgcaagcacttgtcagatgctctcctgcagaacaggagcctgacacacctgaatctgagcaagaacagcctgagagacgagggagtcaagttcctgtgtgaggccttgggtcgcccagatggtaacctgcagagcctgaatttgtcaggttgttctttcacaagagagggctgtggagagctggctaatgccctcagccataatcataatgtgaaaatcttggatttgggagaaaatgatcttcaggatgatggagtgaagctactgtgtgaggctctgaaaccacatcgtgcattgcacacacttgggttggcgaaatgcaatctgacaactgcttgctgccagcatctcttctctgttctcagcagcagtaagagcctggtcaatctgaaccttctaggcaatgaattggatactgatggtgtcaagatgctatgtaaggctttgaaaaagtcgacatgcaggctgcagaaactcgggtaa

SEQ ID NO: 252272 - DNA, 3132 bp, Artificial Sequence
  derived and/or modified sequence
atgaacttctctgttattacatgccctaacggtggaaccaatcaaggcctgctgccctaccttatggcacttgaccaataccagttagaagagttcaaactgtgcttggagccgcagcagctgatggatttttggagcgcgcctcaagggcatttccctaggattccttgggccaacttaagagctgcagacccattgaatctctctttcctgctggatgaacacttccctaaggggcaggcttggaaggttgtgttgggaatattccaaaccatgaacctaaccagcttgtgcgagaaggttcgcgcagaaatgaaggagaacgttcaaacccaggagttacaggaccctacccaagaagacctcgaaatgcttgaagccgctgctgggaacatgcagacccagggctgtcaggatcccaaccaggaggagttagatgaactcgaagaggagactgggaatgtgcaggcccaggggtgtcaggacccaaatcaggaagagccagaaatgttggaggaagcagatcataggcggaaatacagagaaaatatgaaagccgaactactggaaacttgggacaacatatcttggcctaaggaccacgtctatataaggaacacaagtaaagatgaacatgaggaactgcagcgcctgcttgaccccaaccgaactcgggcacaggctcagacaatcgtactggtgggaagggcgggagtgggaaagactacactggctatgcaagctatgctgcactgggcaaatggggttctttttcagcagcggttttcttatgtgttttatctcagctgccacaagatccgctacatgaaggaaactacatttgctgaactgatttctttagattggccagacttcgatgccccaatcgaggaattcatgtctcaaccagagaagctcctttttattatagacggatttgaggagataatcatctctgaaagccgtagtgagtcactcgacgatggcagtccatgcaccgattggtaccaggagctcccagtcactaaaatcctgcattctcttctcaaaaaagaactcgtcccacttgctaccctgctcatcaccattaaaacctggttcgtcagggatctcaaggctagcctagtgaacccgtgttttgtgcagatcaccggtttcaccggggatgacctgagggtgtacttcatgcggcatttcgacgacagctctgaagtcgagaagatcctgcaacaacttcgaaagaacgagaccttattccattcatgctcagctccaatggtgtgctggaccgtgtgctcttgtctcaaacagccaaaggtaagatattacgacctccagagcatcactcagacgaccacctctctgtatgcctattttttctcgaatctgttttctaccgccgaagttgatctggccgatgattcctggcctgggcagtggcgggcactatgttccctggccatcgagggactgtggtcgatgaacttcaccttcaacaaggaagatacagagatagaggggttagaggtgccatttatcgactctctatatgaattcaacattctccagaagattaatgactgcggcggatgcactacgtttacccatctgtcattccaggaattcttcgccgctatgagcttcgtattggaggagcctcgggagtttcctccccattctactaagcctcaggagatgaaaatgctgctgcagcacgtgcttctcgacaaggaagcctactggacacccgtcgtgctcttcttctttgggctcctgaacaagaatatcgctcgcgagttagaggatactttgcactgtaagatcagccccagggtgatggaagagctcctgaagtggggcgaagagctgggcaaagctgagtcagccagcttgcagtttcatatccttagactctttcattgcctgcacgagtcccaggaggaggattttacaaagaaaatgcttggacgcatctttgaagtggatctgaacatcctcgaggacgaagagctacaagcatcctccttctgcttgaagcactgcaagagactgaacaaactgagacttagcgtcagttctcatatcctggagagggatctggaaatacttgagacttcgaagtttgactcgcggatgcacgcttggaactctatttgttctactctcgtcaccaacgaaaaccttcatgaacttgatttgagcaatagtaagctgcacgcttcaagcgtgaaaggcttgtgtttggcattgaagaaccctagatgtaaggtgcagaaactgacatgcaaaagcgtcacccctgaatgggtccttcaggatctgatcatcgcattgcagggaaattccaagctgactcatctaaatttctctagcaataaactcggcatgactgtcccattgatactgaaggcactgcggcactctgcttgcaatctgaagtatctgtgtctggaaaaatgcaacctgtctgctgcctcatgccaggatctggctctgttcctgacctctatccaacacgtcactcgtctttgtctgggattcaatcgtctccaagatgacggaattaagcttctctgcgccgctcttacccatcctaagtgcgccttggagcggcttgaactctggttctgccaattagctgcaccagcgtgtaagcacctatctgacgcactgctgcagaataggtctctgacacacctgaatctgagcaaaaattcactgcgcgatgaaggcgtgaagttcctatgtgaggcactggggagaccggatggtaatttgcaatccctgaatctctcaggttgtagcttcacacgggaaggctgcggcgaattagcgaacgcattgtctcacaatcacaatgtgaaaattttagaccttggggaaaacgacttacaagatgatggtgtgaagctgctgtgtgaggcattgaagccccacagggcgctccatactttagggctagcgaagtgtaatctgactacagcatgttgccaacatttattcagcgtcctgtcatcatcaaagagcctagtgaatctgaacctcctcggtaatgagctggataccgatggagtgaagatgctatgcaaagcactgaagaagtcaacttgccggcttcaaaaactgggctag

SEQ ID NO: 252273 - protein, 1048 aa, Artificial Sequence
  derived and/or modified sequence
MSDVNPPSDTPIPFSSSSTHSSHIPPWTFSCYPGSPCENGVMLYMRNVSHEELQRFKQLLLTELSTGTMPITWDQVETASWAEVVHLLIERFPGRRAWDVTSNIFAIMNCDKMCVVVRREINAILPTLEPEDLNVGETQVNLEEGESGKIRRYKSNVMEKFFPIWDITTWPGNQRDFFYQGVHRHEEYLPCLLLPKRPQGRQPKTVAIQGAPGIGKTILAKKVMFEWARNKFYAHKRWCAFYFHCQEVNQTTDQSFSELIEQKWPGSQDLVSKIMSKPDQLLLLLDGFEELTSTLIDRLEDLSEDWRQKLPGSVLLSSLLSKTMLPEATLLIMIRFTSWQTCKPLLKCPSLVTLPGFNTMEKIKYFQMYFGHTEEGDQVLSFAMENTILFSMCRVPVVCWMVCSGLKQQMERGNNLTQSCPNATSVFVRYISSLFPTRAENFSRKIHQAQLEGLCHLAADSMWHRKWVLGKEDLEEAKLDQTGVTAFLGMSILRRIAGEEDHYVFTLVTFQEFFAALFYVLCFPQRLKNFHVLSHVNIQRLIASPRGSKSYLSHMGLFLFGFLNEACASAVEQSFQCKVSFGNKRKLLKVIPLLHKCDPPSPGSGVPQLFYCLHEIREEAFVSQALNDYHKVVLRIGNNKEVQVSAFCLKRCQYLHEVELTVTLNFMNVWKLSSSSHPGSEAPESNGLHRWWQDLCSVFATNDKLEVLTMTNSVLGPPFLKALAAALRHPQCKLQKLLLRRVNSTMLNQDLIGVLTGNQHLRYLEIQHVEVESKAVKLLCRVLRSPRCRLQCLRLEDCLATPRIWTDLGNNLQGNGHLKTLILRKNSLENCGAYYLSVAQLERLSIENCNLTQLTCESLASCLRQSKMLTHLSLAENALKDEGAKHIWNALPHLRCPLQRLVLRKCDLTFNCCQDMISALCKNKTLKSLDLSFNSLKDDGVILLCEALKNPDCTLQILELENCLFTSICCQAMASMLRKNQHLRHLDLSKNAIGVYGILTLCEAFSSQKKREEVIFCIPAWTRITSFSPTPHPPDFTGKSDCLSQINP

SEQ ID NO: 252274 - DNA, 3147 bp, Artificial Sequence
  derived and/or modified sequence
atgtcagatgtcaaccccccttccgacactccgatccccttttcaagttcctcaacccactccagccatatccctccctggacattttcatgctaccccgggtcaccctgtgagaacggggttatgctttacatgcgcaatgtttcgcatgaggagctgcagaggtttaaacagctgctgcttacagagctgtccacaggtaccatgccaatcacatgggaccaggtggaaacggcttcatgggccgaagtcgtgcatctactcattgagcgctttcctggacgtagggcctgggacgtcacttccaacatttttgccattatgaactgcgacaaaatgtgcgttgtggtccgtcgagagatcaatgcaatcctgccgacactggagccagaggacttgaatgtaggggaaacccaagtgaatctcgaagaaggcgagtcgggcaagatcaggcggtataaatctaatgtcatggagaaatttttcccaatctgggacattaccacctggccaggcaaccagcgggactttttttaccagggcgtgcaccggcacgaggaatacttgccatgcttactgctgcccaaacgaccacagggtcgccagccgaaaacggtagccatccaaggagctcctggcatcggcaagaccatcttagccaagaaggtcatgttcgagtgggcacgcaataagttttatgcccacaaaaggtggtgtgcattctactttcactgccaagaggtgaatcaaacaacggaccagtcattttctgaactcatcgagcagaagtggcctggaagtcaggacctagtgagtaaaatcatgtctaaaccagaccaactcctattgctgctggatggctttgaagaattgacctcgactttgatcgatcggcttgaggatctgtcagaagactggaggcagaaactgcccgggtcagtactgctctccagcctgctgagcaagaccatgctgcctgaagccactctgctcatcatgatcagatttacctcctggcaaacgtgcaaaccattgctgaaatgcccctccctggtgacccttcccggatttaacacaatggagaaaatcaagtactttcagatgtacttcggacacactgaggagggagaccaagttttgtcttttgcaatggagaatactatactcttttctatgtgcagagtgcccgtggtctgttggatggtctgctctggcctgaagcagcagatggagcgcggtaacaacctgacccagtcatgccccaacgctacatctgtgtttgtccgctatatttctagcctattccccacgagggcagaaaatttcagtcgtaagattcatcaggcacaactggagggcctctgtcatcttgccgctgattccatgtggcacaggaagtgggtcctgggcaaagaagatcttgaagaggcaaaactggatcaaacaggggtaaccgcattcctcggcatgagcatattgcgccggattgcaggggaggaagaccactacgtcttcaccctcgtgacgttccaggagttcttcgcagctcttttttatgtactgtgcttccctcagagactgaaaaatttccacgttctctcccatgtgaacatacaacggctgattgcctccccccgtggttctaaatcgtacctcagccacatgggcctatttttgttcggcttcctgaacgaagcatgtgcctcagcggtggaacagagctttcaatgcaaggtctcattcggaaataagcggaaactgttgaaagtcatcccccttcttcacaagtgtgatcccccttcccctggcagcggcgttccccagctgttttattgcctgcacgaaatccgcgaagaggccttcgtgagtcaggccctgaatgactaccataaggtggtgctgaggatcggtaacaataaagaggttcaggttagcgctttttgtctcaagcgctgccaatacctacatgaggtcgagttgaccgtgactttgaatttcatgaacgtatggaaactgtcctccagcagccacccagggtccgaggcgcccgagagcaacggcttgcaccgatggtggcaggacctttgcagcgtcttcgcaaccaacgacaagctcgaggttctcacgatgacaaactccgtgctgggccctccattcttgaaagccttggccgcggcactgcgacatccacagtgcaaacttcaaaagttgctcctgcgcagggtaaacagtactatgctcaatcaggacctgattggggtgttaaccgggaatcagcaccttagataccttgagatccagcacgtggaggttgaaagcaaggctgtgaagcttttgtgcagagtcctgcgctcaccgcggtgccgccttcagtgcctgcggctggaagactgcctggctactccaaggatctggacggatctcggtaacaacctgcagggcaatggccacctaaaaaccctgatcctaaggaaaaacagcctggagaactgtggggcctactatctcagcgtcgcgcagctggagcgcttgagcattgagaactgcaacctcacgcagctgacctgtgaaagtctggcatcgtgcctcaggcagagtaaaatgctcacacaccttagcctggctgaaaacgcccttaaggatgaaggcgccaagcacatatggaacgccctaccacatctccgctgccctctacagagattagtgttgaggaaatgtgacctaacctttaactgttgtcaggatatgattagcgcgctgtgtaagaacaaaaccctcaagtccctcgatctgtctttcaatagtctaaaggatgacggagtgatcctactgtgcgaagcactaaaaaatcccgattgcactcttcagatcttggagctggaaaactgtctctttaccagtatatgttgtcaggcaatggcctctatgctcagaaaaaatcagcatctgcgccatctcgacctgagcaagaacgccattggagtgtacgggatcctcaccttatgtgaggcattctcttcccagaaaaaaagagaagaggtgatcttttgcattcctgcttggactaggattacaagtttcagtcctacgcctcatccccccgacttcacaggcaaaagtgactgcctgagccagattaacccatag

SEQ ID NO: 252275 - DNA, 3147 bp, Artificial Sequence
  derived and/or modified sequence
atgtctgatgtgaacccccccagcgacacccccatccccttcagcagcagcagcacccacagcagccacatccccccctggaccttcagctgctacccaggcagcccctgtgaaaatggagtgatgctgtacatgagaaatgtgtcccatgaggagctgcagcgcttcaagcagctgctgctgacagagctgagcacaggcaccatgcccatcacctgggaccaggtggagacagcctcctgggccgaggtggtgcacctgctgattgagcgcttccctggaagaagagcctgggatgtgaccagcaacatctttgccatcatgaactgtgacaagatgtgtgtggtggtgcggcgggagatcaatgccatcctgcccaccctggagcctgaggacctgaatgtgggggagacccaggtgaacctggaggagggggagagcggcaagatccgccgctacaagagcaatgtgatggagaagttcttccccatctgggacatcaccacctggccaggcaaccagagggacttcttctaccagggcgtgcacagacatgaggagtacctgccctgcctgctgctgcccaagaggccccagggccggcagcccaagacagtggccatccagggcgcccctggcatcggcaagaccatcctggccaagaaggtgatgtttgagtgggccaggaacaagttctacgcccacaagcgctggtgtgccttctacttccactgccaggaggtgaaccagaccacagaccagagcttcagcgagctgattgagcagaagtggccaggcagccaggacctggtgtccaagatcatgagcaagccagaccagctgctgctgctgctggatggctttgaggagctgaccagcaccctgattgaccggctggaggacctgtctgaggactggaggcagaagctgcccggctctgtgctgctgagcagcctgctgagcaagaccatgctgcctgaggccaccctgctgatcatgatccgcttcacctcctggcagacctgcaagcccctgctgaagtgccccagcctggtgaccctgcccggcttcaacaccatggagaagatcaagtacttccagatgtacttcggccacacagaggagggggaccaggtgctgagctttgccatggagaacaccatcctcttctccatgtgccgggtgcctgtggtgtgctggatggtgtgcagcggcctgaagcagcagatggagcggggcaacaacctgacccagagctgccccaatgccacctctgtgtttgtgcgctacatcagcagcctcttccccaccagggctgagaacttcagcaggaagatccaccaggcccagctggagggcctgtgccacctggccgctgacagcatgtggcacaggaagtgggtgctgggcaaggaggacctggaggaggccaagctggaccagacaggagtgacagccttcctgggcatgagcatcctgcggagaattgctggggaggaggaccactacgtgttcaccctggtgaccttccaggagttctttgctgccctcttctacgtgctgtgcttcccccagaggctgaagaacttccacgtgctgagccacgtgaacatccagaggctcatcgccagcccccggggcagcaagagctacctgagccacatgggcctcttcctgtttggcttcctgaatgaggcctgtgccagcgctgtggagcagagcttccagtgcaaggtgtcctttggaaacaagaggaagctgctgaaggtgatccccctgctgcacaagtgtgacccccccagccctggcagcggcgtgccccagctgttctactgcctgcacgagatccgggaggaggcctttgtgtcccaggccctgaatgactaccacaaggtggtgctgcgcatcggcaacaacaaggaggtgcaggtgtctgccttctgcctgaagcgctgccagtacctgcacgaggtggagctgactgtgaccctgaacttcatgaatgtgtggaagctgagcagcagcagccaccctggcagcgaggcccctgagagcaatggcctgcaccgctggtggcaggacctgtgcagcgtgtttgccaccaatgacaagctggaggtgctgaccatgaccaacagcgtgctgggcccccccttcctgaaggccctggccgccgccctgcggcacccccagtgcaagctgcagaagctgctgctgcggcgggtgaacagcaccatgctgaaccaggacctgattggagtgctgaccggcaaccagcacctgcgctacctggagatccagcacgtggaggtggagagcaaggctgtgaagctgctgtgccgggtgctgcggagcccccgctgccgcctgcagtgcctgcggctggaggactgcctggccaccccccgcatctggacagacctgggcaacaacctgcagggcaatggccacctgaagaccctcatcctgaggaagaacagcctggagaactgtggggcctactacctgtctgtggcccagctggagcggctgagcattgagaactgcaacctgacccagctgacctgtgagagcctggccagctgcctgcggcagagcaagatgctgacccacctgagcctggccgagaatgccctgaaggatgaaggagccaagcacatctggaatgccctgccccacctgcgctgccccctgcagaggctggtgctgaggaaatgtgacctgaccttcaactgctgccaggacatgatcagcgccctgtgcaagaacaagaccctgaagagcctggacctgtccttcaacagcctgaaggatgatggagtcatcctgctgtgtgaggccctgaagaacccagactgcaccctgcagatcctggagctggagaactgcctcttcaccagcatctgctgccaggccatggcctccatgctgaggaagaaccagcacctgcggcacctggacctgagcaagaatgccatcggcgtgtatggcatcctgaccctgtgtgaggccttcagcagccagaagaagcgggaggaggtgatcttctgcatcccagcctggacccgcatcaccagcttcagccccaccccccaccccccagacttcaccgggaagagtgactgcctgagccagatcaacccctag

SEQ ID NO: 252276 - DNA, 3147 bp, Artificial Sequence
  derived and/or modified sequence
atgagcgacgtgaacccccccagcgacacccccatccccttcagcagcagctctactcactcaagccacattcccccatggacatttagctgctatccgggtagcccctgtgagaacggggttatgctgtacatgcgaaatgtttcccatgaggagctacagagatttaagcaactgcttcttactgagctgtccacaggaacaatgccgatcacatgggaccaggtcgagaccgcctcctgggcggaggtagtgcatctcttgatagagagatttccaggtcggcgagcatgggatgtgacatctaatatattcgccatcatgaactgcgataaaatgtgcgtggtggtgagacgcgagatcaacgccatactccctactctcgaaccagaggacctcaacgtcggcgaaacccaggtcaatctggaggagggtgagtcgggcaaaatcagaagatacaaaagcaacgtgatggaaaagttcttccccatttgggatatcacaacgtggcccgggaatcagcgcgattttttttatcagggcgtacaccgccacgaagagtacctaccatgtttgttgttaccgaaacggcctcagggacgtcaacctaaaaccgttgcaatacaaggcgctcctggcatcggaaaaaccatccttgctaaaaaagttatgttcgaatgggcccggaataagttttacgcccacaagaggtggtgcgcattctattttcactgccaggaagttaaccagactaccgaccagtctttctccgaattgatagagcagaaatggccgggctcccaagacctggtctctaaaattatgtccaaacccgatcaactcctgttgctgctcgatggattcgaagaactgacgagcaccctcatcgatcggctggaggatctgtcagaggattggagacagaaattgccaggaagcgtcctgttgagcagtctgttgtccaagactatgctgcccgaggcaacactgcttattatgatcagatttaccagttggcagacatgcaaacccctccttaagtgccctagtttggtcacgctgcccgggttcaataccatggagaagattaaatatttccaaatgtactttgggcatacagaggagggagatcaggtgctgtcttttgccatggagaacaccattcttttctccatgtgccgtgtgccagttgtgtgctggatggtgtgttctgggctgaagcagcagatggagaggggaaacaacttaacccagagttgcccaaacgccactagcgtgtttgtgcgatatatcagcagtctgtttccgactagagctgagaattttagcagaaagatccatcaagcccagctggaggggctgtgccatctggccgcggactcaatgtggcaccgcaaatgggtgctcggcaaggaagatctagaagaggccaagctggatcagactggcgtgacagcctttctcgggatgagcatcctccgtagaattgccggagaggaggatcactacgtgtttaccctcgtaactttccaggaattcttcgctgcactgttctacgttttgtgtttccctcagcgtctgaaaaacttccacgtgctgagtcacgtaaatatacagcggttaatcgcctccccccggggctccaaaagctatcttagtcacatgggcctcttcctctttggcttcttaaatgaagcctgcgcctctgcagtggagcagtcattccagtgtaaggtatctttcgggaataagcggaaactacttaaggtgattcccctgcttcataagtgtgaccctcccagcccgggatctggtgtgcctcagcttttctattgcttgcacgagattcgcgaggaagcctttgtcagtcaagcgctcaacgattatcataaggtagtgctaagaataggcaataacaaagaggtccaggtttctgccttctgcctgaagcggtgccagtacctccatgaagtggagctcactgtcaccctaaatttcatgaatgtctggaagctgagctcgtcatctcatcctggaagcgaggctccagagtctaacgggttacatcgctggtggcaagatctgtgcagcgtctttgctacgaatgataagctggaggtacttacgatgaccaactctgtgctcggtcctcccttcctgaaggctctcgcagctgcgctgcgtcatccgcagtgcaagctacagaaactccttttgcgtcgcgttaattccaccatgctgaaccaagacctgatcggtgtgttaaccggtaaccaacacctccgatacctcgaaatccagcacgtcgaggtcgagtcgaaagctgtcaaactgctgtgccgggtcctgcgctcgccaaggtgtaggcttcagtgccttagactggaggactgtctcgcaacaccaaggatatggacggacctcggaaataatctgcagggaaacggtcatctgaagacgctaatcctacgcaaaaacagtctggaaaactgtggcgcttattatttatctgtggcgcagcttgagcgtttgtctatcgaaaattgtaacctcacacagctgacttgcgagtctcttgcttcatgtctgaggcagtctaaaatgctgacccacttgtcgttggctgagaacgccctgaaggatgagggtgcaaagcacatatggaatgctcttccccatctcagatgccctctgcaaagactggtccttcggaagtgcgaccttaccttcaattgctgtcaggacatgataagcgctctctgcaaaaacaagacgttaaaaagcctggatctaagcttcaattctttgaaggacgacggggtgatcctgctgtgcgaggctctaaagaatcccgactgtacacttcagatcctggaactcgaaaattgtctgttcactagtatttgttgtcaggccatggcctctatgttacgcaaaaaccaacatctgcgacacttggatcttagcaaaaatgcgattggagtctatggaatccttacgctgtgtgaagcattcagttcacagaagaaacgagaagaagtaattttttgtattccagcctggacacgtattacaagctttagccccacccctcacccgcctgatttcactggtaagtctgattgcctgtctcagataaatccatag

SEQ ID NO: 252277 - DNA, 3147 bp, Artificial Sequence
  derived and/or modified sequence
atgtcagatgtgaatccgccatccgatacaccaatcccgttttcatctagctcaacccatagtagccatatccctccgtggacctttagctgttacccgggatcgccgtgcgaaaacggtgtgatgctgtatatgcggaacgtcagccacgaggagctgcagcggtttaaacagcttctcttgaccgagctctcaaccggcaccatgcctattacatgggatcaggtggagaccgcatcttgggccgaagttgtccatcttcttatagagcgcttccccggtagaagagcctgggacgtgacctcaaatatattcgcaattatgaattgtgataaaatgtgcgttgttgtgaggagggaaattaacgcgatcctgcctacccttgagcccgaagacctcaatgtcggcgagacccaggtcaacctggaggagggagagtctggtaaaatccgcagatataagtccaatgtgatggagaaattctttccgatatgggatataacaacctggcccggaaaccaaagggatttcttctatcagggcgtccacagacatgaggaatatttgccatgcctgttactacctaagagaccccaaggtcggcagcccaagaccgtggccatccagggggctcccggaatcggcaagactattttggcgaagaaagtcatgttcgaatgggccaggaataagttctatgcacataaaaggtggtgtgccttctatttccattgccaggaagtcaaccaaaccacagatcagtccttctcagagttgattgagcaaaaatggccagggagtcaggacctggtctctaagatcatgtctaagccagaccaactgctgctgctgctggatggcttcgaggagctcacctctacattaatagatcgtctggaggatctatcagaagactggcgacagaagctaccgggttctgtcctcctctcatctctcctgtctaagacgatgctccctgaggccacacttctgataatgatacggttcacctcttggcaaacgtgcaaacctctgttgaaatgcccttcactcgtaactctaccagggtttaacacaatggagaagatcaagtattttcagatgtacttcggccatacagaggaaggagaccaggttctctcttttgcgatggaaaataccattttatttagcatgtgtagagtgcctgtggtgtgctggatggtgtgctccggcctgaagcagcagatggaacgcggtaacaacctgacccagtcctgtccaaatgccacctcagtattcgtgcggtacatctcctccctgtttcctactcgtgcagaaaacttttcccggaagatccaccaggcccaacttgagggactgtgtcatctggctgctgacagtatgtggcaccggaagtgggtgcttgggaaggaggacctggaggaagcaaaacttgaccaaaccggggttaccgccttcctcggtatgtccatacttcggagaattgccggagaagaggatcactatgtcttcactctcgtcacgttccaggaatttttcgcagcccttttttacgtgctctgctttcctcagcgtcttaaaaatttccacgtcctcagccacgtgaacatccagaggcttatcgcatctcccagaggctctaaaagctacctgtcccatatgggcctgtttttgtttggctttctgaatgaggcatgcgcttctgccgttgagcagagcttccagtgcaaggtgagctttggaaacaagcgcaaactgctgaaagtgatcccgttgctgcacaaatgcgacccaccaagccctggctccggtgtaccccagctgttttactgtctacacgagattcgtgaggaggcctttgtctcccaggcactaaatgactatcacaaagttgttctcagaattggtaacaacaaggaggtccaagtttctgcattctgcctgaaaagatgccagtatctgcacgaagtggaattgacagtcactcttaatttcatgaacgtgtggaaactgagctcctcatcccaccctgggagtgaagcacctgagagcaacggccttcacagatggtggcaggatttatgttcagtttttgccaccaatgacaagctggaggtcctgaccatgactaacagtgttcttggacctccgtttcttaaggcgcttgcagccgctctgcgccatcctcagtgtaagctgcagaagctgctgttgcgtagagtaaattcaactatgctgaaccaagacctgatcggcgttctcaccggtaaccagcatcttcgctatctggaaattcagcacgtggaggtcgagagcaaggcagtgaagctgctctgtcgcgttttgcgctcccccagatgccgcttgcagtgtctgagactcgaagattgcctcgcaaccccacggatttggacggacttaggtaacaatctgcagggcaacggccatctgaagacacttattttgcgcaaaaactctttggaaaattgtggggcttattatctcagcgtggctcagctggagcgtttgtcaattgaaaattgcaacctcacacagttgacctgtgagtcccttgcctcatgccttagacagtcaaaaatgttgacacacctttcgttggctgaaaacgcactcaaagatgagggtgctaaacatatctggaacgccctcccccacctcaggtgccctttgcagcgcctggttctgaggaaatgcgacttgacgtttaattgttgccaggacatgatttcggccttgtgcaagaacaagaccttaaagagcctagacctgtcatttaacagcctaaaggacgacggtgtcattctgctgtgcgaagccctgaagaatccagactgtaccctccagattttggagctagaaaattgcctgtttacatctatctgctgccaagcgatggcctcaatgctgagaaagaaccaacatctccgtcatctcgacctgagcaagaatgctataggtgtttacgggatccttacactgtgcgaagctttttcatcccagaagaaaagagaggaagtaatcttctgcatccccgcttggacccgtatcacctctttttcccctactccccatcccccagacttcaccggaaagtctgattgcctctctcagattaacccttag

SEQ ID NO: 252278 - DNA, 3934 bp, Artificial Sequence
  derived and/or modified sequence
gtctcgtgtttctctcttccaatcggttgtctttatcgtggacactgaggtgttctctgccttgactaaagatgagtgacgtgaatccaccctctgacacccccattcccttttcatcctcctccactcacagttctcatattccgccctggacattctcttgctaccccggctccccatgtgaaaatggggtcatgctgtacatgagaaacgtgagccatgaggagctacaacggttcaagcagctcttactgactgagctcagtactggcaccatgcccatcacctgggaccaggtcgagacagccagctgggcagaggtggttcatctcttgatagagcgtttccctggacgacgcgcttgggatgtgacttcgaacatctttgccattatgaactgtgataaaatgtgtgttgtagtccgcagagagataaatgccattctgcctaccttggaaccagaggacttgaatgtgggagaaacacaggtgaatctggaggaaggagaatctggtaaaatacggcggtataaatcgaatgtgatggaaaagtttttccccatatgggacattacgacttggcctggaaaccagagggacttcttctaccaaggtgtacacaggcacgaggagtacttaccatgtctgcttctgcccaaaagaccccagggtagacagcccaagaccgtggccatacagggagctcctgggatcggaaaaacaatcctggccaaaaaggtgatgtttgagtgggccagaaacaagttctacgcccacaagcgctggtgtgctttctacttccattgccaagaggtgaaccagacgacagaccagagcttctccgagctgattgagcaaaagtggcctggatctcaggacctcgtgtcaaagattatgtccaaacccgaccaacttctgctgctcttggatggctttgaggagctcacatctaccctcattgacagactggaggacctgagtgaagactggaggcagaaattgcctgggtctgtcctactgagcagtttgctgagcaaaacgatgcttccagaggccacgctactgatcatgataagatttacctcttggcagacatgcaagcccttgctgaaatgtccctctctcgtaacccttccggggtttaatacgatggaaaaaatcaagtatttccagatgtattttggacacacagaggagggagaccaagtcttgagtttcgccatggaaaacaccattctcttctccatgtgccgggtccctgtggtttgctggatggtctgctctggtctgaaacagcaaatggagagaggaaacaatctcacacagtcatgtccaaatgccacctctgtgttcgtccggtatatttctagcttgtttcccaccagagctgagaacttttccagaaagatccaccaagcacaactggaaggtctgtgtcacttggccgcagacagcatgtggcacaggaaatgggtgttaggtaaagaagatcttgaggaagccaagctggatcagacgggagtcaccgccttccttggcatgagtattcttcggagaattgcaggtgaggaagaccactatgtctttaccctcgtgacttttcaggaattttttgcggccttgttttatgttctctgtttcccacaaagactcaaaaattttcatgtgttgagccacgtgaatatccagcgcctgatagcgagtcccagaggaagcaaaagctatctctctcacatgggacttttcttattcggttttctgaacgaggcctgcgcttcggccgtggaacagtcattccaatgcaaggtgtctttcggtaataagaggaaactgctgaaagtcatacctctgttgcataaatgtgacccaccttctccgggcagtggggtcccgcagttattctactgtctgcatgaaatccgggaggaagcctttgtaagccaagccctaaatgattatcataaagttgtcttgagaattggcaacaacaaagaagttcaagtgtctgctttttgcctgaagcggtgtcaatatttgcatgaggtggaactgaccgtcaccctgaacttcatgaacgtgtggaagctcagctccagctcccatcctggctctgaagcgccagagagcaatgggctgcatcgttggtggcaagacttatgctctgtgtttgcaacgaatgataagctggaagtcctgactatgaccaacagtgttttggggcctccttttttgaaggctctcgcggccgcactgaggcaccctcagtgcaaactgcaaaagctactcctaaggcgtgtgaatagcaccatgttgaaccaggacttaatcggtgttttgacggggaaccagcatctgagatacttggaaatacaacatgtggaagtggagtccaaagctgtgaagcttctatgcagggtgctgagatccccccggtgccgtctgcagtgtctcaggttggaagactgcttggccacccctagaatttggactgatcttggcaataatcttcaaggtaacgggcatctaaagactctcatactaagaaaaaactccctggagaactgtggggcgtattacctgtctgtggcccagctggagaggctgtcgatagagaactgcaaccttacacagcttacttgtgaaagccttgcctcctgtctcaggcagagtaagatgctgacccacctgagcttggcagaaaacgccttgaaagatgaaggggccaagcatatttggaatgccctgccacacctgagatgtcctctgcagaggctggtactgagaaagtgtgacttgacctttaattgctgtcaggatatgatctctgcgctctgtaaaaataaaaccctgaaaagtcttgacctaagttttaatagcctgaaggatgatggggtgatcctgctgtgtgaggccctgaagaaccctgactgtacattacagatcctggagctggaaaactgcctgttcacctccatctgctgccaggccatggcttccatgctccgcaaaaaccaacatctgagacatctggacttgagcaagaatgcgattggagtctatggtattctgaccttgtgcgaggccttctcaagccaaaagaagagagaagaggtcattttctgtattcctgcctggactcgaataactagcttctccccaactcctcacccacccgacttcacgggaaaaagtgactgcctatcccagattaatccttaggccgtccagtcatctttctctggggcttgattgatcagttcccactctgacaactggcaaataccaggcgttatcatcctgtatgcattaacgtactttcccctgaaacagagcaacccagtcaacaccacagaacctcagctttgaaccctggagtgaggacggtgatgccctgtgtgtattaatatgctatgtaaggctgggcgtggtggctcacgcctgtaacccagcactatgggaggtcgaggtgggcagattacctgaggtcaggagttccagaccagcctggccaacatggtgaaaccccgcctctactaaaaaaaaaaatacaaaaaattaggcgtggtggtgggctcctgtaatcccagctgctcgggaggctgaggcaggagaatcacttgaatctaggaggcagagtttgcagtgagctgagatcacgccattgcactccagcctgggcgacagagcaagactctgtctcaagaagaaaaaaaaaatacatatacacataaatatatatatgtgtgtgtgtatatatatatatatatatatatatgctatataaagtttaaatgaaatgctttgagtcacctaagacaggatatagacaaagtcttcatcgtcttcttgcttcttctacctttatttattctcagctctgaatgtatgaacctgctcaatcacctcatcttaaaaataaaatcactgtccctaga

SEQ ID NO: 252279 - DNA, 3147 bp, Artificial Sequence
  derived and/or modified sequence
atgagcgacgtgaacccccccagcgacacccccatccccttcagcagcagcagcacccacagcagccacatccccccctggaccttcagctgctaccccggcagcccctgcgagaacggcgtgatgctgtacatgagaaacgtgagccacgaggagctgcagagattcaagcagctgctgctgaccgagctgagcaccggcaccatgcccatcacctgggaccaggtggagaccgccagctgggccgaggtggtgcacctgctgatcgagagattccccggcagaagagcctgggacgtgaccagcaacatcttcgccatcatgaactgcgacaagatgtgcgtggtggtgagaagagagatcaacgccatcctgcccaccctggagcccgaggacctgaacgtgggcgagacccaggtgaacctggaggagggcgagagcggcaagatcagaagatacaagagcaacgtgatggagaagttcttccccatctgggacatcaccacctggcccggcaaccagagagacttcttctaccagggcgtgcacagacacgaggagtacctgccctgcctgctgctgcccaagagaccccagggcagacagcccaagaccgtggccatccagggcgcccccggcatcggcaagaccatcctggccaagaaggtgatgttcgagtgggccagaaacaagttctacgcccacaagagatggtgcgccttctacttccactgccaggaggtgaaccagaccaccgaccagagcttcagcgagctgatcgagcagaagtggcccggcagccaggacctggtgagcaagatcatgagcaagcccgaccagctgctgctgctgctggacggcttcgaggagctgaccagcaccctgatcgacagactggaggacctgagcgaggactggagacagaagctgcccggcagcgtgctgctgagcagcctgctgagcaagaccatgctgcccgaggccaccctgctgatcatgatcagattcaccagctggcagacctgcaagcccctgctgaagtgccccagcctggtgaccctgcccggcttcaacaccatggagaagatcaagtacttccagatgtacttcggccacaccgaggagggcgaccaggtgctgagcttcgccatggagaacaccatcctgttcagcatgtgcagagtgcccgtggtgtgctggatggtgtgcagcggcctgaagcagcagatggagagaggcaacaacctgacccagagctgccccaacgccaccagcgtgttcgtgagatacatcagcagcctgttccccaccagagccgagaacttcagcagaaagatccaccaggcccagctggagggcctgtgccacctggccgccgacagcatgtggcacagaaagtgggtgctgggcaaggaggacctggaggaggccaagctggaccagaccggcgtgaccgccttcctgggcatgagcatcctgagaagaatcgccggcgaggaggaccactacgtgttcaccctggtgaccttccaggagttcttcgccgccctgttctacgtgctgtgcttcccccagagactgaagaacttccacgtgctgagccacgtgaacatccagagactgatcgccagccccagaggcagcaagagctacctgagccacatgggcctgttcctgttcggcttcctgaacgaggcctgcgccagcgccgtggagcagagcttccagtgcaaggtgagcttcggcaacaagagaaagctgctgaaggtgatccccctgctgcacaagtgcgacccccccagccccggcagcggcgtgccccagctgttctactgcctgcacgagatcagagaggaggccttcgtgagccaggccctgaacgactaccacaaggtggtgctgagaatcggcaacaacaaggaggtgcaggtgagcgccttctgcctgaagagatgccagtacctgcacgaggtggagctgaccgtgaccctgaacttcatgaacgtgtggaagctgagcagcagcagccaccccggcagcgaggcccccgagagcaacggcctgcacagatggtggcaggacctgtgcagcgtgttcgccaccaacgacaagctggaggtgctgaccatgaccaacagcgtgctgggcccccccttcctgaaggccctggccgccgccctgagacacccccagtgcaagctgcagaagctgctgctgagaagagtgaacagcaccatgctgaaccaggacctgatcggcgtgctgaccggcaaccagcacctgagatacctggagatccagcacgtggaggtggagagcaaggccgtgaagctgctgtgcagagtgctgagaagccccagatgcagactgcagtgcctgagactggaggactgcctggccacccccagaatctggaccgacctgggcaacaacctgcagggcaacggccacctgaagaccctgatcctgagaaagaacagcctggagaactgcggcgcctactacctgagcgtggcccagctggagagactgagcatcgagaactgcaacctgacccagctgacctgcgagagcctggccagctgcctgagacagagcaagatgctgacccacctgagcctggccgagaacgccctgaaggacgagggcgccaagcacatctggaacgccctgccccacctgagatgccccctgcagagactggtgctgagaaagtgcgacctgaccttcaactgctgccaggacatgatcagcgccctgtgcaagaacaagaccctgaagagcctggacctgagcttcaacagcctgaaggacgacggcgtgatcctgctgtgcgaggccctgaagaaccccgactgcaccctgcagatcctggagctggagaactgcctgttcaccagcatctgctgccaggccatggccagcatgctgagaaagaaccagcacctgagacacctggacctgagcaagaacgccatcggcgtgtacggcatcctgaccctgtgcgaggccttcagcagccagaagaagagagaggaggtgatcttctgcatccccgcctggaccagaatcaccagcttcagccccaccccccacccccccgacttcaccggcaagagcgactgcctgagccagatcaacccctag

SEQ ID NO: 252280 - protein, 224 aa, Artificial Sequence
  derived and/or modified sequence
MSVFGKLFGAGGGKAGKGGPTPQEAIQRLRDTEEMLSKKQEFLEKKIEQELTAAKKHGTKNKRAALQALKRKKRYEKQLAQIDGTLSTIEFQREALENANTNTEVLKNMGYAAKAMKAAHDNMDIDKVDELMQDIADQQELAEEISTAISKPVGFGEEFDEDELMAELEELEQEELDKNLLEISGPETVPLPNVPSIALPSKPAKKKEEEDDDMKELENWAGSM

SEQ ID NO: 252281 - DNA, 675 bp, Artificial Sequence
  derived and/or modified sequence
atgagtgtgtttggaaaacttttcggcgccggcggagggaaggctggcaaaggtggacctacccctcaggaagccatccaacggctgagggataccgaggaaatgctgagcaagaaacaagagttcttggagaagaaaatagagcaggagctgactgcagcaaagaaacacgggaccaagaataagcgggccgcgctgcaagccttaaagaggaagaaaaggtacgagaagcagttggcccagattgacgggacgctgagcactattgagtttcaacgagaagccctggaaaacgctaacacaaatacggaggtactcaagaacatgggttacgccgccaaagccatgaaagcagcacacgataacatggacatcgacaaagtggatgagctgatgcaggacattgccgaccaacaggagcttgcagaagagatttcaacggccatttctaagccggtgggtttcggagaggagttcgacgaagatgagcttatggcagagttagaggagctcgaacaggaagagctggataagaacctcttagaaatcagtggaccggaaaccgtgcctctgcccaacgtgccgtctatagcgttgccaagcaaaccggccaagaagaaagaggaagaggatgacgacatgaaagaattggaaaactgggccggaagtatgtag

SEQ ID NO: 252282 - DNA, 675 bp, Artificial Sequence
  derived and/or modified sequence
atgtctgtgtttgggaagctgtttggagctgggggcggcaaggccgggaaaggaggccccaccccccaggaggccatccagaggctgcgggacacagaggagatgctgagcaagaagcaggagttcctggagaagaagattgagcaggagctgacagctgccaagaagcacggcaccaagaacaagagagctgccctgcaggccctgaagaggaagaagagatatgagaagcagctggcccagattgatggcaccctgagcaccatcgagttccagcgggaggccctggagaatgccaacaccaacacagaggtgctgaagaacatgggctacgccgccaaggccatgaaggccgcccatgacaacatggacatcgacaaggtggatgagctgatgcaggacattgctgaccagcaggagctggccgaggagatcagcacagccatcagcaagcctgtgggctttggagaggagtttgatgaagatgagctgatggccgagctggaggagctggagcaggaggagctggacaagaacctgctggagatcagcggccctgagaccgtgcccctgcccaacgtgcccagcatcgccctgcccagcaagccagccaagaagaaggaggaggaggatgatgacatgaaggagctggagaactgggccggctccatgtag

SEQ ID NO: 252283 - DNA, 675 bp, Artificial Sequence
  derived and/or modified sequence
atgagcgtgttcggcaagctgttcggcgccggcggcggcaaggccggaaagggcggccctaccccccaggaggctattcaaagactgcgcgacactgaagaaatgctgagtaagaagcaagagtttcttgagaaaaagattgaacaggagcttacggctgcgaaaaagcacggtaccaagaataagagagctgccctgcaagcactgaagaggaagaagcgctatgagaaacagctcgcccagatcgatggcaccctaagtaccatcgagtttcagcgagaggcactagagaatgctaacacaaacacggaggtactcaagaatatgggctatgccgcaaaagctatgaaggccgctcacgataacatggatatcgacaaagtagacgagcttatgcaggacatagctgatcagcaggaactagctgaggagatcagtacagccatctcgaagccagtgggttttggcgaggagttcgacgaggatgaactgatggccgaattagaggaactggagcaggaggagctggataagaacttgctggaaatcagcggacccgagacagtacctcttcctaatgtaccttcaatcgctctccctagcaagccagcaaaaaaaaaggaagaagaggatgacgatatgaaggaactagagaactgggcaggctctatgtag

SEQ ID NO: 252284 - DNA, 675 bp, Artificial Sequence
  derived and/or modified sequence
atgagcgtgtttggcaagctgttcggtgccggaggaggcaaggcaggaaaggggggtccgacacctcaagaggcaatacagcggctgcgggataccgaggagatgctttcaaagaagcaggagttcttggagaagaagattgagcaggagctgaccgccgctaagaaacatgggactaaaaacaaacgcgcagccctgcaggcactgaaaagaaaaaagcggtacgagaagcagctcgcgcagattgacggcaccctcagcactatcgagttccagcgtgaggccttagaaaacgcaaataccaatacagaggttctaaagaatatgggatacgctgcaaaagcaatgaaagcagcccacgacaatatggatatcgacaaagtggatgagttaatgcaagacatcgctgatcaacaggagctcgctgaagagatttctacagccatctcaaagcctgttggattcggggaggagtttgacgaggacgagctgatggccgaactggaggagctggagcaagaagaactggacaaaaacctcctagaaattagcggaccggaaaccgttccgctcccaaatgtgccctccatcgctctaccatcaaagccagccaagaaaaaagaggaggaggacgatgatatgaaagagttggagaactgggcaggcagcatgtag

SEQ ID NO: 252285 - DNA, 1646 bp, Artificial Sequence
  derived and/or modified sequence
ggtggcgcggccgggcccagctgcggggcggaggcggaggcggaggagaggcctgcggcggcagggagcggcgggactgggagcgggcgccggagccgacccgagccgagccgagccgagccgagccggagcgggcggcgaaggccggcgcggcgagcagcaaccatgtcggtgttcgggaagctgttcggggctggagggggtaaggccggcaagggcggcccgaccccccaggaggccatccagcggctgcgggacacggaagagatgttaagcaagaaacaggagttcctggagaagaaaatcgagcaggagctgacggccgccaagaagcacggcaccaaaaacaagcgcgcggccctccaggcactgaagcgtaagaagaggtatgagaagcagctggcgcagatcgacggcacattatcaaccatcgagttccagcgggaggccctggagaatgccaacaccaacaccgaggtgctcaagaacatgggctatgccgccaaggccatgaaggcggcccatgacaacatggacatcgataaagttgatgagttaatgcaggacattgctgaccagcaagaacttgcagaggagatttcaacagcaatttcgaaacctgtagggtttggagaagagtttgacgaggatgagctcatggcggaattagaagaactagaacaggaggaactagacaagaatttgctggaaatcagtggacccgaaacagtccctctaccaaatgttccctctatagccctaccatcaaaacccgccaagaagaaagaagaggaggacgacgacatgaaggaattggagaactgggctggatccatgtaatggggtccagcgctggctgggcccagacagactgtggtggcctgcgcagcgagcaggcgtgtgcgtgtgtggggcaggcaggatgtggtgcaggcaggttccatcgctttcgactctcactccaaagcagtagggccgcgttgctgctcactctctgcatagcatggtctgcacctgggagatgggcggggggaggggggcgggcggggtgggaagtgcctgctgtttataatgttgaatttctgtaaaataaactgtatttgcaaatccaacattgagcttctggactacgctgactccactgctgaatcctcaatggaaagggtcgactggttgcagttgaaatgacctgaaatgtagcctctgtccttgtaagtcagttgacttgccgcacatctctttgtgtacttgtacggtactggcagaaaagtcatttttcaaaagccataggcttttccttgcccttagctgtaataatgcatctgattttgatttcctccagagctgtgtttctgtccatcacctgtgtattggccctgtgtttaccactctggcccactcctcacccccttgctcccctggtcttctggagtttgtgacattgatttgaaatggatggtgttctcttgagagcaagtgagattgttagaattaagttccaactatacagttttctaacatagctataaggtccttgttgctgtttgtgataactgatagataactcattggaaacgtgcatacatttatattcagatgaaattatggtttgcactgtctattaaatatctcgattaattttcata

SEQ ID NO: 252286 - DNA, 675 bp, Artificial Sequence
  derived and/or modified sequence
atgagcgtgttcggcaagctgttcggcgccggcggcggcaaggccggcaagggcggccccaccccccaggaggccatccagagactgagagacaccgaggagatgctgagcaagaagcaggagttcctggagaagaagatcgagcaggagctgaccgccgccaagaagcacggcaccaagaacaagagagccgccctgcaggccctgaagagaaagaagagatacgagaagcagctggcccagatcgacggcaccctgagcaccatcgagttccagagagaggccctggagaacgccaacaccaacaccgaggtgctgaagaacatgggctacgccgccaaggccatgaaggccgcccacgacaacatggacatcgacaaggtggacgagctgatgcaggacatcgccgaccagcaggagctggccgaggagatcagcaccgccatcagcaagcccgtgggcttcggcgaggagttcgacgaggacgagctgatggccgagctggaggagctggagcaggaggagctggacaagaacctgctggagatcagcggccccgagaccgtgcccctgcccaacgtgcccagcatcgccctgcccagcaagcccgccaagaagaaggaggaggaggacgacgacatgaaggagctggagaactgggccggcagcatgtag

SEQ ID NO: 252287 - protein, 166 aa, Artificial Sequence
  derived and/or modified sequence
MMLHSALGLCLLLVTVSSNLAIAIKKEKRPPQTLSRGWGDDITWVQTYEEGLFYAQKSKKPLMVIHHLEDCQYSQALKKVFAQNEEIQEMAQNKFIMLNLMHETTDKNLSPDGQYVPRIMFVDPSLTVRADIAGRYSNRLYTYEPRDLPLLIENMKKALRLIQSEL

SEQ ID NO: 252288 - DNA, 501 bp, Artificial Sequence
  derived and/or modified sequence
atgatgcttcactctgctctcggactgtgcctcctgctcgtgacagtctcgtccaacctggcaatcgctataaaaaaggagaaacgtccaccacagacactttccaggggctggggggacgacattacttgggtccagacgtacgaagagggcctgttttacgcccagaagtctaagaaaccactgatggtgatacatcatctggaggactgccagtactcacaagctcttaaaaaggtgttcgcccagaacgaggaaatacaggagatggcacaaaacaagtttataatgttgaacctcatgcacgagaccaccgataaaaacttgagccctgacggccagtatgtcccacgcattatgttcgtggacccaagcctgacagtgagagcagatatcgctggtcggtattcaaataggttgtacacctatgagcctcgcgatctgccactgctgatcgaaaatatgaaaaaggctcttaggctcatacaatccgagctttag

SEQ ID NO: 252289 - DNA, 501 bp, Artificial Sequence
  derived and/or modified sequence
atgatgctgcacagcgccctgggcctgtgcctgctgctggtgacagtgagcagcaacctggccatcgccatcaagaaggagaagaggcctccccagaccctgagccggggctggggagatgacatcacctgggtgcagacctatgaggagggcctcttctacgcccagaagagcaagaagcccctgatggtgatccaccacctggaggactgccagtacagccaggccctgaagaaggtgtttgcccagaatgaggagatccaggagatggcccagaacaagttcatcatgctgaacctgatgcatgagaccacagacaagaacctgagcccagatggccagtatgtgccccgcatcatgtttgtggaccccagcctgactgtgcgggctgacattgctggccgctacagcaaccggctgtacacctatgagccccgggacctgcccctgctgattgagaacatgaagaaggccctgcggctcatccagagcgagctgtag

SEQ ID NO: 252290 - DNA, 501 bp, Artificial Sequence
  derived and/or modified sequence
atgatgctgcacagcgccctgggcctgtgcctgctgctggtgaccgtgtcttccaatctggctatagcaatcaaaaaggaaaagagaccacctcagacgttatctcgcggatggggggatgacatcacctgggtccaaacctatgaagaaggactgttctacgcccagaaatccaaaaaacccctgatggtcattcatcacttagaagattgccagtacagccaggctttgaagaaggtgtttgcgcagaatgaagagatccaggagatggctcagaacaagtttatcatgttaaacttaatgcacgaaactactgataaaaacctgtcaccagatggccagtacgtaccacggataatgttcgttgacccttccctaactgtgcgcgctgacattgccgggcgatactctaatcgcttatatacctatgagccacgggacctgcctctgctaatcgaaaatatgaaaaaggccttgcgactgattcagtccgaactgtag

SEQ ID NO: 252291 - DNA, 501 bp, Artificial Sequence
  derived and/or modified sequence
atgatgctccactcagccctggggctgtgtctgttgctggtgacggtgtcttcgaacttagcaattgccataaagaaggaaaagaggcccccacagacactaagtcgcggatggggcgacgatatcacatgggtccagacttatgaggaaggccttttctacgcacaaaaatctaaaaagccactcatggtaatccaccatctggaggattgccaatattcccaggctctgaagaaggtgttcgcacaaaatgaggagattcaagagatggcccaaaacaagttcataatgctgaatctgatgcatgagaccacagacaagaacctgtccccagatggccagtacgttccacgcattatgtttgtggaccctagtcttactgttcgggctgatattgccggaagatattctaatcggttatatacttatgagccgagggatctcccgctgctgattgagaatatgaaaaaagctcttcggttaatacagtcagagttatag

SEQ ID NO: 252292 - DNA, 749 bp, Artificial Sequence
  derived and/or modified sequence
aaacatccagaatacatttccaacaagagcactggccaagtcagcttcttctgagagagtctctagaagacatgatgctacactcagctttgggtctctgcctcttactcgtcacagtttcttccaaccttgccattgcaataaaaaaggaaaagaggcctcctcagacactctcaagaggatggggagatgacatcacttgggtacaaacttatgaagaaggtctcttttatgctcaaaaaagtaagaagccattaatggttattcatcacctggaggattgtcaatactctcaagcactaaagaaagtatttgcccaaaatgaagaaatacaagaaatggctcagaataagttcatcatgctaaaccttatgcatgaaaccactgataagaatttatcacctgatgggcaatatgtgcctagaatcatgtttgtagacccttctttaacagttagagctgacatagctggaagatactctaacagattgtacacatatgagcctcgggatttacccctattgatagaaaacatgaagaaagcattaagacttattcagtcagagctataagagatgatggaaaaaagccttcacttcaaagaagtcaaatttcatgaagaaaacctctggcacattgacaaatactaaatgtgcaagtatatagattttgtaatattactatttagtttttttaatgtgtttgcaatagtcttattaaaataaatgttttttaaatctgagactgac

SEQ ID NO: 252293 - DNA, 501 bp, Artificial Sequence
  derived and/or modified sequence
atgatgctgcacagcgccctgggcctgtgcctgctgctggtgaccgtgagcagcaacctggccatcgccatcaagaaggagaagagacccccccagaccctgagcagaggctggggcgacgacatcacctgggtgcagacctacgaggagggcctgttctacgcccagaagagcaagaagcccctgatggtgatccaccacctggaggactgccagtacagccaggccctgaagaaggtgttcgcccagaacgaggagatccaggagatggcccagaacaagttcatcatgctgaacctgatgcacgagaccaccgacaagaacctgagccccgacggccagtacgtgcccagaatcatgttcgtggaccccagcctgaccgtgagagccgacatcgccggcagatacagcaacagactgtacacctacgagcccagagacctgcccctgctgatcgagaacatgaagaaggccctgagactgatccagagcgagctgtag

SEQ ID NO: 252294 - protein, 333 aa, Artificial Sequence
  derived and/or modified sequence
MLTLTRIRTVSYEVRSTFLFISVLEFAVGFLTNAFVFLVNFWDVVKRQALSNSDCVLLCLSISRLFLHGLLFLSAIQLTHFQKLSEPLNHSYQAIIMLWMIANQANLWLAACLSLLYCSKLIRFSHTFLICLASWVSRKISQMLLGIILCSCICTVLCVWCFFSRPHFTVTTVLFMNNNTRLNWQIKDLNLFYSFLFCYLWSVPPFLLFLVSSGMLTVSLGRHMRTMKVYTRNSRDPSLEAHIKALKSLVSFFCFFVISSCAAFISVPLLILWRDKIGVMVCVGIMAACPSGHAAILISGNAKLRRAVMTILLWAQSSLKVRADHKADSRTLC

SEQ ID NO: 252295 - DNA, 1002 bp, Artificial Sequence
  derived and/or modified sequence
atgctgaccctgaccagaatcagaaccgtgagctacgaggtgagaagcaccttcctgttcatcagcgtgctggagttcgccgtgggcttcctgaccaacgccttcgtgttcctggtgaacttctgggacgtggtgaagagacaggccctgagcaacagcgactgcgtgctgctgtgcctgagcatcagcagactgttcctgcacggcctgctgttcctgagcgccatccagctgacccacttccagaagctgagcgagcccctgaaccacagctaccaggccatcatcatgctgtggatgatcgccaaccaggccaacctgtggctggccgcctgcctgagcctgctgtactgcagcaagctgatcagattcagccacaccttcctgatctgcctggccagctgggtgagcagaaagatcagccagatgctgctgggcatcatcctgtgcagctgcatctgcaccgtgctgtgcgtgtggtgcttcttcagcagaccccacttcaccgtgaccaccgtgctgttcatgaacaacaacaccagactgaactggcagatcaaggacctgaacctgttctacagcttcctgttctgctacctgtggagcgtgccccccttcctgctgttcctggtgagcagcggcatgctgaccgtgagcctgggcagacacatgagaaccatgaaggtgtacaccagaaacagcagagaccccagcctggaggcccacatcaaggccctgaagagcctggtgagcttcttctgcttcttcgtgatcagcagctgcgccgccttcatcagcgtgcccctgctgatcctgtggagagacaagatcggcgtgatggtgtgcgtgggcatcatggccgcctgccccagcggccacgccgccatcctgatcagcggcaacgccaagctgagaagagccgtgatgaccatcctgctgtgggcccagagcagcctgaaggtgagagccgaccacaaggccgacagcagaaccctgtgctag

SEQ ID NO: 252296 - DNA, 1002 bp, Artificial Sequence
  derived and/or modified sequence
atgttgactctaacgcgaatccgcactgttagctacgaagtgagatctacttttctattcataagcgtgcttgaatttgccgttggcttcctcaccaatgctttcgtgtttctcgtcaacttttgggacgtggtgaagagacaggccttgagtaattccgactgtgtgctgctgtgtcttagtatctcgcgtctcttcctccacgggttgctgttcctttctgccatacagctcacccactttcagaagctttccgagccactgaatcactcttaccaggcaatcattatgctgtggatgattgccaatcaggcaaacctatggctcgcagcatgtctcagcttgctgtactgtagcaagctgatccggttctctcacactttcctgatttgtttagcttcttgggtgtcccggaagatctcgcagatgctgcttggcatcatcctctgttcctgtatttgtaccgtgctgtgcgtctggtgcttcttctcccgcccgcattttactgttaccaccgtgctttttatgaacaacaacacacgccttaattggcagattaaggacctgaatttattttactcattcttattctgctacttgtggagtgtacctccgttccttctattcttagtgtcctcaggaatgttgactgtgagcctgggacgacatatgaggaccatgaaggtgtacactcggaactctcgtgacccaagcttggaagcccacattaaggcactcaaaagcctcgtgtccttcttctgcttcttcgttatttcctcctgtgccgcatttatctccgtccctctactgatactgtggcgcgacaagattggggtcatggtttgcgtcggaattatggcagcctgcccaagcggccacgcggcgatcctgattagtggaaatgccaaattgcgacgggctgtgatgacaatcctcctatgggctcagagctccctaaaagtgcgggcagatcacaaggccgatagccgtacattgtgctag

SEQ ID NO: 252297 - DNA, 1002 bp, Artificial Sequence
  derived and/or modified sequence
atgctgaccctgacccgcatcagaacagtgtcctatgaggtgcgcagcaccttcctgttcatctctgtgctggagtttgctgtgggcttcctgaccaatgcctttgtgttcctggtgaacttctgggatgtggtgaagaggcaggccctgagcaacagcgactgtgtgctgctgtgcctgagcatcagccgcctcttcctgcacggcctgctcttcctgagcgccatccagctgacccacttccagaagctgtctgagcccctgaaccacagctaccaggccatcatcatgctgtggatgattgccaaccaggccaacctgtggctggccgcctgcctgagcctgctgtactgcagcaagctgatccgcttcagccacaccttcctgatctgcctggcctcctgggtgtccaggaagatcagccagatgctgctgggcatcatcctgtgcagctgcatctgcaccgtgctgtgtgtgtggtgcttcttcagccggccccacttcaccgtgaccaccgtgctcttcatgaacaacaacacccggctgaactggcagatcaaggacctgaacctcttctacagcttcctgttctgctacctgtggagcgtgccccccttcctgctcttcctggtgagcagcggcatgctgactgtgtccctgggccgccacatgaggaccatgaaggtgtacaccaggaacagccgggaccccagcctggaggcccacatcaaggccctgaagagcctggtgtccttcttctgcttcttcgtcatcagcagctgtgccgccttcatctctgtgcccctgctgatcctgtggagggacaagattggagtgatggtgtgtgtgggcatcatggccgcctgccccagcggccacgccgccatcctgatctctggaaatgccaagctgcggcgggctgtgatgaccatcctgctgtgggcccagagcagcctgaaggtgcgggctgaccacaaggctgacagcaggaccctgtgctag

SEQ ID NO: 252298 - DNA, 1002 bp, Artificial Sequence
  derived and/or modified sequence
atgctgaccctgacccggatccggaccgtgagctacgaggtgcggagcacattcctttttatctccgttctggaatttgcagttggcttcctgacaaacgcgtttgtgtttcttgtcaacttttgggatgtcgtgaagcgccaggctctctcaaactccgactgcgtgctactttgcctcagtatttctcgtctctttctccacggcctgctgttcctctctgctatccagctgactcactttcaaaaactgagcgaacccctgaatcattcataccaggccattattatgctctggatgattgccaaccaggctaatctgtggttggccgcgtgtctatccttgctgtactgtagcaagctcatcagattttctcacacgtttcttatttgcttggcctcatgggtgtcccggaagattagccagatgctgcttgggattatcctctgctcttgtatatgtactgtcctttgtgtttggtgttttttctctcgtccccactttacggtgacgaccgtcctgtttatgaacaataatactaggctgaactggcagataaaggacctgaacctcttctactcgtttttgttctgttatctttggagcgttccccctttccttctcttcctggttagttccgggatgctgacagtgtctctgggacgccatatgagaacaatgaaggtatacacacgaaacagcagggatccatcactggaggcgcacatcaaggcactcaaatcactggttagctttttctgcttcttcgttatttcctcatgcgctgctttcatcagtgtccctcttctcatcctgtggagagataagattggagtaatggtctgcgtgggcataatggccgcctgtcctagtgggcacgccgcaattctcatctcagggaacgctaaactgaggcgagcagttatgacaatccttctttgggcccagtccagtctaaaggtgagggccgaccacaaggctgatagtcggaccttatgctag

SEQ ID NO: 252299 - DNA, 1002 bp, Artificial Sequence
  derived and/or modified sequence
atgctgaccctgaccaggataaggacagtgtcctatgaagtgaggtccacctttctgtttatatcggtcctggaattcgctgtgggtttcctgacgaacgcatttgtcttcctggtcaacttctgggacgtggtcaaacggcaggccttaagcaattcagactgcgtccttctgtgcctgtcaatctcacgactttttctccatggactcctctttctgtctgccatccagttgactcatttccagaagcttagtgagcccctcaaccattcgtaccaggcgatcatcatgctgtggatgatcgcaaatcaggccaatctttggttggccgcttgcctgagccttctttattgcagcaaactgatcaggtttagccacacctttcttatttgtctggcaagttgggtgtcaagaaaaatatcccagatgctcttggggattatactgtgttcctgtatctgtaccgttctgtgcgtctggtgtttcttttcacggcctcatttcaccgtgactaccgtgttgtttatgaacaacaacaccaggcttaactggcagattaaggatttaaacctgttttatagttttttgttttgctacctgtggagtgttcccccattcctgctgttcctggtgtcttcgggcatgctgacggtgagtctcgggaggcacatgagaaccatgaaagtgtacacacggaacagccgcgacccctccctggaagcccacatcaaggcccttaagtccctcgtatcctttttctgcttttttgttatcagttcgtgcgctgccttcataagcgtgccactgttgatcctgtggagggacaagattggggttatggtatgtgtgggcataatggcggcatgcccctctggccatgccgcaatcctgatttctggcaacgcgaagttgcgcagagctgttatgacaatacttttgtgggcacagagttctttgaaagtgagagctgaccacaaagctgactcacggactctctgctag

SEQ ID NO: 252300 - DNA, 1143 bp, Artificial Sequence
  derived and/or modified sequence
cctttctgcactgggtggcaaccaggtctttagattagccaactagagaagagaagtagaatagccaattagagaagtgacatcatgttgactctaactcgcatccgcactgtgtcctatgaagtcaggagtacatttctgttcatttcagtcctggagtttgcagtggggtttctgaccaatgccttcgttttcttggtgaatttttgggatgtagtgaagaggcaggcactgagcaacagtgattgtgtgctgctgtgtctcagcatcagccggcttttcctgcatggactgctgttcctgagtgctatccagcttacccacttccagaagttgagtgaaccactgaaccacagctaccaagccatcatcatgctatggatgattgcaaaccaagccaacctctggcttgctgcctgcctcagcctgctttactgctccaagctcatccgtttctctcacaccttcctgatctgcttggcaagctgggtctccaggaagatctcccagatgctcctgggtattattctttgctcctgcatctgcactgtcctctgtgtttggtgcttttttagcagacctcacttcacagtcacaactgtgctattcatgaataacaatacaaggctcaactggcagattaaagatctcaatttattttattcctttctcttctgctatctgtggtctgtgcctcctttcctattgtttctggtttcttctgggatgctgactgtctccctgggaaggcacatgaggacaatgaaggtctataccagaaactctcgtgaccccagcctggaggcccacattaaagccctcaagtctcttgtctcctttttctgcttctttgtgatatcatcctgtgctgccttcatctctgtgcccctactgattctgtggcgcgacaaaataggggtgatggtttgtgttgggataatggcagcttgtccctctgggcatgcagccatcctgatctcaggcaatgccaagttgaggagagctgtgatgaccattctgctctgggctcagagcagcctgaaggtaagagccgaccacaaggcagattcccggacactgtgctgagaatggacatgaaatgagctcttcattaatacgcctgtgagtcttcataaatatgcc

SEQ ID NO: 252301 - protein, 433 aa, Artificial Sequence
  derived and/or modified sequence
MEPQLGPEAAALRPGWLALLLWVSALSCSFSLPASSLSSLVPQVRTSYNFGRTFLGLDKCNACIGTSICKKFFKEEIRSDNWLASHLGLPPDSLLSYPANYSDDSKIWRPVEIFRLVSKYQNEISDRRICASASAPKTCSIERVLRKTERFQKWLQAKRLTPDLVQGLASPLLRCPSQRLLDRVVRRYAEVADAGSIFMDHFTDRDKLRLLYTLAVNSHPILLQIFPGAEGWPLPKYLGSCGRFLVSTSTRPLQEFYDAPPDQAADLAYQLLGVLESLRSNDLNYFFYFTHIDAGMFGVFNNGHLFIRDASAVGVIDKQEGSQEANRAGENKDIFSCLVSGCQAQLPSCESISEKQSLVLVCQKLLPRLLQGRFPSPVQDDIDSILVQCGDSIRPDPEVLGAASQLKDILRPLRTCDSRFAYRYPDCKYNDKF

SEQ ID NO: 252302 - DNA, 4655 bp, Artificial Sequence
  derived and/or modified sequence
ctctttggccaagccctgcctctgtacagcctcgagtggacagccagaggctgcagctggagcccagagcccaagatggagccccagctggggcctgaggctgccgccctccgccctggctggctggccctgctgctgtgggtctcagccctgagctgttctttctccttgccagcttcttccctttcttctctggtgccccaagtcagaaccagctacaattttggaaggactttcctcggtcttgataaatgcaatgcctgcatcgggacatctatttgcaagaagttctttaaagaagaaataagatctgacaactggctggcttcccaccttggactgcctcccgattccttgctttcttatcctgcaaattactcagatgattccaaaatctggcgccctgtggagatctttagactggtcagcaaatatcaaaacgagatctcagacaggagaatctgtgcctctgcatcagccccaaagacctgcagcattgagcgtgtcctgcggaaaacagagaggttccagaaatggctgcaggccaagcgcctcacgccggacctggtgcagggcctggccagcccgctcctgcgctgcccttcgcagcgactcctggatcgcgtggtcaggcgctatgcagaggtggccgacgccggcagcatcttcatggaccacttcaccgaccgtgacaagctgcgcctgctctacacgctggctgtcaactcgcaccccatcctcctacagatcttccctggggctgagggatggccgctgcccaagtacctgggctcctgtggcagattcctcgtcagcaccagcaccagaccgctgcaggaattctatgatgcacccccagatcaggcagccgaccttgcctaccagctcctgggtgtcctggagtctttgaggagcaacgatttgaactatttcttctacttcacccacattgatgcaggcatgttcggcgtctttaacaacgggcatctgttcatccgggatgccagtgcagtgggcgtcatcgacaagcaggaaggcagccaagaagccaacagggcaggagagaataaagacatttttagctgcctggtttccggctgccaggcccagctgccctcctgcgaaagcatctctgagaagcagagcctggtgctggtgtgtcagaagttgctgcctcgacttctccaggggaggttcccctccccagtgcaagacgacatagactccatccttgttcagtgtggggacagcatccgcccagacccagaagtccttggggccgccagccagctgaaagacatcttgaggcccctgagaacgtgtgactccagatttgcctatcgttacccagattgcaaatataacgataagttctgaagggctggtgtctagctggccttggggacaacacgcttggctctccattctcccagtcgggttgctgcaaggtagaaagaagcagctcttttttaaagatgagaagaaaggcacactcatttcttagggactgagaggggagttgtgagataccacgtggctgtctctgctggctgggacgtcctggcaaagcccgcggtgggcatcagaagacctgggtgtggacgctcactcaatgtctttgagcctcagtttcctctgttctccaccagactctcctgagggtgaaagaagacacagatggagccaccactgagcatatatcccaagcatgggtcttgggacacatgctcaccacctccatcccaggtggttacaaagtgtgttctggaaaagcacagaggcggggagcatgagaaagagctgctcaggtcaggaggctggagtggagggaaggcaggggaaggacaggctccctgccactaccactttagactcggacaagaggggcccccttcctgctccctatggccctgcgtcactccccacaccatcgcgggatgaggagactgcaggccaaggggacatgcctgccaccacctagagcctggtacctgaggctccatacacctgcgcatggggcttctcgtggtgtgggaagaagccaggggtaagaagataaaggggggccggcgggggaccaatgtgttagcccaagtcttccaagaatatgtgtcaagatagagtgaatggaacaaagatttgttaggggaaatgattgtgtgtaaggaaagaaggagggagccggagaagattgggaggaccagtaagtcgagctgcaagctgagccccggtgaaggagagaatgtctggcaggagcttgctaagctcaaaatcaaagaaaggttcagcaaggctgtcagggtgtcctcaagacaaaggcagccatcagaagagccccgtgtctcccacaaatagaccccgttagcatccctgctgcactcagtggttggcggaaacagcaaagatagatttcagagcacagcagcaggggtccctggtcagccccgctccctagagcaggagatcttgagtgggagaacattcttgttgtagccacagctgaggccctggaccagctctctccacaccgcatgctccgagttgggactctaaggagtctaggaattttcattcaaacttggccttacaggtcactcatcagaaaaatacttttttcaaggtcaaccaatagaacatactttattcaacagtttgttagtttgctttttaaatatttagccacatggtatgtaggcttccatgtacactcttgccctggcccctgaaacataagcagggggctcttctgtacatttgcccagcttccctgccagcctttaaccccaggaacctctcagtctacctcctcttttctgcctctgaatccctacctttaaagtcagaacaggccaggcccggtggctcacgcctgtaatcccagcactttgggaggctgaggtgggtggatcacttgacatcagtagttcaagaccagcctggccaacatggtgaaaccccatccttactaaaaatacaaaaattagccaggtgtggtggcgggcacctgtaatcccagctactcaggaggctgaggcaggagaatcacttgaacccaggaggcagagtttgcagtcagccaagatcacgccactgtactccagcctggatgacacagcgagactccgtctcaaaataaataaataaaaataaagtcagaacacctggcttaataggcctcactgtgcagatgaggaaactgaggcccagggaggaagagcgatctgtggagatatttctagaacccctgcaagctgagccccagtgaaggagagaaggtccagtaggagcttgctaagctcaaaatcgaagaaaggttcagcaagactgtcagggtgacctcaaagcaatggcagccatcagaggagccccattgctattaggaggctcctattgccctccccttcagcctctgactttcacctgtgctacccaattctggttccttcactcccattcaaaaatggaccccagaaaagccttattttgtggagtacctagttcccttttgggtttgtctcttgactgctacgggcattgccccagggcaaccatgacagtgaagatgactggccaagcttgtggactggccagcaagcttgggctgcctgagacgctttgaaatggctgccttctgagttggtcttgagggtgaagactgaccacccttctcacctgcacagtcacagtccctctcctgctggcctgactgcagctgtcctcccagctggccacctgaccagagaccaggagagaggccacagcctccagaccctccagagtcccacggaggaagaaggcttaccagagagaccctctgatgcatgagccaggccccagcccttctccctgcatccaggtgtgtttccaccgcaaaatgcctccacacaatgagcgactttggccctgcgtgggtcagcatgtggtctgaggtaaccctcaaatgcctccaccacacatctgtccacctgcacgggttcaaggtaagcacttgcccccttctctcctccagaccagtcgcctgaaattctgagcaacattccttcaagactatcatgtaacccttggtgatgctgagtccagacaggaaatgcagacttgggacccacctgtatcagcagaaagaggccttgtgccccgtttgtccgagtcccagaacggagcaaatgagaaaaccggcgagctgtcccccgaggagctgtagggagattggtttttagtataaattacaataaaattttgtgtatgtgtacagctgtgttcacatccacagtgtaagctgtgatatggtttggatgtttgtcccctccaaatctcatgttgaaatgtgatccccagcattggaggtggggcctgatgggaggtgattgggtgatgggggaagttgcctcatgaatgacttggtgccctcctggaagtgatgagtgagttctcgctgagctcactcaagatgtggttgtttaaaagagtgtggcacgtccctcccccaactctccctctcactcccgctctcaccatgtgacacacctgctcccccttcgccttccaccatgattggaagcttcctgaagcccttaccagaagcagatgccagccccacacttcctgtaccacctgcagaaccataaaccaaaataaagctcttttctttatcaatt

SEQ ID NO: 252303 - DNA, 1302 bp, Artificial Sequence
  derived and/or modified sequence
atggagccgcagctcggcccagaggctgctgctctcagaccgggatggcttgctctgctcttgtgggtgtccgcgttgtcttgtagctttagcctgcccgcatcctctctctcctccttggtgcctcaggtgaggaccagctataacttcggaaggaccttcctgggacttgataagtgcaacgcctgcatcgggacaagcatttgtaaaaaattctttaaggaagaaatccggagcgacaactggctggcaagccacctgggactgccccctgattcccttctatcgtatcctgccaattattccgacgattcgaagatttggcggccagttgaaatcttccggctggtcagcaaataccagaacgaaatatcagacaggcggatttgcgcaagcgcaagcgcacccaagacctgcagcatcgagcgggttctgaggaagacggagcgcttccagaaatggctgcaagcaaagaggctaactcccgacctggtgcaagggctggccagcccgctgctgaggtgcccatcccagaggctgttggacagagtggtgaggcggtacgccgaggtcgctgacgccggatcaatttttatggaccactttacggatagagataaactccgccttctttataccctcgctgttaatagtcatcccatcctgctccagattttcccgggagcggaaggatggcccttgcccaagtatttgggtagctgcgggagatttctggtaagcacatcaactcgaccactccaggagttttacgatgccccacctgatcaggccgctgacttggcctaccagctgcttggcgtgctggagtccctgcggtcaaatgatctaaattactttttctattttacacatattgacgcaggtatgtttggggtgttcaataatgggcacttgttcatacgagacgcctctgccgtgggagttatcgacaagcaagaagggagtcaggaggcaaatcgcgctggcgaaaacaaggacatcttctcctgtcttgtgtctggctgtcaagctcagttgccttcttgtgagtcaattagtgaaaaacagtctttagtgcttgtgtgtcagaagctgctccctcgacttctgcaaggtcggttcccatctccagtacaggacgatatagacagtatacttgtgcagtgcggcgattcgatccggccagaccctgaggtgctgggtgccgctagccagcttaaggatatcctccgacccttgaggacatgtgatagcagattcgcctaccgctatcccgattgcaagtataatgacaagttttag

SEQ ID NO: 252304 - DNA, 1302 bp, Artificial Sequence
  derived and/or modified sequence
atggagccccagctggggcctgaggctgctgctttgagaccaggttggcttgcgcttctgctctgggttagcgctttgtcatgctcattctccctcccggcttcctcattaagttcacttgttcctcaagtacggacctcctacaactttgggcgaacattcctgggcctggataagtgcaatgcctgcatcggcacgtccatctgcaaaaagtttttcaaggaagaaattcgcagcgacaattggctagcctcccatcttggtttgccacctgattcccttctgtcctatcccgccaattatagtgatgacagcaaaatttggcggccagtcgaaatattccgccttgtatctaaatatcaaaacgaaatctccgaccgacgaatatgtgcatctgcttcagcccctaagacctgctccattgaacgggtcctgcggaagaccgagcgatttcagaagtggctgcaagccaaaagactgacccccgatttagtgcagggtttggcttcaccactgcttcgctgtccctctcagaggctgctcgatcgcgtagtgcggcggtacgctgaggtcgctgacgccgggtcaatctttatggatcactttactgatagggataaactgagacttctgtatactctggccgttaacagccatcccatccttctgcaaattttccctggcgcagaggggtggcctctgcccaaatacctgggttcttgtggacggttcctcgtctccacaagcacccgaccactccaagaattctatgacgcgcctcccgaccaagcggccgacttggcttaccagcttctgggtgtgctcgaatccctgaggtcaaacgatttgaactacttcttctacttcacgcacattgatgcaggtatgtttggcgtttttaataacggacatcttttcattcgcgatgcatccgccgtaggcgtgatcgacaaacaggagggttctcaggaagcgaatcgcgccggagagaacaaagatattttctcctgtctcgttagcggctgtcaggctcaactgccaagttgtgagtcaatctccgagaaacagagcctggtgctcgtgtgtcaaaagctccttccacgacttctccagggacgctttcctagtccagtgcaggacgacatcgattctattctggtgcaatgtggagattctatacggcccgatcctgaagtgcttggcgccgcttctcaactcaaggacatcctccggcctcttcgtacctgtgactcgcgatttgcctatcggtatcctgactgtaaatacaatgacaaattctag

SEQ ID NO: 252305 - DNA, 1302 bp, Artificial Sequence
  derived and/or modified sequence
atggaaccccagcttggtcccgaagccgccgccttgcgacccggatggttggccctacttttgtgggtttcagccctgtcttgttctttttctctccctgccagcagtctgagctcccttgtgcctcaggtgcggacgtcctataattttggtcgaacatttttaggcctggacaagtgtaacgcgtgtatcggtacttcgatttgtaaaaagttttttaaagaagaaatccgctctgataactggttggcttcccacctaggcctacctcctgattccctcctgagctacccagcaaactatagtgatgacagcaaaatttggcggccagtcgaaatattccgccttgtatctaaatatcaaaacgaaatctccgaccgacgaatatgtgcatctgcttcagcccctaagacctgctccattgaacgggtcctgcggaagaccgagcgatttcagaagtggctgcaagccaaaagactgacccccgatttagtgcagggtttggcttcaccactgcttcgctgtccctctcagaggctgctcgatcgcgtagtgcggcggtacgctgaggtcgctgacgccgggtcaatctttatggatcattttacagaccgggataagctccgtttattgtatacactggccgttaatagtcatccaatcctgctgcagattttcccaggtgctgaaggctggccccttccaaaatacctcggatcgtgcggcaggtttcttgtgtccacaagcacccgtcccctccaagagttttatgacgcacctccagatcaggcagcagaccttgcatatcagttactgggtgtcctcgaatctctgcgttccaatgacctgaattacttcttttactttacacacattgatgccgggatgtttggtgtttttaataacggacatcttttcattcgcgatgcatccgccgtaggcgtgatcgacaaacaggagggttctcaggaagcgaatcgcgccggagagaacaaagatattttctcctgtctcgttagcggctgtcaggctcaactgccaagttgtgagtcaatctccgagaaacagagcctggtgctcgtgtgtcaaaagctccttccacgacttctccagggacgctttcctagtccagtgcaggacgacatcgattctattctggtgcaatgtggagattctatacggcccgatcctgaagtgcttggcgccgcttctcaactcaaggacatcctccggcctcttcgtacctgtgactcgcgatttgcctatcggtatcctgactgtaaatacaatgacaaattctag

SEQ ID NO: 252306 - DNA, 1302 bp, Artificial Sequence
  derived and/or modified sequence
atggagccccagctgggccccgaggccgccgccctgagacccggctggctggccctgctgctgtgggtgagcgccctgagctgcagcttcagcctgcccgccagcagcctgagcagcctggtgccccaggtgagaaccagctacaacttcggcagaaccttcctgggcctggacaagtgcaacgcctgcatcggcaccagcatctgcaagaagttcttcaaggaggagatcagaagcgacaactggctggccagccacctgggcctgccccccgacagcctgctgagctaccccgccaactacagcgacgacagcaagatctggagacccgtggagatcttcagactggtgagcaagtaccagaacgagatcagcgacagaagaatctgcgccagcgccagcgcccccaagacctgcagcatcgagagagtgctgagaaagaccgagagattccagaagtggctgcaggccaagagactgacccccgacctggtgcagggcctggccagccccctgctgagatgccccagccagagactgctggacagagtggtgagaagatacgccgaggtggccgacgccggcagcatcttcatggaccacttcaccgacagagacaagctgagactgctgtacaccctggccgtgaacagccaccccatcctgctgcagatcttccccggcgccgagggctggcccctgcccaagtacctgggcagctgcggcagattcctggtgagcaccagcaccagacccctgcaggagttctacgacgccccccccgaccaggccgccgacctggcctaccagctgctgggcgtgctggagagcctgagaagcaacgacctgaactacttcttctacttcacccacatcgacgccggcatgttcggcgtgttcaacaacggccacctgttcatcagagacgccagcgccgtgggcgtgatcgacaagcaggagggcagccaggaggccaacagagccggcgagaacaaggacatcttcagctgcctggtgagcggctgccaggcccagctgcccagctgcgagagcatcagcgagaagcagagcctggtgctggtgtgccagaagctgctgcccagactgctgcagggcagattccccagccccgtgcaggacgacatcgacagcatcctggtgcagtgcggcgacagcatcagacccgaccccgaggtgctgggcgccgccagccagctgaaggacatcctgagacccctgagaacctgcgacagcagattcgcctacagataccccgactgcaagtacaacgacaagttctag

SEQ ID NO: 252307 - DNA, 1302 bp, Artificial Sequence
  derived and/or modified sequence
atggaaccgcaactgggtcccgaagctgctgctttaagaccagggtggctagcacttctactgtgggttagtgccctgtcctgtagcttttcattacctgcctcctccctgtctagcctagttccccaggtacgcacctcctacaacttcggccggacctttctcggactggataaatgcaatgcatgtattggaacatctatatgtaagaagtttttcaaagaagagattcgctctgacaattggctggcttcccatctcggcctgccaccggacagcttacttagttatccggccaattactccgatgactccaagatatggcgaccagtggaaatctttcgactagtaagcaaatatcaaaacgagatttcagacagacggatctgcgcctctgcctccgcgcccaaaacctgcagcattgagagagtgctgagaaagaccgagcgcttccagaaatggctgcaggctaagaggctgacgcctgacttggtgcagggcttagcctcccctctgttgaggtgcccctcccaaaggctgctggatcgtgtagttagacggtacgccgaggttgctgacgctggttccatcttcatggatcactttaccgatagggacaagctccggctgttgtatactcttgcagttaacagccacccaatcctgctgcaaatttttcctggcgccgagggatggcctctcccaaagtacctaggcagttgcggcagattccttgtgagtacgtctacccgcccactgcaggaattctacgatgctcctccagaccaggcagccgatctggcctaccagctgctgggagtccttgaaagcttgcgaagcaatgacctaaattactttttctacttcacccatatcgacgccgggatgtttggcgtgttcaataacgggcacctattcatcagggatgccagcgccgttggcgtgattgacaaacaggagggaagccaggaagctaatcgcgccggagagaataaggacatatttagctgccttgtgtccggatgccaagcacagctcccctcttgtgagtccatctccgagaaacagtcactggtccttgtctgtcaaaaactcctgccaagactgctgcaggggcggttccctagccccgtgcaggacgatatcgactctatactggtgcagtgcggcgatagtataagacccgacccagaggtgttaggggccgcgagccagttgaaggatatccttcgccctttacgtacctgcgacagccggttcgcataccggtacccagactgtaaatataacgataaattctag

SEQ ID NO: 252308 - DNA, 1302 bp, Artificial Sequence
  derived and/or modified sequence
atggagccccagctgggccctgaggccgccgccctgcggcccggctggctggccctgctgctgtgggtgtctgccctgagctgcagcttcagcctgcctgccagcagcctgagcagcctggtgccccaggtgaggaccagctacaactttggccgcaccttcctgggcctggacaagtgcaatgcctgcatcggcaccagcatctgcaagaagttcttcaaggaggagatccgcagtgacaactggctggccagccacctgggcctgcccccagacagcctgctgagctacccagccaactacagtgatgacagcaagatctggaggcctgtggagatcttccggctggtgtccaagtaccagaatgagatcagtgaccggcgcatctgtgccagcgccagcgcccccaagacctgcagcattgagcgggtgctgaggaagacagagcgcttccagaagtggctgcaggccaagaggctgaccccagacctggtgcagggcctggccagccccctgctgcgctgccccagccagaggctgctggacagagtggtgcggcgctatgcagaggtggctgatgctggcagcatcttcatggaccacttcacagaccgggacaagctgcggctgctgtacaccctggccgtgaacagccaccccatcctgctgcagatcttccctggagctgagggctggcccctgcccaagtacctgggcagctgtggccgcttcctggtgtccaccagcacccggcccctgcaggagttctatgatgcccccccagaccaggccgctgacctggcctaccagctgctgggcgtgctggagagcctgcggagcaatgacctgaactacttcttctacttcacccacattgatgctggcatgtttggagtcttcaacaacggccacctgttcatcagagatgccagcgctgtgggcgtcatcgacaagcaggagggcagccaggaggccaacagagctggggagaacaaggacatcttcagctgcctggtgtctggctgccaggcccagctgcccagctgtgagagcatcagcgagaagcagagcctggtgctggtgtgccagaagctgctgccccggctgctgcagggccgcttccccagccctgtgcaggatgacatcgacagcatcctggtgcagtgtggggacagcatccggccagaccctgaggtgctgggcgccgccagccagctgaaggacatcctgcggcccctgcggacctgtgacagcagatttgcctaccgctacccagactgcaagtacaatgacaagttctag

SEQ ID NO: 252309 - DNA, 1302 bp, Artificial Sequence
  derived and/or modified sequence
atggagccccagctgggccccgaggccgccgccctgcggcccggctggctagccctgcttctttgggttagcgcattaagctgcagcttctccttacctgcctcctcgttgagtagtttggttccacaggtacggaccagctacaattttggccggactttcctgggactggacaagtgtaacgcctgtatcggaacttccatatgtaaaaagttctttaaagaggaaatcagatccgataactggctagcctcgcatctgggtctgccacctgacagtctgttgagctatcccgctaattactctgacgattccaaaatctggcgccccgtcgagatattcaggctggtgtccaagtaccaaaacgaaatttcggaccgacggatctgtgctagcgctagcgctcccaaaacttgttccattgagcgcgtgttgagaaaaacagaaaggttccagaaatggctccaggccaaacgtctaactccggatttggtgcagggccttgcgtcgcccctgctgaggtgcccttcccagagattactggatagggttgtcaggcgatacgccgaagtcgccgatgctgggtctattttcatggatcactttacagaccgggataaacttcggctactgtataccctggcagtgaactcccatccgatcctgctgcagatcttccctggcgcagaaggatggcctctgccaaagtacctgggctcctgcgggaggttccttgtctccacaagcacgcgacctttacaggaattctatgatgcacctcccgaccaagcggccgacttggcatatcagctgctaggcgtgctggagtccttaagatccaacgatctgaactatttcttttacttcacccatattgacgctggcatgttcggcgttttcaataacggacacctgtttatcagggatgcttccgcggtgggagttatcgataagcaagagggttcgcaagaggctaacagagccggcgagaacaaggacattttttcctgcctcgtaagcggctgccaggcccagctgccgtcctgcgagtccatctccgaaaagcagtccttggtacttgtatgtcagaaactgctgccaaggctcctacagggccggttccctagccctgtccaggacgacatcgattccatccttgtccagtgcggagacagtattcgtccggaccctgaggtactgggtgctgcctcacagctgaaagacattctccggccccttagaacttgcgacagcagatttgcgtacaggtatccagattgtaaatataacgataaattctag

SEQ ID NO: 252310 - RNA, 1302 nt, Artificial Sequence
  derived and/or modified sequence
auggagccccagcuggggccugaggcugcugcuuugagaccagguuggcuugcgcuucugcucuggguuagcgcuuugucaugcucauucucccucccggcuuccucauuaaguucacuuguuccucaaguacggaccuccuacaacuuugggcgaacauuccugggccuggauaagugcaaugccugcaucggcacguccaucugcaaaaaguuuuucaaggaagaaauucgcagcgacaauuggcuagccucccaucuugguuugccaccugauucccuucuguccuaucccgccaauuauagugaugacagcaaaauuuggcggccagucgaaauauuccgccuuguaucuaaauaucaaaacgaaaucuccgaccgacgaauaugugcaucugcuucagccccuaagaccugcuccauugaacggguccugcggaagaccgagcgauuucagaaguggcugcaagccaaaagacugacccccgauuuagugcaggguuuggcuucaccacugcuucgcugucccucucagaggcugcucgaucgcguagugcggcgguacgcugaggucgcugacgccgggucaaucuuuauggaucacuuuacugauagggauaaacugagacuucuguauacucuggccguuaacagccaucccauccuucugcaaauuuucccuggcgcagagggguggccucugcccaaauaccuggguucuuguggacgguuccucgucuccacaagcacccgaccacuccaagaauucuaugacgcgccucccgaccaagcggccgacuuggcuuaccagcuucugggugugcucgaaucccugaggucaaacgauuugaacuacuucuucuacuucacgcacauugaugcagguauguuuggcguuuuuaauaacggacaucuuuucauucgcgaugcauccgccguaggcgugaucgacaaacaggaggguucucaggaagcgaaucgcgccggagagaacaaagauauuuucuccugucucguuagcggcugucaggcucaacugccaaguugugagucaaucuccgagaaacagagccuggugcucgugugucaaaagcuccuuccacgacuucuccagggacgcuuuccuaguccagugcaggacgacaucgauucuauucuggugcaauguggagauucuauacggcccgauccugaagugcuuggcgccgcuucucaacucaaggacauccuccggccucuucguaccugugacucgcgauuugccuaucgguauccugacuguaaauacaaugacaaauucuag

SEQ ID NO: 252311 - RNA, 1302 nt, Artificial Sequence
  derived and/or modified sequence
auggaaccccagcuuggucccgaagccgccgccuugcgacccggaugguuggcccuacuuuuguggguuucagcccugucuuguucuuuuucucucccugccagcagucugagcucccuugugccucaggugcggacguccuauaauuuuggucgaacauuuuuaggccuggacaaguguaacgcguguaucgguacuucgauuuguaaaaaguuuuuuaaagaagaaauccgcucugauaacugguuggcuucccaccuaggccuaccuccugauucccuccugagcuacccagcaaacuauagugaugacagcaaaauuuggcggccagucgaaauauuccgccuuguaucuaaauaucaaaacgaaaucuccgaccgacgaauaugugcaucugcuucagccccuaagaccugcuccauugaacggguccugcggaagaccgagcgauuucagaaguggcugcaagccaaaagacugacccccgauuuagugcaggguuuggcuucaccacugcuucgcugucccucucagaggcugcucgaucgcguagugcggcgguacgcugaggucgcugacgccgggucaaucuuuauggaucauuuuacagaccgggauaagcuccguuuauuguauacacuggccguuaauagucauccaauccugcugcagauuuucccaggugcugaaggcuggccccuuccaaaauaccucggaucgugcggcagguuucuuguguccacaagcacccguccccuccaagaguuuuaugacgcaccuccagaucaggcagcagaccuugcauaucaguuacuggguguccucgaaucucugcguuccaaugaccugaauuacuucuuuuacuuuacacacauugaugccgggauguuugguguuuuuaauaacggacaucuuuucauucgcgaugcauccgccguaggcgugaucgacaaacaggaggguucucaggaagcgaaucgcgccggagagaacaaagauauuuucuccugucucguuagcggcugucaggcucaacugccaaguugugagucaaucuccgagaaacagagccuggugcucgugugucaaaagcuccuuccacgacuucuccagggacgcuuuccuaguccagugcaggacgacaucgauucuauucuggugcaauguggagauucuauacggcccgauccugaagugcuuggcgccgcuucucaacucaaggacauccuccggccucuucguaccugugacucgcgauuugccuaucgguauccugacuguaaauacaaugacaaauucuag

SEQ ID NO: 252312 - protein, 1093 aa, Artificial Sequence
  derived and/or modified sequence
MADSSSSSFFPDFGLLLYLEELNKEELNTFKLFLKETMEPEHGLTPWNEVKKARREDLANLMKKYYPGEKAWSVSLKIFGKMNLKDLCERAKEEINWSAQTIGPDDAKAGETQEDQEAVLGDGTEYRNRIKEKFCITWDKKSLAGKPEDFHHGIAEKDRKLLEHLFDVDVKTGAQPQIVVLQGAAGVGKTTLVRKAMLDWAEGSLYQQRFKYVFYLNGREINQLKERSFAQLISKDWPSTEGPIEEIMYQPSSLLFIIDSFDELNFAFEEPEFALCEDWTQEHPVSFLMSSLLRKVMLPEASLLVTTRLTTSKRLKQLLKNHHYVELLGMSEDAREEYIYQFFEDKRWAMKVFSSLKSNEMLFSMCQVPLVCWAACTCLKQQMEKGGDVTLTCQTTTALFTCYISSLFTPVDGGSPSLPNQAQLRRLCQVAAKGIWTMTYVFYRENLRRLGLTQSDVSSFMDSNIIQKDAEYENCYVFTHLHVQEFFAAMFYMLKGSWEAGNPSCQPFEDLKSLLQSTSYKDPHLTQMKCFLFGLLNEDRVKQLERTFNCKMSLKIKSKLLQCMEVLGNSDYSPSQLGFLELFHCLYETQDKAFISQAMRCFPKVAINICEKIHLLVSSFCLKHCRCLRTIRLSVTVVFEKKILKTSLPTNTWDGDRITHCWQDLCSVLHTNEHLRELDLYHSNLDKSAMNILHHELRHPNCKLQKLLLKFITFPDGCQDISTSLIHNKNLMHLDLKGSDIGDNGVKSLCEALKHPECKLQTLRLESCNLTVFCCLNISNALIRSQSLIFLNLSTNNLLDDGVQLLCEALRHPKCYLERLSLESCGLTEAGCEYLSLALISNKRLTHLCLADNVLGDGGVKLMSDALQHAQCTLKSLVLRRCHFTSLSSEYLSTSLLHNKSLTHLDLGSNWLQDNGVKLLCDVFRHPSCNLQDLELMGCVLTNACCLDLASVILNNPNLRSLDLGNNDLQDDGVKILCDALRYPNCNIQRLGLEYCGLTSLCCQDLSSALICNKRLIKMNLTQNTLGYEGIVKLYKVLKSPKCKLQVLGLCKEAFDEEAQKLLEAVGVSNPHLIIKPDCNYHNEEDVSWWWCF

SEQ ID NO: 252313 - DNA, 3282 bp, Artificial Sequence
  derived and/or modified sequence
atggccgacagcagcagcagcagcttcttccccgacttcggcctgctgctgtacctggaggagctgaacaaggaggagctgaacaccttcaagctgttcctgaaggagaccatggagcccgagcacggcctgaccccctggaacgaggtgaagaaggccagaagagaggacctggccaacctgatgaagaagtactaccccggcgagaaggcctggagcgtgagcctgaagatcttcggcaagatgaacctgaaggacctgtgcgagagagccaaggaggagatcaactggagcgcccagaccatcggccccgacgacgccaaggccggcgagacccaggaggaccaggaggccgtgctgggcgacggcaccgagtacagaaacagaatcaaggagaagttctgcatcacctgggacaagaagagcctggccggcaagcccgaggacttccaccacggcatcgccgagaaggacagaaagctgctggagcacctgttcgacgtggacgtgaagaccggcgcccagccccagatcgtggtgctgcagggcgccgccggcgtgggcaagaccaccctggtgagaaaggccatgctggactgggccgagggcagcctgtaccagcagagattcaagtacgtgttctacctgaacggcagagagatcaaccagctgaaggagagaagcttcgcccagctgatcagcaaggactggcccagcaccgagggccccatcgaggagatcatgtaccagcccagcagcctgctgttcatcatcgacagcttcgacgagctgaacttcgccttcgaggagcccgagttcgccctgtgcgaggactggacccaggagcaccccgtgagcttcctgatgagcagcctgctgagaaaggtgatgctgcccgaggccagcctgctggtgaccaccagactgaccaccagcaagagactgaagcagctgctgaagaaccaccactacgtggagctgctgggcatgagcgaggacgccagagaggagtacatctaccagttcttcgaggacaagagatgggccatgaaggtgttcagcagcctgaagagcaacgagatgctgttcagcatgtgccaggtgcccctggtgtgctgggccgcctgcacctgcctgaagcagcagatggagaagggcggcgacgtgaccctgacctgccagaccaccaccgccctgttcacctgctacatcagcagcctgttcacccccgtggacggcggcagccccagcctgcccaaccaggcccagctgagaagactgtgccaggtggccgccaagggcatctggaccatgacctacgtgttctacagagagaacctgagaagactgggcctgacccagagcgacgtgagcagcttcatggacagcaacatcatccagaaggacgccgagtacgagaactgctacgtgttcacccacctgcacgtgcaggagttcttcgccgccatgttctacatgctgaagggcagctgggaggccggcaaccccagctgccagcccttcgaggacctgaagagcctgctgcagagcaccagctacaaggacccccacctgacccagatgaagtgcttcctgttcggcctgctgaacgaggacagagtgaagcagctggagagaaccttcaactgcaagatgagcctgaagatcaagagcaagctgctgcagtgcatggaggtgctgggcaacagcgactacagccccagccagctgggcttcctggagctgttccactgcctgtacgagacccaggacaaggccttcatcagccaggccatgagatgcttccccaaggtggccatcaacatctgcgagaagatccacctgctggtgagcagcttctgcctgaagcactgcagatgcctgagaaccatcagactgagcgtgaccgtggtgttcgagaagaagatcctgaagaccagcctgcccaccaacacctgggacggcgacagaatcacccactgctggcaggacctgtgcagcgtgctgcacaccaacgagcacctgagagagctggacctgtaccacagcaacctggacaagagcgccatgaacatcctgcaccacgagctgagacaccccaactgcaagctgcagaagctgctgctgaagttcatcaccttccccgacggctgccaggacatcagcaccagcctgatccacaacaagaacctgatgcacctggacctgaagggcagcgacatcggcgacaacggcgtgaagagcctgtgcgaggccctgaagcaccccgagtgcaagctgcagaccctgagactggagagctgcaacctgaccgtgttctgctgcctgaacatcagcaacgccctgatcagaagccagagcctgatcttcctgaacctgagcaccaacaacctgctggacgacggcgtgcagctgctgtgcgaggccctgagacaccccaagtgctacctggagagactgagcctggagagctgcggcctgaccgaggccggctgcgagtacctgagcctggccctgatcagcaacaagagactgacccacctgtgcctggccgacaacgtgctgggcgacggcggcgtgaagctgatgagcgacgccctgcagcacgcccagtgcaccctgaagagcctggtgctgagaagatgccacttcaccagcctgagcagcgagtacctgagcaccagcctgctgcacaacaagagcctgacccacctggacctgggcagcaactggctgcaggacaacggcgtgaagctgctgtgcgacgtgttcagacaccccagctgcaacctgcaggacctggagctgatgggctgcgtgctgaccaacgcctgctgcctggacctggccagcgtgatcctgaacaaccccaacctgagaagcctggacctgggcaacaacgacctgcaggacgacggcgtgaagatcctgtgcgacgccctgagataccccaactgcaacatccagagactgggcctggagtactgcggcctgaccagcctgtgctgccaggacctgagcagcgccctgatctgcaacaagagactgatcaagatgaacctgacccagaacaccctgggctacgagggcatcgtgaagctgtacaaggtgctgaagagccccaagtgcaagctgcaggtgctgggcctgtgcaaggaggccttcgacgaggaggcccagaagctgctggaggccgtgggcgtgagcaacccccacctgatcatcaagcccgactgcaactaccacaacgaggaggacgtgagctggtggtggtgcttctag

SEQ ID NO: 252314 - DNA, 3282 bp, Artificial Sequence
  derived and/or modified sequence
atggcggacagttcatcatcaagtttttttccagattttggactccttttatacttagaggagctaaataaagaagagcttaacaccttcaagctgttcttgaaggaaacaatggagccagaacacggtttaacgccttggaatgaggttaagaaggccaggagagaggacttggcaaacctgatgaaaaaatattaccccggcgaaaaagcctggtctgtgtcactcaaaattttcggcaaaatgaatctcaaagacctgtgcgagagggcaaaggaggagattaactggtccgctcagacaattgggcccgacgatgccaaggccggcgagacccaggaggatcaggaagctgtgctcggcgacgggactgagtacaggaacaggataaaagagaagttctgtatcacgtgggataagaagtccctggcgggtaaacctgaggattttcatcatgggatcgcagaaaaagaccggaagctcctggaacaccttttcgacgtggacgtcaaaacaggtgcccagccccagatcgtggtacttcaaggcgccgctggtgtgggcaaaaccaccttagtccggaaagcgatgctggattgggccgagggaagcctgtatcagcagcgcttcaagtatgtgttttatctcaatggcagggagatcaatcagttgaaagagagaagtttcgcacagctaatctcaaaggactggccctccacagaggggccaatcgaagagatcatgtaccagccgtcaagtctcctgtttattatagacagttttgacgagttgaacttcgcctttgaggaacccgaattcgctctctgcgaggactggacacaggaacaccccgtgagtttccttatgtcaagtcttcttaggaaggtcatgctgcctgaagcttctctgcttgtaaccacaaggttaacaacatcgaaaaggctgaaacagctattgaaaaaccaccattatgttgaactcctcgggatgtccgaggacgcccgcgaggagtatatttatcagtttttcgaggacaagaggtgggccatgaaggtgttctcctctttgaaaagtaacgaaatgcttttctcaatgtgccaagtgccactcgtttgctgggctgcctgtacatgtctgaaacagcaaatggaaaagggaggagacgttactctgacctgccagaccacaaccgctctgttcacctgctatatatcaagccttttcacccccgtggatgggggcagcccctctttgccgaaccaagcacagctgaggagactgtgtcaagtggccgctaaaggcatctggacgatgacctacgtgttctatagggaaaacctgcgacgactgggcctcactcaatctgacgtaagtagcttcatggatagcaatattatccaaaaggacgctgaatacgaaaactgctacgtcttcacccacctgcacgtacaggaattctttgccgccatgttctacatgttgaagggatcctgggaagccgggaacccctcctgccagccattcgaggatctcaaatcattgttgcaatcaacatcttacaaagatccacacctgactcagatgaaatgctttctgttcggcttactgaacgaagaccgagtcaaacagctggaaagaacatttaattgcaaaatgtcactgaagattaaaagtaaactgcttcagtgcatggaggtgcttggaaactctgattactcaccaagccagcttggcttcctggaattattccattgcctgtacgaaacgcaagataaggcgttcatttctcaggcaatgcggtgttttcctaaggtggctattaatatctgtgagaagattcatttgctcgtaagtagtttttgtctcaaacactgccggtgcttgaggaccatacgactgagtgtcactgtcgtgttcgagaaaaaaatcctgaagaccagtctacccacgaacacctgggatggggacaggatcacccattgctggcaggatctgtgctccgtgctccacaccaacgagcacttgcgcgaacttgatctctaccacagcaacctcgacaagtcggccatgaatattcttcatcacgaactaaggcatccaaattgcaagctgcagaagctcctgctcaagttcatcaccttcccagatgggtgtcaagacatcagcacttccttgattcacaataaaaatctcatgcacctggacctaaaggggagcgatatcggcgataatggcgtaaagagcctgtgcgaagctctgaaacatcccgagtgcaagttgcagacactgagattggaaagctgcaaccttaccgtgttttgctgtctgaatattagcaatgccttgattagatcacaatctctgattttcctgaacctctccacgaacaatctgctggatgatggagtacagttgctgtgcgaggctctccgccaccctaagtgctatctggaaagactctccctggagtcatgcggcctcactgaagccgggtgtgaatacttatctctcgcgttaatctcaaataaacgtctgacacatctgtgcctcgccgacaacgtcctgggagatggcggcgttaaactgatgtctgacgcacttcagcatgcccaatgtacattgaagtcgttggtcctgcggagatgtcactttacctccctgagttccgagtacctatcaacctccctgctacataacaagtccctcactcacttggacttgggcagcaattggctgcaagataatggagtaaaacttctctgtgatgtctttcggcacccatcgtgtaaccttcaagatttggagctgatgggctgtgtgctcaccaacgcatgttgcctggaccttgcatccgtcatcctgaacaatcctaacctccgcagcctcgatctgggaaacaacgacctgcaggacgatggagttaaaatcctgtgtgacgcactgaggtatcccaactgcaatattcagcgcctgggcctggagtattgcggactcacctctctttgttgtcaggatctgagcagtgccctcatttgcaataagcgccttatcaaaatgaatcttacccaaaatacactgggctatgagggaatcgtgaaattgtacaaggtcctaaaaagccccaaatgtaaactccaagtcctcggcctgtgtaaagaggctttcgacgaggaagcgcaaaaactcctagaagccgttggcgtttccaacccccaccttatcattaaacctgactgcaactaccacaacgaagaggatgtgtcatggtggtggtgtttttag

SEQ ID NO: 252315 - DNA, 3282 bp, Artificial Sequence
  derived and/or modified sequence
atggctgacagcagcagcagcagcttcttcccagactttggcctgctgctgtacctggaggagctgaacaaggaggagctgaacaccttcaagctgttcctgaaggagaccatggagcctgagcacggcctgaccccctggaatgaggtgaagaaggcccggcgggaggacctggccaacctgatgaagaagtactacccaggagagaaggcctggagcgtgtccctgaagatctttgggaagatgaacctgaaggacctgtgtgagcgggccaaggaggagatcaactggagcgcccagaccatcggcccagatgatgccaaggccggggagacccaggaggaccaggaggccgtgctgggagatggaacagagtacagaaaccgcatcaaggagaagttctgcatcacctgggacaagaagagcctggccggcaagccagaggacttccaccacggcattgctgagaaggacaggaagctgctggagcacctgtttgatgtggatgtgaagacaggagcccagccccagatcgtggtgctgcagggcgctgctggggtgggcaagaccaccctggtgaggaaggccatgctggactgggccgagggcagcctgtaccagcagcgcttcaagtatgtgttctacctgaatggccgggagatcaaccagctgaaggagaggagctttgcccagctgatcagcaaggactggcccagcacagagggccccatcgaggagatcatgtaccagcccagcagcctgctcttcatcatcgacagctttgatgagctgaactttgcctttgaggagcctgagtttgccctgtgtgaggactggacccaggagcaccctgtgtccttcctgatgagcagcctgctgaggaaggtgatgctgcctgaggccagcctgctggtgaccacccggctgaccaccagcaagaggctgaagcagctgctgaagaaccaccactacgtggagctgctgggcatgtctgaagatgcccgggaggagtacatctaccagttctttgaggacaagcgctgggccatgaaggtgttcagcagcctgaagagcaatgagatgctgttctccatgtgccaggtgcccctggtgtgctgggccgcctgcacctgcctgaagcagcagatggagaagggaggagatgtgaccctgacctgccagaccaccacagccctcttcacctgctacatcagcagcctcttcacccctgtggatggcggcagccccagcctgcccaaccaggcccagctgcggcggctgtgccaggtggccgccaagggcatctggaccatgacctacgtgttctaccgggagaacctgcggcggctgggcctgacccagagtgatgtgtcctccttcatggacagcaacatcatccagaaggatgctgaatatgagaactgctacgtgttcacccacctgcacgtgcaggagttctttgctgccatgttctacatgctgaagggctcctgggaggccggcaaccccagctgccagccctttgaggacctgaagagcctgctgcagagcaccagctacaaggacccccacctgacccagatgaagtgcttcctgtttggcctgctgaatgaagatagagtgaagcagctggagaggaccttcaactgcaagatgagcctgaagatcaagagcaagctgctgcagtgcatggaggtgctgggcaacagcgactacagccccagccagctgggcttcctggagctgttccactgcctgtatgagacccaggacaaggccttcatcagccaggccatgcgctgcttccccaaggtggccatcaacatctgtgagaagatccacctgctggtgtcctccttctgcctgaagcactgccgctgcctgcggaccatccggctgtctgtgacagtggtgtttgagaagaagatcctgaagaccagcctgcccaccaacacctgggatggagaccgcatcacccactgctggcaggacctgtgcagcgtgctgcacaccaatgagcacctgcgggagctggacctgtaccacagcaacctggacaagagcgccatgaacatcctgcaccacgagctgcggcaccccaactgcaagctgcagaagctgctgctgaagttcatcaccttcccagatggctgccaggacatcagcaccagcctcatccacaacaagaacctgatgcacctggacctgaagggcagtgacattggagacaacggggtgaagagcctgtgtgaggccctgaagcaccctgagtgcaagctgcagaccctgcggctggagagctgcaacctgactgtgttctgctgcctgaacatcagcaatgccctgatccgcagccagagcctcatcttcctgaacctgagcaccaacaacctgctggatgatggagtgcagctgctgtgtgaggccctgcggcaccccaagtgctacctggagcggctgagcctggagagctgtggcctgacagaggccggctgtgagtacctgagcctggccctgatcagcaacaagaggctgacccacctgtgcctggccgacaacgtgctgggagatggaggagtgaagctgatgtctgatgccctgcagcacgcccagtgcaccctgaagagcctggtgctgcggcgctgccacttcaccagcctgagcagcgagtacctgagcaccagcctgctgcacaacaagagcctgacccacctggacctgggcagcaactggctgcaggacaatggagtgaagctgctgtgtgatgtgttccgccaccccagctgcaacctgcaggacctggagctgatgggctgtgtgctgaccaatgcctgctgcctggacctggccagcgtcatcctgaacaaccccaacctgcggagcctggacctgggcaacaatgacctgcaggatgatggagtgaagatcctgtgtgatgccctgcgctaccccaactgcaacatccagaggctgggcctggagtactgcggcctgaccagcctgtgctgccaggacctgagcagcgccctgatctgcaacaagaggctcatcaagatgaacctgacccagaacaccctgggctatgagggcatcgtgaagctgtacaaggtgctgaagagccccaagtgcaagctgcaggtgctgggcctgtgcaaggaggcctttgatgaggaggcccagaagctgctggaggccgtgggcgtgagcaacccccacctgatcatcaagccagactgcaactaccacaatgaagaagatgtgtcctggtggtggtgcttctag

SEQ ID NO: 252316 - DNA, 3282 bp, Artificial Sequence
  derived and/or modified sequence
atggccgacagcagcagcagcagcttcttccccgacttcggcctgctgctgtacctggaggagcttaacaaagaagagctcaatacctttaagctgttcctgaaagagaccatggagccggaacatggcctgactccatggaatgaggtcaagaaagcaaggcgggaagacctagccaatcttatgaagaagtattatccgggcgaaaaagcttggagcgtgtctctgaagatcttcggtaaaatgaaccttaaggacctgtgtgagcgggctaaagaagaaataaactggtccgcccagacaatcggaccagacgacgcaaaggcgggtgagacccaggaggaccaggaggctgtcctgggcgacggcaccgaatatcgcaaccgcattaaagaaaaattctgtattacgtgggataagaaatcacttgccggaaagccagaggacttccaccatggcatagctgaaaaagaccgcaaactcctggagcatctatttgatgtcgacgtgaaaaccggtgctcagccgcagatagtagtgctacagggggccgccggcgtgggaaagaccactttggttcgtaaggcgatgttggactgggctgaagggtcgctgtaccagcaaagatttaagtacgtgttttacttaaacggtcgcgaaattaatcagctgaaggagagatcgtttgctcagcttatctccaaggactggccttccacggaaggtcccattgaggagatcatgtaccagccttcatctctcctgttcattatcgatagttttgatgaactgaacttcgcctttgaggaaccagagttcgctctgtgtgaggactggacacaagaacacccagtgtcatttctcatgtcatccctgctgcgcaaggtgatgctgcccgaagcatcactcttggtcaccacccgactcaccacatctaagcggctcaaacagctactcaagaaccaccactatgtggagctgctggggatgagcgaggacgctcgcgaggaatacatttaccagttttttgaagataaaaggtgggctatgaaggtcttctcaagccttaagtccaatgaaatgctcttcagtatgtgtcaggtgccgctggtatgttgggctgcttgtacttgcctgaagcagcagatggagaaaggaggcgacgtgacactgacatgtcagactacaactgccctatttacgtgctatatctcaagcctctttactcctgtcgatggcgggtccccctccctacctaatcaggcgcagctccgacggctgtgccaagtggcggctaaaggaatctggactatgacttatgttttctatagggaaaacctgaggaggctggggctcacacagtccgacgtctcttccttcatggatagtaatatcattcaaaaagacgcggaatacgagaactgctatgtcttcacccaccttcatgttcaggaatttttcgccgcaatgttttatatgctgaaaggatcctgggaggccggaaacccctcctgccagcccttcgaagacctcaagagcctgctgcaaagcaccagctataaagacccacaccttacccagatgaagtgttttctgttcggcttgcttaacgaggaccgtgtgaaacaactagagcgcaccttcaactgcaagatgtctttgaaaattaaatctaaacttctgcagtgcatggaagtcttgggaaattctgactactccccaagccaattggggttcctagagctttttcactgcctttacgagacgcaagataaagccttcatcagtcaagctatgaggtgcttcccaaaagtggctatcaatatctgcgagaaaatacatctgctggtgtcttcattctgcttgaagcattgcagatgtctgaggacaattcgactgtccgtaaccgtggtttttgagaagaagatcctaaaaactagcctgccgaccaatacatgggacggtgaccgcatcacccactgctggcaggacctctgtagtgtgctgcacaccaacgagcaccttcgggaactcgatctgtaccactcgaatcttgacaagtcagcaatgaatattctccaccacgaattacgacaccccaactgtaaattgcagaaactgctgttaaaattcatcacgtttcccgacggctgtcaggatatttccacctccctcatacacaacaagaacctgatgcacctggatctgaaaggttctgatatcggcgataatggagtgaaatcgctttgcgaggccttaaagcatcctgagtgtaagctccaaactctgagattggaaagctgcaatctgaccgtgttttgctgtctcaatattagtaatgcattgattagatcccagtctctgatcttcttgaatctgagcaccaataacttactggacgatggagtgcagctgctgtgcgaagccttacggcaccctaaatgctatctggagagattgtcgctggagtcttgcggcctcaccgaagccggctgcgaatatctctccttagcgctgatctccaataaacgccttacacacctgtgcctcgccgataacgttctgggtgacggcggggttaagttgatgagtgacgcactacagcacgcccagtgtactcttaaatcgcttgtgctgcgacggtgccactttacgtctcttagttctgaatatctttccactagcctgctccacaacaaaagccttactcacctggacctgggcagcaactggttgcaagataacggcgtgaagttactctgcgacgtgttccgacacccttcttgtaaccttcaggacctggagctgatgggctgtgttctgactaatgcatgttgcctagatctcgcgtccgttatcctgaacaaccccaacctgcggagtttagacttgggcaataatgacctgcaagatgacggggtgaaaatcctctgtgatgccctgcgctaccctaactgtaacatacagcgactgggcttggagtactgcggtctcacctccctgtgttgccaggacctctcgagcgcccttatctgtaacaaacgactcatcaagatgaacctcacacagaatacccttggatacgaaggcattgtaaagctatacaaagtgcttaaaagcccaaaatgcaagttgcaggtgctcgggctgtgtaaggaggcatttgacgaggaagctcagaagctactggaggccgtcggagttagcaatccccacctcatcatcaagcccgattgcaattaccacaatgaggaagatgtaagttggtggtggtgtttttag

SEQ ID NO: 252317 - DNA, 3628 bp, Artificial Sequence
  derived and/or modified sequence
gtatcccgcgcctcccgacctttggccgctggcattcctgcgcgggcgggagctgcgggcgctcgggggataaggcgaggacgcaccagcattaatggaataggagaactcccgaagcttttagggccctgggaaagggggcgtggctggaaacggagctactggcttcggagaattctgtgaccctcaccaccgcgacgaccccgaggaaacgctgtcaggtcgcctttggttggcaaggcgtggttgtcctcgctgtcccgcgccttggcggaatgggcacctcactagccctggcactagctagcatcgctctaaactcaagaggcctgaatatttggacaagatggcagattcatcatcatcttctttctttcctgattttgggctgctattgtatttggaggagctaaacaaagaggaattaaatacattcaagttattcctaaaggagaccatggaacctgagcatggcctgacaccctggaatgaagtgaagaaggccaggcgggaggacctggccaatttgatgaagaaatattatccaggagagaaagcctggagtgtgtctctcaaaatctttggcaagatgaacctgaaggatctgtgtgagagagcgaaagaagagatcaactggtcggcccagactataggaccagatgatgccaaggctggagagacacaagaagatcaggaggcagtgctgggtgatggaacagaatacagaaatagaataaaggaaaaattttgcatcacttgggacaagaagtctttggctggaaagcctgaagatttccatcatggaattgcagagaaagatagaaaactgttggaacacttgttcgatgtggatgtcaaaaccggtgcacagccacagatcgtggtgcttcagggagctgctggagttgggaaaacaaccttggtgagaaaggcaatgttagattgggcagagggcagtctctaccagcagaggtttaagtatgttttttatctcaatgggagagaaattaaccagctgaaagagagaagctttgctcaattgatatcaaaggactggcccagcacagaaggccccattgaagaaatcatgtaccagccaagtagcctcttgtttattattgacagtttcgatgaactgaactttgcctttgaagaacctgagtttgcactgtgcgaagactggacccaagaacacccagtgtccttcctcatgagtagtttgctgaggaaagtgatgctccctgaggcatccttattggtgacaacaagactcacaacttctaagagactaaagcagttgttgaagaatcaccattatgtagagctactaggaatgtctgaggatgcaagagaggagtatatttaccagttttttgaagataagaggtgggccatgaaagtattcagttcactaaaaagcaatgagatgctgtttagcatgtgccaagtccccctagtgtgctgggccgcttgtacttgtctgaagcagcaaatggagaagggtggtgatgtcacattgacctgccaaacaaccacagctctgtttacctgctatatttctagcttgttcacaccagtagatggaggctctcctagtctacccaaccaagcccagctgagaagactgtgccaagtcgctgccaaaggaatatggactatgacttacgtgttttacagagaaaatctcagaaggcttgggttaactcaatctgatgtctctagttttatggacagcaatattattcagaaggacgcagagtatgaaaactgctatgtgttcacccaccttcatgttcaggagttttttgcagctatgttctatatgttgaaaggcagttgggaagctgggaacccttcctgccagccttttgaagatttgaagtcattacttcaaagcacaagttataaagacccccatttgacacagatgaagtgctttttgtttggccttttgaatgaagatcgagtaaaacaactggagaggacttttaactgtaaaatgtcactgaagataaaatcaaagttacttcagtgtatggaagtattaggaaacagtgactattctccatcacagctgggatttctggagttgtttcactgtctgtatgagactcaagataaagcgtttataagccaggcaatgagatgtttcccaaaggttgccattaatatttgtgagaaaatacatttgcttgtatcttctttctgccttaagcactgccggtgtttgcggaccatcaggctgtctgtaactgtggtatttgagaagaagatattaaaaacaagcctcccaactaacacttgggatggtgatcgcattactcactgttggcaagatctctgttctgtgcttcatacaaatgaacacttgagagaattggacctgtaccatagcaaccttgataaatcagcaatgaatatcctgcatcatgaactaaggcacccaaactgtaaactacaaaagctactgttgaaatttatcactttccctgatggttgtcaggatatctctacttctttgattcataacaagaatctgatgcatcttgacctaaaagggagtgatataggggataatggagtaaagtcattgtgtgaggccttgaaacacccagagtgtaaactacagactctcaggctggaatcttgcaacctaactgtattttgttgtctaaatatatctaatgctctcatcagaagccagagcctgatatttctgaatctgtcaaccaataatctgttggatgatggagtgcagcttttgtgtgaggccttaagacatccaaagtgttatctagagagactgtccttagaaagctgtggtctcacagaggctggctgtgagtatctttctttggctctcatcagcaataaaagactgacacatttgtgcttggcagacaatgtcttgggtgatggtggagtaaagcttatgagtgatgccctgcaacatgcacaatgtactctgaagagccttgtgctgaggcgttgccatttcacttcacttagcagtgaatatctgtcaacttctcttctacacaacaagagcctgacgcatctggatctaggatcaaactggctacaagacaatggagtgaagcttctgtgtgatgtctttcggcatccaagctgtaatcttcaggacttggaattgatgggctgtgttctcactaatgcatgttgtctggatctggcttctgttattttgaataacccaaacctgaggagcctggaccttgggaacaacgatttgcaggatgatggagtgaaaattctgtgtgatgctttgagatatccaaactgtaacattcagaggctcgggttggaatactgtggtttgacatctctctgctgtcaagatctctcctctgctcttatctgcaacaaaagactgataaaaatgaatctgacacagaataccttaggatatgaaggaattgtgaagttatataaagtcttgaagtctcctaagtgtaaactacaagttctagggttgtgcaaagaggcatttgatgaggaagcccagaagctgctggaagctgtgggagttagcaatccacacttaatcattaagccagattgtaactatcataatgaagaagatgtgtcttggtggtggtgtttctga

SEQ ID NO: 252318 - DNA, 3282 bp, Artificial Sequence
  derived and/or modified sequence
atggcagactcctctagtagctccttctttcctgactttgggctcctgttatatctggaggagcttaacaaggaggagctgaatacatttaaactgttcctaaaagagaccatggagcccgaacatggcctgacaccctggaacgaggtgaagaaggccagacgcgaggatttggcaaatctaatgaaaaagtactatcccggagagaaagcgtggagtgtgtccttgaaaatttttggaaagatgaacctgaaggacctgtgtgaacgagcaaaagaggaaattaactggtccgcacagaccattggacctgacgacgcaaaagctggagagacccaggaggaccaagaagccgtgctcggcgacgggacagagtacagaaaccgcattaaggagaaattttgtatcacatgggacaaaaagagtctcgcgggtaagcctgaagactttcaccatggaatagcggaaaaagatcgcaaactactggaacacctttttgatgtggatgtgaaaacaggtgcacagccacagatagtggtgctgcaaggcgctgccggagtcggtaaaaccacgctcgtcagaaaagctatgctggattgggcggaaggctccttgtaccaacagcgatttaagtatgttttctatttaaacgggagagaaattaatcagttaaaagaacgttctttcgcccagcttatctcaaaggactggccatctacagaaggacccatcgaagagataatgtatcagccgtcgagtttactcttcattatcgattcctttgatgagctgaactttgcctttgaggaacccgaatttgccctttgcgaagattggacgcaagaacaccctgtctcttttctgatgtcctctctgctgaggaaggttatgctgccagaggcttctctcctggtcaccactagactcacaacatcaaagcgactcaagcagctgttgaagaaccaccattatgtggagctcctaggaatgtctgaggacgcaagagaagagtacatctatcagtttttcgaagacaaacgttgggccatgaaggtgtttagtagtctgaagagcaacgagatgctcttttccatgtgccaggtgccattggtgtgctgggccgcttgcacatgtctgaagcagcagatggaaaaagggggtgacgttactttgacatgccaaacgactactgcactctttacatgctacatcagttctttatttacccctgtggacggcggttctccaagcctcccaaaccaggcccagcttcggcgattatgccaggttgctgcgaagggcatttggactatgacatatgtattttaccgagagaacctacgccgattaggactcacgcagtcggacgtaagctctttcatggacagcaatatcattcagaaggacgctgaatatgagaattgttatgtgtttactcatctgcatgtccaggagttctttgcagccatgttttacatgttgaaaggctcgtgggaagcaggaaatccctcttgtcagccctttgaggatctgaagtctctcctacagagtacaagctataaagaccctcatttgactcaaatgaagtgttttcttttcggtttgctcaatgaggatagggttaaacagcttgagcggacctttaattgtaaaatgagtcttaagatcaagtcaaaattgttacagtgtatggaagtcttgggcaatagcgactactcccctagtcaactcggcttcctggagctctttcactgcttgtacgagacccaagataaagcctttattagtcaagcgatgcgttgctttcctaaggtagctattaatatatgtgagaagatccatcttttggtgtcatccttttgtctcaaacattgtagatgcctgcgtaccattagattatccgtgaccgtggtttttgaaaaaaagatcctcaagacaagccttcccacaaacacctgggatggtgaccgcattactcactgctggcaagacctctgcagcgtgttgcacacgaatgaacaccttcgagagctggatctgtatcatagcaacctggacaaatctgcgatgaatatcctgcaccacgagttgagacatcctaattgcaagctccaaaagcttcttctgaagtttattacctttcccgatgggtgtcaagatatctcaacttcccttatccacaacaagaatctgatgcatctggacttgaagggatctgacatcggggacaatggcgtcaaatccctttgtgaagccctcaaacacccagagtgcaagctgcagactctccggcttgagtcgtgtaatttaaccgtgttctgctgcctgaatatttcaaacgcgctgattcgctcccaatcattaatttttctgaatctgtccacaaataacctgctggatgatggcgtgcaattgctctgtgaggctttgagacatcccaaatgttatttagaacgccttagtttggagtcatgcggtctcacagaagctggatgcgaatatctgagcttggctctgatatccaataagcgcttaacacacctctgcctggctgataacgtcctcggcgacggcggagtgaagttaatgtccgacgccctgcagcacgcccaatgcactctgaaatcgctcgtattgaggcggtgtcatttcacgtctttaagcagcgaatatctttctacaagcctgcttcataacaaatctctaactcatctcgatttgggttccaactggctgcaggataatggggttaaactactctgtgatgtttttagacacccttcttgtaacctgcaggatctggaactgatggggtgtgtgctcacaaatgcttgctgcctcgacctggccagcgttattctgaataaccccaacttgcggagcctagacctggggaataacgacctacaggatgatggcgtcaaaattctctgcgatgccctgagatacccaaactgcaacatacaacgcctgggcctggaatattgcggtcttacgtccctttgttgtcaggatctgagctccgcattaatctgcaataagcgccttatcaaaatgaacctgacccaaaacactctggggtatgaggggattgttaagctctacaaggtcctcaagagccctaagtgcaaacttcaggtcttggggctctgcaaggaggcattcgatgaggaggcccaaaaactgctcgaggccgttggggtttctaacccccacctgatcatcaagccagattgcaactaccacaatgaggaggatgtttcctggtggtggtgcttctag

SEQ ID NO: 252319 - protein, 101 aa, Artificial Sequence
  derived and/or modified sequence
MSNTQAERSIIGMIDMFHKYTGRDGKIEKPSLLTMMKENFPNFLSACDKKGIHYLATVFEKKDKNEDKKIDFSEFLSLLGDIAADYHKQSHGAAPCSGGSQ

SEQ ID NO: 252320 - DNA, 306 bp, Artificial Sequence
  derived and/or modified sequence
atgagcaacacccaggccgagagaagcatcatcggcatgatcgacatgttccacaagtacaccggcagagacggcaagatcgagaagcccagcctgctgaccatgatgaaggagaacttccccaacttcctgagcgcctgcgacaagaagggcatccactacctggccaccgtgttcgagaagaaggacaagaacgaggacaagaagatcgacttcagcgagttcctgagcctgctgggcgacatcgccgccgactaccacaagcagagccacggcgccgccccctgcagcggcggcagccagtag

SEQ ID NO: 252321 - DNA, 491 bp, Artificial Sequence
  derived and/or modified sequence
caagttccttctgctccatcttagggctgtttttactctgtcctcagccctccttctaacacccccacatagagaccttaattcaaactaaggtaagaaatgattgtctttatttcctgaaggctttttgaaagcaaagatgagcaacactcaagctgagaggtccataataggcatgatcgacatgtttcacaaatacaccggacgtgatggcaagattgagaagccaagcctgctgacgatgatgaaggagaacttccccaatttcctcagtgcctgtgacaaaaagggcatacattacctcgccactgtctttgagaaaaaggacaagaatgaggataagaagattgatttttctgagtttctgtccttgctgggagacatagccgcagactaccacaagcagagccatggagcggcgccctgttctgggggaagccagtgatccagccccaccaaggggcctccagagaccccaggaacaataagtg

SEQ ID NO: 252322 - DNA, 306 bp, Artificial Sequence
  derived and/or modified sequence
atgtctaacacccaggcggagcggtctattattggcatgattgatatgttccacaagtataccggcagagacgggaagatcgagaaaccatccctgttgacaatgatgaaggaaaacttccccaatttcctatcagcttgtgataaaaagggcattcactatttggccaccgtcttcgagaaaaaagataagaacgaagacaaaaagattgactttagcgaatttctgtctttgttgggagatatagccgctgattatcataagcagtcgcacggggcggcaccctgctctggcggaagccaatag

SEQ ID NO: 252323 - DNA, 306 bp, Artificial Sequence
  derived and/or modified sequence
atgtcaaacacacaagcagaacgctctataattgggatgatcgatatgttccacaagtacaccggtagggatggcaaaatcgaaaagccatccttacttaccatgatgaaggagaattttcctaattttctaagtgcttgtgataagaaggggatccactatctggccactgtgtttgagaagaaagacaaaaacgaagacaaaaagatagattttagcgagttcctcagccttctcggtgacattgccgccgactatcacaagcaaagccacggcgccgccccctgctcgggtgggtcccagtag

SEQ ID NO: 252324 - DNA, 306 bp, Artificial Sequence
  derived and/or modified sequence
atgtccaacacccaggcagaaagatctatcatcggcatgatagacatgttccataaatataccggacgggacgggaagatcgaaaaaccttcacttctgaccatgatgaaagaaaacttcccaaactttctgtccgcttgtgacaagaagggaatacattatttggcaaccgtgtttgaaaaaaaggataaaaacgaagataagaagattgacttttcggaatttctctctctcctcggagatattgctgccgactatcacaaacagtcccacggcgctgcgccatgctccggcgggtctcagtag

SEQ ID NO: 252325 - DNA, 4295 bp, Artificial Sequence
  derived and/or modified sequence
gcttggggtgcagggcagcccaggctggctactggctggaagatctgctttggaaagctttttgaaagcaaagatgagcaacactcaagctgagaggtccataataggcatgatcgacatgtttcacaaatacaccggacgtgatggcaagattgagaagccaagcctgctgacgatgatgaaggagaacttccccaatttcctcagtgcctgtgacaaaaagggcatacattacctcgccactgtctttgagaaaaaggacaagaatgaggataagaagattgatttttctgagtttctgtccttgctgggagacatagccgcagactaccacaagcagagccatggagcggcgccctgttctgggggaagccagtgatccagccccaccaaggggcctccagagaccccaggaacaataagtgtctcctcccaccagacacttgccttatttcttcttctctttggtgacctacattgtcaaaactaccaattccaggttaactttgttggagaatttcccccacccccatccagtgggtcacccaggagtaatgtccctccagcaacgttccccctatggcctccagcagagctgatctgcctctcacacaggtcctggtgtctgcctctgcaccgttccctaaatgcagccaccttggcaggttccaggtggaagttggtagaaggcccctgccaggtcacagcaatgctctccttgtcaaggcatggaccagggtcattcagacacattcagatactgcactgagaaggagctggcatctctcagtgtgctcctgccctcccactcctgccccagctgttctccagggcttggggaaacagaaaccactcacatagggattcctggatggcttcaggttcagcgcccttggggctatgaatgggaggctcagcagtgccctgaggatgggcttccttgtcctgtggcctctgctccaggggcagtgtcctttccctgtgctgtgtgcttgtgtgcatgtgcctatgtgggtgaccctgtggaagtgagaaggagtcactgtgatgcttagctgtcctaaatgatggtttgctcaatgccaggactgggtttctggtgatgaatgaatattccagattttgaggagctctaagtggtccaggagtccaagtaagcagtctggctggaataaggcagcatcacggaaattctgtaaggactgacacagagagctcatgctgactgtgatgagaaattgcagcacctctatctcgcaggtaatggagtagtttgttattggtagtctactccaggccaggcagtgtgttatgggctgaggatgcagaaacaggcaggacacagtgctgtcctagcagtgcactggcgggtctctccatgcaggccacaacacagggtcagtgttcacctggtgtcacttccaggcaatgttctgtgcagccgctcttagtattcttccttgaggctcacatcatgtgtccctatcactcttactactctggtcagtctccagctaacctctcaatcaggcaaacattcttcttggaggaatcaggcaaacatctcaaaaattctctttccatcctaccagcagcagtgtgtaagatgggctatttgttctttggaatgactgctccactccacactcacacctctattcacagaccagcatctcctctccttatcaggaacattccttcctgaacatattctgcacctcgtcagccttcaggactgatctgccattttcacctctaaatccccatgtctgaccattagttttcttctctttccttctctccctttctcattctcattccacctgttcttggaactcacggagacctacagtccctgggctttcattttctcctcccagccccctgctgccttctctatgcagcctgccctccatcatccaccccagaattgctctctttcctctcttagctctgttgcccactttccttgggccataccttccctgcagatctccagcccagaaccatcttcccctgttgtcctcctctctcctccaccgggactgctggtcactgcttagaaccgtcatgccagggtcccaaaagtgtgggtgcctgacttcctctctgtgcagcactctctgaatccctcctattcaccttgctgctgttattccccgaatgcgcaacataccccccatcaatatatctcagtatttcatgtctcaataccaatcttttaaactactgcctctaccagaaatgtcttttaatacttcttctgtctcattaacattacatttcaaggctgagctttaatgtcagtgtctcttagacattcagagggtgaaccaccatcccttcaccccaaagaaatgatctctgcttcatttgtgcctccctcaccatgaccccactcttaccatagtggctacattacttcagattcccctaatgtctttccagccagacttggaatcatggagggaaaacattgttacctcggatctcctggttacccagcacatagtagtactggattccagctcataataagtactctatatcatttttcaatataaaatgtatttgtgcaaattctagtcaatactactttatgtaaacagcagtgtaaaatccaaaaacttccagtcctggaggcaggttgtgcagcttaggggaggaccccagaatctggaccccagagtctggaagcaggccagaaaggataaggcaaatgactgaacagttccctcaggactcacgtactgatctcccaaaagaagagagggtctccctggggtggggttgctggaccttcaatccatcgctacagtccagaaggcaattggccactcctaatgtgggcctgccctccctttatttttccagttcttatttcacctgataatattccgtccaattggcaatggcacataaaaattaggatggagtgtgtggacaaatacttcttcatcttcttgtctaggttttagaaatcaccttctcaagggagccttgtctaatgttcctgagactatttcacactctccatgcttatgtcaatgcaggactcatcacatctattcggatattctgtttacacacccatgtcatcccagagaggtgatcacagggcagggacacatgtgtggcatacagttcctagttaagatcccaaatcctgagatattgctgatttgctatggcaggtcgtcaagagaactgtgtcattccaaactcaccaaggtggcttatagaacagaagcagatggatatgaagaggagaggggaccagaccatctccgcaaccacagcccagagctccagtcaccagatagaaaattgatttgatttcatccaatattccttcgaaagagtgtcaaggaatagggtggggcaatgtgtcattctgcattggaaggaggacattttagagcaaggcctaagggcacaggtattagtgtcatattgatcagaattcaacctttgttctaacacatactagagcaagaatttacttgatttggaataattaatagctactggacattatattggtactaaagagaaagaatacttgacagctctatgcccacactcacattacagctgatgtgaaagagattctggaaatccaaatgttccccagaaattctgatatcaaaacattccaataacttttttttttcaggcgcagtctcactctgtcgcccgggctggagtgctgtgagctgtccgtggtgctgaattcactgtgacgtcactcctgtctctctttgctttcttctgactgacatttattcagccttctctacaggaatctcttatgttcccccacatgcaggtggtttttcagtaggctcctgaagagtgatctcaactttccaggaagaaaagagggcaaagggaacaatgtgaaaagaagcagaaaatcataaaagaccatgtgtttgataaacaaccagattgtttctggttccctgccactataaaaacaccatgagagcatactcatacatgttcccttataaatctgcgaggtagtttctttggtattcttgcccaggaaatgggttgattcatcacagattttatatatatacttttttttaactaagtgtgagataatatcttattgtttttgtaacttgcattttacaagagttctgaccagcaccagataagcttcagtgctctcctttctttggccttaatattattggattaaagaattactgcctctcactaggagcatcatttatttaccattattttcaatttcatattaaaactcaatttctagtagagtc

SEQ ID NO: 252326 - DNA, 4334 bp, Artificial Sequence
  derived and/or modified sequence
gtgggaagagccaggctgagccttataaaggactgctctttgtccaaacacacacatctcactcatccttctactcgtgacacttcccagttctggctttttgaaagcaaagatgagcaacactcaagctgagaggtccataataggcatgatcgacatgtttcacaaatacaccggacgtgatggcaagattgagaagccaagcctgctgacgatgatgaaggagaacttccccaatttcctcagtgcctgtgacaaaaagggcatacattacctcgccactgtctttgagaaaaaggacaagaatgaggataagaagattgatttttctgagtttctgtccttgctgggagacatagccgcagactaccacaagcagagccatggagcggcgccctgttctgggggaagccagtgatccagccccaccaaggggcctccagagaccccaggaacaataagtgtctcctcccaccagacacttgccttatttcttcttctctttggtgacctacattgtcaaaactaccaattccaggttaactttgttggagaatttcccccacccccatccagtgggtcacccaggagtaatgtccctccagcaacgttccccctatggcctccagcagagctgatctgcctctcacacaggtcctggtgtctgcctctgcaccgttccctaaatgcagccaccttggcaggttccaggtggaagttggtagaaggcccctgccaggtcacagcaatgctctccttgtcaaggcatggaccagggtcattcagacacattcagatactgcactgagaaggagctggcatctctcagtgtgctcctgccctcccactcctgccccagctgttctccagggcttggggaaacagaaaccactcacatagggattcctggatggcttcaggttcagcgcccttggggctatgaatgggaggctcagcagtgccctgaggatgggcttccttgtcctgtggcctctgctccaggggcagtgtcctttccctgtgctgtgtgcttgtgtgcatgtgcctatgtgggtgaccctgtggaagtgagaaggagtcactgtgatgcttagctgtcctaaatgatggtttgctcaatgccaggactgggtttctggtgatgaatgaatattccagattttgaggagctctaagtggtccaggagtccaagtaagcagtctggctggaataaggcagcatcacggaaattctgtaaggactgacacagagagctcatgctgactgtgatgagaaattgcagcacctctatctcgcaggtaatggagtagtttgttattggtagtctactccaggccaggcagtgtgttatgggctgaggatgcagaaacaggcaggacacagtgctgtcctagcagtgcactggcgggtctctccatgcaggccacaacacagggtcagtgttcacctggtgtcacttccaggcaatgttctgtgcagccgctcttagtattcttccttgaggctcacatcatgtgtccctatcactcttactactctggtcagtctccagctaacctctcaatcaggcaaacattcttcttggaggaatcaggcaaacatctcaaaaattctctttccatcctaccagcagcagtgtgtaagatgggctatttgttctttggaatgactgctccactccacactcacacctctattcacagaccagcatctcctctccttatcaggaacattccttcctgaacatattctgcacctcgtcagccttcaggactgatctgccattttcacctctaaatccccatgtctgaccattagttttcttctctttccttctctccctttctcattctcattccacctgttcttggaactcacggagacctacagtccctgggctttcattttctcctcccagccccctgctgccttctctatgcagcctgccctccatcatccaccccagaattgctctctttcctctcttagctctgttgcccactttccttgggccataccttccctgcagatctccagcccagaaccatcttcccctgttgtcctcctctctcctccaccgggactgctggtcactgcttagaaccgtcatgccagggtcccaaaagtgtgggtgcctgacttcctctctgtgcagcactctctgaatccctcctattcaccttgctgctgttattccccgaatgcgcaacataccccccatcaatatatctcagtatttcatgtctcaataccaatcttttaaactactgcctctaccagaaatgtcttttaatacttcttctgtctcattaacattacatttcaaggctgagctttaatgtcagtgtctcttagacattcagagggtgaaccaccatcccttcaccccaaagaaatgatctctgcttcatttgtgcctccctcaccatgaccccactcttaccatagtggctacattacttcagattcccctaatgtctttccagccagacttggaatcatggagggaaaacattgttacctcggatctcctggttacccagcacatagtagtactggattccagctcataataagtactctatatcatttttcaatataaaatgtatttgtgcaaattctagtcaatactactttatgtaaacagcagtgtaaaatccaaaaacttccagtcctggaggcaggttgtgcagcttaggggaggaccccagaatctggaccccagagtctggaagcaggccagaaaggataaggcaaatgactgaacagttccctcaggactcacgtactgatctcccaaaagaagagagggtctccctggggtggggttgctggaccttcaatccatcgctacagtccagaaggcaattggccactcctaatgtgggcctgccctccctttatttttccagttcttatttcacctgataatattccgtccaattggcaatggcacataaaaattaggatggagtgtgtggacaaatacttcttcatcttcttgtctaggttttagaaatcaccttctcaagggagccttgtctaatgttcctgagactatttcacactctccatgcttatgtcaatgcaggactcatcacatctattcggatattctgtttacacacccatgtcatcccagagaggtgatcacagggcagggacacatgtgtggcatacagttcctagttaagatcccaaatcctgagatattgctgatttgctatggcaggtcgtcaagagaactgtgtcattccaaactcaccaaggtggcttatagaacagaagcagatggatatgaagaggagaggggaccagaccatctccgcaaccacagcccagagctccagtcaccagatagaaaattgatttgatttcatccaatattccttcgaaagagtgtcaaggaatagggtggggcaatgtgtcattctgcattggaaggaggacattttagagcaaggcctaagggcacaggtattagtgtcatattgatcagaattcaacctttgttctaacacatactagagcaagaatttacttgatttggaataattaatagctactggacattatattggtactaaagagaaagaatacttgacagctctatgcccacactcacattacagctgatgtgaaagagattctggaaatccaaatgttccccagaaattctgatatcaaaacattccaataacttttttttttcaggcgcagtctcactctgtcgcccgggctggagtgctgtgagctgtccgtggtgctgaattcactgtgacgtcactcctgtctctctttgctttcttctgactgacatttattcagccttctctacaggaatctcttatgttcccccacatgcaggtggtttttcagtaggctcctgaagagtgatctcaactttccaggaagaaaagagggcaaagggaacaatgtgaaaagaagcagaaaatcataaaagaccatgtgtttgataaacaaccagattgtttctggttccctgccactataaaaacaccatgagagcatactcatacatgttcccttataaatctgcgaggtagtttctttggtattcttgcccaggaaatgggttgattcatcacagattttatatatatacttttttttaactaagtgtgagataatatcttattgtttttgtaacttgcattttacaagagttctgaccagcaccagataagcttcagtgctctcctttctttggccttaatattattggattaaagaattactgcctctcactaggagcatcatttatttaccattattttcaatttcatattaaaactcaatttctagtagagtc

SEQ ID NO: 252327 - DNA, 306 bp, Artificial Sequence
  derived and/or modified sequence
atgagcaacacccaggccgagaggagcatcatcggcatgattgacatgttccacaagtacacaggaagagatggcaagattgagaagcccagcctgctgaccatgatgaaggagaacttccccaacttcctgagcgcctgtgacaagaagggcatccactacctggccaccgtgtttgagaagaaggacaagaatgaagacaagaagattgacttcagcgagttcctgagcctgctgggggacattgctgctgactaccacaagcagagccatggagctgccccctgcagcggcggcagccagtag

SEQ ID NO: 252328 - DNA, 306 bp, Artificial Sequence
  derived and/or modified sequence
atgagcaacacccaggccgagcggagcatcatcggcatgatcgacatgtttcataaatatacgggccgcgacggtaagattgagaaaccgtcattgctgactatgatgaaggagaactttcccaactttctgagcgcctgcgacaaaaaagggatccattatctagcaaccgtatttgagaagaaggataaaaacgaagacaaaaagatcgacttcagcgaatttttgtccctgctgggggacatcgccgccgattaccacaaacagagccacggtgctgccccatgtagcggtggcagtcagtag

SEQ ID NO: 252329 - DNA, 306 bp, Artificial Sequence
  derived and/or modified sequence
atgagcaacacccaggccgagcggagcatcatcggcatgatcgacatgttccacaagtacacaggacgtgatggcaaaatcgagaagccaagtctgttgaccatgatgaaggagaattttcctaacttcctcagcgcctgtgataagaaggggattcactacctagccacggtgtttgagaagaaagataaaaacgaagacaagaagatcgacttctccgaatttttgagccttctgggcgatatcgccgccgactaccataaacagtctcatggtgccgctccttgctccggtggttctcagtag

SEQ ID NO: 252330 - DNA, 306 bp, Artificial Sequence
  derived and/or modified sequence
atgagcaacacccaggccgagcggagcatcatcggcatgatcgacatgttccacaaatacacaggccgggatggaaaaattgaaaagccttcgcttttgacaatgatgaaagagaattttccaaatttcctgagcgcctgtgacaaaaaggggatccactaccttgccacggtcttcgagaagaaggacaaaaatgaggataagaagatcgatttctcagaattcctgtctctgcttggcgacatcgccgccgattatcataaacagagccacggtgccgcaccttgttcaggcggcagtcaatag

SEQ ID NO: 252331 - DNA, 306 bp, Artificial Sequence
  derived and/or modified sequence
atgtccaacacacaggctgaacgctctataatcggaatgattgacatgttccataagtacactggtagagatggcaagatcgagaagccatctctgctgactatgatgaaagagaattttccaaactttctgtccgcctgcgacaaaaaagggatccactatctcgctaccgttttcgagaaaaaggacaagaatgaggacaaaaagatcgatttcagcgagtttctgtcccttcttggcgacattgccgcagactaccacaagcagtctcacggggcagccccatgctcagggggatcccaatag

SEQ ID NO: 252332 - DNA, 306 bp, Artificial Sequence
  derived and/or modified sequence
atgagcaatacacaggctgagcgcagcatcatcggaatgatcgatatgttccataaatatacaggcagggacggaaaaatagagaaaccttcactgttaactatgatgaaagagaacttccccaatttcctttccgcatgtgacaagaaggggatccattacttagcaaccgttttcgagaagaaggacaagaacgaggacaagaagatagacttttctgagtttcttagcctcctgggggacatagctgctgactatcacaagcagtcacacggggcagctccttgttcaggcggatcacagtag

SEQ ID NO: 252333 - DNA, 306 bp, Artificial Sequence
  derived and/or modified sequence
atgagcaatacacaggctgagagatccatcattggaatgattgacatgttccacaaatacactgggcgagacgggaaaattgagaaaccctctttgcttacaatgatgaaggaaaacttcccaaactttttgtctgcctgcgataagaaaggcatacattatctagccaccgtgtttgaaaagaaagataaaaatgaggacaagaaaattgatttttccgaatttctgtcattactgggcgatatagcggctgactatcataaacaatcgcacggcgcagctccatgctcaggaggatcacaatag

SEQ ID NO: 252334 - protein, 715 aa, Artificial Sequence
  derived and/or modified sequence
MDLILNRMDYLQVGVTSQKTMKLIPASRHRATQKVVIGDHDGVVMCFGMKKGEAAAVFKTLPGPKIARLELGGVINTPQEKIFIAAASEIRGFTKRGKQFLSFETNLTESIKAMHISGSDLFLSASYIYNHYCDCKDQHYYLSGDKINDVICLPVERLSRITPVLACQDRVLRVLQGSDVMYAVEVPGPPTVLALHNGNGGDSGEDLLFGTSDGKLALIQITTSKPVRKWEIQNEKKRGGILCIDSFDIVGDGVKDLLVGRDDGMVEVYSFDNANEPVLRFDQMLSESVTSIQGGCVGKDSYDEIVVSTYSGWVTGLTTEPIHKESGPGEELKINQEMQNKISSLRNELEHLQYKVLQERENYQQSSQSSKAKSAVPSFGINDKFTLNKDDASYSLILEVQTAIDNVLIQSDVPIDLLDVDKNSAVVSFSSCDSESNDNFLLATYRCQADTTRLELKIRSIEGQYGTLQAYVTPRIQPKTCQVRQYHIKPLSLHQRTHFIDHDRPMNTLTLTGQFSFAEVHSWVVFCLPEVPEKPPAGECVTFYFQNTFLDTQLESTYRKGEGVFKSDNISTISILKDVLSKEATKRKINLNISYEINEVSVKHTLKLIHPKLEYQLLLAKKVQLIDALKELQIHEGNTNFLIPEYHCILEEADHLQEEYKKQPAHLERLYGMITDLFIDKFKFKGTNVKTKVPLLLEILDSYDQNALISFFDAA

SEQ ID NO: 252335 - protein, 672 aa, Artificial Sequence
  derived and/or modified sequence
MDLILNRMDYLQVGVTSQKTMKLIPASRHRATQKVVIGDHDGVVMCFGMKKGEAAAVFKTLPGPKIARLELGGVINTPQEKIFIAAASEIRGFTKRGKQFLSFETNLTESIKAMHISGSDLFLSASYIYNHYCDCKDQHYYLSGDKINDVICLPVERLSRITPVLACQDRVLRVLQGSDVMYAVEVPGPPTVLALHNGNGGDSGEDLLFGTSDGKLALIQITTSKPVRKWEIQNEKKRGGILCIDSFDIVGDGVKDLLVGRDDGMVEVYSFDNANEPVLRFDQMLSESVTSIQGGCVGKDSYDEIVVSTYSGWVTGLTTEPIHKESGPGEELKINQEMQNKISSLRNELEHLQYKVLQERENYQQSSQSSKAKSAVPSFGINDKFTLNKDDASYSLILEVQTAIDNVLIQSDVPIDLLDVDKNSAVVSFSSCDSESNDNFLLATYRCQADTTRLELKIRSIEGQYGTLQAYVTPRIQPKTCQVRQYHIKPLSLHQRTHFIDHDRPMNTLTLTGQFSFAEVHSWVVFCLPEVPEKPPAGECVTFYFQNTFLDTQLESTYRKGEGVFKSDNISTISILKDVLSKEATKRKINLNISYEINEVSVKHTLKLIHPKLEYQLLLAKKVQLIDALKELQIHEGNTNFLIPEYHCILEEADHLQEEYKKQPAHLERLYG

SEQ ID NO: 252336 - DNA, 2148 bp, Artificial Sequence
  derived and/or modified sequence
atggatttgattctcaataggatggattatcttcaggtgggagtgaccagtcagaagacgatgaagctcattcccgctagccggcatcgagcgacccagaaagttgtgatcggtgaccacgacggcgtcgtaatgtgcttcggcatgaaaaagggcgaggctgcggccgtgttcaaaacacttcctggaccaaagatcgcccggctagaactgggtggggttattaacacaccccaagagaaaattttcattgccgctgccagcgagatacggggtttcaccaaaagaggtaaacagtttctgtcattcgaaacaaacctgactgagagcattaaagctatgcacatttctggaagtgacctgtttctgagtgcctcctacatatacaatcactattgtgactgtaaagatcaacattattatctgtctggggacaaaatcaacgacgtgatatgcttgccagtcgaacgactctccaggatcacccccgtactagcctgccaggacagggtattgcgtgtccttcagggcagcgacgtcatgtacgccgtagaggttcctggccctccgaccgtgctggcactgcacaacgggaacggtggagatagtggcgaggacctgctgttcggaaccagtgacgggaagttagccctgatccaaataactacaagcaagcctgttagaaaatgggaaatacaaaacgagaagaagcggggcgggatcctgtgcattgatagtttcgatatcgtgggtgatggagtcaaagacctcctggtaggacgggacgacggcatggttgaggtttactccttcgacaacgctaatgagccagtgctgaggtttgaccagatgttaagcgagtcagttacaagcattcagggcggttgcgtaggaaaggatagctacgatgagatcgtggtgtccacgtattctggttgggttacgggcctcaccaccgaacctattcataaggaaagcggcccaggcgaggagttaaagatcaaccaggaaatgcagaacaaaattagtagtctccggaacgagctggagcacctccaatataaggttctccaggagagggaaaactaccaacagagcagtcagagctcgaaggccaaaagtgccgtaccctcctttggcatcaatgacaagtttacccttaacaaggacgatgcttcttatagtctcattctggaggttcagaccgccatcgacaacgtgctaatccaatctgatgtccccattgatctgctcgacgttgacaagaattccgcggtggtctcattcagcagctgtgactccgagagcaatgacaatttccttttagcgacctaccggtgtcaagctgacactacaagactggaactcaagatcagatctattgaaggccagtacggaaccctgcaggcttacgtgacccccagaatacagccaaaaacctgtcaggtgcggcaatatcacattaaaccccttagcctgcaccagcgcacccattttatcgatcatgaccgcccaatgaatacactgacccttaccggacagttctcctttgccgaagttcactcgtgggtggtcttttgccttcctgaggtgccagagaagcccccggccggcgagtgcgtcaccttttacttccagaacacctttctcgatacacaactcgagagcacttatcgaaaaggtgaaggcgtgttcaagtcagacaacatcagcactatcagtatacttaaggatgtacttagtaaagaagcaaccaagaggaaaatcaacctgaatatctcctacgagatcaatgaggtaagcgtaaagcataccctcaaactgatccaccccaaactggagtaccaactgttgctggccaaaaaagtccaacttatcgatgccctcaaggagctccaaatccacgagggcaatactaacttcctgattcccgagtaccattgtatcctggaggaagcagaccatttgcaagaggaatataaaaaacagccagcgcatctcgagcgcctgtatggcatgatcacggacctgttcatcgataagttcaaatttaagggcaccaacgttaagactaaggtgcctttgctgctagaaattttggatagttacgatcagaacgctttgatcagctttttcgacgctgcctag

SEQ ID NO: 252337 - DNA, 2148 bp, Artificial Sequence
  derived and/or modified sequence
atggacctgatcctgaacaggatggactacctgcaggtgggcgtgaccagccagaagaccatgaagctgatcccagccagccgccaccgggccacccagaaggtggtgattggagaccatgatggagtggtgatgtgcttcggcatgaagaagggggaggccgctgctgtgttcaagaccctgcccggccccaagatcgcccggctggagctgggcggcgtcatcaacaccccccaggagaagatcttcatcgccgccgccagcgagatccggggcttcaccaagaggggcaagcagttcctgagctttgagaccaacctgacagagagcatcaaggccatgcacatcagcggcagtgacctcttcctgagcgccagctacatctacaaccactactgtgactgcaaggaccagcactactacctgagcggggacaagatcaatgatgtgatctgcctgcctgtggagcggctgagccgcatcacccctgtgctggcctgccaggacagagtgctgcgggtgctgcagggcagtgatgtgatgtatgctgtggaggtgcccggccccccaacagtgctggccctgcacaatggaaatggaggagacagcggggaggacctgctgtttggcaccagtgatggcaagctggccctgatccagatcaccaccagcaagcctgtgaggaagtgggagatccagaatgagaagaagagaggaggcatcctgtgcatcgacagctttgatattgtgggagatggagtgaaggacctgctggtgggcagagatgatggcatggtggaggtgtacagctttgacaatgccaatgaacctgtgctgcgctttgaccagatgctgtctgagagcgtgaccagcatccagggcggctgtgtgggcaaggacagctatgatgaaattgtggtgtccacctacagcggctgggtgacaggcctgaccacagagcccatccacaaggagagcggccctggagaggagctgaagatcaaccaggagatgcagaacaagatcagcagcctgagaaatgagctggagcacctgcagtacaaggtgctgcaggagcgggagaactaccagcagagcagccagagcagcaaggccaagtctgctgtgcccagctttggcatcaatgacaagttcaccctgaacaaggatgatgccagctacagcctcatcctggaggtgcagacagccatcgacaacgtgctgatccagagtgatgtgcccatcgacctgctggatgtggacaagaacagcgctgtggtgtccttcagcagctgtgacagcgagagcaatgacaacttcctgctggccacctaccgctgccaggccgacaccacccggctggagctgaagatccgcagcattgagggccagtatggcaccctgcaggcctacgtgaccccccgcatccagcccaagacctgccaggtgcggcagtaccacatcaagcccctgagcctgcaccagaggacccacttcatcgaccatgaccggcccatgaacaccctgaccctgaccggccagttctcctttgctgaggtgcacagctgggtggtgttctgcctgcctgaggtgcctgagaagcccccagctggagaatgtgtgaccttctacttccagaacaccttcctggacacccagctggagagcacctacaggaagggggagggcgtcttcaagagtgacaacatcagcaccatcagcatcctgaaggatgtgctgagcaaggaggccaccaagaggaagatcaacctgaacatctcctatgagatcaatgaggtgtctgtgaagcacaccctgaagctgatccaccccaagctggagtaccagctgctgctggccaagaaggtgcagctgattgatgccctgaaggagctgcagatccacgagggcaacaccaacttcctgatccctgagtaccactgcatcctggaggaggccgaccacctgcaggaggagtacaagaagcagcctgcccacctggagcggctgtatggcatgatcacagacctcttcatcgacaagttcaagttcaagggcaccaacgtgaagaccaaggtgcccctgctgctggagatcctggacagctatgaccagaatgccctgatctccttctttgatgctgcctag

SEQ ID NO: 252338 - DNA, 2148 bp, Artificial Sequence
  derived and/or modified sequence
atggacctgatcctgaaccggatggactacctgcaggtgggcgtgacttctcagaaaactatgaagcttatccctgcatcaagacaccgcgctacccaaaaggttgtaatcggggatcacgacggtgtcgtcatgtgcttcggaatgaaaaaaggtgaggccgccgccgtgtttaaaaccctccctggacccaagatcgcccgactggagctgggcggagtgattaacactcctcaggagaaaatctttatcgcagccgcttctgaaatccgaggcttcaccaaacgcggcaaacagtttctgagcttcgagaccaatctcactgagtcaattaaagcaatgcacatatctgggtctgacctctttctgagcgcctcgtatatttataatcactactgcgactgcaaggatcaacactattatttgtcaggagacaagatcaacgacgttatttgcctgcctgtggaacggctcagcaggatcactccagtgctggcttgtcaggatcgcgtgctccgtgtcctgcagggaagtgacgtgatgtatgctgttgaggtccccggaccaccaactgtgctggcactgcataatggcaacggcggagactccggcgaagatctgttgtttggcacatctgatgggaaactggccctgatacagatcaccacttctaaaccggtccggaagtgggagatccagaacgagaaaaaacgaggtggtattctgtgcatcgacagcttcgacatcgtgggggacggcgtaaaggaccttctggtggggcgcgacgatggtatggttgaagtgtattccttcgataacgccaacgagcctgtcctccggttcgaccagatgctcagcgagtcagtcacctcaatacaaggcggttgcgtgggcaaggactcatatgacgagatcgttgtatctacatacagcgggtgggtgaccgggctgactacggagccgatacataaagagtcagggcccggagaagaactgaagataaatcaggaaatgcagaacaagatttcctcactgagaaatgaactcgaacatcttcagtacaaggtgctgcaggaacgagagaattatcaacagtccagccagtccagtaaggcaaagagcgcggtccctagcttcggtatcaatgataagtttaccctcaacaaagacgatgcctcatactcgctgatccttgaggttcaaacggctattgacaacgtgctgattcaatctgacgtgccaatcgacctgctagacgtcgacaaaaacagcgcagtggtctcctttagcagttgcgattccgagagtaacgacaacttcctactggctacttatcggtgccaagccgacactacaaggctggagctgaagattaggagtatcgaagggcagtacggtactctccaggcgtatgttacgcctagaatacagccgaaaacttgtcaggtgcgacaataccatatcaagccactctccctccaccaacggacacatttcatagatcatgatcgtccaatgaacactctcaccctgactgggcagttctcctttgcagaggtccattcctgggtggtcttttgcctccctgaagttcctgagaaacctcctgcaggcgaatgtgtgactttctacttccagaacacttttctggacacccagcttgaaagcacttaccggaagggtgaaggcgttttcaagtctgataatatcagtacaattagtattttgaaggatgtgttatctaaggaagctaccaagcgcaagataaaccttaatatctcatacgaaattaacgaggtctccgtcaaacacacgcttaagctgatacatccaaaactggagtaccagctccttcttgcaaaaaaagtgcagttgatagatgctctgaaggagctgcagattcacgaaggcaacactaatttcctcatcccagaatatcactgcatactggaagaggctgatcacctacaggaagagtacaaaaagcaaccggctcatctggagcgcttatatgggatgattactgacctgtttatagataagtttaaatttaaagggacgaacgtaaagactaaagttccactgctgctggagatcctggacagctacgatcagaatgctctgatctctttttttgatgcagcttag

SEQ ID NO: 252339 - DNA, 2148 bp, Artificial Sequence
  derived and/or modified sequence
atggatttgattctgaaccgcatggactatctacaggttggcgtgacatcccagaaaaccatgaagctcatccctgcctcgcgacaccgcgcaactcagaaagtggtcataggggaccacgatggggtagtgatgtgtttcggcatgaaaaagggtgaagccgctgctgtgtttaagactctgcctggacccaaaatagcacggcttgagctgggaggcgtgatcaacaccccgcaagagaagattttcattgcagcagctagtgaaatccgagggttcactaaaagaggtaaacaattcctcagctttgagaccaacctgacagaatccattaaagctatgcatatttccggaagtgacctcttcctttccgccagctacatctacaatcactattgtgactgtaaggatcaacactactacctcagcggtgataaaattaatgacgtgatttgtctgcctgtagagaggttgtctcggattacacctgtcctcgcctgtcaggacagagtcctaagagtcctgcaggggagcgacgtcatgtacgccgttgaagttcctggcccacctacggttctggctctccacaatgggaatggcggagatagtggtgaagatctcttgtttgggacaagtgacgggaagttagcgctgatacagatcaccactagcaagccggtgcgtaagtgggaaatacagaatgagaagaagcgcggtggcatactgtgtatcgattcctttgacatcgtgggcgatggagtaaaagatctgctggtgggtcgagacgacggcatggtggaagtgtattcctttgacaacgctaacgagcccgtgctaagatttgatcagatgctgtctgaatcagtgactagtattcagggaggctgcgtggggaaggattcctacgacgaaatcgtggtctccacctacagcggctgggtgaccggcctcactacagagcctatccacaaggagagtggcccaggtgaagagttaaagattaatcaggagatgcagaacaagatttcaagtctcaggaatgagctggagcatctccagtataaggtcctgcaggagcgcgagaattaccagcagtcttcacagtcaagcaaagctaagtccgccgttcccagtttcggcattaatgataagtttacactgaataaagatgatgcctcttattccctgatcctggaagtccagacggctatcgacaacgttcttatccaatctgacgtgcccatagatctcttggacgtggacaaaaactcagcagtcgtgagtttttcctcctgtgacagtgaaagcaacgacaactttctgctcgccacatataggtgccaagctgataccacccggctcgagctgaaaatacggagtatagaggggcagtacggcactctccaggcctatgttactcctcggatacaaccaaaaacatgtcaagtaaggcagtatcatattaagcccctgtccctccaccagcgcacccacttcattgaccacgatcgccctatgaacaccctgaccctgaccggccagttttcttttgctgaagtgcatagctgggtggtattctgccttcctgaggtgcctgaaaaaccgcctgctggcgaatgtgtgactttttacttccaaaacaccttcttagacactcagctagagtccacctaccggaaaggcgagggcgtgttcaaatctgataatatctctactatatccatccttaaggacgtgctctctaaggaagcaacaaaacggaagatcaacctgaacatatcctatgagatcaacgaggtcagcgtgaaacacaccttgaagctcatccatcccaagttggagtatcagctcttgctggctaagaaagttcagctgatcgacgcactgaaagaactgcagattcatgagggcaacaccaattttcttatccccgagtaccactgtatcctcgaggaggccgaccatctccaggaagagtataaaaaacagccagctcacctggaaaggttgtacgggatgattacagatctcttcatcgacaaatttaagttcaaagggacaaatgtgaaaactaaggttccactcctgttggagatcctcgactcctacgaccaaaacgccctgatctcctttttcgacgccgcatag

SEQ ID NO: 252340 - DNA, 3752 bp, Artificial Sequence
  derived and/or modified sequence
gacgtcacgcaggacgccactgccctgtcgccccgcctgtgcagcccaggacctaggcgcggtagctggggctggcttttgaggggcgcgggcagccttctgactgggtcggaggcctgcgggcccgaagcctctgtccctcctgttcttgtccggcgctgcttagcccctccgcgtagtcatcatggatctgattttaaaccgaatggattatctgcaggtgggagtaacatctcagaagactatgaagctaattcctgcctcaagacacagagctacacaaaaggtggttattggagatcatgatggggtagttatgtgctttggcatgaagaaaggagaagcagcagcagtgttcaagactttacccgggccgaagattgcaaggctggaactgggaggggttatcaacacacctcaggagaaaatttttattgctgcagcatctgagattagaggcttcacaaaaagaggaaaacagttcctctcctttgaaacaaacctcactgaaagcattaaagctatgcacatatctggctcagacctctttctcagtgcaagttacatctataaccattattgtgactgcaaagaccaacattattacctttctggggataaaatcaatgatgtgatctgccttccagtggaaagattatctcgtatcacacctgtattggcctgccaggacagagtgctcagagttttacagggatctgatgtgatgtatgcagttgaagttcctggaccccctactgtcttagcactacacaatggaaatggcggtgactctggagaagaccttttgtttgggacatcagacggaaaacttgcgcttatacagattactacatccaaaccagtacgcaagtgggaaattcaaaatgagaaaaagagaggaggtattttgtgtattgacagctttgacattgtgggtgatggggttaaagatttacttgttgggagagatgacggaatggtggaagtgtatagttttgataatgcaaatgaacctgttctacgatttgatcagatgttgtctgaaagcgtcacatctatccagggtggttgtgtaggaaaagacagctatgatgaaatcgtggtgtccacatattcaggctgggttacaggtctgacaacagagcccattcataaggaaagtggaccaggagaagaactaaaaattaatcaggagatgcagaataaaatttcttccttacggaatgagttggaacatttgcagtataaggtattgcaggaaagagagaattatcaacagtcttctcaatcaagcaaagcaaaatcagcagtaccttcctttggtataaatgataaatttacactaaataaagatgatgccagttacagccttatcttagaggtacagactgcaatagataatgtcttaatacagagtgatgttccaatagatttacttgatgtggataaaaattctgctgttgttagctttagcagctgtgattctgagtcaaacgacaacttccttcttgccacttatcggtgccaggcagatactacaaggctggaactcaagattcgctcaattgaaggccagtatggcacactacaagcatatgtgactccaagaattcaacccaaaacctgtcaggtccgccagtaccacatcaaacctctttcactccatcaaagaactcactttattgatcatgacagacccatgaatacactgaccctaacaggccagttcagttttgctgaagttcactcctgggtggttttttgtctgcctgaagttccagaaaaacctccagcaggagaatgtgtgacattttactttcagaacacctttctagatacacaacttgaaagtacctacagaaaaggagagggagtttttaaatctgacaacatttctactatctccatcctaaaagatgtgctttctaaagaagctacaaaaaggaaaattaacctcaacatatcatacgagataaatgaagtatcagtcaaacacactttaaagctaatccacccaaagctggagtaccagttgcttttggctaagaaagtgcagttaattgatgctttaaaagaattacagattcatgagggaaatacgaactttctgataccagaatatcactgtattctagaagaggcagatcacctacaggaagaatacaaaaagcaacctgcacatcttgaaagactctatggcatgatcactgatcttttcatagataaatttaagtttaaaggcaccaatgtaaaaactaaagtaccccttctattggaaattctggacagttatgaccaaaatgcattgatttcattcttcgatgcagcatgacatacaaataaggtaaagtcccaaagaagtggtctgtttaaatgaaaaatgttaaaagagaattagaagttaactgtgtatgtactttaatttcaaatgcttttttatatctaaaaatatttgagatataatggctttttaaagtaatgcttctatttcttttgacaaattgaactttctaaaactaaaagagtctttttatttttaaaacacaagtagaatgatttaaataggattttaatgaatttttggcaagtggctgttttaatttttaaattgagaagtaatatgtggaaaattaaaatatattcaaatgtattacaaggtacataaacacataaacatgtagaccgctttataggcttcaaaatgtatttttatatattaccttatttgatcttcacaactgttgtaaaatttgtcaaatcatataagaaaactgattctcagtgaaattttgtgattaagaggacatgctaatattttgtaaagctgggaccagaacccaagtactggtacttgctttgtgtcctggttactatgtatgttgccagctagtggaaataacctaccaattgttttttctaggagataggattgatttgcaactgatattccttttgcttggtagtgttttatgactctgctgcagtttgtggaaatgctggacttggctcagtgctataaattgtagccaggaaataagaagagcttacacagagtcgggggatcttaattagacatgctgtaaccagtggagctattcagcgtgcttcaagtgaagagtgcagaaatagtgatgccatcttagattttcctacactagtatcttctagatctctttttatcatatatgacattaaggctacagaagttttgtgcattaatcttaattcatatttattaatttcaagggaatattgaaaggttttaaaatggcatacagataatggaaaataagctttatgtttcaagaagggcagactcacgaattttttagaaaacagtgcttcttaatgatatgctattatacttattagttatgtgcaagctttgtatattcttatatttatatataaatataaaaatttgttaaaggcacgtatagttaagagagttttattttaataaggtcatattgtttttactatgtttaaaaaactttacttctgaaaggaacataattatatctaggtcactagaacgtcattgtgttttttgttggttgccacagcttggggaaaaatagaaaaaaattaatgactgtatttgaatattttgtaatgcactgctatttattatatatatcaacagtagttcaaggtgccatcttaaattaattgcatcttcattaggaaaaataaaaagcataaaacacaatttctggttactatgaataaacgcctaaatgttaagatga

SEQ ID NO: 252341 - DNA, 2148 bp, Artificial Sequence
  derived and/or modified sequence
atggacctgatcctgaacagaatggactacctgcaggtgggcgtgaccagccagaagaccatgaagctgatccccgccagcagacacagagccacccagaaggtggtgatcggcgaccacgacggcgtggtgatgtgcttcggcatgaagaagggcgaggccgccgccgtgttcaagaccctgcccggccccaagatcgccagactggagctgggcggcgtgatcaacaccccccaggagaagatcttcatcgccgccgccagcgagatcagaggcttcaccaagagaggcaagcagttcctgagcttcgagaccaacctgaccgagagcatcaaggccatgcacatcagcggcagcgacctgttcctgagcgccagctacatctacaaccactactgcgactgcaaggaccagcactactacctgagcggcgacaagatcaacgacgtgatctgcctgcccgtggagagactgagcagaatcacccccgtgctggcctgccaggacagagtgctgagagtgctgcagggcagcgacgtgatgtacgccgtggaggtgcccggcccccccaccgtgctggccctgcacaacggcaacggcggcgacagcggcgaggacctgctgttcggcaccagcgacggcaagctggccctgatccagatcaccaccagcaagcccgtgagaaagtgggagatccagaacgagaagaagagaggcggcatcctgtgcatcgacagcttcgacatcgtgggcgacggcgtgaaggacctgctggtgggcagagacgacggcatggtggaggtgtacagcttcgacaacgccaacgagcccgtgctgagattcgaccagatgctgagcgagagcgtgaccagcatccagggcggctgcgtgggcaaggacagctacgacgagatcgtggtgagcacctacagcggctgggtgaccggcctgaccaccgagcccatccacaaggagagcggccccggcgaggagctgaagatcaaccaggagatgcagaacaagatcagcagcctgagaaacgagctggagcacctgcagtacaaggtgctgcaggagagagagaactaccagcagagcagccagagcagcaaggccaagagcgccgtgcccagcttcggcatcaacgacaagttcaccctgaacaaggacgacgccagctacagcctgatcctggaggtgcagaccgccatcgacaacgtgctgatccagagcgacgtgcccatcgacctgctggacgtggacaagaacagcgccgtggtgagcttcagcagctgcgacagcgagagcaacgacaacttcctgctggccacctacagatgccaggccgacaccaccagactggagctgaagatcagaagcatcgagggccagtacggcaccctgcaggcctacgtgacccccagaatccagcccaagacctgccaggtgagacagtaccacatcaagcccctgagcctgcaccagagaacccacttcatcgaccacgacagacccatgaacaccctgaccctgaccggccagttcagcttcgccgaggtgcacagctgggtggtgttctgcctgcccgaggtgcccgagaagccccccgccggcgagtgcgtgaccttctacttccagaacaccttcctggacacccagctggagagcacctacagaaagggcgagggcgtgttcaagagcgacaacatcagcaccatcagcatcctgaaggacgtgctgagcaaggaggccaccaagagaaagatcaacctgaacatcagctacgagatcaacgaggtgagcgtgaagcacaccctgaagctgatccaccccaagctggagtaccagctgctgctggccaagaaggtgcagctgatcgacgccctgaaggagctgcagatccacgagggcaacaccaacttcctgatccccgagtaccactgcatcctggaggaggccgaccacctgcaggaggagtacaagaagcagcccgcccacctggagagactgtacggcatgatcaccgacctgttcatcgacaagttcaagttcaagggcaccaacgtgaagaccaaggtgcccctgctgctggagatcctggacagctacgaccagaacgccctgatcagcttcttcgacgccgcctag

SEQ ID NO: 252342 - protein, 307 aa, Artificial Sequence
  derived and/or modified sequence
MALTSDLGKQIKLKEVEGTLLQPATVDNWSQIQSFEAKPDDLLICTYPKAGTTWIQEIVDMIEQNGDVEKCQRAIIQHRHPFIEWARPPQPSETGFHHVAQAGLKLLSSSNPPASTSQSAKITDLLPPSFWENNCKFLYVARNAKDCMVSYYHFQRMNHMLPDPGTWEEYFETFINGKVVWGSWFDHVKGWWEMKDRHQILFLFYEDIKRDPKHEIRKVMQFMGKKVDETVLDKIVQETSFEKMKENPMTNRSTVSKSILDQSISSFMRKGTVGDWKNHFTVAQNERFDEIYRRKMEGTSINFCMEL

SEQ ID NO: 252343 - DNA, 924 bp, Artificial Sequence
  derived and/or modified sequence
atggccctgaccagcgacctgggcaagcagatcaagctgaaggaggtggagggcaccctgctgcagcccgccaccgtggacaactggagccagatccagagcttcgaggccaagcccgacgacctgctgatctgcacctaccccaaggccggcaccacctggatccaggagatcgtggacatgatcgagcagaacggcgacgtggagaagtgccagagagccatcatccagcacagacaccccttcatcgagtgggccagacccccccagcccagcgagaccggcttccaccacgtggcccaggccggcctgaagctgctgagcagcagcaacccccccgccagcaccagccagagcgccaagatcaccgacctgctgccccccagcttctgggagaacaactgcaagttcctgtacgtggccagaaacgccaaggactgcatggtgagctactaccacttccagagaatgaaccacatgctgcccgaccccggcacctgggaggagtacttcgagaccttcatcaacggcaaggtggtgtggggcagctggttcgaccacgtgaagggctggtgggagatgaaggacagacaccagatcctgttcctgttctacgaggacatcaagagagaccccaagcacgagatcagaaaggtgatgcagttcatgggcaagaaggtggacgagaccgtgctggacaagatcgtgcaggagaccagcttcgagaagatgaaggagaaccccatgaccaacagaagcaccgtgagcaagagcatcctggaccagagcatcagcagcttcatgagaaagggcaccgtgggcgactggaagaaccacttcaccgtggcccagaacgagagattcgacgagatctacagaagaaagatggagggcaccagcatcaacttctgcatggagctgtag

SEQ ID NO: 252344 - DNA, 924 bp, Artificial Sequence
  derived and/or modified sequence
atggcactgacctcagatctgggcaagcagattaaattgaaagaggtggaaggcactttgcttcagccggctaccgtcgataattggagtcagattcaaagttttgaggccaagcccgacgatctgctgatttgcacctacccaaaggctggcacgacctggatccaggaaatcgtggacatgattgaacaaaacggcgacgtggagaagtgccagcgtgctatcatacagcaccgtcacccgttcatcgagtgggctcgcccgcctcaaccaagtgagaccggatttcatcatgttgcgcaggcgggcctgaaactgctctcttccagtaacccacccgcaagtacaagccagtccgctaagattactgatctgctccctccctccttctgggagaacaactgcaagtttctctatgtagccaggaacgcaaaagactgtatggtatcctactaccattttcagcgaatgaaccacatgctgccagaccccggaacatgggaagaatacttcgaaacttttatcaatgggaaggtcgtctggggctcatggttcgaccatgtcaaagggtggtgggaaatgaaagatcgccatcagatcctgttcctcttctacgaggatataaagcgcgatcctaagcatgagatcagaaaggttatgcagtttatgggaaaaaaagtggacgagactgtgctagacaaaattgtgcaagagaccagcttcgagaaaatgaaggagaatccaatgacgaacaggagtaccgtcagtaaatctatcctggaccagagcatctccagctttatgcgtaaaggcaccgttggagactggaagaatcatttcactgtggcgcagaatgagcgctttgacgaaatttaccgccgcaaaatggaagggactagcataaacttttgtatggagctgtag

SEQ ID NO: 252345 - DNA, 924 bp, Artificial Sequence
  derived and/or modified sequence
atggccctgaccagtgacctgggcaagcagatcaagctgaaggaggtggagggcaccctgctgcagcctgccaccgtggacaactggagccagatccagagctttgaggccaagccagatgacctgctgatctgcacctaccccaaggccggcaccacctggatccaggagatcgtggacatgattgagcagaatggagatgtggagaagtgccagagggccatcatccagcaccgccaccccttcatcgagtgggcccggcccccccagcccagcgagaccggcttccaccacgtggcccaggccggcctgaagctgctgagcagcagcaaccccccagccagcaccagccagagcgccaagatcacagacctgctgcccccatccttctgggagaacaactgcaagttcctgtatgtggccagaaatgccaaggactgcatggtgtcctactaccacttccagaggatgaaccacatgctgcctgaccccggcacctgggaggagtactttgagaccttcatcaacgggaaggtggtgtggggctcctggtttgaccacgtgaagggctggtgggagatgaaggacagacaccagatcctcttcctgttctatgaggacatcaagagggaccccaagcatgagatcaggaaggtgatgcagttcatgggcaagaaggtggatgagaccgtgctggacaagatcgtgcaggagaccagctttgagaagatgaaggagaaccccatgaccaacagaagcacagtgtccaagagcatcctggaccagagcatcagcagcttcatgaggaagggcaccgtgggggactggaagaaccacttcaccgtggcccagaatgaaagatttgatgagatctacagaaggaagatggagggcaccagcatcaacttctgcatggagctgtag

SEQ ID NO: 252346 - DNA, 924 bp, Artificial Sequence
  derived and/or modified sequence
atggccctgaccagcgacctgggcaagcagatcaagctgaaggaggttgaaggcacgctgctgcagcccgcaaccgttgacaattggtcccaaatccagagttttgaagccaagccagacgatcttctaatctgcacttaccccaaggcaggtaccacctggattcaggagattgttgatatgatagaacagaatggcgatgtggagaagtgccagcgcgccatcatacagcatcgccaccccttcatcgagtgggcgaggccaccacagcctagcgaaacaggctttcaccatgtggctcaagccgggctcaagttgctgtcatccagtaacccccctgcttctacctcccaatccgccaaaattacagacttgctgcccccttctttctgggaaaacaactgtaaatttttgtacgtcgctcgaaacgcgaaagattgcatggtctcttactaccacttccaacggatgaatcatatgctgcctgatccaggtacctgggaagagtatttcgagacgttcatcaacggcaaagtcgtgtggggatcttggttcgatcatgtaaagggctggtgggaaatgaaggatcgccatcagatactattcctattctacgaggatataaaacgggatccaaagcacgagatcaggaaggttatgcagttcatgggcaagaaagtcgacgagaccgtactggacaagatcgtgcaggaaacaagtttcgagaaaatgaaagaaaatcctatgaccaaccgaagcactgtcagcaagtctatcttggatcaatcgataagtagtttcatgagaaaggggacagttggggactggaagaatcattttacagtggcacagaatgagcggtttgatgaaatctacaggcgaaagatggaaggcactagcatcaatttctgtatggaactgtag

SEQ ID NO: 252347 - DNA, 924 bp, Artificial Sequence
  derived and/or modified sequence
atggccctcacatccgacctaggcaaacagattaaattgaaagaagtagagggcactctcttgcaacccgctaccgtggacaactggtctcaaattcagagcttcgaagctaaaccagacgatttgttaatctgtacttatccaaaggcgggtactacctggattcaggagatcgttgatatgatagaacagaatggtgacgtggagaaatgccagcgggcaatcatccaacatcgccaccccttcatagagtgggccagacccccacagccaagtgaaaccgggttccatcatgtggcacaggccggactcaagttactttcatcctcaaacccccctgcctccacatcacaaagtgccaagatcacggacttactccctccctctttttgggaaaacaattgtaaattcctctacgtcgcacgaaacgccaaagactgtatggtctcttattaccacttccagaggatgaaccatatgcttccggatcccggaacttgggaagagtatttcgagacctttatcaatggcaaagtcgtgtggggcagctggttcgatcacgtcaaggggtggtgggaaatgaaagatcgccaccaaatcctgtttctgttttacgaggacatcaaaagagaccccaaacatgaaatcagaaaagtgatgcaattcatgggtaagaaagtcgacgaaactgtgcttgacaagatcgtgcaggagacaagctttgagaagatgaaagaaaatccaatgaccaatcggtccactgtttcaaaaagcatactcgatcagagtataagctcattcatgaggaaaggcacggtgggcgattggaagaaccacttcaccgtggcacagaacgagaggtttgatgagatctataggcgtaagatggagggaacatctattaacttttgcatggagctttag

SEQ ID NO: 252348 - DNA, 2828 bp, Artificial Sequence
  derived and/or modified sequence
agcttcgaggccagtgggaggagggaggggccaggcagctgagggccaggaaagatgtgaaaaactctagctggtgaccgagaggaggagtagagtgtgcccttagttcatatgaactagagggagttggtatttgcacagcagtcagggtcacatgagtgatcatggtacagtgagaagttctccctcccagggccaggtcacagggtttgtttctgttcaatccggattcttccagtaaaagcttcaacttcccacactgaagctgagagcctcccaaagtgctggctacctgctgagcgcccccgtaactctgacacagtagtaatttgagcctctgcaattgccgtctgcttcctgtgaaagtcctttccgtgcccactgacccttgagtgggcctttgagctgctgactttcagctggaacttgaagggaccccaaccctgagacactatggccctgacctcagacctggggaaacagataaaactgaaagaggtggaggggaccctcctgcagcctgcaactgtggacaactggagccagatccagagcttcgaggccaaaccagatgatctcctcatctgcacctaccctaaagcagggacaacgtggattcaggaaattgtggatatgattgaacagaatggggacgtggagaagtgccagcgagccatcatccaacaccgccatcctttcattgagtgggctcggccaccccaaccttctgagacaggatttcaccatgttgcccaggctggtctcaaactcctgagctcaagcaatccacctgcctcaacctcccaaagtgccaagattacagacctgctgccaccgtctttctgggaaaacaactgcaagttcctttatgtagctcgaaatgccaaagactgtatggtttcctactaccatttccaaaggatgaaccacatgcttcctgaccctggtacctgggaagagtattttgaaaccttcatcaatggaaaagtggtttggggttcctggtttgaccacgtgaaaggatggtgggagatgaaagacagacaccagattctcttcctcttctatgaggacataaagagggacccaaagcatgaaattcggaaggtgatgcagttcatgggaaagaaggtggatgaaacagtgctagataaaattgtccaggagacgtcatttgagaaaatgaaagaaaatcccatgacaaatcgttctacagtttccaaatctatcttggaccagtcaatttcctccttcatgagaaaaggaactgtgggggattggaaaaaccacttcactgttgcccagaatgagaggtttgatgaaatctatagaagaaagatggaaggaacctccataaacttctgcatggaactctgagcaagatgtaaataaaattaaaaggtggatggcaagagtgcaaatactatcttcaatccttcagtcccagccagaagaatctctgaaagcatattgtgaatgtatacaatgtagtacaaacaatctctgtgatgattaacagtatgtcaccacttcattttttaaaaaggatcacgtctaatgcccattttcccaactattctttccaaagtaagatataaggtagcttaataaactaagtaaaacgtatgacttgagtacaaaaggattgttttaatccccattattctggaaagtgcatcctagtctcccagtctataacatcataataccttgagtataagtccaaatattaggttatatctatattaaaaacaaaatttctgtcatctgtcctggccattcaggcaactccagcctgggctcaatcctggagttctgtctggtcactatcagaaggaacactttgagggaaaccctggtgcagccagccctgaggaaacatggcctgagtgccctcactggtgggtgggaataaaatggaagtgcacagaggagatgtcagaagaccaaaacttggtgaatagtcccagtgctaggtcatataggaaacagaaagcatgacagtggccttttgggaacccaagttacgtcctggtgaaagcagaaaggaggagacaggatggctgtcaacaacgtcagcatgggcatggctcccaggcatggaggtaattgggtcttggcttcaatgccacccttttgggaagccctaaaccaagtgaggtgttcttttcccttgcttcccatatttgtcccagttgcagccctgttgttatgtatttactcttcaatttcttatttatacctctcactcaattgttaattctttgggttcagtctcatgccatatttactcctagtacctaatgcagtgcctggcacacagcaagtgcccttgagaacttgtagagggagtaaaaaagtgcatggataaatgactgcagcaaatcacaaattttgaactttgacccttttcttttagtcccaaatagtggcattccatagctgagggtagtaggagcagttcaccctgggagcagacaataagaggaagaatgaagccaactaaaattctgaatgctttttgttggatttcgtagggtattttttttaaaatagggtcttgctatgttgcccaggctggtcttaactgactgctttttattattaccatgcactggcaattccaaacaatgtcagtgttaaaatgcttctccctgaaaaagagaaaaaaaaaaggaaaaaaagaaaagaaaagtgaaaagaaaaactcttattggcctaagttctaaataatagctaggttaccactgagttttaactatatgtatatgagcttcaaataagcacctttttattatgtaaataaataaaagttatctgtatcccca

SEQ ID NO: 252349 - protein, 267 aa, Artificial Sequence
  derived and/or modified sequence
MASLLKVDQEVKLKVDSFRERITSEAEDLVANFFPKKLLELDSFLKEPILNIHDLTQIHSDMNLPVPDPILLTNSHDGLDGPTYKKRRLDECEEAFQGTKVFVMPNGMLKSNQQLVDIIEKVKPEIRLLIEKCNTPSGKGPHICFDLQVKMWVQLLIPRIEDGNNFGVSIQEETVAELRTVESEAASYLDQISRYYITRAKLVSKIAKYPHVEDYRRTVTEIDEKEYISLRLIISELRNQYVTLHDMILKNIEKIKRPRSSNAETLY

SEQ ID NO: 252350 - DNA, 804 bp, Artificial Sequence
  derived and/or modified sequence
atggcctctctcttgaaggtggatcaagaggtgaagctgaaagtagattccttccgtgagagaatcacaagtgaagcagaagaccttgttgcaaacttctttccgaagaaactgctggaactggactcttttcttaaagagcccatcttgaacatccatgacctgacgcagattcattccgacatgaatctgcctgtgcccgatccaatccttctgacaaatagccatgatggccttgatggacctacttacaagaaaaggaggttagatgaatgtgaggaggccttccaaggcacaaaagtgtttgtgatgccgaacggtatgttgaaaagcaaccagcaactggtggatattatcgagaaagtgaaacctgaaatcagactgctgatagagaagtgcaacacccccagcggaaaggggccacacatctgttttgacctgcaggtgaagatgtgggtgcagcttctaataccacgaatcgaagatggaaacaacttcggcgtatctatccaggaagaaaccgttgccgaactgcgcaccgtcgagtctgaggcagcctcctatctggatcagatatccagatattatataacccgcgcgaaactggtttccaagatcgccaaatacccacacgtcgaggattacaggaggactgtaaccgagattgacgaaaaagaatatatcagtcttcggctgattatcagcgaacttaggaaccagtacgtcaccctacacgatatgatcctaaaaaacatagaaaaaattaagaggcctagatcatctaacgcagaaaccttgtattag

SEQ ID NO: 252351 - DNA, 48 bp, Artificial Sequence
  derived and/or modified sequence
atggccagccttctgaaggtggatcaggaagtcaaattgaagctctag

SEQ ID NO: 252352 - DNA, 804 bp, Artificial Sequence
  derived and/or modified sequence
atggccagcctgctgaaggtggaccaggaggtgaagctgaaggtggacagcttccgggagcgcatcaccagcgaggccgaggacctggtggccaacttcttccccaagaagctgctggagctggacagcttcctgaaggagcccatcctgaacatccatgacctgacccagatccacagcgacatgaacctgcctgtgcctgaccccatcctgctgaccaacagccatgatggcctggatggccccacctacaagaagaggcggctggatgaatgtgaggaggccttccagggcaccaaggtgtttgtgatgcccaacggcatgctgaagagcaaccagcagctggtggacatcatcgagaaggtgaagccagagatccggctgctgattgagaagtgcaacaccccatctgggaagggcccccacatctgctttgacctgcaggtgaagatgtgggtgcagctgctgatccccagaattgaagatggcaacaactttggagtgtccatccaggaggagaccgtggccgagctgaggacagtggagagcgaggccgccagctacctggaccagatcagccgctactacatcacccgggccaagctggtgtccaagatcgccaagtacccccacgtggaggactacagaagaacagtgacagaaattgatgagaaggagtacatcagcctgcggctcatcatcagcgagctgaggaaccagtatgtgaccctgcatgacatgatcctgaagaacatcgagaagatcaagaggcccaggagcagcaatgctgagaccctgtactag

SEQ ID NO: 252353 - DNA, 804 bp, Artificial Sequence
  derived and/or modified sequence
atggccagcctgctgaaggtggaccaggaggtgaagctgaaggtggactcatttcgggagcgcatcacgtcagaagccgaagatctcgtcgctaatttctttcccaaaaagctgctggagttggatagcttcttaaaagagccgatcctgaacattcatgaccttactcaaatccacagcgacatgaatctccctgtgcccgatcccatcctgctgaccaactctcacgatggattggacggtcctacgtacaagaaacgacgactcgacgagtgcgaggaagcttttcaaggtacaaaagtatttgtcatgccaaatgggatgctgaagtctaaccaacaactggtcgatattatcgaaaaggtgaaacccgaaatccgattactcatcgaaaaatgcaacactccttctggtaagggtccccacatctgttttgatctacaagtgaaaatgtgggtccagctgctgattccccggatcgaagacggaaacaactttggcgttagcatccaggaggagactgtcgccgagctgagaactgttgagagcgaggccgcgagttatctggaccagatcagtcggtactacattacgagagccaaactagtctccaaaatcgctaagtatccccacgtagaagattacaggaggacagtgacggagatcgatgaaaaagagtatatcagccttcgcctcatcatttcagagcttcggaaccagtacgttaccctgcacgatatgatactaaagaatatagagaagattaagaggccacggtcctcaaacgcagaaaccctgtattag

SEQ ID NO: 252354 - DNA, 804 bp, Artificial Sequence
  derived and/or modified sequence
atggcatctctgttaaaagtggaccaggaggtgaaactaaaggtggactcttttagggaaaggattactagcgaggctgaagatttggtagcaaacttcttccctaaaaagctcctggagctggactcttttcttaaagagccgattctcaacatccacgacttaacgcagatccactctgatatgaacttgcctgttcctgatcccatcctgctgaccaatagccacgatggcctggatggtcccacttacaagaagcgtcgcttagacgagtgcgaggaggcttttcagggaacaaaagtgttcgtgatgccgaatgggatgctcaaatctaatcaacagctggttgacattatcgagaaggtcaaacctgagatcagacttctgatcgaaaagtgcaatacacctagcggaaaagggcctcatatatgtttcgacctgcaggtgaaaatgtgggttcagcttctgattccgcgaatcgaggacggcaacaattttggggtttcaatccaggaagagacagttgcggagctgcgcactgtggagtctgaggctgcatcgtatctcgaccagatctctagatactatataactcgcgcaaagctggtctccaagatcgccaagtatccacatgtcgaggactatcgacgaaccgttacagaaattgacgaaaaggagtacatctcgctgaggctgatcatctccgagctccgaaatcagtacgtcaccttgcacgatatgattctgaaaaatatcgagaagatcaagagacccaggtcctctaatgctgaaacattgtactag

SEQ ID NO: 252355 - DNA, 48 bp, Artificial Sequence
  derived and/or modified sequence
atggcatccctgctcaaggtggaccaggaagtgaaattaaagctgtag

SEQ ID NO: 252356 - DNA, 3210 bp, Artificial Sequence
  derived and/or modified sequence
ggcgtgagcggcgaaagccgggagggcgagcgagagagcaagcaggcagcaggctgccggcgggcgggcggacggcacagagggagggagcgagcgagcagtgagtaagccagcaagggcggtcgggtcccgaggtcagccgagatttctcaggtccctccggccccctccctggagtccacagcgcctccggtgtccagaggatcggacacggcccggcccggccatggcctcgttgctgaaggtggatcaggaagtgaagctcaaggttgattctttcagggagcggatcacaagtgaggcagaagacttggtggcaaattttttcccaaagaagttattagaacttgatagttttctgaaggaaccaatcttaaacatccatgacctaactcagatccactctgacatgaatctcccagtccctgaccccattcttctcaccaatagccatgatggactggatggtcccacttataagaagcgaaggttggatgagtgtgaagaagccttccaaggaaccaaggtgtttgtgatgcccaatgggatgctgaaaagcaaccagcagctggtggacattattgagaaagtgaaacctgagatccggctgttgattgagaaatgtaacacgccttcaggcaaaggtcctcatatatgttttgacctccaggtcaaaatgtgggtacagctcctgattcccaggatagaagatggaaacaactttggggtgtccattcaggaggaaacagttgcagagctaagaactgttgagagtgaagctgcatcttatctggaccagatttctagatattatattacaagagccaaattggtttctaaaatagctaaatatccccatgtggaggactatcgccgcaccgtgacagagattgatgagaaagaatatatcagccttcggctcatcatatcagagctgaggaatcaatatgtcactctacatgacatgatcctgaaaaatatcgagaagatcaaacggccccggagcagcaatgcagagactctgtactgaggccagggccagggccaggggactctgtgagtctggctcaagaccgacattgccttggtttgttacatgactatcgtgatggggaaactggctggaaatagtaatcacacctctctgtttttagttagagtctaatgaaactctcatctagttctgtgatgtgtttacctcttttttcaggcctcaggaactcttctatttccttccctaataccccacacccaacctgtcgtaatttctggagaactccaggtttgtgtgtgcaggatgttggcacaaaaatacctgtgttttcattctccccctctctccctcctgtgtcttgcgctttatgttttcttccgtttgataattagttggttaaaagctgagggaaccggaaggaaagtgctaggtgttttttaggaactagggtggcggggggacgaacttctcttcctcacatgaggttactgtttctttcctctgtggggcattggatcctcccacagttgccctggtgatgacttagggcttcccatctgtgtacatcccactttgaatcttgatcgtgacaagaaataccttaggccttcagtcaattccgaagctccttcagttgtttttataatgggcgttttcacatgcacatatgtgtatgcatgtatacgcccatacagacatgcacacacagactcctactccattagctaacataccctccctctccacaacccctgtcacatacctttcaggaggtgacagttgtcttagttgtcatctacccagacaaacgtcctgggcccgtcctccctcctgatactgtagcctcttggtacccagggtgagttggtggagaacagagagatgagaagcagagggcttggggaaagcctgttcctctctgactcagccctttttggcattattgcaagagcttgactcctggttgccttttcccagccagttttcagttggggtgaaggtttctgcaagtgtgaggtccagatgctgctgctcatgttgggctttccttttgggaactatttctctttatttatagtgtcgggcttccggggaaagcaatcattggtgtgtatgtgtatgtgcatgcacacacgtgcatatacacatttgtgtatgtggaaatgtgctgggcaagtcaaaactatagaagagttgcctcctgtctctcgaatcttccagagatatcacttaattgttaacagcttttgtgttaatccccttcagcccctagctcttttattctaccacggctggagagttgatacctgcagtcagcctgccagtgactcttagtgtctgtttctgacttatttttcctgtctctgtcttccaacccccaataatatttccaccggggatgcatcatttttactcccaatattctgtagagagggagtcaggatgctgtcttcccacgaatagtactcagtaacaaaccaattgcattttagttgggcagtgctcccacccaccctccagatcccttccagctaaaacccttcccccttccctccatgtgtttctcagtttcccgtttcgtttgttggactgttccactgcccctcctcctcaccctatcacccatggatcgtaatgtaaaattcttttaccatgtcaagaaattattaaaaatacaggtactttgacctctttctaaagccgcagaccctggtgcaatgctctggtggctagggatgtactcatgctcatatgtgtgcacgcttggacacccacctccatggacacctagccaccctgttgtgtgtccttatgccagttgagctgaatcttttccccagtatagtggaaagactgaggcttctgcctactgagcaaggttgggtgcttcatttgtgttcagtctgaattatgggaaagttagctcttcccagacctaagctgccttctctccctactttcagaagatcctagttccttccttcccgagtgatacccatgaactgccagtagaggctgctatcgttccatgtgtaaggaatgaactggttcaaggcgcgtcctacccagtcattttctttaccttatactaattcttcctgaataatgtcttcagtttcttgaggagactcctagttttggttttcaaattacttggagggctgcctaggaatctatctccctctgaaataaagtttcctcatcttccaccttgc

SEQ ID NO: 252357 - DNA, 804 bp, Artificial Sequence
  derived and/or modified sequence
atggccagcctgctgaaggtggaccaggaggtgaagctgaaggtggacagcttcagagagagaatcaccagcgaggccgaggacctggtggccaacttcttccccaagaagctgctggagctggacagcttcctgaaggagcccatcctgaacatccacgacctgacccagatccacagcgacatgaacctgcccgtgcccgaccccatcctgctgaccaacagccacgacggcctggacggccccacctacaagaagagaagactggacgagtgcgaggaggccttccagggcaccaaggtgttcgtgatgcccaacggcatgctgaagagcaaccagcagctggtggacatcatcgagaaggtgaagcccgagatcagactgctgatcgagaagtgcaacacccccagcggcaagggcccccacatctgcttcgacctgcaggtgaagatgtgggtgcagctgctgatccccagaatcgaggacggcaacaacttcggcgtgagcatccaggaggagaccgtggccgagctgagaaccgtggagagcgaggccgccagctacctggaccagatcagcagatactacatcaccagagccaagctggtgagcaagatcgccaagtacccccacgtggaggactacagaagaaccgtgaccgagatcgacgagaaggagtacatcagcctgagactgatcatcagcgagctgagaaaccagtacgtgaccctgcacgacatgatcctgaagaacatcgagaagatcaagagacccagaagcagcaacgccgagaccctgtactag

SEQ ID NO: 252358 - DNA, 48 bp, Artificial Sequence
  derived and/or modified sequence
atggccagcctgctgaaggtggaccaggaggtgaagctgaagctgtag

SEQ ID NO: 252359 - protein, 232 aa, Artificial Sequence
  derived and/or modified sequence
MSALLRLLRTGAPAAACLRLGTSAGTGSRRAMALYHTEERGQPCSQNYRLFFKNVTGHYISPFHDIPLKVNSKEILSCGEVIHVKILGILALIDEGETDWKLIAINANDPEASKFHDIDDVKKFKPGYLEATLNWFRLYKVPDGKPENQFAFNGEFKNKAFALEVIKSTHQCWKALLMKKCNGGAINCTNVQISDSPFRCTQEEARSLVESVSSSPNKESNEEEQVWHFLGK

SEQ ID NO: 252360 - DNA, 699 bp, Artificial Sequence
  derived and/or modified sequence
atgagtgcactgctcagactcctccgaactggagccccagctgccgcttgtcttcgcttggggacctccgccggaactggctctcgccgcgcgatggccttgtaccataccgaggaacgcggtcagccctgctcccagaattatcgactgtttttcaagaacgtgactgggcattacatctctccattccacgatatccccttgaaggtaaacagcaaggagatcctctcttgtggcgaggtgatacatgtgaaaatcctcggcattctggcgctgatcgacgagggtgagaccgattggaaactgatagcaatcaacgccaatgacccggaagcaagcaaattccacgatattgacgatgtgaaaaagttcaagcctggataccttgaggcgacacttaactggttccgcctttataaggtaccagacggcaagcctgagaatcagttcgcttttaacggagagttcaagaacaaggcgttcgcattggaggtgattaagtccactcaccagtgttggaaggcgctcctcatgaagaagtgcaatgggggagccatcaactgtacaaacgtccaaatttcagacagcccatttcgttgcactcaagaagaagcacggagccttgtggaatccgtcagtagcagcccaaacaaggagagtaacgaggaagagcaagtctggcacttcttgggcaagtag

SEQ ID NO: 252361 - DNA, 699 bp, Artificial Sequence
  derived and/or modified sequence
atgtctgccctgctgcggctgctgaggactggagccccagctgctgcctgcctgcggctgggcaccagcgctggcaccggcagcagaagagccatggccctgtaccacacagaggagcggggccagccctgcagccagaactaccgcctcttcttcaagaatgtgacaggccactacatcagccccttccatgacatccccctgaaggtgaacagcaaggagatcctgagctgtggggaggtgattcatgtgaagatcctgggcatcctggccctgattgatgaaggagaaacagactggaagctgattgccatcaatgccaatgaccctgaggccagcaagttccatgacattgatgatgtgaagaagttcaagccaggctacctggaggccaccctgaactggttccggctgtacaaggtgcctgatggcaagccagagaaccagtttgccttcaatggagagttcaagaacaaggcctttgccctggaggtgatcaagagcacccaccagtgctggaaggccctgctgatgaagaagtgcaatggaggagccatcaactgcaccaacgtgcagatcagtgacagccccttccgctgcacccaggaggaggcccggagcctggtggagagcgtgagcagcagccccaacaaggagagcaatgaggaggagcaggtgtggcacttcctgggcaagtag

SEQ ID NO: 252362 - DNA, 699 bp, Artificial Sequence
  derived and/or modified sequence
atgagcgccctgctgcggctgctgcggaccggcgcccccgccgccgcctgtttacgcctgggtacgtctgctggaacaggctctaggagagcgatggccctctatcacaccgaggaacggggtcagccttgctcccagaattaccggcttttttttaaaaacgtcacgggacactatatatccccctttcatgatatcccccttaaggtgaacagtaaggaaattctgtcgtgcggagaggtgatacacgttaagatacttggtattctggccctgatcgatgaaggggagactgactggaagttgattgccatcaacgccaatgaccctgaggccagtaagttccacgatatcgacgacgttaaaaagtttaagccaggttacttggaggctaccctcaactggttcagactatataaggtgccggacggaaagccagaaaaccaatttgcgttcaacggcgagtttaaaaataaggcctttgcactcgaggtgattaagtccacacaccagtgctggaaagccctcctgatgaagaagtgtaacgggggcgctatcaactgtacgaacgtgcaaatttccgactctcccttccggtgcacacaggaagaagcaagaagcctcgtagagtcagtctcttcctcacccaacaaagaaagtaacgaggaagagcaggtgtggcattttttgggaaaatag

SEQ ID NO: 252363 - DNA, 699 bp, Artificial Sequence
  derived and/or modified sequence
atgtcagcactgcttcgtctgctgcgtaccggggcaccggctgcggcatgtctcagattgggtacctcagccggtacgggctccaggcgcgcaatggccctgtatcatactgaagaaagaggccaaccctgtagtcagaattacaggttattttttaagaacgttaccggtcattacatctctccttttcacgatattccccttaaggtgaacagcaaggagatactgagctgcggcgaggtgatccacgtaaaaattttagggatactggcacttatcgacgagggagagaccgattggaaattaatcgccattaatgctaatgatcctgaggcctcaaaatttcacgacatcgatgacgtcaaaaaatttaagcccggttatctcgaggccactctcaattggtttaggctgtacaaggtgccagacggcaaaccagagaatcagtttgccttcaacggcgaatttaaaaacaaggcatttgcgttggaagttattaagtccactcaccagtgctggaaagccctcctgatgaagaaatgcaacgggggtgctatcaattgcacaaacgtgcagatttccgactcacctttccgctgtacacaggaggaggcaaggtctctagtagaatctgtgagctctagtcccaataaagagtccaacgaggaagagcaggtatggcactttttgggcaagtag

SEQ ID NO: 252364 - DNA, 859 bp, Artificial Sequence
  derived and/or modified sequence
atgagcgcgctgctgcggctgctgcgcacgggtgccccagccgctgcgtgcctgcggttggggaccagtgcagggaccgggtcgcgccgtgctatggccctgtaccacactgaggagcgcggccagccctgctcgcagaattaccgcctcttctttaagaatgtaactggtcactacatttccccctttcatgatattcctctgaaggtgaactctaaagagattctttcttgtggagaagttattcatgtgaagatccttggaattttggctcttattgatgaaggtgaaacagattggaaattaattgctatcaatgcgaatgatcctgaagcctcaaagtttcatgatattgatgatgttaagaagttcaaaccgggttacctggaagctactcttaattggtttagattatataaggtaccagatggaaaaccagaaaaccagtttgcttttaatggagaattcaaaaacaaggcttttgctcttgaagttattaaatccactcatcaatgttggaaagcattgcttatgaagaagtgtaatggaggagctataaattgcacaaacgtgcagatatctgatagccctttccgttgcactcaagaggaagcaagatcattagttgaatcggtatcatcttcaccaaataaagaaagtaatgaagaagagcaagtgtggcacttccttggcaagtgattgaaacatctgaaattctgctgtcaagattcccatctctaaggactccaagtgctagagacaagggggtctatgagcatttactgacttcctgttaaaacttcattttttcaaactttttgagctatgcaatatataaataaacagtaagaattttaaa

SEQ ID NO: 252365 - DNA, 699 bp, Artificial Sequence
  derived and/or modified sequence
atgagcgccctgctgagactgctgagaaccggcgcccccgccgccgcctgcctgagactgggcaccagcgccggcaccggcagcagaagagccatggccctgtaccacaccgaggagagaggccagccctgcagccagaactacagactgttcttcaagaacgtgaccggccactacatcagccccttccacgacatccccctgaaggtgaacagcaaggagatcctgagctgcggcgaggtgatccacgtgaagatcctgggcatcctggccctgatcgacgagggcgagaccgactggaagctgatcgccatcaacgccaacgaccccgaggccagcaagttccacgacatcgacgacgtgaagaagttcaagcccggctacctggaggccaccctgaactggttcagactgtacaaggtgcccgacggcaagcccgagaaccagttcgccttcaacggcgagttcaagaacaaggccttcgccctggaggtgatcaagagcacccaccagtgctggaaggccctgctgatgaagaagtgcaacggcggcgccatcaactgcaccaacgtgcagatcagcgacagccccttcagatgcacccaggaggaggccagaagcctggtggagagcgtgagcagcagccccaacaaggagagcaacgaggaggagcaggtgtggcacttcctgggcaagtag

SEQ ID NO: 252366 - protein, 168 aa, Artificial Sequence
  derived and/or modified sequence
MSALLRLLRTGAPAAACLRLGTSAGTGSRRAMALYHTEERGQPCSQNYRLFFNIDDVKKFKPGYLEATLNWFRLYKVPDGKPENQFAFNGEFKNKAFALEVIKSTHQCWKALLMKKCNGGAINCTNVQISDSPFRCTQEEARSLVESVSSSPNKESNEEEQVWHFLGK

SEQ ID NO: 252367 - DNA, 507 bp, Artificial Sequence
  derived and/or modified sequence
atgtcggccctgttgcggctgttgaggactggggcccccgccgccgcatgcctgagactcggcacaagcgcaggcaccggatcccggagagccatggcactgtaccataccgaggaaaggggacaaccatgctcacaaaactaccggctctttttcaatatcgatgacgttaagaaattcaaacccggttatctagaggccacactcaactggttccgcctgtacaaagtacccgacggaaaaccggagaatcagtttgcctttaatggtgaatttaagaacaaggcatttgccctcgaagttatcaaatcgacccatcagtgttggaaagctctcctcatgaagaagtgtaacggtggcgctattaactgcaccaatgtgcagatctctgattccccattcagatgtactcaggaagaggcgcggtctctggtagagtcggtgagctccagccctaacaaagagtccaacgaggaggagcaggtctggcacttcctgggcaaatag

SEQ ID NO: 252368 - DNA, 507 bp, Artificial Sequence
  derived and/or modified sequence
atgtctgccctgctgcggctgctgaggactggagccccagctgctgcctgcctgcggctgggcaccagcgctggcaccggcagcagaagagccatggccctgtaccacacagaggagcggggccagccctgcagccagaactaccgcctcttcttcaacattgatgatgtgaagaagttcaagccaggctacctggaggccaccctgaactggttccggctgtacaaggtgcctgatggcaagccagagaaccagtttgccttcaatggagagttcaagaacaaggcctttgccctggaggtgatcaagagcacccaccagtgctggaaggccctgctgatgaagaagtgcaatggaggagccatcaactgcaccaacgtgcagatcagtgacagccccttccgctgcacccaggaggaggcccggagcctggtggagagcgtgagcagcagccccaacaaggagagcaatgaggaggagcaggtgtggcacttcctgggcaagtag

SEQ ID NO: 252369 - DNA, 507 bp, Artificial Sequence
  derived and/or modified sequence
atgagcgccctgctgcggctgctgcggaccggcgcccccgccgccgcctgcctgcggctggggacatcagctgggacaggatcaaggcgcgcaatggcactgtaccacaccgaggaaagaggacagccctgtagccagaattaccggctctttttcaacatcgatgacgtgaaaaaattcaaacccgggtacctcgaagcaaccctgaactggtttcggctgtacaaggtgccagatggaaagccagagaaccagtttgccttcaacggtgagtttaagaataaggcttttgccttagaagtgatcaaaagcacacaccagtgttggaaggctctgttgatgaaaaaatgcaacggaggtgccatcaactgtaccaacgtgcaaatttccgattcacccttccgttgtacccaagaggaggcccgtagcttagtcgaatcagtgagttcttctcccaataaagagtctaacgaagaggaacaggtgtggcactttttggggaagtag

SEQ ID NO: 252370 - DNA, 507 bp, Artificial Sequence
  derived and/or modified sequence
atgtctgcactgcttagattgttacgcaccggagctcccgcagcggcttgcttgagactaggcacttccgctggtacgggcagtcggcgtgctatggcattatatcatactgaggagcggggtcagccgtgctctcagaactaccgactgttctttaacatagacgatgtgaagaagtttaagccgggatacttagaggccactctgaattggttccgactgtacaaggtgcctgatgggaaacccgagaatcagttcgcgtttaatggcgagtttaaaaacaaggcctttgcactggaggtcataaagtctacccatcagtgttggaaggcgttactgatgaaaaagtgcaacggaggcgctatcaattgtactaacgtgcagatttctgactcacccttccgttgcactcaggaggaagcacgttcattggtagaaagtgtatcctccagcccaaacaaagaatctaacgaggaagaacaagtctggcattttctggggaaatag

SEQ ID NO: 252371 - DNA, 667 bp, Artificial Sequence
  derived and/or modified sequence
atgagcgcgctgctgcggctgctgcgcacgggtgccccagccgctgcgtgcctgcggttggggaccagtgcagggaccgggtcgcgccgtgctatggccctgtaccacactgaggagcgcggccagccctgctcgcagaattaccgcctcttctttaatattgatgatgttaagaagttcaaaccgggttacctggaagctactcttaattggtttagattatataaggtaccagatggaaaaccagaaaaccagtttgcttttaatggagaattcaaaaacaaggcttttgctcttgaagttattaaatccactcatcaatgttggaaagcattgcttatgaagaagtgtaatggaggagctataaattgcacaaacgtgcagatatctgatagccctttccgttgcactcaagaggaagcaagatcattagttgaatcggtatcatcttcaccaaataaagaaagtaatgaagaagagcaagtgtggcacttccttggcaagtgattgaaacatctgaaattctgctgtcaagattcccatctctaaggactccaagtgctagagacaagggggtctatgagcatttactgacttcctgttaaaacttcattttttcaaactttttgagctatgcaatatataaataaacagtaagaattttaaa

SEQ ID NO: 252372 - DNA, 507 bp, Artificial Sequence
  derived and/or modified sequence
atgagcgccctgctgagactgctgagaaccggcgcccccgccgccgcctgcctgagactgggcaccagcgccggcaccggcagcagaagagccatggccctgtaccacaccgaggagagaggccagccctgcagccagaactacagactgttcttcaacatcgacgacgtgaagaagttcaagcccggctacctggaggccaccctgaactggttcagactgtacaaggtgcccgacggcaagcccgagaaccagttcgccttcaacggcgagttcaagaacaaggccttcgccctggaggtgatcaagagcacccaccagtgctggaaggccctgctgatgaagaagtgcaacggcggcgccatcaactgcaccaacgtgcagatcagcgacagccccttcagatgcacccaggaggaggccagaagcctggtggagagcgtgagcagcagccccaacaaggagagcaacgaggaggagcaggtgtggcacttcctgggcaagtag

SEQ ID NO: 252373 - protein, 202 aa, Artificial Sequence
  derived and/or modified sequence
MKKARNDEYENLFNMIVEIPRWTNAKMEIATKEPMNPIKQYVKDGKLRYVANIFPYKGYIWNYGTLPQTWEDPHEKDKSTNCFGDNDPIDVCEIGSKILSCGEVIHVKILGILALIDEGETDWKLIAINANDPEASKFHGLRNIPVYTINRIVILPSLDRSQTSSLSYLPAHQDSCVPLDAALHVVLYFCSLLGLQSYLSCF

SEQ ID NO: 252374 - protein, 334 aa, Artificial Sequence
  derived and/or modified sequence
MSALLRLLRTGAPAAACLRLGTSAGTGSRRAMALYHTEERGQPCSQNYRLFFKNVTGHYISPFHDIPLKVNSKEENGIPMKKARNDEYENLFNMIVEIPRWTNAKMEIATKEPMNPIKQYVKDGKLRYVANIFPYKGYIWNYGTLPQTWEDPHEKDKSTNCFGDNDPIDVCEIGSKILSCGEVIHVKILGILALIDEGETDWKLIAINANDPEASKFHDIDDVKKFKPGYLEATLNWFRLYKVPDGKPENQFAFNGEFKNKAFALEVIKSTHQCWKALLMKKCNGGAINCTNVQISDSPFRCTQEEARSLVESVSSSPNKESNEEEQVWHFLGK

SEQ ID NO: 252375 - protein, 349 aa, Artificial Sequence
  derived and/or modified sequence
MSALLRLLRTGAPAAACLRLGTSAGTGSRRAMALYHTEERGQPCSQNYRLFFKNVTGHYISPFHDIPLKVNSKEDTEAQGIFIDLSKIWENGIPMKKARNDEYENLFNMIVEIPRWTNAKMEIATKEPMNPIKQYVKDGKLRYVANIFPYKGYIWNYGTLPQTWEDPHEKDKSTNCFGDNDPIDVCEIGSKILSCGEVIHVKILGILALIDEGETDWKLIAINANDPEASKFHDIDDVKKFKPGYLEATLNWFRLYKVPDGKPENQFAFNGEFKNKAFALEVIKSTHQCWKALLMKKCNGGAINCTNVQISDSPFRCTQEEARSLVESVSSSPNKESNEEEQVWHFLGK

SEQ ID NO: 252376 - protein, 316 aa, Artificial Sequence
  derived and/or modified sequence
MSALLRLLRTGAPAAACLRLGTSAGTGSRRAMALYHTEERGQPCSQNYRLFFKNVTGHYISPFHDIPLKVNSKEENGIPMKKARNDEYEIATKEPMNPIKQYVKDGKLRYVANIFPYKGYIWNYGTLPQTWEDPHEKDKSTNCFGDNDPIDVCEIGSKILSCGEVIHVKILGILALIDEGETDWKLIAINANDPEASKFHDIDDVKKFKPGYLEATLNWFRLYKVPDGKPENQFAFNGEFKNKAFALEVIKSTHQCWKALLMKKCNGGAINCTNVQISDSPFRCTQEEARSLVESVSSSPNKESNEEEQVWHFLGK

SEQ ID NO: 252377 - DNA, 609 bp, Artificial Sequence
  derived and/or modified sequence
atgaagaaggcaagaaatgacgaatatgagaatctctttaatatgattgtggagatacccagatggaccaacgcgaaaatggaaattgctaccaaggaacccatgaaccccatcaaacagtatgtcaaggacggaaagttgcggtacgtggcaaacattttcccgtacaaaggctacatttggaattacggcacattaccacagacctgggaagacccgcatgaaaaggacaagagcacaaattgtttcggggacaacgatccaatagacgtttgcgaaatcggctcaaagattttatcctgtggcgaggtgatccacgttaagattctgggcatacttgctttgatagacgagggtgaaacagattggaagttgatcgcaattaacgccaatgaccctgaagcaagtaagtttcacggactccggaacattcctgtgtatacgattaatcgcattgtgatcctccctagtctggatcggagccagacatctagcctgtcttatctgcccgcccaccaggattcatgcgtgccattagacgcagcgttgcatgtggtgctgtacttttgttcactgctcggtctgcagtcgtacctctcatgcttctag

SEQ ID NO: 252378 - DNA, 1005 bp, Artificial Sequence
  derived and/or modified sequence
atgagtgccctgctcagactgttgagaactggcgccccggccgctgcttgtctaagactggggacttctgcgggtacagggagccggcgcgctatggccttgtaccatacggaggaaagagggcaaccgtgctcacagaattaccgactgttctttaagaacgtaaccggacattatatttccccattccacgatatacctctgaaagttaatagcaaagaagaaaacggaatcccaatgaaaaaggcgagaaatgacgaatacgaaaacttattcaacatgatcgtcgagattcctcgctggacgaacgcgaagatggagattgctaccaaggagccaatgaatccaatcaaacagtatgtgaaggacggcaaactccggtacgtggctaatattttcccttacaaaggttacatctggaattacggaaccttgccacaaacctgggaagacccgcacgagaaagacaaatccaccaattgcttcggagataacgatcccatcgacgtatgcgagatcggctcgaaaatcctgagttgcggtgaagttatccatgttaagatcctggggatactggccctcatagacgagggagagactgactggaagcttatcgctattaatgctaatgatcctgaggcttctaagtttcacgatatagacgacgtaaaaaagtttaagcctgggtacctagaggcaaccctgaactggttcagactgtataaggtgcctgacgggaagccggagaatcagttcgcttttaacggcgaattcaaaaacaaagcttttgccctagaagtaatcaagtctacacaccagtgctggaaagccctgttaatgaagaagtgcaacggcggcgctatcaactgtaccaatgtgcagatctcggattcaccttttaggtgcacccaggaggaagcccggtcgctcgtggaatctgtgtcatcgtctcctaacaaagagtctaatgaagaggagcaagtttggcatttcctcggtaaatag

SEQ ID NO: 252379 - DNA, 1050 bp, Artificial Sequence
  derived and/or modified sequence
atgtcggcactgctgaggctgctcagaaccggggctccagctgccgcgtgtttacgcctcggtactagcgctggcactgggtccagacgcgcaatggcactgtatcacacagaagagaggggacagccctgttctcaaaactatcgcctttttttcaaaaatgtaacaggacattatatttcccctttccatgacatcccacttaaggtgaattccaaggaggatacagaggcacaggggatttttattgacctttccaagatctgggagaatggcattccaatgaaaaaagcacggaatgacgagtacgaaaacctttttaacatgattgtggaaattcccagatggacaaacgcaaaaatggagatcgctacaaaggagccaatgaacccaataaagcagtacgtgaaggatggcaaactgcggtatgttgccaacatctttccatacaaggggtatatctggaactatggcaccctgcctcaaacatgggaggatcctcacgaaaaagataaaagcaccaactgcttcggcgacaacgatcctatcgacgtctgcgagatcggctctaaaatactcagttgtggagaggtcattcatgtaaaaatcttaggcatccttgcgctgatcgacgagggtgagactgactggaagctgatagctattaatgctaatgatcccgaggcctccaagttccatgacatcgatgacgtgaaaaaattcaagcccggatacctggaagccacgctgaattggttccgcctttataaagtgcctgacggcaagccagagaaccaattcgcttttaatggcgaatttaagaataaggcgtttgcactggaagtaattaagtcaactcatcagtgttggaaggcgttgctgatgaaaaaatgtaacggcggggctatcaattgcaccaatgtccaaatctccgatagcccatttcgctgcacccaggaagaagctagaagcctggtcgagagtgtctcctctagcccgaataaggaatccaacgaggaggaacaagtgtggcactttctcggtaaatag

SEQ ID NO: 252380 - DNA, 951 bp, Artificial Sequence
  derived and/or modified sequence
atgagtgcactgcttcgcctgttacggacgggtgctcctgcagccgcatgtctgcggcttgggacctccgctggaactgggtcacgccgcgcaatggccctttatcacaccgaagagagaggccaaccatgttcgcaaaactacagactctttttcaagaatgtgactggccattacatcagccccttccacgatattccattgaaagtaaactctaaggaggagaacggtatccctatgaagaaagcacgtaacgatgagtacgagatcgccactaaggagcccatgaaccctataaaacagtacgtgaaggatgggaagttacggtatgttgctaatatcttcccttataaaggatatatctggaactacggcactctcccccagacttgggaggacccccacgagaaggacaagtctacaaactgttttggtgacaatgaccctatcgatgtgtgcgagataggatccaaaattctgagctgtggtgaggttatacacgtcaaaatcctgggaattctagcacttatagacgaaggagagaccgattggaaattaattgctatcaatgctaacgacccagaggcatcaaagttccatgatatcgacgacgtgaagaaatttaagcccggctacctcgaagcaacccttaactggttcaggctgtacaaagttcctgatgggaaaccagaaaaccagttcgcctttaacggcgaatttaagaataaggcgtttgccctagaggtcattaaaagtacccaccaatgctggaaagcactcttaatgaagaaatgtaatgggggggcaatcaattgtacgaacgtgcagatctcagacagcccgttcagatgtacccaggaggaagctagaagtctggtcgagagtgtctcgagctccccaaacaaagaaagcaatgaggaggagcaggtctggcacttcctaggcaaatag

SEQ ID NO: 252381 - DNA, 609 bp, Artificial Sequence
  derived and/or modified sequence
atgaagaaggccagaaatgatgaatatgagaacctcttcaacatgattgtggagatcccccgctggaccaatgccaagatggagatcgccaccaaggagcccatgaaccccatcaagcagtatgtgaaggatggcaagctgcgctacgtggccaacatcttcccctacaagggctacatctggaactacggcaccctgccccagacctgggaggacccccatgagaaggacaagagcaccaactgctttggagacaatgaccccattgatgtgtgtgagatcggcagcaagatcctgagctgtggggaggtgatccacgtgaagatcctgggcatcctggccctgattgatgaaggagaaacagactggaagctgattgccatcaatgccaatgaccctgaggccagcaagttccacggcctgaggaacatccctgtgtacaccatcaaccgcatcgtcatcctgcccagcctggacaggagccagaccagcagcctgagctacctgcctgcccaccaggacagctgtgtgcccctggatgctgccctgcacgtggtgctgtacttctgcagcctgctgggcctgcagagctacctgagctgcttctag

SEQ ID NO: 252382 - DNA, 1005 bp, Artificial Sequence
  derived and/or modified sequence
atgtctgccctgctgcggctgctgaggactggagccccagctgctgcctgcctgcggctgggcaccagcgctggcaccggcagcagaagagccatggccctgtaccacacagaggagcggggccagccctgcagccagaactaccgcctcttcttcaagaatgtgacaggccactacatcagccccttccatgacatccccctgaaggtgaacagcaaggaggagaatggcatccccatgaagaaggccagaaatgatgaatatgaaaatctcttcaacatgattgtggagatcccccgctggaccaatgccaagatggagatcgccaccaaggagcccatgaaccccatcaagcagtatgtgaaggatggcaagctgcgctacgtggccaacatcttcccctacaagggctacatctggaactacggcaccctgccccagacctgggaggacccccatgagaaggacaagagcaccaactgcttcggggacaatgaccccattgatgtgtgtgaaattggcagcaagatcctgagctgtggggaggtgattcatgtgaagatcctgggcatcctggccctgattgatgaaggagaaacagactggaagctgattgccatcaatgccaatgaccctgaggccagcaagttccatgacattgatgatgtgaagaagttcaagccaggctacctggaggccaccctgaactggttccggctgtacaaggtgcctgatggcaagccagagaaccagtttgccttcaatggagagttcaagaacaaggcctttgccctggaggtgatcaagagcacccaccagtgctggaaggccctgctgatgaagaagtgcaatggaggagccatcaactgcaccaacgtgcagatcagtgacagccccttccgctgcacccaggaggaggcccggagcctggtggagagcgtgagcagcagccccaacaaggagagcaatgaggaggagcaggtgtggcacttcctgggcaagtag

SEQ ID NO: 252383 - DNA, 1050 bp, Artificial Sequence
  derived and/or modified sequence
atgtctgccctgctgcggctgctgaggactggagccccagctgctgcctgcctgcggctgggcaccagcgctggcaccggcagcagaagagccatggccctgtaccacacagaggagcggggccagccctgcagccagaactaccgcctcttcttcaagaatgtgacaggccactacatcagccccttccatgacatccccctgaaggtgaacagcaaggaggacacagaggcccagggcatcttcatcgacctgagcaagatctgggagaatggcatccccatgaagaaggccagaaatgatgaatatgagaacctcttcaacatgattgtggagatcccccgctggaccaatgccaagatggagatcgccaccaaggagcccatgaaccccatcaagcagtatgtgaaggatggcaagctgcgctacgtggccaacatcttcccctacaagggctacatctggaactacggcaccctgccccagacctgggaggacccccatgagaaggacaagagcaccaactgctttggagacaatgaccccattgatgtgtgtgagatcggcagcaagatcctgagctgtggggaggtgatccacgtgaagatcctgggcatcctggccctgattgatgaaggagaaacagactggaagctgattgccatcaatgccaatgaccctgaggccagcaagttccatgacattgatgatgtgaagaagttcaagccaggctacctggaggccaccctgaactggttccggctgtacaaggtgcctgatggcaagccagagaaccagtttgccttcaacggggagttcaagaacaaggcctttgccctggaggtgatcaagagcacccaccagtgctggaaggccctgctgatgaagaagtgcaatggaggagccatcaactgcaccaacgtgcagatcagtgacagccccttccgctgcacccaggaggaggcccggagcctggtggagagcgtgagcagcagccccaacaaggagagcaatgaggaggagcaggtgtggcacttcctgggcaagtag

SEQ ID NO: 252384 - DNA, 951 bp, Artificial Sequence
  derived and/or modified sequence
atgtctgccctgctgcggctgctgaggactggagccccagctgctgcctgcctgcggctgggcaccagcgctggcaccggcagcagaagagccatggccctgtaccacacagaggagcggggccagccctgcagccagaactaccgcctcttcttcaagaatgtgacaggccactacatcagccccttccatgacatccccctgaaggtgaacagcaaggaggagaatggcatccccatgaagaaggccagaaatgatgaatatgagatcgccaccaaggagcccatgaaccccatcaagcagtatgtgaaggatggcaagctgcgctacgtggccaacatcttcccctacaagggctacatctggaactacggcaccctgccccagacctgggaggacccccatgagaaggacaagagcaccaactgcttcggggacaatgaccccattgatgtgtgtgaaattggcagcaagatcctgagctgtggggaggtgattcatgtgaagatcctgggcatcctggccctgattgatgaaggagaaacagactggaagctgattgccatcaatgccaatgaccctgaggccagcaagttccatgacattgatgatgtgaagaagttcaagccaggctacctggaggccaccctgaactggttccggctgtacaaggtgcctgatggcaagccagagaaccagtttgccttcaatggagagttcaagaacaaggcctttgccctggaggtgatcaagagcacccaccagtgctggaaggccctgctgatgaagaagtgcaatggaggagccatcaactgcaccaacgtgcagatcagtgacagccccttccgctgcacccaggaggaggcccggagcctggtggagagcgtgagcagcagccccaacaaggagagcaatgaggaggagcaggtgtggcacttcctgggcaagtag

SEQ ID NO: 252385 - DNA, 609 bp, Artificial Sequence
  derived and/or modified sequence
atgaagaaggcccggaacgacgagtacgagaacctgttcaacatgatcgtggagatcccaaggtggacgaatgcgaagatggagatcgctaccaaggagcccatgaatcccattaaacaatatgttaaagatggcaaactgcggtacgtggcgaatatttttccctacaaagggtatatctggaactacgggacactcccccaaacttgggaggacccccacgagaaagataaatcaacaaattgcttcggagacaacgatcctatcgatgtctgtgagatagggtccaaaattctttcttgcggggaagtgatccacgtgaaaattctgggtatactcgctttgatcgatgagggcgagaccgactggaagctaatagcgatcaatgccaacgatccagaggctagtaagtttcacggattgagaaacatccccgtgtacactattaataggatcgtaatcctccctagcttagaccggtcacagacctcaagcctctcctatcttccggcacaccaggattcttgcgtgcctctcgatgcggcgttgcatgtggtgttgtacttctgttcactcttaggcctccaatcatatcttagttgtttttag

SEQ ID NO: 252386 - DNA, 1005 bp, Artificial Sequence
  derived and/or modified sequence
atgagcgccctgctgcggctgctgcggaccggcgcccccgccgccgcttgcttacgcctcggtaccagcgccgggacaggttcccgccgcgcaatggccctctatcacacggaggagaggggccaaccttgtagtcaaaactataggctgttcttcaagaatgtaacaggccattatatatctccctttcatgatatcccattgaaagtgaattccaaggaggaaaacgggattccaatgaaaaaggctcggaacgatgagtatgagaacctgttcaacatgatcgttgagattcccaggtggaccaatgctaaaatggagattgcaactaaagagcctatgaaccctatcaagcaatacgtcaaagatggcaaactccggtacgtggcgaatatcttcccatataagggctacatctggaactacggaactctcccacagacatgggaagatccccacgagaaggataaatccacaaattgtttcggagataatgatcctatagacgtgtgcgaaataggctccaagatactgagctgcggagaagtgatccacgtaaaaattctaggaatcctagccctaattgatgaaggggagaccgactggaaattaattgctatcaatgccaacgatcctgaggcgtctaaattccatgatattgatgatgtgaagaagttcaagcctggctatctggaagcgacactgaactggttccgactgtacaaggttccagacggaaagccagagaatcagtttgccttcaatggtgagttcaagaataaggccttcgcactcgaggtcattaagtcaacgcaccagtgttggaaggcactattgatgaagaagtgtaacggcggagcaataaattgcacaaacgtccagatcagcgattccccttttaggtgcacccaagaggaggccagaagtcttgttgagagcgtgtcctcgtctcctaacaaggagagcaacgaagaggaacaggtttggcactttctgggcaagtag

SEQ ID NO: 252387 - DNA, 1050 bp, Artificial Sequence
  derived and/or modified sequence
atgagcgccctgctgcggctgctgcggaccggcgcccccgccgccgcctgtcttagacttggtaccagcgcaggaaccggaagccggcgggccatggccctgtatcatacagaagagaggggccaaccttgttcacagaactacaggttgtttttcaagaatgttacggggcactacatcagtccattccacgatattcccctgaaagtcaatagcaaagaggatacagaggcccagggtattttcatcgacttaagcaagatctgggagaacgggattcctatgaaaaaggcaaggaacgacgaatacgaaaacttattcaatatgatagtggaaattccacggtggactaatgccaagatggagatcgccactaaagaacctatgaaccctatcaagcagtacgttaaagacggcaaactccgctacgttgcaaacattttcccgtacaaaggctacatttggaactatggaactctgcctcaaacgtgggaagatcctcacgaaaaggacaagtctactaattgctttggcgataacgatccaatagatgtctgcgaaatcggctccaagattctgagttgtggcgaggtgatacacgtgaagattctgggtatcttggctctgattgatgagggtgagactgactggaagctaattgcgattaacgccaatgacccggaggcgtccaagtttcacgatattgacgatgtgaagaagttcaagcccggttatttggaggctactctcaactggttccgcctatacaaggtgcccgatggcaaacccgagaatcaatttgcattcaatggcgagtttaaaaacaaggcattcgcactggaggtgatcaaatctactcaccagtgctggaaagctcttctcatgaaaaagtgcaatggcggcgcaattaattgcacaaatgttcaaattagcgactcgccattccgttgtacgcaagaggaggctagatcactcgtcgaatctgtgtctagtagccccaacaaagagtccaatgaggaggaacaggtatggcattttctgggtaaatag

SEQ ID NO: 252388 - DNA, 951 bp, Artificial Sequence
  derived and/or modified sequence
atgagcgccctgctgcggctgctgcggaccggcgcccccgccgccgcctgtctcaggctaggtacgtctgctggcacaggatctagacgtgcaatggccctgtaccatacggaggaaagagggcagccctgttcacagaattacaggctcttttttaagaatgtcactggacactatattagtccttttcatgatatccctttgaaagtgaactcgaaggaagaaaatggtattcccatgaaaaaggctaggaacgacgagtacgagatcgctaccaaggagcccatgaatcctatcaagcaatatgtgaaggacggtaagcttcgctacgtggcaaacatctttccgtacaaaggttatatttggaactatggcactctccctcaaacctgggaggatccccatgaaaaggacaaatcaaccaattgcttcggcgacaatgatcccatcgacgtctgcgagatcggatctaaaatcttgtcatgcggggaggttatccacgtgaagatcctgggcatcttggccctaatcgacgaaggggaaacagattggaagctcatcgccatcaatgccaatgatccagaggcatcaaagttccatgatatcgacgatgtcaagaagtttaagccaggctacctggaggccacactgaactggtttagattatataaagtcccggatggcaaacccgagaatcagtttgcttttaatggggagttcaaaaataaagcattcgcactcgaagtaatcaagtcgacacatcagtgttggaaggcactcctgatgaagaaatgcaacggaggcgccatcaattgcacaaacgtccaaatctctgacagcccatttaggtgcacacaggaagaggcaaggtcgctcgtggagagcgtctcatccagccccaacaaagaaagtaatgaggaagaacaagtctggcatttcttggggaagtag

SEQ ID NO: 252389 - DNA, 609 bp, Artificial Sequence
  derived and/or modified sequence
atgaaaaaggcacgcaatgatgagtacgagaatcttttcaatatgatcgtagaaattccgcgttggacaaacgcaaaaatggagatcgcgacaaaagaaccaatgaacccaatcaagcagtatgtgaaggacggcaaactgaggtatgtggctaatatattcccttacaaaggttacatatggaattatggcacactcccccagacctgggaagacccccatgagaaagacaagagcaccaactgcttcggtgacaatgaccctatcgacgtgtgcgaaataggatcgaaaatcctgtcctgtggggaagtgatccacgtgaagatactcggcattctggctctgatcgacgagggtgagaccgactggaagctaattgccataaacgccaacgatcccgaagcatccaagttccatgggctccggaacataccagtgtatacaataaatcggattgttatcctccctagcctggatagatcccagacaagctctctatcatatctccccgcacaccaggactcctgtgttccactcgatgccgcacttcacgtagtattatacttctgctcgctgctggggttacagtcctatctgagctgcttttag

SEQ ID NO: 252390 - DNA, 1005 bp, Artificial Sequence
  derived and/or modified sequence
atgtccgctcttctgaggcttcttagaactggcgctccggctgcagcatgcctgcggctgggaacaagcgccggtactggcagtcgcagagccatggccctgtaccatacggaggagagaggccagccctgtagccaaaattataggttattctttaagaatgtgactgggcactacatcagccccttccacgacatcccactgaaggtcaactccaaagaggagaatggaatacccatgaagaaagccaggaatgatgagtatgaaaacctgtttaacatgattgtggaaatccctaggtggacaaatgccaagatggagatcgccacaaaagagcccatgaacccaatcaaacagtacgttaaggatggcaaactaagatacgttgccaatatcttcccttacaaggggtacatttggaactacggtacattgccgcaaacttgggaagacccacacgagaaggataagagtaccaattgcttcggggacaatgaccctatcgatgtgtgcgaaatcggtagcaaaatcctgtcatgcggagaggtgatccatgtgaagattctgggtatcctggcccttatagacgaaggcgaaactgattggaagttgatcgcaatcaacgccaacgaccctgaagctagtaagtttcacgatatcgatgacgtgaaaaaatttaaacctggctacctcgaggcaaccctgaactggttcagactttacaaggtgccagacggcaaacctgagaaccagttcgccttcaacggggagttcaaaaacaaggccttcgctcttgaagtcattaaatctacccaccagtgctggaaggccctgctgatgaaaaagtgcaatggtggagcaataaactgcacaaacgttcagatctctgatagcccttttcgctgcacccaggaagaggcgcgatctctggtggagtccgtaagctcatcccctaacaaagaaagcaacgaagaggaacaggtgtggcatttcttaggcaaatag

SEQ ID NO: 252391 - DNA, 1050 bp, Artificial Sequence
  derived and/or modified sequence
atgagtgctctacttaggctgttacgaacaggggctcctgccgctgcttgccttagacttgggacatccgctggaacgggttcgcgaagggccatggcactttaccatacggaagagcggggtcagccctgctcccagaactaccggctcttctttaagaatgtgaccggccattatatctcaccctttcatgacatccccctcaaagtgaactctaaagaggacaccgaggcccaaggcatatttatcgatctctctaaaatttgggagaacggcatccctatgaaaaaagcacggaacgacgaatacgagaacctgttcaacatgatcgttgaaatacccagatggacaaacgctaaaatggaaatcgcaactaaagaacccatgaatcccattaaacagtacgtcaaggacggcaagctccgatacgtagcaaacattttcccttacaagggctatatttggaactacgggacactgcctcagacatgggaggacccccacgagaaagataaatctactaactgcttcggtgacaatgatccgatagatgtctgtgaaattgggtccaaaatcctgtcatgtggagaggtgatccatgtcaaaattctgggaatactcgcattaattgatgaaggcgagacagattggaagctcattgccatcaatgcaaacgaccccgaagcctccaagtttcatgatatcgacgacgtgaaaaagtttaagccgggttatttagaagctacccttaactggttcagactgtacaaggtgcccgacggcaagcccgagaatcagttcgcttttaacggggagttcaaaaataaggcattcgccttagaggtcattaagtccacacaccaatgctggaaagccctgctgatgaaaaagtgtaacggaggagccattaattgtacaaatgtgcagatctctgactcccctttccggtgcactcaggaggaggctcgtagcttggtcgagtccgtgtctagtagccccaataaagagtcaaacgaggaggaacaggtttggcacttcctgggcaagtag

SEQ ID NO: 252392 - DNA, 951 bp, Artificial Sequence
  derived and/or modified sequence
atgtcggctctgctgagattgttgagaacgggcgcacctgccgctgcctgcctgcggctgggcacctctgcaggcaccgggagtaggagagctatggcgctgtaccacactgaagaacgcggtcaaccatgttcccagaactataggctttttttcaagaatgttaccgggcattatatcagtccatttcatgatattcctctgaaagtcaacagcaaagaagagaacggcattccgatgaaaaaggcgaggaacgatgaatacgagatagctacaaaggaacctatgaaccccatcaagcagtatgtcaaagacggcaagctacggtacgtggccaacattttcccttataaaggctacatatggaactatgggaccctcccacagacatgggaggatcctcacgagaaggacaagtcaacaaactgcttcggcgacaatgacccgattgacgtttgtgagattggcagcaagatcctatcttgcggagaagtgatacatgtgaagatccttggcatactagcgctaattgatgaaggggaaactgactggaagctaattgccattaacgcgaatgacccagaagcgtcaaaattccacgacatcgacgacgttaagaaatttaagcccggatacttggaggctacactcaattggtttcggctgtataaggtccccgatggcaaacctgaaaatcagtttgcctttaacggggagttcaagaacaaggcatttgcattggaggttatcaagtctacacatcaatgctggaaggcactgctgatgaaaaagtgcaacggtggggcaatcaattgcacgaacgtccagatttctgatagtcccttccgctgtacgcaagaagaggctcggtcgctcgtggaatccgttagctcgagccccaataaggagtctaatgaggaagaacaagtgtggcacttcttgggtaagtag

SEQ ID NO: 252393 - DNA, 839 bp, Artificial Sequence
  derived and/or modified sequence
accagtgcagggaccgggtcgcgccgtgctatggccctgtaccacactgaggagcgcggccagccctgctcgcagaattaccgcctcttctttagaaaatggcattcctatgaagaaagcacgaaatgatgaatatgagaatctgtttaatatgattgtagaaatacctcggtggacaaatgctaaaatggagattgccaccaaggagccaatgaatcccattaaacaatatgtaaaggatggaaagctacgctatgtggcgaatatcttcccttacaagggttatatatggaattatggtaccctccctcagacttgggaagatccccatgaaaaagataagagcacgaactgctttggagataatgatcctattgatgtttgcgaaataggctcaaagattctttcttgtggagaagttattcatgtgaagatccttggaattttggctcttattgatgaaggtgaaacagattggaaattaattgctatcaatgcgaatgatcctgaagcctcaaagtttcatggtctcagaaatattccagtatatacaataaatcgcatagtcatcctgccttcacttgacaggagccaaacttccagcctgtcctacctgcctgcacatcaggattcctgtgtgcccctggatgcagccctacatgttgttttgtatttttgttccctcttgggtctacaaagttacttatcttgtttttgagtctttttgatgttaatctgtttataaggtatctattttaggtaggttagcctgagggagtacattgaaacacgaatttagtgcccctcctgtcaaaaggtctctgttttttccgaagcag

SEQ ID NO: 252394 - DNA, 1684 bp, Artificial Sequence
  derived and/or modified sequence
ccgcgcgcacagcaggaccgtcattgacgccatgagcgcgctgctgcggctgctgcgcacgggtgccccagccgctgcgtgcctgcggttggggaccagtgcagggaccgggtcgcgccgtgctatggccctgtaccacactgaggagcgcggccagccctgctcgcagaattaccgcctcttctttaagaatgtaactggtcactacatttccccctttcatgatattcctctgaaggtgaactctaaagaggaaaatggcattcctatgaagaaagcacgaaatgatgaatatgagaatctgtttaatatgattgtagaaatacctcggtggacaaatgctaaaatggagattgccaccaaggagccaatgaatcccattaaacaatatgtaaaggatggaaagctacgctatgtggcgaatatcttcccttacaagggttatatatggaattatggtaccctccctcagacttgggaagatccccatgaaaaagataagagcacgaactgctttggagataatgatcctattgatgtttgcgaaataggctcaaagattctttcttgtggagaagttattcatgtgaagatccttggaattttggctcttattgatgaaggtgaaacagattggaaattaattgctatcaatgcgaatgatcctgaagcctcaaagtttcatgatattgatgatgttaagaagttcaaaccgggttacctggaagctactcttaattggtttagattatataaggtaccagatggaaaaccagaaaaccagtttgcttttaatggagaattcaaaaacaaggcttttgctcttgaagttattaaatccactcatcaatgttggaaagcattgcttatgaagaagtgtaatggaggagctataaattgcacaaacgtgcagatatctgatagccctttccgttgcactcaagaggaagcaagatcattagttgaatcggtatcatcttcaccaaataaagaaagtaatgaagaagagcaagtgtggcacttccttggcaagtgattgaaacatctgaaattctgctgtcaagattcccatctctaaggactccaagtgctagagacaagggggtctatgagcatttactgacttcctgttaaaacttcattttttcaaactttttgagctatgcaatatataaataaacagtaagaattttaaattactctcctttggacatttattgatataaaaagaagattttggccaggcacggtggctcatgcctgtaatttcagcactttgggaggccgaggtgggcagatcacaaggtcaggagttcaagaccagcctggccagtatgttgaaaccccatctctattaaaaatacaaaaattagccaggcgtggtggtgcatgcctgtagacccagctactcaggaggctgaggcagaagaactgcttgagcccaggaggcagaggttgcagtgagcagagattgtgccactgcactccagcctaggcgacagagagagactccgtctcaaaaaaaaaaaaaagattttgtttcatttcatagcacaaatttagaggcattgagttgaccatttctagtttctatacctgaaggaacccattgattttaccagtttttatttctgtagattggatgtaaaaatcacagattcaataaattaataaactttgtgta

SEQ ID NO: 252395 - DNA, 1221 bp, Artificial Sequence
  derived and/or modified sequence
ccgtcattgacgccatgagcgcgctgctgcggctgctgcgcacgggtgccccagccgctgcgtgcctgcggttggggaccagtgcagggaccgggtcgcgccgtgctatggccctgtaccacactgaggagcgcggccagccctgctcgcagaattaccgcctcttctttaagaatgtaactggtcactacatttccccctttcatgatattcctctgaaggtgaactctaaagaggacactgaggctcaaggcatttttatagacttgtctaagatctgggaaaatggcattcctatgaagaaagcacgaaatgatgaatatgagaatctgtttaatatgattgtagaaatacctcggtggacaaatgctaaaatggagattgccaccaaggagccaatgaatcccattaaacaatatgtaaaggatggaaagctacgctatgtggcgaatatcttcccttacaagggttatatatggaattatggtaccctccctcagacttgggaagatccccatgaaaaagataagagcacgaactgctttggagataatgatcctattgatgtttgcgaaataggctcaaagattctttcttgtggagaagttattcatgtgaagatccttggaattttggctcttattgatgaaggtgaaacagattggaaattaattgctatcaatgcgaatgatcctgaagcctcaaagtttcatgatattgatgatgttaagaagttcaaaccgggttacctggaagctactcttaattggtttagattatataaggtaccagatggaaaaccagaaaaccagtttgcttttaatggagaattcaaaaacaaggcttttgctcttgaagttattaaatccactcatcaatgttggaaagcattgcttatgaagaagtgtaatggaggagctataaattgcacaaacgtgcagatatctgatagccctttccgttgcactcaagaggaagcaagatcattagttgaatcggtatcatcttcaccaaataaagaaagtaatgaagaagagcaagtgtggcacttccttggcaagtgattgaaacatctgaaattctgctgtcaagattcccatctctaaggactccaagtgctagagacaagggggtctatgagcatttactgacttcctgttaaaacttcattttttcaaactttttgagctatgcaatatataaataaacagtaagaatttt

SEQ ID NO: 252396 - DNA, 1122 bp, Artificial Sequence
  derived and/or modified sequence
ccgtcattgacgccatgagcgcgctgctgcggctgctgcgcacgggtgccccagccgctgcgtgcctgcggttggggaccagtgcagggaccgggtcgcgccgtgctatggccctgtaccacactgaggagcgcggccagccctgctcgcagaattaccgcctcttctttaagaatgtaactggtcactacatttccccctttcatgatattcctctgaaggtgaactctaaagaggaaaatggcattcctatgaagaaagcacgaaatgatgaatatgagattgccaccaaggagccaatgaatcccattaaacaatatgtaaaggatggaaagctacgctatgtggcgaatatcttcccttacaagggttatatatggaattatggtaccctccctcagacttgggaagatccccatgaaaaagataagagcacgaactgctttggagataatgatcctattgatgtttgcgaaataggctcaaagattctttcttgtggagaagttattcatgtgaagatccttggaattttggctcttattgatgaaggtgaaacagattggaaattaattgctatcaatgcgaatgatcctgaagcctcaaagtttcatgatattgatgatgttaagaagttcaaaccgggttacctggaagctactcttaattggtttagattatataaggtaccagatggaaaaccagaaaaccagtttgcttttaatggagaattcaaaaacaaggcttttgctcttgaagttattaaatccactcatcaatgttggaaagcattgcttatgaagaagtgtaatggaggagctataaattgcacaaacgtgcagatatctgatagccctttccgttgcactcaagaggaagcaagatcattagttgaatcggtatcatcttcaccaaataaagaaagtaatgaagaagagcaagtgtggcacttccttggcaagtgattgaaacatctgaaattctgctgtcaagattcccatctctaaggactccaagtgctagagacaagggggtctatgagcatttactgacttcctgttaaaacttcattttttcaaactttttgagctatgcaatatataaataaacagtaagaatttt

SEQ ID NO: 252397 - DNA, 609 bp, Artificial Sequence
  derived and/or modified sequence
atgaagaaggccagaaacgacgagtacgagaacctgttcaacatgatcgtggagatccccagatggaccaacgccaagatggagatcgccaccaaggagcccatgaaccccatcaagcagtacgtgaaggacggcaagctgagatacgtggccaacatcttcccctacaagggctacatctggaactacggcaccctgccccagacctgggaggacccccacgagaaggacaagagcaccaactgcttcggcgacaacgaccccatcgacgtgtgcgagatcggcagcaagatcctgagctgcggcgaggtgatccacgtgaagatcctgggcatcctggccctgatcgacgagggcgagaccgactggaagctgatcgccatcaacgccaacgaccccgaggccagcaagttccacggcctgagaaacatccccgtgtacaccatcaacagaatcgtgatcctgcccagcctggacagaagccagaccagcagcctgagctacctgcccgcccaccaggacagctgcgtgcccctggacgccgccctgcacgtggtgctgtacttctgcagcctgctgggcctgcagagctacctgagctgcttctag

SEQ ID NO: 252398 - DNA, 1005 bp, Artificial Sequence
  derived and/or modified sequence
atgagcgccctgctgagactgctgagaaccggcgcccccgccgccgcctgcctgagactgggcaccagcgccggcaccggcagcagaagagccatggccctgtaccacaccgaggagagaggccagccctgcagccagaactacagactgttcttcaagaacgtgaccggccactacatcagccccttccacgacatccccctgaaggtgaacagcaaggaggagaacggcatccccatgaagaaggccagaaacgacgagtacgagaacctgttcaacatgatcgtggagatccccagatggaccaacgccaagatggagatcgccaccaaggagcccatgaaccccatcaagcagtacgtgaaggacggcaagctgagatacgtggccaacatcttcccctacaagggctacatctggaactacggcaccctgccccagacctgggaggacccccacgagaaggacaagagcaccaactgcttcggcgacaacgaccccatcgacgtgtgcgagatcggcagcaagatcctgagctgcggcgaggtgatccacgtgaagatcctgggcatcctggccctgatcgacgagggcgagaccgactggaagctgatcgccatcaacgccaacgaccccgaggccagcaagttccacgacatcgacgacgtgaagaagttcaagcccggctacctggaggccaccctgaactggttcagactgtacaaggtgcccgacggcaagcccgagaaccagttcgccttcaacggcgagttcaagaacaaggccttcgccctggaggtgatcaagagcacccaccagtgctggaaggccctgctgatgaagaagtgcaacggcggcgccatcaactgcaccaacgtgcagatcagcgacagccccttcagatgcacccaggaggaggccagaagcctggtggagagcgtgagcagcagccccaacaaggagagcaacgaggaggagcaggtgtggcacttcctgggcaagtag

SEQ ID NO: 252399 - DNA, 1050 bp, Artificial Sequence
  derived and/or modified sequence
atgagcgccctgctgagactgctgagaaccggcgcccccgccgccgcctgcctgagactgggcaccagcgccggcaccggcagcagaagagccatggccctgtaccacaccgaggagagaggccagccctgcagccagaactacagactgttcttcaagaacgtgaccggccactacatcagccccttccacgacatccccctgaaggtgaacagcaaggaggacaccgaggcccagggcatcttcatcgacctgagcaagatctgggagaacggcatccccatgaagaaggccagaaacgacgagtacgagaacctgttcaacatgatcgtggagatccccagatggaccaacgccaagatggagatcgccaccaaggagcccatgaaccccatcaagcagtacgtgaaggacggcaagctgagatacgtggccaacatcttcccctacaagggctacatctggaactacggcaccctgccccagacctgggaggacccccacgagaaggacaagagcaccaactgcttcggcgacaacgaccccatcgacgtgtgcgagatcggcagcaagatcctgagctgcggcgaggtgatccacgtgaagatcctgggcatcctggccctgatcgacgagggcgagaccgactggaagctgatcgccatcaacgccaacgaccccgaggccagcaagttccacgacatcgacgacgtgaagaagttcaagcccggctacctggaggccaccctgaactggttcagactgtacaaggtgcccgacggcaagcccgagaaccagttcgccttcaacggcgagttcaagaacaaggccttcgccctggaggtgatcaagagcacccaccagtgctggaaggccctgctgatgaagaagtgcaacggcggcgccatcaactgcaccaacgtgcagatcagcgacagccccttcagatgcacccaggaggaggccagaagcctggtggagagcgtgagcagcagccccaacaaggagagcaacgaggaggagcaggtgtggcacttcctgggcaagtag

SEQ ID NO: 252400 - DNA, 951 bp, Artificial Sequence
  derived and/or modified sequence
atgagcgccctgctgagactgctgagaaccggcgcccccgccgccgcctgcctgagactgggcaccagcgccggcaccggcagcagaagagccatggccctgtaccacaccgaggagagaggccagccctgcagccagaactacagactgttcttcaagaacgtgaccggccactacatcagccccttccacgacatccccctgaaggtgaacagcaaggaggagaacggcatccccatgaagaaggccagaaacgacgagtacgagatcgccaccaaggagcccatgaaccccatcaagcagtacgtgaaggacggcaagctgagatacgtggccaacatcttcccctacaagggctacatctggaactacggcaccctgccccagacctgggaggacccccacgagaaggacaagagcaccaactgcttcggcgacaacgaccccatcgacgtgtgcgagatcggcagcaagatcctgagctgcggcgaggtgatccacgtgaagatcctgggcatcctggccctgatcgacgagggcgagaccgactggaagctgatcgccatcaacgccaacgaccccgaggccagcaagttccacgacatcgacgacgtgaagaagttcaagcccggctacctggaggccaccctgaactggttcagactgtacaaggtgcccgacggcaagcccgagaaccagttcgccttcaacggcgagttcaagaacaaggccttcgccctggaggtgatcaagagcacccaccagtgctggaaggccctgctgatgaagaagtgcaacggcggcgccatcaactgcaccaacgtgcagatcagcgacagccccttcagatgcacccaggaggaggccagaagcctggtggagagcgtgagcagcagccccaacaaggagagcaacgaggaggagcaggtgtggcacttcctgggcaagtag

SEQ ID NO: 252401 - protein, 61 aa, Artificial Sequence
  derived and/or modified sequence
MDPNCSCTTGVSCACTGSCTCKECKCTSCKKSCCSCCPVGCAKCAHGCVCKGTLENCSCCA

SEQ ID NO: 252402 - DNA, 186 bp, Artificial Sequence
  derived and/or modified sequence
atggaccccaactgcagctgcaccaccggcgtgagctgcgcctgcaccggcagctgcacctgcaaggagtgcaagtgcaccagctgcaagaagagctgctgcagctgctgccccgtgggctgcgccaagtgcgcccacggctgcgtgtgcaagggcaccctggagaactgcagctgctgcgcctag

SEQ ID NO: 252403 - DNA, 186 bp, Artificial Sequence
  derived and/or modified sequence
atggatcccaattgttcctgcacgacaggagtgtcctgtgcatgtaccgggagttgtacgtgtaaggagtgtaagtgtacctcctgcaagaagagttgttgctcttgctgccctgtgggctgcgcgaaatgcgctcatgggtgcgtttgcaaggggactctggaaaattgttcctgttgtgcctag

SEQ ID NO: 252404 - DNA, 186 bp, Artificial Sequence
  derived and/or modified sequence
atggaccccaactgcagctgcaccactggagtgtcctgtgcctgcaccggcagctgcacctgcaaggagtgcaagtgcaccagctgcaagaagagctgctgcagctgctgccctgtgggctgtgccaagtgtgcccacggctgtgtgtgcaagggcaccctggagaactgcagctgctgtgcctag

SEQ ID NO: 252405 - DNA, 186 bp, Artificial Sequence
  derived and/or modified sequence
atggaccccaactgcagctgcaccaccggcgtgagctgcgcctgcacaggttcttgcacctgcaaagagtgcaaatgcacaagttgtaaaaaaagctgttgttcctgctgtcccgtggggtgtgcaaaatgcgcccacgggtgtgtctgtaaaggtaccctggagaattgttcctgctgtgcctag

SEQ ID NO: 252406 - DNA, 439 bp, Artificial Sequence
  derived and/or modified sequence
ccctgagtagaaaagcagccgcaggctgtggcgctccaccacgccgtccgggtgggcctagcagtcgctccatttatcgcttgagatctccagccttaccgcggctcgaaatggaccccaactgctcctgcaccactggtgtctcctgcgcctgcaccggctcctgcacgtgcaaagagtgcaaatgcacctcctgcaagaagagctgctgctcctgctgccccgtgggctgtgccaagtgtgcccacggctgtgtctgcaaagggacgttggagaactgcagctgctgtgcctgatgtgggaacagctcttctcccagatgttaatagaacaagctgcacaacctggattttttttcaatacgatactgagccatttgctgcatttctttttatattaaatatgtgagtgacaataaaacaattttgacttgaatctt

SEQ ID NO: 252407 - DNA, 186 bp, Artificial Sequence
  derived and/or modified sequence
atggatcctaattgcagctgcactaccggggtgagctgcgcatgtaccgggtcttgtacatgtaaagagtgcaaatgtaccagctgcaaaaagtcttgctgttcctgctgtccagtggggtgcgcaaagtgcgcacatggctgcgtctgcaaggggaccctggagaactgctcttgttgtgcttag

SEQ ID NO: 252408 - protein, 366 aa, Artificial Sequence
  derived and/or modified sequence
MALTVDVAGPAPWGFRITGGRDFHTPIMVTKVAERGKAKDADLRPGDIIVAINGESAEGMLHAEAQSKIRQSPSPLRLQLDRSQATSPGQTNGDSSLEVLATRFQGSVRTYTESQSSLRSSYSSPTSLSPRAGSPFSPPPSSSSLTGEAAISRSFQSLACSPGLPAADRLSYSGRPGSRQAGLGRAGDSAVLVLPPSPGPRSSRPSMDSEGGSLLLDEDSEVFKMLQENREGRAAPRQSSSFRLLQEALEAEERGGTPAFLPSSLSPQSSLPASRALATPPKLHTCEKCSTSIANQAVRIQEGRYRHPGCYTCADCGLNLKMRGHFWEDACAMEGMRLSLEALEGMVEGAKRRDRRKTRRPIQPSW

SEQ ID NO: 252409 - DNA, 423 bp, Artificial Sequence
  derived and/or modified sequence
atgaagggccaggagggcatccggggcgagggctgcaccgaccccgagatcaaggctagcccacagatgtgggccgcacggttccgcggaatgcgcagccggttcagtccccttttctcgcaggcaactgaaatgggacctagggttagcgccggatggtgtctcagcgggggtggtaggaaggttagctccctgcagggcgatttccctcctggaggcttttgggcacttagtaatgacagtgccctgtcgctaccgccactgtctctgcctcaccctcaccctctgaggccgccgggactgggagtcaatgagtttacgcagggcttacaccctcccctccacccagcggctagcgtttttcagacttgtttctatcgcaaaccacattactgcagtacactgcggccgacaaccacctag

SEQ ID NO: 252410 - DNA, 1101 bp, Artificial Sequence
  derived and/or modified sequence
atggccctcaccgtggacgtcgccgggccagctccgtggggctttaggataaccggggggcgcgacttccacaccccaattatggtgactaaggtggctgagcgggggaaggcgaaagatgctgatctgcgccctggggatataatcgtggccattaacggtgagagtgcggagggtatgctccacgcggaggcacagtctaaaattaggcagtctccttctccactgaggcttcaactggacagaagtcaagcgacatctcccggacaaacaaatggggattccagtttggaggtgctggcgacaaggtttcaagggtcagtacgcacatatacagagagccagtctagtctgagatcaagctatagcagtccaacctccctcagccctcgagctggttcgccattctcgccacccccgtcatcaagtagcttgacaggcgaagccgctatatctaggagctttcaatccctagcatgtagccccggcttaccagccgctgaccggctttcctacagcggccgcccggggagccggcaggccggactgggcagggctggggactcggcggtactggtgctcccaccaagccctggcccacgctcctccaggcctagtatggacagtgaaggtgggtcactcttgttagatgaagacagtgaggtctttaaaatgttgcaagagaacagagaggggcgggccgcccccagacaaagctcatcttttcggctactgcaggaagcacttgaggctgaagagcgaggtggcacccctgctttccttcctagcagcctctccccacaatccagcctgcctgccagcagggccctggccacacctcctaagctgcatacttgcgagaaatgttccacttctatcgccaatcaagccgtgagaattcaagaaggccgttaccggcatcctgggtgctacacatgtgcagactgtggcctgaacctgaaaatgcggggtcacttctgggaggacgcatgtgccatggagggcatgagactgtcactggaggccctcgagggtatggtcgaaggcgccaaacgccgagacaggcggaaaacgagaaggcctattcagccttcatggtag

SEQ ID NO: 252411 - DNA, 1101 bp, Artificial Sequence
  derived and/or modified sequence
atggccctgactgtggatgtggccggccctgccccctggggcttccgcatcaccggcggccgggacttccacacccccatcatggtgaccaaggtggccgagcggggcaaggccaaggatgctgacctgcggcctggggacatcatcgtggccatcaatggagagagcgctgagggcatgctgcatgctgaggcccagagcaagatccggcagagccccagccccctgcggctgcagctggacaggagccaggccaccagccctggccagaccaacggggacagcagcctggaggtgctggccacccgcttccagggctctgtgaggacctacacagagagccagagcagcctgcggagcagctacagcagccccaccagcctgagcccccgggccggcagccccttcagccccccacccagcagcagcagcctgaccggggaggccgccatcagccgctccttccagagcctggcctgcagccctggcctgcctgctgctgaccggctgagctacagcggccggcccggcagccggcaggccggcctgggccgggccggggacagcgctgtgctggtgctgccccccagccctggccccaggagcagccggcccagcatggattctgagggcggcagcctgctgctggatgaggacagcgaggtgttcaagatgctgcaggagaaccgggagggccgggccgccccccggcagagcagcagcttccggctgctgcaggaggccctggaggccgaggagcggggcggcaccccagccttcctgcccagcagcctgagcccccagagcagcctgcctgccagccgggccctggccaccccacccaagctgcacacctgtgagaagtgcagcaccagcatcgccaaccaggccgtgcgcatccaggagggccgctaccgccaccctggctgctacacctgtgccgactgtggcctgaacctgaagatgaggggccacttctgggaggatgcctgtgccatggagggcatgaggctgagcctggaggccctggagggcatggtggagggcgccaagaggcgggacaggaggaagacccggcggcccatccagcccagctggtag

SEQ ID NO: 252412 - DNA, 1101 bp, Artificial Sequence
  derived and/or modified sequence
atggccctgaccgtggacgtggccggccccgccccctggggcttccggataacaggcggccgggattttcataccccaatcatggtgaccaaagtggcagaacgaggcaaagccaaggacgctgatttgagaccaggagacatcatcgtagcaatcaacggagaaagcgcagaagggatgctgcacgctgaggcacagagcaagatccggcagtcacccagcccacttcgactgcaattggaccggagtcaggccacctccccaggacagaccaatggggacagcagcctggaggtgcttgccacccgcttccagggatccgtcaggacctacactgagtcgcaatcaagcctgagaagcagttactcctcacctacatcgctctctcctcgcgccggctctcctttttcccccccacccagtagcagctccctcaccggagaggcagcgatttcaagaagcttccagtccctagcatgtagtcccggtctgcctgctgccgaccggctgagctactccggccggccgggaagcaggcaagctggcctggggcgcgccggcgactccgccgtgcttgttctgcctccatcccccggaccacgcagcagccggccttctatggattctgaaggagggtctctgctgctcgacgaggatagcgaggtattcaagatgctgcaggaaaatcgcgagggcagggctgcaccccggcagagcagttctttccgcctgctgcaagaggccctggaagctgaagagagaggggggaccccagcttttcttccttcatcgctgtccccgcagagctcactcccagcctcccgggcactggccactcctccaaagctgcacacctgtgaaaaatgttctacctctatagccaatcaggcagtgcgaatccaggaaggtagatacaggcatcccgggtgctacacatgtgcagattgcgggctgaatcttaagatgagaggccacttttgggaagatgcatgcgctatggagggcatgcgcctcagccttgaggctctggagggcatggtggagggcgcgaaacgtagagataggagaaaaacaagacggccaatccagccttcatggtag

SEQ ID NO: 252413 - DNA, 4592 bp, Artificial Sequence
  derived and/or modified sequence
ccgggagctgtggtgccctctccttctccctttggctcctctcctgctgccttacagtgcccccagagccggctaggggcatggacttcacctcctggtcctctcttcctcaggtatggcgttgacggtggatgtggccgggccagcgccctggggcttccgtatcacagggggcagggatttccacacgcccatcatggtgactaaggtggccgagcggggcaaagccaaggacgctgacctccggcctggagacataatcgtggccatcaacggggaaagcgcggagggcatgctgcatgccgaggcccagagcaagatccgccagagcccctcgcccctgcggctgcagctggaccggtctcaggctacgtctccagggcagaccaatggggacagctccttggaagtgctggcgactcgcttccagggctccgtgaggacatacactgagagtcagtcctccttaaggtcctcctactccagcccaacctccctcagcccgagggccggcagccccttctcaccaccaccctctagcagctccctcactggagaggcagccatcagccgcagcttccagagtctggcatgttccccgggcctccccgctgctgaccgcctgtcctactcaggccgccctggaagccgacaggccggcctcggccgcgctggcgactcggcggtgctggtgctgccgccttccccgggccctcgttcctccaggcccagcatggactcggaagggggaagcctcctcctggacgaggactcggaagtcttcaagatgctgcaggaaaatcgcgagggacgggcggccccccgacagtccagctcctttcggctcttgcaggaagccctggaggctgaggagagaggtggcacgccagccttcttgcccagctcactgagcccccagtcctccctgcccgcctccagggccctggccacccctcccaagctccacacttgtgagaagtgcagtaccagcatcgcgaaccaggctgtgcgcatccaggagggccggtaccgccaccccggctgctacacctgtgccgactgtgggctgaacctgaagatgcgcgggcacttctgggaggacgcttgtgctatggagggaatgagattgtcactggaagctttggaggggatggtggagggcgccaagcggagggacaggaggaagaccaggagacccatccagccaagctggtgagacaacctctgatcctgaggaccggccgcccaccaagggttgggcccccggggccaggttgatctaccgacaccttccacttctttcctgggagagactgctggcttcattggtgattgatttggaggggggaaaaagggcagggtggctcaggctttaggcccaggtactggggaggcctgaggagccctcctggagctcaggaggccgaggctgccttaagctgtgatcatgccactgcattccagcctgggagagagagaggacctgtctgttgaaaaaaacacaaaaacaaatgaatgcatgtggccagtgccaggtgagctgccctgggggttcactggagttgaggcaggggacagtagtctcccctgccagcctaggattttgggcgtcattcacccactacccctagtgctagtcccagaggatgctgcggagggggcagcctcagctctcttttcagagaagatcaaagctgggcttcccagggtgcctggctggtccctgccggcagctttgtgctctccggctctttgtgaaaggaatcttggcgcagatgtttgtgttgcctcctcaggcacctgtagatataatttacaccatgatatcattgtctcaccttttgcctgggtggctgcctgagaaaggtctttctttttatagaaaagatcaaggctgtctggcgcgggactccatgagccccaggcgctggtcagaaacggggtagtctctttggcgccacctagtgtccagtttggcccatggcggggcccattcacggggcaacactgggcttctgggcacagcgggaatacagaaagatacagcactcctcatgccttcctggaggtagaaggccagtggcagcgactgagctggcatgaatgaataagaggatgtggcactgagcgccaagggctaccttggaacgcaccgaggagcgtcccgtgagttcaaagcagtggccgtgatgcaaaaggagggctgggtcttggagacgtggagaagaggaatgctgagtgatggggtggctgctggggggatgcttagctcagagcagtggctgatggggacactgagataagatcggaggggagctgtcaatgccagaagtggtttgaacttccccttgaggctctagggacattttgttttgagacatggtcttgctctattgcccaggctggagtgcagtggtacaatcttagctcactgcagcctccacctcccaggctcaagagatcctcccacagcctcccaggtagctgggactacaggcgtgcaccaccacacccagctaatttttaagtttttttttttttttaagagatggggtctcactatgttgcccaggctggtctcgaacttcgggccccaagccatcctcccaccttggctttccaaagtgttgggattacaagcgtgagctaaccttgcccagcctctgggaacacttggaaggttttaagcagagaagtgacaggttggaaaagatggtttggattattgatatggacagattcccacctgtatgtagcacgccatgctgggccagcagtgtcataggagtggagggggataagtggggactggggacatgtgaaatgatgggcattccagtgaggcatcgaatgccttctgagggctttgtaggttccagctcaaatccccctctggctcttgttctttggtgtggcagccatctctcctcccaggggtcctgagggtttcagcaccagggttctctgcagccacacaatcagcccggctcgggagcaaactcccctggaagaacggagttatgagttggtcagcagaggaggctggggacaggcagtttttggtcttttacctctgatcttgtccccaacctaagccagctagctgcgtgctcccactccctctgccgcacgccgcccgtctatgttcccggactttgtccagtgcagtgccctcttcccttcctgcactgaggagattaactgaagtgacagattagagttagaagtggcccaaaggagcatctggtacaaccccctttggttagagaagggaaagtgacttttccaaagctgcacagctagacagtcataatggctaagctctgggggtgcttttgatgtgctagggatacttccaatgctttaactcacttaatcctcacaacccgagataggtactgttaccatcctctctgcagacgaggaaaccgaggaccaggaggttcagtaaatggtccaagtactcctagctagtaaggaatggatctacagcctgcctcccaggtttctggcttgtggggggcagagtttgtccctctgtcatcagaggcagccttccaggcacagctctggtcacctctggtcacaactggaggtcaccacagccctccccagcgctctgtaggctctcagctttgtgcttcctcccacgggtactagctccagctgagcttgcaggaaacccacttcctgaagccaggacttccccatgggaagtgcaggggccactgggcagcctgagggctgaccctgctcaggacactgtctgtctcaggaactcatggcagtggtttaccttgtcaggagtgcatggacgggctgcccctcccattccttcaagcatcactcagagagccctggcctggctctaggcttgggactgcggctgccacaggaagggggcatccccctactttgggtgttgggtcagatcctgcccccgtgcccgccagggctcaggttcctctgagctggtcctgggccaggacgcatctgcatggcggtggtggggaggaggggtgcgccatggcctggaggggagtgtgtgttggggtgtgtgtgtggaggttcttttgagtcacacacaaagcattgtgctgagacactgcattcctgctggctgggcttcctgtttccagatgcattcctgtcccagagtcaccacagagactgtttggaatcccgccccacattctccaaattcagggcgcgatctggcaaaggctccctcccccaccctcttactttggagggagtctgggctccctcctacccagggagggctggcagggctctggcacggccggggtgtgattccacacatcttcttggtcttgcataaggcagttcctggagacccagcactctggttctctctctgcctgtgagaagcggaatgggtactgtctaggaggactgggcagggtgggggcaacccagaggacccatggctagcagggaagggcctgggcttgaatgtgactctgttgagacatggccagcaattctggcacttggctgtcattcggctggcctgcgcagagattggctgtgggcctcagtttccccattttataaagttttaaaatctg

SEQ ID NO: 252414 - DNA, 1101 bp, Artificial Sequence
  derived and/or modified sequence
atggcactcactgtagacgtagccggtcctgcaccctgggggtttaggattacaggcggacgcgactttcatactccaatcatggtgactaaggtggcagagcgagggaaagccaaggacgcagacctgaggccaggcgacattatcgtggcgatcaacggcgagtcagccgagggcatgttgcacgcagaagcccagtctaagattcgccaatcacccagccctctcaggctgcagctcgataggagccaggccacctctcctggccagacaaacggcgactcaagtctggaggtcctggcgacccgctttcagggctctgttcgcacatacacagaaagtcagtctagcctccggagttcctactcctcacctacttccttgtcacccagggctggatctccattcagcccacccccaagcagttctagcctcacaggtgaagccgcaatctctcgatcttttcagagcttggcttgttcccctgggctgcctgcagcagatcggctctcttattctggtcgcccaggcagcaggcaggctggtctgggccgtgccggagattcagctgtgttggtgttgcctccctctcccggacctcggtctagccgcccttctatggatagtgaaggcggatcgttgctgttggacgaggactccgaggtgtttaagatgctccaagaaaaccgggagggacgcgcagcacccaggcagtcttcttcgttcagactgctgcaagaagccctggaagcagaagagagaggaggaactcctgcgttcctcccatcttcattatctcctcagtcctccctgccagcgtctcgcgcactcgccacaccgcctaaattacatacgtgtgagaagtgcagcacatccatcgctaatcaggccgtcaggattcaagaaggaaggtatcgtcacccgggatgttacacatgcgctgactgcggattgaatctcaaaatgcggggacacttttgggaggacgcttgcgctatggaaggcatgcggctgtcacttgaggcactggaaggcatggtagagggcgctaaacgccgagataggaggaaaacaagacgaccgatccagccttcatggtag

SEQ ID NO: 252415 - DNA, 1101 bp, Artificial Sequence
  derived and/or modified sequence
atggccctgaccgtggacgtggccggccccgccccctggggcttcagaatcaccggcggcagagacttccacacccccatcatggtgaccaaggtggccgagagaggcaaggccaaggacgccgacctgagacccggcgacatcatcgtggccatcaacggcgagagcgccgagggcatgctgcacgccgaggcccagagcaagatcagacagagccccagccccctgagactgcagctggacagaagccaggccaccagccccggccagaccaacggcgacagcagcctggaggtgctggccaccagattccagggcagcgtgagaacctacaccgagagccagagcagcctgagaagcagctacagcagccccaccagcctgagccccagagccggcagccccttcagccccccccccagcagcagcagcctgaccggcgaggccgccatcagcagaagcttccagagcctggcctgcagccccggcctgcccgccgccgacagactgagctacagcggcagacccggcagcagacaggccggcctgggcagagccggcgacagcgccgtgctggtgctgccccccagccccggccccagaagcagcagacccagcatggacagcgagggcggcagcctgctgctggacgaggacagcgaggtgttcaagatgctgcaggagaacagagagggcagagccgcccccagacagagcagcagcttcagactgctgcaggaggccctggaggccgaggagagaggcggcacccccgccttcctgcccagcagcctgagcccccagagcagcctgcccgccagcagagccctggccaccccccccaagctgcacacctgcgagaagtgcagcaccagcatcgccaaccaggccgtgagaatccaggagggcagatacagacaccccggctgctacacctgcgccgactgcggcctgaacctgaagatgagaggccacttctgggaggacgcctgcgccatggagggcatgagactgagcctggaggccctggagggcatggtggagggcgccaagagaagagacagaagaaagaccagaagacccatccagcccagctggtag

SEQ ID NO: 252416 - protein, 447 aa, Artificial Sequence
  derived and/or modified sequence
MELLKLNRSVQGTGPGPGASLCRPGAPLLNSSSVGNLSCEPPRIRGAGTRELELAIRITLYAVIFLMSVGGNMLIIVVLGLSRRLRTVTNAFLLSLAVSDLLLAVACMPFTLLPNLMGTFIFGTVICKAVSYLMGVSVSVSTLSLVAIALERYSAICRPLQARVWQTRSHAARVIVATWLLSGLLMVPYPVYTVVQPVGPRVLQCVHRWPSARVRQTWSVLLLLLLFFIPGVVMAVAYGLISRELYLGLRFDGDSDSDSQSRVRNQGGLPGAVHQNGRCRPETGAVGEDSDGCYVQLPRSRPALELTALTAPGPGSGSRPTQAKLLAKKRVVRMLLVIVVLFFLCWLPVYSANTWRAFDGPGAHRALSGAPISFIHLLSYASACVNPLVYCFMHRRFRQACLETCARCCPRPPRARPRALPDEDPPTPSIASLSRLSYTTISTLGPG

SEQ ID NO: 252417 - DNA, 1344 bp, Artificial Sequence
  derived and/or modified sequence
atggaactgttgaagctgaataggagtgttcagggcactggccccggccctggggcgagcctatgccgcccgggggctccactgctgaattccagtagcgttggaaatctaagttgcgagcctcctcggatccgaggagcgggtactcgcgagctcgaactggccatccgtattacgttgtatgccgttatctttctcatgtctgtcggtggcaacatgctaattattgtggtgctcggcctgagccgccggctgcgtacagtcactaacgcttttctgctgtcattggccgttagtgatctgctgcttgccgtcgcatgtatgccctttacactgctgcccaaccttatgggaacattcatcttcgggacggtgatatgtaaagcggtgtcttatctgatgggagtctcagtgtcagtatctacgctctcattggtggccatcgccctcgagagatattccgcaatctgtaggccacttcaggcccgggtgtggcagaccaggtcacacgctgccagggtaatcgttgctacctggctgttgtccggtctgctcatggtcccttatccggtatacactgtggtccagccggtaggacccagagtgctgcagtgcgttcatagatggccctctgctcgcgtgagacagacctggagtgtgctgctgctgctgcttctcttctttatccctggtgtcgttatggcagttgcgtatggccttattagcagggagctgtatctaggtttgaggttcgatggcgactccgacagtgactcgcagagcagggtcagaaaccaaggagggctaccaggcgctgttcaccaaaacggccgatgccggcccgagaccggggccgtgggtgaggatagtgatggctgctacgtccagctgcccaggtcacggccagctctggagctgacagcccttacagcgccgggccctgggagcgggtccaggcctacccaggcgaagcttttggcaaaaaaacgcgtggtgcgcatgctgctcgtgatagtcgtcctgtttttcttgtgttggcttcccgtctattcagcaaacacttggagagcattcgacggccctggagcccaccgggccctctcaggggcccctatctccttcatccatcttctgtcatacgcctccgcctgcgtcaatccactagtgtattgttttatgcacagaagatttcggcaggcatgtctagagacctgcgctagatgttgccctcgtcctcctcgagctagaccccgtgcccttccggacgaagatccccctacaccctccatagcttctctgtccagactgtcttacacaactatcagcaccctaggtccaggatag

SEQ ID NO: 252418 - DNA, 1344 bp, Artificial Sequence
  derived and/or modified sequence
atggagctgctgaagctgaacagatctgtgcagggcactggacctggccctggggccagcctgtgcaggcctggggcccccctgctgaacagcagctctgtgggcaacctgagctgtgagcccccacgcatcagaggagctggcacccgggagctggagctggccatccgcatcaccctgtatgctgtgatcttcctgatgtctgtgggcggcaacatgctgatcatcgtggtgctgggcctgagccggcggctgaggacagtgaccaatgccttcctgctgagcctggccgtgtctgacctgctgctggccgtggcctgcatgcccttcaccctgctgcccaacctgatgggcaccttcatcttcggcaccgtcatctgcaaggctgtgtcctacctgatgggcgtgtctgtgtctgtgtccaccctgagcctggtggccatcgccctggagcgctacagcgccatctgccggcccctgcaggcccgggtgtggcagaccaggagccatgctgcccgggtgattgtggccacctggctgctgagcggcctgctgatggtgccctaccctgtgtacacagtggtgcagcctgtgggcccccgggtgctgcagtgtgtgcaccgctggcccagcgcccgggtgcggcagacctggagcgtgctgctgctgctgctgctcttcttcatccctggggtggtgatggctgtggcctacggcctcatcagccgggagctgtacctgggcctgcgctttgatggagacagcgacagcgacagccagagccgggtgaggaaccagggcggcctgcccggggctgtgcaccagaatggccgctgcaggcctgagactggagctgtgggggaggacagtgatggctgctacgtgcagctgcccaggagcaggcctgccctggagctgacagccctgacagcccctggccctggcagcggcagccggcccacccaggccaagctgctggccaagaagagggtggtgaggatgctgctggtgattgtggtgctcttcttcctgtgctggctgcctgtgtacagcgccaacacctggagggcctttgatggccctggggcccaccgggccctgagcggggcccccatctccttcatccacctgctgtcctatgccagcgcctgtgtgaaccccctggtgtactgcttcatgcaccggcgcttccggcaggcctgcctggagacctgtgcccgctgctgcccccggcccccccgggcccggccccgggccctgcctgatgaagatcctcccacccccagcatcgccagcctgagccggctgagctacaccaccatcagcaccctgggccctggatag

SEQ ID NO: 252419 - DNA, 1344 bp, Artificial Sequence
  derived and/or modified sequence
atggagctgctgaagctgaaccggagcgtgcagggcaccggccccggtcccggagccagtttgtgcaggcccggagcaccattgctgaactctagcagcgtaggcaacctgagctgtgagccaccgcggatccgaggggcagggacaagagaactggagcttgccatccgaattaccctgtatgccgtgatatttctcatgtcagtgggtggcaacatgctcatcattgtggtgctcgggctgagccggagattacgcaccgtaacgaatgcatttctcctctcactggctgtgtctgacctgctgctcgccgtggcatgcatgcctttcacacttctgcccaacttgatggggacattcattttcggcacggtgatctgcaaagccgttagctacctgatgggggtatcagtgtccgtgtccaccctgagcttggtggccatcgcactggagcgttattcagcgatctgtcggcctctgcaggcccgggtatggcaaacccgtagccacgcggccagggttatcgtggccacatggctgctgtcaggtttgctgatggtcccctacccggtgtacactgtggtgcagcctgtcgggcctcgagtactgcagtgcgtccacaggtggccaagcgccagagtgcgacaaacgtggagcgtcctgttattgctgcttttgttcttcattccaggtgtcgtcatggccgtggcatatgggttaatttctcgagaactgtacctcggcctgagatttgacggtgattcggattcggactcccagagcagagtgaggaaccaaggtggtctccctggcgctgttcatcagaatggacggtgtcggcccgaaacgggcgctgtaggtgaggattctgatgggtgctatgtgcagctacctcggtctagacccgctttggagctaactgctctgactgctcctgggcccggcagtgggtcgagaccgacgcaggcaaaactgctagctaagaagcgggtggttagaatgttgttagtcatagtggtgctcttttttctgtgctggttgccagtgtattcagccaatacttggcgcgcatttgacggaccaggggctcacagggccctaagtggagccccaatatcgtttatccacctcctgtcatatgcttcagcgtgtgtaaacccgctggtctattgtttcatgcaccgtcgttttcggcaggcctgcctggagacctgtgccagatgctgcccacgaccccctagagcccgtcccagggccctgccagacgaggacccccctacaccatctatagccagtctctcacggttgtcatacactactatttcaaccctggggccgggttag

SEQ ID NO: 252420 - DNA, 1344 bp, Artificial Sequence
  derived and/or modified sequence
atggaattgcttaaattaaaccgtagcgtccagggtaccggcccaggaccaggggcatccctctgtcgacccggagccccactgctcaattcaagctcggtgggaaatctctcttgtgaaccccctaggatccggggagcagggacaagggagcttgagttggccatcagaatcacgctttatgccgtcatttttttgatgtctgttggaggtaatatgctgattatcgtggtgcttgggctttccagacgcctgagaactgtcaccaatgcctttctgctgtctcttgctgtgagcgaccttctgttggcagtggcttgtatgccgttcaccctgctgccaaacctgatggggacgtttattttcggtaccgtcatttgcaaagctgtgtcttacctcatgggagtgagcgtgtccgtctcaacgctctcgctcgtcgccatagccctggagcgatacagtgccatttgcaggcccctgcaggcgagggtctggcagacgaggagccacgctgctcgcgtaattgtggccacttggctcttgtctggtctgctgatggtgccgtaccccgtctacacagtagttcaaccagtcggaccccgagtcctgcaatgtgtacatagatggccctcagctcgggttcgccaaacctggtccgtgttgctactgctgctgctgttcttcatcccgggtgtggtgatggcagttgcctatggcctgatctcaagggagctgtatctaggtttgaggtttgatggagactctgactccgacagtcaatcccgcgtgagaaaccagggcggtctccccggagcggtccaccaaaacggtcgctgccgcccagagaccggggctgtgggagaagatagtgacggctgttacgtccagctccccagatcccgcccagctcttgaattgaccgccctcaccgcccctggaccaggaagtgggtctcggccaacacaggctaagctactcgctaaaaagcgggtggtgagaatgttgcttgtgattgtggtgctgttcttcctctgctggctgccggtgtacagtgcaaacacctggagggcttttgatggaccgggagcccaccgcgcactctctggggctcccatctcgttcatccacctcttgtcctacgctagcgcttgcgtcaatccattggtgtactgtttcatgcacaggcgattccgccaggcctgtctggagacatgtgccagatgttgccccagaccccctcgggctcgtcccagggccctcccagatgaggaccccccaacccctagtattgccagcctctccagactgagctataccacgataagcacactgggccctgggtag

SEQ ID NO: 252421 - DNA, 2121 bp, Artificial Sequence
  derived and/or modified sequence
cgggaacccaggcggggcgagccgcgggagagtggagggcaggcgcctgggctgggggcggggaccaggcggggcagggggcagggagaggagggcggcgggagcctgagccggaatcgcagcgtgagcaggtggagccgcgttgggagcccgccgggtcgagctgagtaaggcggcgggctcggcgggggccatggagctgctaaagctgaaccggagcgtgcagggaaccggacccgggccgggggcttccctgtgccgcccgggggcgcctctcctcaacagcagcagtgtgggcaacctcagctgcgagccccctcgcattcgcggagccgggacacgagaattggagctggccattagaatcactctttacgcagtgatcttcctgatgagcgttggaggaaatatgctcatcatcgtggtcctgggactgagccgccgcctgaggactgtcaccaatgccttcctcctctcactggcagtcagcgacctcctgctggctgtggcttgcatgcccttcaccctcctgcccaatctcatgggcacattcatctttggcaccgtcatctgcaaggcggtttcctacctcatgggggtgtctgtgagtgtgtccacgctaagcctcgtggccatcgcactggagcggtacagcgccatctgccgaccactgcaggcacgagtgtggcagacgcgctcccacgcggctcgcgtgattgtagccacgtggctgctgtccggactactcatggtgccctaccccgtgtacactgtcgtgcaaccagtggggcctcgtgtgctgcagtgcgtgcatcgctggcccagtgcgcgggtccgccagacctggtccgtactgctgcttctgctcttgttcttcatcccgggtgtggttatggccgtggcctacgggcttatctctcgcgagctctacttagggcttcgctttgacggcgacagtgacagcgacagccaaagcagggtccgaaaccaaggcgggctgccaggggctgttcaccagaacgggcgttgccggcctgagactggcgcggttggcgaagacagcgatggctgctacgtgcaacttccacgttcccggcctgccctggagctgacggcgctgacggctcctgggccgggatccggctcccggcccacccaggccaagctgctggctaagaagcgcgtggtgcgaatgttgctggtgatcgttgtgcttttttttctgtgttggttgccagtttatagtgccaacacgtggcgcgcctttgatggcccgggtgcacaccgagcactctcgggtgctcctatctccttcattcacttgctgagctacgcctcggcctgtgtcaaccccctggtctactgcttcatgcaccgtcgctttcgccaggcctgcctggaaacttgcgctcgctgctgcccccggcctccacgagctcgccccagggctcttcccgatgaggaccctcccactccctccattgcttcgctgtccaggcttagctacaccaccatcagcacactgggccctggctgaggagtagaggggccgtgggggttgaggcagggcaaatgacatgcactgacccttccagacatacgaaacacaaaccacaactgacacaggaaaccaacacccaaagcatggactaaccccaacgcacaggaaaaggtagcttacctgacacaagaggaataagaatggagcagtacatgggaaaggaggcatgcctctgatatgggactgagcctggcccatagaaacatgacactgaccttggagagacacagcgtccctagcagtgaactatttctacacagtgggaactctgacaagggctgacctgcctctcacacacatagattaatggcactgattgttttagagactatggagcctggcacaggactgattctgggatgctcctagtttgacctcacagtgacccttcccaatcagcactgaaaataccatcaggcctaatctcatacctctgaccaacaggctgttctgcactgaaaaggttcttcatccctttccagttaaggaccgtggccctgccctctccttccttacccaaactgttcaagaaataataaattgtttggcttcctcctgaa

SEQ ID NO: 252422 - DNA, 1344 bp, Artificial Sequence
  derived and/or modified sequence
atggagctgctgaagctgaacagaagcgtgcagggcaccggccccggccccggcgccagcctgtgcagacccggcgcccccctgctgaacagcagcagcgtgggcaacctgagctgcgagccccccagaatcagaggcgccggcaccagagagctggagctggccatcagaatcaccctgtacgccgtgatcttcctgatgagcgtgggcggcaacatgctgatcatcgtggtgctgggcctgagcagaagactgagaaccgtgaccaacgccttcctgctgagcctggccgtgagcgacctgctgctggccgtggcctgcatgcccttcaccctgctgcccaacctgatgggcaccttcatcttcggcaccgtgatctgcaaggccgtgagctacctgatgggcgtgagcgtgagcgtgagcaccctgagcctggtggccatcgccctggagagatacagcgccatctgcagacccctgcaggccagagtgtggcagaccagaagccacgccgccagagtgatcgtggccacctggctgctgagcggcctgctgatggtgccctaccccgtgtacaccgtggtgcagcccgtgggccccagagtgctgcagtgcgtgcacagatggcccagcgccagagtgagacagacctggagcgtgctgctgctgctgctgctgttcttcatccccggcgtggtgatggccgtggcctacggcctgatcagcagagagctgtacctgggcctgagattcgacggcgacagcgacagcgacagccagagcagagtgagaaaccagggcggcctgcccggcgccgtgcaccagaacggcagatgcagacccgagaccggcgccgtgggcgaggacagcgacggctgctacgtgcagctgcccagaagcagacccgccctggagctgaccgccctgaccgcccccggccccggcagcggcagcagacccacccaggccaagctgctggccaagaagagagtggtgagaatgctgctggtgatcgtggtgctgttcttcctgtgctggctgcccgtgtacagcgccaacacctggagagccttcgacggccccggcgcccacagagccctgagcggcgcccccatcagcttcatccacctgctgagctacgccagcgcctgcgtgaaccccctggtgtactgcttcatgcacagaagattcagacaggcctgcctggagacctgcgccagatgctgccccagaccccccagagccagacccagagccctgcccgacgaggacccccccacccccagcatcgccagcctgagcagactgagctacaccaccatcagcaccctgggccccggctag

SEQ ID NO: 252423 - protein, 342 aa, Artificial Sequence
  derived and/or modified sequence
MQAVDNLTSAPGNTSLCTRDYKITQVLFPLLYTVLFFVGLITNGLAMRIFFQIRSKSNFIIFLKNTVISDLLMILTFPFKILSDAKLGTGPLRTFVCQVTSVIFYFTMYISISFLGLITIDRYQKTTRPFKTSNPKNLLGAKILSVVIWAFMFLLSLPNMILTNRQPRDKNVKKCSFLKSEFGLVWHEIVNYICQVIFWINFLIVIVCYTLITKELYRSYVRTRGVGKVPRKKVNVKVFIIIAVFFICFVPFHFARIPYTLSQTRDVFDCTAENTLFYVKESTLWLTSLNACLDPFIYFFLCKSFRNSLISMLKCPNSATSLSQDNRKKEQDGGDPNEETPM

SEQ ID NO: 252424 - protein, 245 aa, Artificial Sequence
  derived and/or modified sequence
MQAVDNLTSAPGNTSLCTRDYKITQVLFPLLYTVLFFVGLITNGLAMRIFFQIRSKSNFIIFLKNTVISDLLMILTFPFKILSDAKLGTGPLRTFVCQVIFWINFLIVIVCYTLITKELYRSYVRTRGVGKVPRKKVNVKVFIIIAVFFICFVPFHFARIPYTLSQTRDVFDCTAENTLFYVKESTLWLTSLNACLDPFIYFFLCKSFRNSLISMLKCPNSATSLSQDNRKKEQDGGDPNEETPM

SEQ ID NO: 252425 - DNA, 1029 bp, Artificial Sequence
  derived and/or modified sequence
atgcaggctgtagataacctcacatctgccccggggaatacttccttgtgcacaagagattataagataacacaggttctgttccccctactctacacagttctgttctttgtgggattaatcaccaatgggctagcaatgagaatattctttcagattcggtctaaaagcaacttcatcattttcttgaaaaacacggtgatctcagacctgctgatgattctgacattcccgtttaaaatcctgtccgatgccaaacttgggacagggcctctcaggactttcgtatgtcaggttaccagcgtgatcttctactttaccatgtacatcagcatttcttttctgggtctaatcactattgataggtaccaaaagaccacccgaccgtttaagacatcgaatccaaaaaatctactcggcgctaaaatcctctccgtagtgatctgggctttcatgttcctgttaagtcttcccaacatgattctgaccaacagacagcctcgggacaagaacgtgaagaagtgttccttcttgaagtcggagttcggactcgtgtggcacgaaatcgttaactatatttgtcaggttatcttctggatcaacttcttgatcgtgatcgtttgttacaccctaattacgaaagagctttaccggagctacgtgcggaccaggggggtcggaaaggtgcctcgcaagaaggtcaatgtaaaggtgttcataattattgccgtcttctttatttgctttgtgcccttccatttcgcacgcatcccgtacacactgagccagacaagggacgtatttgattgcaccgctgaaaacacactgttctatgtcaaggagtccaccctttggctaacgtcactgaatgcatgcctcgatccatttatttacttctttctgtgcaagtcattccgaaactcactcatttcgatgctcaagtgtccaaatagcgcgacttccctctcacaggacaacagaaaaaaggagcaggatggaggtgaccctaacgaggagacaccaatgtag

SEQ ID NO: 252426 - DNA, 738 bp, Artificial Sequence
  derived and/or modified sequence
atgcaggccgtcgacaaccttacaagtgctcccggaaatacatctctgtgcaccagagactacaagatcactcaggtcctgtttccactgctgtacaccgtgttgttttttgtggggctcataaccaacgggctagccatgaggatcttctttcagattcgctctaagagcaacttcattatatttctgaaaaatactgtcatctccgatttgttgatgatactgaccttcccttttaagattctctccgatgccaagttgggaactggtcccttgagaacctttgtgtgtcaagttatattttggatcaactttttaatcgtgattgtttgctataccctcatcactaaggagctctataggtcctatgttaggactcggggcgtcggtaaagttccgcgaaagaaggtgaatgtaaaagtgtttatcattatagccgtgttctttatttgcttcgtcccgttccactttgcaagaatcccctatactcttagccagacaagagatgtcttcgactgtaccgctgagaacaccctattctatgtcaaagagtctactctctggctgacctccctgaacgcctgtcttgatccctttatttacttcttcttgtgcaagagtttcagaaactcccttatttccatgttaaagtgcccaaattccgcgacctctttatcacaggataaccgtaaaaaggagcaggatggaggagatcctaatgaggagactcccatgtag

SEQ ID NO: 252427 - DNA, 1029 bp, Artificial Sequence
  derived and/or modified sequence
atgcaggccgtggacaacctgaccagcgcccctggcaacaccagcctgtgcacccgggactacaagatcacccaggtgctcttccccctgctgtacacagtgctcttctttgtgggcctcatcaccaacggcctggccatgaggatcttcttccagatccgcagcaagagcaacttcatcatcttcctgaagaacacagtcatcagtgacctgctgatgatcctgaccttccccttcaagatcctgagtgatgccaagctgggcaccggccccctgcggacctttgtgtgccaggtgaccagcgtcatcttctacttcaccatgtacatcagcatctccttcctgggcctcatcaccatcgaccgctaccagaagaccacccggcccttcaagaccagcaaccccaagaacctgctgggcgccaagatcctgtctgtggtgatctgggccttcatgttcctgctgagcctgcccaacatgatcctgaccaaccggcagccccgggacaagaatgtgaagaagtgcagcttcctgaagtcagaatttggcctggtgtggcatgaaattgtgaactacatctgccaggtgatcttctggatcaacttcctgattgtcatcgtgtgctacaccctcatcaccaaggagctgtaccgctcctatgtgaggacccggggcgtgggcaaggtgcccaggaagaaggtgaatgtgaaggtgttcatcatcatcgctgtgttcttcatctgctttgtgcccttccactttgcccgcatcccctacaccctgagccagaccagagatgtgtttgactgcacagctgagaacaccctcttctacgtgaaggagagcaccctgtggctgaccagcctgaatgcctgcctggaccccttcatctacttcttcctgtgcaagagcttcaggaacagcctcatctccatgctgaagtgccccaacagcgccaccagcctgagccaggacaacaggaagaaggagcaggacggcggggaccccaatgaggagacccccatgtag

SEQ ID NO: 252428 - DNA, 738 bp, Artificial Sequence
  derived and/or modified sequence
atgcaggccgtggacaacctgaccagcgcccctggcaacaccagcctgtgcacccgggactacaagatcacccaggtgctcttccccctgctgtacacagtgctcttctttgtgggcctcatcaccaacggcctggccatgaggatcttcttccagatccgcagcaagagcaacttcatcatcttcctgaagaacacagtcatcagtgacctgctgatgatcctgaccttccccttcaagatcctgagtgatgccaagctgggcaccggccccctgcggacctttgtgtgccaggtgatcttctggatcaacttcctgattgtgattgtgtgctacaccctcatcaccaaggagctgtaccgctcctatgtgaggacccggggcgtgggcaaggtgcccaggaagaaggtgaatgtgaaggtgttcatcatcatcgctgtgttcttcatctgctttgtgcccttccactttgcccgcatcccctacaccctgagccagaccagagatgtgtttgactgcacagctgagaacaccctcttctacgtgaaggagagcaccctgtggctgaccagcctgaatgcctgcctggaccccttcatctacttcttcctgtgcaagagcttcaggaacagcctcatctccatgctgaagtgccccaacagcgccaccagcctgagccaggacaacaggaagaaggagcaggatggaggagaccccaatgaggagacccccatgtag

SEQ ID NO: 252429 - DNA, 1029 bp, Artificial Sequence
  derived and/or modified sequence
atgcaggccgtggacaacctgaccagcgcccccggcaacaccagcctgtgtacccgggattataaaatcactcaggtactttttcctctactgtataccgtacttttttttgtgggcctgatcacgaatggcctcgcaatgcgaatattctttcagatcagatccaagagcaatttcataatcttcttgaagaacaccgtcatcagtgatctcctgatgatcctcacttttcctttcaagatcttgtccgatgcaaaactggggaccggaccactgcgtaccttcgtgtgccaggtaacctccgttatattttacttcactatgtatatctccatctcctttctcggcctcattacaatagacaggtaccagaagacaacccgcccattcaagacttctaaccctaaaaatcttctaggtgccaagatcctgtctgttgtgatttgggccttcatgtttctgctcagcctgcctaacatgattttgaccaaccgacagccccgcgataaaaacgtgaaaaaatgctcgttcctgaagagcgagttcggcctggtctggcacgagatcgtaaattatatctgccaggtcatcttttggatcaactttctgatcgtgattgtatgttatacactcatcactaaggagctgtacagaagttatgtccgcaccagaggggtgggtaaggtgcctcgtaaaaaggtgaacgtcaaggtttttataatcatcgcggtgttcttcatttgtttcgtgcctttccacttcgccagaataccatataccctctcccagactagagacgtcttcgactgcaccgccgaaaacacgctgttttatgtgaaagaaagtacactttggctgacgtcactcaacgcttgtttggaccccttcatctatttttttctgtgcaagtcattccggaatagcttgatatccatgctcaagtgcccgaacagcgccacatccttatcacaggataataggaaaaaggagcaagacggaggcgatccaaatgaggagacaccaatgtag

SEQ ID NO: 252430 - DNA, 738 bp, Artificial Sequence
  derived and/or modified sequence
atgcaggccgtggacaacctgaccagcgcccccggcaacaccagcttgtgcaccagagactacaagattacacaagtgctattcccactcctgtatacagtactattttttgtcgggctgataacgaacggtctggccatgcgcatctttttccagattcgctcgaagtcgaactttatcatttttctcaagaacactgttatttctgacttgctgatgatattgacttttccattcaagattctatcagatgccaagctcgggaccggcccacttcgaacgttcgtctgtcaggttatattttggattaattttctgatcgttatcgtttgttatacgctgataacaaaagaactgtataggtcatatgtccgaacccggggcgtcggaaaagtcccacgcaagaaggtcaatgttaaggtgttcatcattatcgccgttttcttcatatgcttcgtcccattccacttcgcccgtatcccttatactctctcacagactcgagacgtctttgattgtacagcggaaaataccctcttctacgtgaaggagtctactttatggctgacatctctcaacgcttgcctggatccgttcatctactttttcctgtgtaaaagctttcggaactccctgatctccatgctgaagtgccctaactctgccacaagcctctcacaggacaacaggaaaaaggaacaggacgggggcgatcccaatgaggagacgcctatgtag

SEQ ID NO: 252431 - DNA, 1029 bp, Artificial Sequence
  derived and/or modified sequence
atgcaggcagtggacaacctgaccagtgctcctggtaatacgtccctctgtacccgcgattacaagattacacaagtgctgttccctctgttgtacaccgttctcttcttcgttgggctcattaccaatgggctggccatgagaatcttcttccagatccggtccaagtcgaacttcattatatttctaaagaacacagtcatctctgacctgctcatgatcctgacatttccctttaaaattctcagtgacgcaaagttgggaactgggcctttaaggacgtttgtgtgccaggttacctctgtgatcttttactttacaatgtacataagcatctcattcctgggtctgatcacaatcgatagataccagaagactactagaccgtttaaaacttcaaaccccaagaacctgttaggcgcaaagatcctgtccgtagtgatctgggcctttatgtttctgctgagtctgccgaacatgatcctgactaaccgtcagccccgagataagaatgtgaagaagtgttcgtttttgaaaagtgagtttggcttggtgtggcacgagatcgtcaactatatctgtcaggtcattttctggatcaactttctaatagtcattgtctgttatactctgatcacaaaagagttatacagatcttatgttcggacacgaggagtgggcaaggtgcctcgcaaaaaggtgaatgtcaaagtcttcataatcatcgccgttttcttcatctgtttcgtcccgttccacttcgcacggatcccgtacacactgagtcagacacgggatgtctttgactgcactgccgagaacacactgttctatgtgaaagagtctacactgtggttaacttccctgaatgcatgtctggatcctttcatctactttttcctttgtaagtctttcaggaacagcctaattagtatgctgaaatgccctaactctgccacttccctgtcgcaggacaacaggaaaaaggagcaggatggaggggacccaaacgaggaaacccccatgtag

SEQ ID NO: 252432 - DNA, 738 bp, Artificial Sequence
  derived and/or modified sequence
atgcaggctgtcgacaatttgacaagcgctcctggtaacacatccctttgtactagagactacaaaattacccaggtgctcttcccgctcttgtataccgtgttgttctttgtggggctcattacaaatgggttagctatgaggatctttttccagattagaagtaaatctaactttataatatttttgaaaaacaccgtgatctctgatctgttgatgatcctgactttccccttcaagatcctttcggatgctaaacttggcacagggcctctgcgcaccttcgtctgccaggtcatcttttggattaatttcctgatcgtcattgtgtgctataccttgatcaccaaagaattgtatcggtcttacgtgcgtacaagaggagttggaaaagtgccaaggaaaaaggtgaacgtgaaagtcttcataattatcgccgttttttttatctgctttgtaccttttcacttcgccagaatcccatacaccctgagccaaacaagagacgtgtttgattgtaccgcggagaatactttattttatgttaaggaatccacattgtggctgacctcactgaacgcttgcctggatccttttatctatttcttcctgtgcaaatctttccgcaactctctcatctctatgctcaaatgccctaatagcgccaccagccttagccaggataatcggaaaaaagaacaggacggtggtgatcctaatgaggaaaccccaatgtag

SEQ ID NO: 252433 - DNA, 1766 bp, Artificial Sequence
  derived and/or modified sequence
actgttgttacacaacaaacatcatagtgctgaaatgacaaaaatccagggtagtgatcacaatcagaagacaggagctgcagaacagaacactttctcatgtccagggtcagattacaagagcactcaagactttactgacgaaaactcaggaaatcctctatcacaaagaggtttggcaactaaactaagacattaaaaggaaaataccagatgccactctgcaggttgcaataactactacttactggatacattcaaaccctccagaatcaacagttatcaggtaaccaacaagaaatgcaagccgtcgacaacctcacctctgcgcctggtaacaccagtctgtgcaccagagactacaaaatcacccaggtcctcttcccactgctctacactgtcctgttttttgttggacttatcacaaatggcctggcgatgaggattttctttcaaatccggagtaaatcaaactttattatttttcttaagaacacagtcatttctgatcttctcatgattctgacttttccattcaaaattcttagtgatgccaaactgggaacaggaccactgagaacttttgtgtgtcaagttacctccgtcatattttatttcacaatgtatatcagtatttcattcctgggactgataactatcgatcgctaccagaagaccaccaggccatttaaaacatccaaccccaaaaatctcttgggggctaagattctctctgttgtcatctgggcattcatgttcttactctctttgcctaacatgattctgaccaacaggcagccgagagacaagaatgtgaagaaatgctctttccttaaatcagagttcggtctagtctggcatgaaatagtaaattacatctgtcaagtcattttctggattaatttcttaattgttattgtatgttatacactcattacaaaagaactgtaccggtcatacgtaagaacgaggggtgtaggtaaagtccccaggaaaaaggtgaacgtcaaagttttcattatcattgctgtattctttatttgttttgttcctttccattttgcccgaattccttacaccctgagccaaacccgggatgtctttgactgcactgctgaaaatactctgttctatgtgaaagagagcactctgtggttaacttccttaaatgcatgcctggatccgttcatctattttttcctttgcaagtccttcagaaattccttgataagtatgctgaagtgccccaattctgcaacatctctgtcccaggacaataggaaaaaagaacaggatggtggtgacccaaatgaagagactccaatgtaaacaaattaactaaggaaatatttcaatctctttgtgttcagaactcgttaaagcaaagcgctaagtaaaaatattaactgacgaagaagcaactaagttaataataatgactctaaagaaacagaagattacaaaagcaattttcatttacctttccagtatgaaaagctatcttaaaatatagaaaactaatctaaactgtagctgtattagcagcaaaacaaacgacatccaattgtcatgctgcatgcaaaactacacagaattcatgttttgcagagttttgccaaaatgagtaatcatataatatttactgtaatttttaaaatacattatcgttcacaattttattttttcataatcaactaaggaagaacgatcaattggatataatcttcttaccaaaaatgatagttaaaatgtatatatatcctagt

SEQ ID NO: 252434 - DNA, 1348 bp, Artificial Sequence
  derived and/or modified sequence
acaatcagaagacaggagctgcagaacagaacactttctcatgtccagggtcagattacaagagcactcaagactttactgacgaaaactcaggaaatcctctatcacaaagaggtttggcaactaaactaagacattaaaaggaaaataccagatgccactctgcaggttgcaataactactacttactggatacattcaaaccctccagaatcaacagttatcaggtaaccaacaagaaatgcaagccgtcgacaacctcacctctgcgcctggtaacaccagtctgtgcaccagagactacaaaatcacccaggtcctcttcccactgctctacactgtcctgttttttgttggacttatcacaaatggcctggcgatgaggattttctttcaaatccggagtaaatcaaactttattatttttcttaagaacacagtcatttctgatcttctcatgattctgacttttccattcaaaattcttagtgatgccaaactgggaacaggaccactgagaacttttgtgtgtcaagtcattttctggattaatttcttaattgttattgtatgttatacactcattacaaaagaactgtaccggtcatacgtaagaacgaggggtgtaggtaaagtccccaggaaaaaggtgaacgtcaaagttttcattatcattgctgtattctttatttgttttgttcctttccattttgcccgaattccttacaccctgagccaaacccgggatgtctttgactgcactgctgaaaatactctgttctatgtgaaagagagcactctgtggttaacttccttaaatgcatgcctggatccgttcatctattttttcctttgcaagtccttcagaaattccttgataagtatgctgaagtgccccaattctgcaacatctctgtcccaggacaataggaaaaaagaacaggatggtggtgacccaaatgaagagactccaatgtaaacaaattaactaaggaaatatttcaatctctttgtgttcagaactcgttaaagcaaagcgctaagtaaaaatattaactgacgaagaagcaactaagttaataataatgactctaaagaaacagaagattacaaaagcaattttcatttacctttccagtatgaaaagctatcttaaaatatagaaaactaatctaaactgtagctgtattagcagcaaaacaaacgacatccaattgtcatgctgcatgcaaaactacacagaattcatgttttgcagagttttgccaaaatgagtaatcatataatatttactgtaatttttaaaatacattatcgttcacaattttattttttcataatcaactaa

SEQ ID NO: 252435 - DNA, 1029 bp, Artificial Sequence
  derived and/or modified sequence
atgcaggccgtggacaacctgaccagcgcccccggcaacaccagcctgtgcaccagagactacaagatcacccaggtgctgttccccctgctgtacaccgtgctgttcttcgtgggcctgatcaccaacggcctggccatgagaatcttcttccagatcagaagcaagagcaacttcatcatcttcctgaagaacaccgtgatcagcgacctgctgatgatcctgaccttccccttcaagatcctgagcgacgccaagctgggcaccggccccctgagaaccttcgtgtgccaggtgaccagcgtgatcttctacttcaccatgtacatcagcatcagcttcctgggcctgatcaccatcgacagataccagaagaccaccagacccttcaagaccagcaaccccaagaacctgctgggcgccaagatcctgagcgtggtgatctgggccttcatgttcctgctgagcctgcccaacatgatcctgaccaacagacagcccagagacaagaacgtgaagaagtgcagcttcctgaagagcgagttcggcctggtgtggcacgagatcgtgaactacatctgccaggtgatcttctggatcaacttcctgatcgtgatcgtgtgctacaccctgatcaccaaggagctgtacagaagctacgtgagaaccagaggcgtgggcaaggtgcccagaaagaaggtgaacgtgaaggtgttcatcatcatcgccgtgttcttcatctgcttcgtgcccttccacttcgccagaatcccctacaccctgagccagaccagagacgtgttcgactgcaccgccgagaacaccctgttctacgtgaaggagagcaccctgtggctgaccagcctgaacgcctgcctggaccccttcatctacttcttcctgtgcaagagcttcagaaacagcctgatcagcatgctgaagtgccccaacagcgccaccagcctgagccaggacaacagaaagaaggagcaggacggcggcgaccccaacgaggagacccccatgtag

SEQ ID NO: 252436 - DNA, 738 bp, Artificial Sequence
  derived and/or modified sequence
atgcaggccgtggacaacctgaccagcgcccccggcaacaccagcctgtgcaccagagactacaagatcacccaggtgctgttccccctgctgtacaccgtgctgttcttcgtgggcctgatcaccaacggcctggccatgagaatcttcttccagatcagaagcaagagcaacttcatcatcttcctgaagaacaccgtgatcagcgacctgctgatgatcctgaccttccccttcaagatcctgagcgacgccaagctgggcaccggccccctgagaaccttcgtgtgccaggtgatcttctggatcaacttcctgatcgtgatcgtgtgctacaccctgatcaccaaggagctgtacagaagctacgtgagaaccagaggcgtgggcaaggtgcccagaaagaaggtgaacgtgaaggtgttcatcatcatcgccgtgttcttcatctgcttcgtgcccttccacttcgccagaatcccctacaccctgagccagaccagagacgtgttcgactgcaccgccgagaacaccctgttctacgtgaaggagagcaccctgtggctgaccagcctgaacgcctgcctggaccccttcatctacttcttcctgtgcaagagcttcagaaacagcctgatcagcatgctgaagtgccccaacagcgccaccagcctgagccaggacaacagaaagaaggagcaggacggcggcgaccccaacgaggagacccccatgtag

SEQ ID NO: 252437 - protein, 299 aa, Artificial Sequence
  derived and/or modified sequence
MITFLYIFFSILIMVLFVLGNFANGFIALVNFIDWVKRKKISSADQILTALAVSRIGLLWALLLNWYLTVLNPAFYSVELRITSYNAWVVTNHFSMWLAANLSIFYLLKIANFSNLLFLHLKRRVRSVILVILLGTLIFLVCHLLVANMDESMWAEEYEGNMTGKMKLRNTVHLSYLTVTTLWSFIPFTLSLISFLMLICSLCKHLKKMQLHGEGSQDLSTKVHIKALQTLISFLLLCAIFFLFLIVSVWSPRRLRNDPVVMVSKAVGNIYLAFDSFILIWRTKKLKHTFLLILCQIRC

SEQ ID NO: 252438 - DNA, 900 bp, Artificial Sequence
  derived and/or modified sequence
atgatcaccttcctgtacatcttcttcagcatcctgatcatggtgctgttcgtgctgggcaacttcgccaacggcttcatcgccctggtgaacttcatcgactgggtgaagagaaagaagatcagcagcgccgaccagatcctgaccgccctggccgtgagcagaatcggcctgctgtgggccctgctgctgaactggtacctgaccgtgctgaaccccgccttctacagcgtggagctgagaatcaccagctacaacgcctgggtggtgaccaaccacttcagcatgtggctggccgccaacctgagcatcttctacctgctgaagatcgccaacttcagcaacctgctgttcctgcacctgaagagaagagtgagaagcgtgatcctggtgatcctgctgggcaccctgatcttcctggtgtgccacctgctggtggccaacatggacgagagcatgtgggccgaggagtacgagggcaacatgaccggcaagatgaagctgagaaacaccgtgcacctgagctacctgaccgtgaccaccctgtggagcttcatccccttcaccctgagcctgatcagcttcctgatgctgatctgcagcctgtgcaagcacctgaagaagatgcagctgcacggcgagggcagccaggacctgagcaccaaggtgcacatcaaggccctgcagaccctgatcagcttcctgctgctgtgcgccatcttcttcctgttcctgatcgtgagcgtgtggagccccagaagactgagaaacgaccccgtggtgatggtgagcaaggccgtgggcaacatctacctggccttcgacagcttcatcctgatctggagaaccaagaagctgaagcacaccttcctgctgatcctgtgccagatcagatgctag

SEQ ID NO: 252439 - DNA, 900 bp, Artificial Sequence
  derived and/or modified sequence
atgatcactttcctctacatttttttttcgattctgatcatggtgctgtttgttttgggaaactttgccaacggattcatcgcactcgtgaacttcattgattgggtcaaacggaagaagatatccagcgccgaccaaatattgactgcccttgcagtgtcgcggattgggctcctgtgggccctgcttctgaactggtacctgacagtgcttaaccccgcattctacagcgtagaactgaggattactagctataatgcatgggtcgtgaccaatcacttcagtatgtggttagccgccaacttaagcatcttttacttactgaaaatagcaaatttctctaaccttttattcctccatctaaaaaggcgcgtccgctcagtgatccttgtcattctcctggggacactgatctttctggtttgtcatttactcgtggccaatatggatgagtccatgtgggctgaagaatacgagggaaacatgaccggtaagatgaagcttagaaacaccgtacacctgtcatatctgactgtcacgaccttgtggagttttatccctttcaccctatccctgattagtttccttatgctcatctgcagcctgtgtaagcatctgaagaaaatgcaattacacggagaaggcagccaagacctttctactaaggtgcacattaaggcgctccaaactctgataagctttctgctgctttgcgcgattttctttctgtttctcattgtgagtgtttggtcccccaggagattgcggaacgatcctgtggtcatggtgtcgaaagccgtgggaaacatttatcttgcttttgattctttcatccttatctggagaacgaaaaaattaaaacacacatttctcttgatactgtgccaaattcgttgctag

SEQ ID NO: 252440 - DNA, 900 bp, Artificial Sequence
  derived and/or modified sequence
atgatcaccttcctgtacatcttcttcagcatcctgatcatggtgctgtttgtgctgggcaactttgccaacggcttcatcgccctggtgaacttcatcgactgggtgaagaggaagaagatcagcagcgctgaccagatcctgacagccctggccgtgagccgcatcggcctgctgtgggccctgctgctgaactggtacctgactgtgctgaacccagccttctacagcgtggagctgcgcatcaccagctacaatgcctgggtggtgaccaaccacttctccatgtggctggccgccaacctgagcatcttctacctgctgaagatcgccaacttcagcaacctgctcttcctgcacctgaagagaagagtgcgcagcgtcatcctggtgatcctgctgggcaccctcatcttcctggtgtgccacctgctggtggccaacatggatgagagcatgtgggccgaggagtatgagggcaacatgaccgggaagatgaagctgaggaacacagtgcacctgagctacctgactgtgaccaccctgtggagcttcatccccttcaccctgagcctcatctccttcctgatgctgatctgcagcctgtgcaagcacctgaagaagatgcagctgcacggggagggcagccaggacctgagcaccaaggtgcacatcaaggccctgcagaccctcatctccttcctgctgctgtgtgccatcttcttcctgttcctgattgtgtctgtgtggagcccccggcggctgagaaatgaccctgtggtgatggtgtccaaggctgtgggcaacatctacctggcctttgacagcttcatcctgatctggaggaccaagaagctgaagcacaccttcctgctgatcctgtgccagatccgctgctag

SEQ ID NO: 252441 - DNA, 900 bp, Artificial Sequence
  derived and/or modified sequence
atgatcaccttcctgtacatcttcttcagcatcctgatcatggtgctgttcgtgctgggtaacttcgctaatggatttattgccctagtcaactttattgactgggtgaagcggaagaaaatctctagcgctgaccagattttgacagcgttggccgtatcccgcatcggcttactgtgggcacttctgctaaactggtacctgaccgtattgaatccagccttctactcagtggagctgcgcattacctcctacaatgcctgggttgttaccaaccacttttctatgtggttagccgccaacctgtctatcttttatcttctgaagatcgctaatttttccaatctccttttcttgcacctgaaaagaagggtccggagcgtgattcttgtgatacttctgggtactctgatctttctggtgtgccatctgcttgtggccaacatggacgaaagcatgtgggcggaggagtacgaggggaatatgaccggcaaaatgaaactccgaaatacagtgcacctgagctatcttacagtgaccacactctggtcattcataccctttacgctctccctaattagttttttgatgttgatctgttcactgtgtaagcaccttaagaagatgcagctacatggcgaaggctcccaggacctaagtaccaaggtgcatatcaaagcgttacagaccctgatctccttcctactgctgtgcgccattttcttcctttttttgatcgtgagcgtttggtctcctcgccggctgcggaacgaccccgttgtaatggtttccaaggctgttggcaatatctaccttgccttcgactcgtttatcctaatctggaggacaaagaaactgaaacacacgttcctcctcattctctgtcagattagatgttag

SEQ ID NO: 252442 - DNA, 900 bp, Artificial Sequence
  derived and/or modified sequence
atgatcacgttcctttatattttcttcagcatcttgatcatggtgctgttcgtgctaggcaactttgctaacgggttcattgctctggttaattttattgattgggttaagcgaaaaaagataagtagcgctgatcagattcttaccgcactggccgtctcccggattgggctcctctgggccctgctgctcaactggtacctcacagtgttgaatcccgcattttatagcgtcgagctccgcattacttcctataatgcctgggtagtgactaaccacttttctatgtggttggccgctaacctgagcattttttaccttctcaagatcgcgaatttctctaatcttctgtttctacatctaaagcggcgtgtcaggtcagtgatcctggtcatcttactgggaactcttattttccttgtgtgtcacctgttagttgccaatatggatgaatccatgtgggcggaagaatacgagggcaacatgacgggaaagatgaagctcagaaacacagtgcacctgagctatttgactgtgaccaccttatggtccttcattccttttacactgtcccttatctcttttcttatgctcatctgcagcctttgtaagcatctcaagaaaatgcagctccacggcgaaggctcccaagacctttctacaaaggtccacattaaggcactgcagactctcatctctttcctattactgtgtgcaattttttttttgttcctgattgtcagtgtgtggtcccccagacgactcaggaatgaccctgtggtgatggtgagcaaggccgtgggtaatatttacctcgccttcgactctttcatcctgatttggcgcactaagaaactaaaacacaccttcttgttgatactgtgccagattcgttgctag

SEQ ID NO: 252443 - DNA, 1000 bp, Artificial Sequence
  derived and/or modified sequence
tcacaaccagtgatattaggcttgcattttctttctttttttctgctcagatatgataacttttctatacatttttttttcaattctaataatggttttatttgttctcggaaactttgccaatggcttcatagcactggtaaatttcattgactgggtgaagagaaaaaagatctcctcagctgaccaaattctcactgctctggcggtctccagaattggtttgctctgggcattattattaaattggtatttaactgtgttgaatccagctttttatagtgtagaattaagaattacttcttataatgcctgggttgtaaccaaccatttcagcatgtggcttgctgctaacctcagcatattttatttgctcaagattgccaatttctccaaccttctttttcttcatttaaagaggagagttaggagtgtcattctggtgatactgttggggactttgatatttttggtttgtcatcttcttgtggcaaacatggatgagagtatgtgggcagaagaatatgaaggaaacatgactgggaagatgaaattgaggaatacagtacatctttcatatttgactgtaactaccctatggagcttcataccctttactctgtccctgatatcttttctgatgctaatctgttctctgtgtaaacatctcaagaagatgcagctccatggagaaggatcgcaagatctcagcaccaaggtccacataaaagctttgcaaactctgatctccttcctcttgttatgtgccattttctttctattcctaatcgtttcggtttggagtcctaggaggctgcggaatgacccggttgtcatggttagcaaggctgttggaaacatatatcttgcattcgactcattcatcctaatttggagaaccaagaagctaaaacacacctttcttttgattttgtgtcagattaggtgctgagtaaaagacctgaaactctcaactctctagattcacaagtgggacatt

SEQ ID NO: 252444 - protein, 208 aa, Artificial Sequence
  derived and/or modified sequence
MIIKHFFGTVLVLLASTTIFSLDLKLIIFQQRQVNQESLKLLNKLQTLSIQQCLPHRKNFLLPQKSLSPQQYQKGHTLAILHEMLQQIFSLFRANISLDGWEENHTEKFLIQLHQQLEYLEALMGLEAEKLSGTLGSDNLRLQVKMYFRRIHDYLENQDYSTCAWAIVQVEISRCLFFVFSLTEKLSKQGRPLNDMKQELTTEFRSPR

SEQ ID NO: 252445 - DNA, 627 bp, Artificial Sequence
  derived and/or modified sequence
atgattataaaacacttttttggaactgtgctcgtcctcctggccagcaccaccatttttagtctggatcttaagctgattattttccagcagagacaggtgaaccaggagtcgttaaagctgctgaacaaactgcagaccctgagcattcaacaatgtctgccacatcggaagaactttctcctacctcagaagagcctgtctccccaacagtaccagaaagggcacacacttgctatactgcacgaaatgcttcagcagattttcagtctctttagagcaaatatttctcttgacggttgggaggaaaaccatacggagaagttcctgatccagcttcaccagcagttagagtacctggaggcccttatgggactggaggcggagaagctgagtgggactctggggtcagacaacctcagactccaagtgaagatgtattttcggaggatacatgactatctggaaaaccaggactacagtacttgcgcatgggcgattgtacaagttgagatctcccgatgtctctttttcgtattcagcttaaccgaaaagttatctaagcagggtcgcccactcaatgacatgaagcaggaattaaccaccgaattcaggagtcccaggtag

SEQ ID NO: 252446 - DNA, 627 bp, Artificial Sequence
  derived and/or modified sequence
atgatcattaaacacttcttcggcactgtcttagttctcctggcatcaacaacaatattctcccttgatctgaaactcattattttccaacaacggcaggttaaccaagaaagcctgaaacttttgaataagctccaaacactgtccatacaacagtgtttgcctcatagaaaaaacttcctcttgccgcagaagtctctgtcccctcagcagtaccaaaagggacatactttggcaatactgcatgagatgttgcagcagattttttccttgttccgggccaatatttcattggatgggtgggaggagaatcatacagaaaagttcctgatacaactccatcagcaactggaatacttggaagccctgatgggcctggaagccgagaagctgagtggtacgcttggatcagacaaccttcgcctgcaagtgaaaatgtatttcagacggatacatgactatctcgagaatcaggattactccacatgcgcatgggctattgtacaagtagagatttctagatgtctattcttcgtgttcagcttgactgaaaaactttctaaacaaggcagaccgttaaacgatatgaagcaggagctaactaccgaattccgcagtccaaggtag

SEQ ID NO: 252447 - DNA, 1472 bp, Artificial Sequence
  derived and/or modified sequence
cttagatattaaactgataggataagatataaaataatttaagattgctgatatatgttttaaaattaattatttgctcaagcatttgtgacaatttacagttctaattgaggttttaaatttagtagtttgtaggtattttaagttttgcccctgaattctttataggtgctgataagcctttggtaagttttactccatgaaagactattactgaaaaaaacgtaatctcaataaaagaactttaataagcttgactaaatatttagaaagcacattgtgttcagtgaaactttgtatataatgaatagaataataaaagattatgttggatgactagtctgtaattgcctcaaggaaagcatacaatgaataagttattttggtacttcctcaaaatagccaacacaatagggaaatggagaaaatgtactctgaacaccatgaaaagggaacctgaaaatctaatgtgtaaacttggagaaatgacattagaaaacgaaagcaacaaaagagaacactctccaaaataatctgagatgcatgaaaggcaaacattcactagagctggaatttccctaagtctatgcagggataagtagcatatttgaccttcaccatgattatcaagcacttctttggaactgtgttggtgctgctggcctctaccactatcttctctctagatttgaaactgattatcttccagcaaagacaagtgaatcaagaaagtttaaaactcttgaataagttgcaaaccttgtcaattcagcagtgtctaccacacaggaaaaactttctgcttcctcagaagtctttgagtcctcagcagtaccaaaaaggacacactctggccattctccatgagatgcttcagcagatcttcagcctcttcagggcaaatatttctctggatggttgggaggaaaaccacacggagaaattcctcattcaacttcatcaacagctagaatacctagaagcactcatgggactggaagcagagaagctaagtggtactttgggtagtgataaccttagattacaagttaaaatgtacttccgaaggatccatgattacctggaaaaccaggactacagcacctgtgcctgggccattgtccaagtagaaatcagccgatgtctgttctttgtgttcagtctcacagaaaaactgagcaaacaaggaagacccttgaacgacatgaagcaagagcttactacagagtttagaagcccgaggtaggtggagggactagaggacttctccagacatgattcttcatagagtggtaatacaatttatagtacaatcacattgctttgattttgtgtatatatatatttatctgtgttttaagattgtgcatattgaccacaattgtttttattttgtaatgtggctttatatattctatccattttaaattgtttgtatgtcaaaataaattcattaatatggttgattcttc

SEQ ID NO: 252448 - DNA, 627 bp, Artificial Sequence
  derived and/or modified sequence
atgataattaaacactttttcggaacagtgctggttctcctcgcatccaccaccatcttcagcctcgacctgaagctcatcatctttcaacaacgccaggtaaaccaagaatcccttaagttgttaaataagctgcaaactctgtctattcagcaatgtttgcctcatcgcaaaaacttcctgttgccacagaagtcactctcgcctcaacagtaccagaaaggacacacacttgccatcctccacgaaatgctccagcagattttttcgctattccgggcaaatatatctctagacggttgggaggagaatcatacagaaaagttcctgatacaactccatcagcaactggaatacttggaagccctgatgggcctggaagccgagaagctgagtggtacgcttggatcagacaaccttcgcctgcaagtgaaaatgtatttcagacggatacatgactatctcgagaatcaggattactccacatgcgcatgggctattgtacaagtagagatttctagatgtctattcttcgtgttcagcttgactgaaaaactttctaaacaaggcagaccgttaaacgatatgaagcaggagctaacaactgagtttcgatcaccccgctag

SEQ ID NO: 252449 - DNA, 627 bp, Artificial Sequence
  derived and/or modified sequence
atgatcatcaagcacttcttcggcaccgtgctggtgctgctggccagcaccaccatcttcagcctggacctgaagctgatcatcttccagcagagacaggtgaaccaggagagcctgaagctgctgaacaagctgcagaccctgagcatccagcagtgcctgccccacagaaagaacttcctgctgccccagaagagcctgagcccccagcagtaccagaagggccacaccctggccatcctgcacgagatgctgcagcagatcttcagcctgttcagagccaacatcagcctggacggctgggaggagaaccacaccgagaagttcctgatccagctgcaccagcagctggagtacctggaggccctgatgggcctggaggccgagaagctgagcggcaccctgggcagcgacaacctgagactgcaggtgaagatgtacttcagaagaatccacgactacctggagaaccaggactacagcacctgcgcctgggccatcgtgcaggtggagatcagcagatgcctgttcttcgtgttcagcctgaccgagaagctgagcaagcagggcagacccctgaacgacatgaagcaggagctgaccaccgagttcagaagccccagatag

SEQ ID NO: 252450 - DNA, 627 bp, Artificial Sequence
  derived and/or modified sequence
atgattattaaacactttttcggaaccgtgctggtgttgctggcttcaacaactattttttccctggacttgaaactgattatattccagcagagacaggttaatcaagagtcattgaagcttctgaataagctgcagactcttagcattcagcagtgcctgcctcaccggaagaattttctgctcccacaaaaatccctgagtcctcagcagtatcaaaagggacacacactcgcaattttgcatgagatgctgcaacaaattttctccctgtttagggccaacatctctctcgacggctgggaagaaaaccacacggagaaatttctgatacagctgcaccaacaactcgaatacctggaagctttaatggggctcgaagcagaaaaattgagtggaactttggggagcgataacctgcgcctccaggttaaaatgtatttccgccgtatccacgattatctcgagaaccaggattatagcacttgtgcatgggctatcgtccaggtcgaaatctccaggtgcctgttcttcgtattcagtctaacggagaaactgtccaagcagggcaggcccctgaacgacatgaagcaagaacttactaccgaattccgatcccctagatag

SEQ ID NO: 252451 - DNA, 627 bp, Artificial Sequence
  derived and/or modified sequence
atgatcatcaagcacttctttggaacagtgctggtgctgctggccagcaccaccatcttcagcctggacctgaagctgatcatcttccagcagaggcaggtgaaccaggagagcctgaagctgctgaacaagctgcagaccctgagcatccagcagtgcctgccccacaggaagaacttcctgctgccccagaagagcctgagcccccagcagtaccagaagggccacaccctggccatcctgcacgagatgctgcagcagatcttcagcctcttccgggccaacatcagcctggatggctgggaggagaaccacacagagaagttcctgatccagctgcaccagcagctggagtacctggaggccctgatgggcctggaggccgagaagctgagcggcaccctgggcagtgacaacctgcggctgcaggtgaagatgtacttccgccgcatccatgactacctggagaaccaggactacagcacctgtgcctgggccatcgtgcaggtggagatcagccgctgcctcttctttgtgttcagcctgacagagaagctgagcaagcagggccggcccctgaatgacatgaagcaggagctgaccacagagttccgcagccccaggtag

SEQ ID NO: 252452 - DNA, 627 bp, Artificial Sequence
  derived and/or modified sequence
atgatcatcaagcacttcttcggcaccgtgctggtgctgctggcctcgactactattttttctctggacttaaaactgattatctttcaacagcgccaggtcaaccaggaatctctgaagctgttaaacaagctgcagacactctccatccaacaatgtttaccacatagaaagaactttttactccctcagaagagcctttcccctcagcagtaccagaaaggacatacccttgccatcctccacgagatgctacagcagatcttctcgttattccgcgcaaatatatccctggacggctgggaggaaaaccacaccgaaaaattcctaatccagctccatcagcaattggagtatctcgaggcactcatgggcctcgaggctgagaagttgtcggggactctggggtctgataatctcagacttcaggttaagatgtactttaggcgcattcacgactacttggagaatcaggactattcaacatgtgcttgggctatcgtacaagtcgaaatcagccggtgcctgtttttcgttttctccctcacagaaaaattgagcaagcagggcagaccactgaatgacatgaagcaggaactaactacagagttcaggagtcctaggtag

SEQ ID NO: 252453 - RNA, 627 nt, Artificial Sequence
  derived and/or modified sequence
augaucauuaaacacuucuucggcacugucuuaguucuccuggcaucaacaacaauauucucccuugaucugaaacucauuauuuuccaacaacggcagguuaaccaagaaagccugaaacuuuugaauaagcuccaaacacuguccauacaacaguguuugccucauagaaaaaacuuccucuugccgcagaagucucuguccccucagcaguaccaaaagggacauacuuuggcaauacugcaugagauguugcagcagauuuuuuccuuguuccgggccaauauuucauuggaugggugggaggagaaucauacagaaaaguuccugauacaacuccaucagcaacuggaauacuuggaagcccugaugggccuggaagccgagaagcugagugguacgcuuggaucagacaaccuucgccugcaagugaaaauguauuucagacggauacaugacuaucucgagaaucaggauuacuccacaugcgcaugggcuauuguacaaguagagauuucuagaugucuauucuucguguucagcuugacugaaaaacuuucuaaacaaggcagaccguuaaacgauaugaagcaggagcuaacuaccgaauuccgcaguccaagguag

SEQ ID NO: 252454 - RNA, 627 nt, Artificial Sequence
  derived and/or modified sequence
augauaauuaaacacuuuuucggaacagugcugguucuccucgcauccaccaccaucuucagccucgaccugaagcucaucaucuuucaacaacgccagguaaaccaagaaucccuuaaguuguuaaauaagcugcaaacucugucuauucagcaauguuugccucaucgcaaaaacuuccuguugccacagaagucacucucgccucaacaguaccagaaaggacacacacuugccauccuccacgaaaugcuccagcagauuuuuucgcuauuccgggcaaauauaucucuagacgguugggaggagaaucauacagaaaaguuccugauacaacuccaucagcaacuggaauacuuggaagcccugaugggccuggaagccgagaagcugagugguacgcuuggaucagacaaccuucgccugcaagugaaaauguauuucagacggauacaugacuaucucgagaaucaggauuacuccacaugcgcaugggcuauuguacaaguagagauuucuagaugucuauucuucguguucagcuugacugaaaaacuuucuaaacaaggcagaccguuaaacgauaugaagcaggagcuaacaacugaguuucgaucaccccgcuag

SEQ ID NO: 252455 - protein, 167 aa, Artificial Sequence
  derived and/or modified sequence
MGLSNILFVMAFLLSGAAPLKIQAYFNETADLPCQFANSQNQSLSELVVFWQDQENLVLNEVYLGKEKFDSVHSKYMGRTSFDSDSWTLRLHNLQIKDKGLYQCIIHHKKPTGMIRIHQMNSELSVLANFSQPEIVPISNITENVYINLTCSSIHGYPEPKKMSVLL

SEQ ID NO: 252456 - DNA, 504 bp, Artificial Sequence
  derived and/or modified sequence
atggggctgagcaatatactcttcgttatggcctttctgctaagcggcgcagctcccctgaagattcaggcctactttaatgagacagccgatctgccctgccagttcgctaattctcagaatcagagcctgtccgagctggtcgtgttctggcaggaccaggagaaccttgtcttaaatgaggtctatctaggaaaggagaagttcgactcagtacactcaaaatatatggggcggaccagctttgactctgacagctggacactgcgtttacataacctacagatcaaagacaaagggctctatcagtgtataatccatcacaaaaagccgactgggatgattaggattcaccagatgaactccgagctgtccgtcctcgccaatttcagccaacccgaaattgtgcccatttctaatatcacagagaatgtatacatcaatcttacatgttccagtatccatgggtatcccgagcccaagaagatgtccgtgcttctgtag

SEQ ID NO: 252457 - DNA, 504 bp, Artificial Sequence
  derived and/or modified sequence
atgggcctgagcaacatcctgtttgtgatggccttcctgctgtctggagctgcccccctgaagatccaggcctacttcaatgaaacagctgacctgccctgccagtttgccaacagccagaaccagagcctgtctgagctggtggtgttctggcaggaccaggagaacctggtgctgaatgaggtgtacctgggcaaggagaagtttgattctgtgcacagcaagtacatgggccgcaccagctttgacagcgacagctggaccctgcggctgcacaacctgcagatcaaggacaagggcctgtaccagtgcatcatccaccacaagaagcccaccggcatgatccgcatccaccagatgaacagcgagctgtctgtgctggccaacttcagccagcctgagatcgtgcccatcagcaacatcacagaaaatgtgtacatcaacctgacctgcagcagcatccacggctacccagagcccaagaagatgtctgtgctgctgtag

SEQ ID NO: 252458 - DNA, 504 bp, Artificial Sequence
  derived and/or modified sequence
atgggcctgagcaacatcctgttcgtgatggccttcctgctgagcggagccgctccactcaagattcaggcctactttaacgagaccgccgatctgccttgccagttcgccaatagtcaaaatcagtcgttaagcgaactggtcgtgttttggcaagatcaagagaatcttgtgttgaatgaggtctatctcggaaaagagaaatttgattccgtccactctaaatacatgggccgcactagttttgatagcgattcttggacgctacggctgcataacctacagatcaaagacaagggactctaccagtgtatcatccatcacaaaaagccgacaggtatgatccggatccatcaaatgaatagcgagctgtccgtgctggctaacttctctcagcccgagatcgtgccgattagtaatatcaccgagaacgtatacatcaatctgacatgcagttcaatccacggctatccagagcctaagaaaatgagtgtccttttgtag

SEQ ID NO: 252459 - DNA, 504 bp, Artificial Sequence
  derived and/or modified sequence
atgggcctatccaacatcttattcgtgatggccttcttgctgagcggggctgcccctttgaagatccaggcgtatttcaacgaaaccgccgatctcccttgccagttcgctaatagccagaatcagtctctgtctgaactcgttgtgttctggcaggatcaagaaaacctagtattgaacgaggtatacttaggcaaagagaaatttgactctgtgcacagcaagtacatggggagaacctcttttgactccgatagctggacccttcggctgcataatctccagatcaaggataaggggctgtatcagtgcattatccaccacaaaaagcccaccggtatgattcggattcaccagatgaactctgaactgtccgttttagcaaacttctctcagcccgagatcgtgcccatcagcaacattacagagaacgtctacatcaaccttacatgcagctccattcacggttaccctgagcccaaaaagatgagtgtgctgctttag

SEQ ID NO: 252460 - DNA, 567 bp, Artificial Sequence
  derived and/or modified sequence
gtatttgagttctaccgtcagtcctggcattatttctctctctacaaggagccttaggagcactatgggactgagtaacattctctttgtgatggccttcctgctctctggtgctgctcctctgaagattcaagcttatttcaatgagactgcagacctgccatgccaatttgcaaactctcaaaaccaaagcctgagtgagctagtagtattttggcaggaccaggaaaacttggttctgaatgaggtatacttaggcaaagagaaatttgacagtgttcattccaagtatatgggccgcacaagttttgattcggacagttggaccctgagacttcacaatcttcagatcaaggacaagggcttgtatcaatgtatcatccatcacaaaaagcccacaggaatgattcgcatccaccagatgaattctgaactgtcagtgcttgctaacttcagtcaacctgaaatagtaccaatttctaatataacagaaaatgtgtacataaatttgacctgctcatctatacacggttacccagaacctaagaagatgagtgttttgctaag

SEQ ID NO: 252461 - DNA, 504 bp, Artificial Sequence
  derived and/or modified sequence
atgggcctgagcaacatcctgttcgtgatggccttcctgctgagcggcgccgcccccctgaagatccaggcctacttcaacgagaccgccgacctgccctgccagttcgccaacagccagaaccagagcctgagcgagctggtggtgttctggcaggaccaggagaacctggtgctgaacgaggtgtacctgggcaaggagaagttcgacagcgtgcacagcaagtacatgggcagaaccagcttcgacagcgacagctggaccctgagactgcacaacctgcagatcaaggacaagggcctgtaccagtgcatcatccaccacaagaagcccaccggcatgatcagaatccaccagatgaacagcgagctgagcgtgctggccaacttcagccagcccgagatcgtgcccatcagcaacatcaccgagaacgtgtacatcaacctgacctgcagcagcatccacggctaccccgagcccaagaagatgagcgtgctgctgtag

SEQ ID NO: 252462 - protein, 354 aa, Artificial Sequence
  derived and/or modified sequence
MTAAIRRQRELSILPKVTLEAMNTTVMQGFNRSERCPRDTRIVQLVFPALYTVVFLTGILLNTLALWVFVHIPSSSTFIIYLKNTLVADLIMTLMLPFKILSDSHLAPWQLRAFVCRFSSVIFYETMYVGIVLLGLIAFDRFLKIIRPLRNIFLKKPVFAKTVSIFIWFFLFFISLPNTILSNKEATPSSVKKCASLKGPLGLKWHQMVNNICQFIFWTVFILMLVFYVVIAKKVYDSYRKSKSKDRKNNKKLEGKVFVVVAVFFVCFAPFHFARVPYTHSQTNNKTDCRLQNQLFIAKETTLFLAATNICMDPLIYIFLCKKFTEKLPCMQGRKTTASSQENHSSQTDNITLG

SEQ ID NO: 252463 - DNA, 1065 bp, Artificial Sequence
  derived and/or modified sequence
atgaccgccgccatcagaagacagagagagctgagcatcctgcccaaggtgaccctggaggccatgaacaccaccgtgatgcagggcttcaacagaagcgagagatgccccagagacaccagaatcgtgcagctggtgttccccgccctgtacaccgtggtgttcctgaccggcatcctgctgaacaccctggccctgtgggtgttcgtgcacatccccagcagcagcaccttcatcatctacctgaagaacaccctggtggccgacctgatcatgaccctgatgctgcccttcaagatcctgagcgacagccacctggccccctggcagctgagagccttcgtgtgcagattcagcagcgtgatcttctacgagaccatgtacgtgggcatcgtgctgctgggcctgatcgccttcgacagattcctgaagatcatcagacccctgagaaacatcttcctgaagaagcccgtgttcgccaagaccgtgagcatcttcatctggttcttcctgttcttcatcagcctgcccaacaccatcctgagcaacaaggaggccacccccagcagcgtgaagaagtgcgccagcctgaagggccccctgggcctgaagtggcaccagatggtgaacaacatctgccagttcatcttctggaccgtgttcatcctgatgctggtgttctacgtggtgatcgccaagaaggtgtacgacagctacagaaagagcaagagcaaggacagaaagaacaacaagaagctggagggcaaggtgttcgtggtggtggccgtgttcttcgtgtgcttcgcccccttccacttcgccagagtgccctacacccacagccagaccaacaacaagaccgactgcagactgcagaaccagctgttcatcgccaaggagaccaccctgttcctggccgccaccaacatctgcatggaccccctgatctacatcttcctgtgcaagaagttcaccgagaagctgccctgcatgcagggcagaaagaccaccgccagcagccaggagaaccacagcagccagaccgacaacatcaccctgggctag

SEQ ID NO: 252464 - DNA, 1065 bp, Artificial Sequence
  derived and/or modified sequence
atgaccgccgcgataagaagacagagagagctgtctatacttcctaaagttaccctggaagccatgaacacgaccgtcatgcaaggattcaacaggtctgaaaggtgtccaagggacacccgaattgtgcaattggtgttccccgccttatataccgtggtgttcttaaccggaatcttactgaataccctcgcgctatgggtttttgtgcacatacctagcagctctacattcattatttatctgaaaaatacacttgtggctgacctgattatgactcttatgcttccatttaagattcttagcgattcacacttggccccttggcagctgagagcgttcgtatgtagattctcaagtgttatcttttacgagaccatgtacgtcggtatcgttctcctgggtctgatcgctttcgaccggttcctgaagatcattcgcccactgcgaaatatattccttaaaaagccggtctttgctaagactgtctcgattttcatttggtttttcctcttttttattagcctcccaaatactatcctgtccaacaaggaggccacaccatcaagtgtgaaaaagtgtgcatctctcaaaggacccctcggccttaagtggcatcagatggtgaacaacatctgtcagtttatcttctggactgtcttcattctcatgttagtcttctatgtggtaatcgctaaaaaagtgtacgacagttacagaaagtccaagagcaaggacagaaagaacaataagaaacttgaagggaaggtgtttgtcgtggtcgcagtgttctttgtttgcttcgcaccgttccattttgcacgggtgccttatactcactcccagactaataacaaaactgattgccggctccagaaccagctgtttatcgcgaaagagactaccctgttcctcgcagctaccaacatttgcatggaccctcttatatacattttcctatgcaaaaagtttaccgagaaactgccatgcatgcagggcagaaaaacaacagcctctagccaggagaatcactcttcgcagactgacaatatcacactcggctag

SEQ ID NO: 252465 - DNA, 1065 bp, Artificial Sequence
  derived and/or modified sequence
atgacagctgccatccggcggcagcgggagctgagcatcctgcccaaggtgaccctggaggccatgaacaccaccgtgatgcagggcttcaacagaagtgagcgctgcccccgggacacccgcatcgtgcagctggtgtttcctgccctgtacacagtggtgttcctgaccggcatcctgctgaacaccctggccctgtgggtgtttgtgcacatccccagcagcagcaccttcatcatctacctgaagaacaccctggtggccgacctgatcatgaccctgatgctgcccttcaagatcctgagtgacagccacctggccccctggcagctgcgggcctttgtgtgccgcttcagcagcgtcatcttctatgagaccatgtatgtgggcatcgtgctgctgggcctgattgcctttgaccgcttcctgaagatcatccggcccctgaggaacatcttcctgaagaagcctgtgtttgccaagacagtgtccatcttcatctggttcttcctgttcttcatcagcctgcccaacaccatcctgagcaacaaggaggccacccccagctctgtgaagaagtgtgccagcctgaagggccccctgggcctgaagtggcaccagatggtgaacaacatctgccagttcatcttctggacagtgttcatcctgatgctggtgttctacgtggtgattgccaagaaggtgtatgacagctacaggaagagcaagagcaaggacaggaagaacaacaagaagctggagggcaaggtgtttgtggtggtggccgtgttctttgtgtgctttgcccccttccactttgcccgggtgccctacacccacagccagaccaacaacaagacagactgccgcctgcagaaccagctgttcatcgccaaggagaccaccctcttcctggccgccaccaacatctgcatggaccccctcatctacatcttcctgtgcaagaagttcacagagaagctgccctgcatgcagggcaggaagaccacagccagcagccaggagaaccacagcagccagacagacaacatcaccctgggctag

SEQ ID NO: 252466 - DNA, 1065 bp, Artificial Sequence
  derived and/or modified sequence
atgaccgccgccatccggcggcagcgggagctgagcatcctgcccaaagttaccctggaggccatgaacaccacagtgatgcaggggtttaatcgcagcgagcggtgcccacgtgacacccgcatagtgcagctggtgttcccagctctctacacagtcgtgttccttactgggatacttctgaacacactggcactgtgggtttttgtgcatattccctcttccagcacctttattatttacctgaagaataccttagtggccgacctcattatgaccctgatgctgccatttaagatcctttctgatagccacttggccccatggcagctccgggcctttgtatgtcgattcagctcggtcattttttatgaaactatgtatgtgggcatagtgctgctgggactgatcgcctttgatcgctttctcaaaatcattagacccctccgaaatatatttctcaaaaaaccagtgtttgcgaaaactgtgtctatcttcatctggtttttccttttctttatttcattacccaacactatcctgagcaacaaggaagcaactccaagttccgtgaaaaaatgtgcctcactgaagggcccactcgggctgaaatggcaccagatggtgaacaacatctgtcagtttatcttctggacagttttcatcttgatgttggttttctacgtcgtcatcgccaaaaaggtctatgactcctaccgcaagtccaagtcaaaagaccgaaaaaataacaaaaaactcgaaggcaaggtgtttgtggtcgtggcagtctttttcgtgtgctttgccccgttccactttgcccgcgtgccatatacccacagccagactaataacaagacagactgccgcctgcaaaatcaactctttattgcaaaggagactacactgtttctcgccgcaaccaacatttgcatggatcccttaatctacatttttctctgcaaaaaatttacagaaaaactcccttgtatgcaggggagaaagacgactgctagcagtcaggagaatcactcaagccagacagataatattacgttaggatag

SEQ ID NO: 252467 - DNA, 1065 bp, Artificial Sequence
  derived and/or modified sequence
atgacagcagccatccggcgtcaacgtgaattgagcattttaccgaaggtcaccctggaggcaatgaatacaacagtcatgcagggctttaatagatctgagagatgtccacgagacactaggatagtgcagcttgtttttcctgccctgtacaccgtggtttttctgacgggcatcttgctcaatactctggcactttgggtattcgttcatattcccagctcaagcacattcataatttacctgaagaacaccctggtggctgacctgatcatgacactgatgctcccgttcaaaatcctctcggatagtcacctggctccctggcagcttagagcattcgtgtgtagattctccagcgttatcttttacgagactatgtacgtaggcatcgtgctgctcggactgattgcatttgataggttcctgaagatcattcggcctctgagaaacatctttttgaagaaacctgtctttgccaaaacggtgtcaattttcatttggttcttcctgttcttcatttctctgccaaatactatactgtctaacaaagaagctaccccgtcaagtgtcaagaagtgcgcgtcactcaaggggccactggggctgaaatggcatcaaatggtgaataatatttgtcagtttattttttggacagttttcatacttatgctggttttctacgttgtgattgctaaaaaagtgtacgatagctaccggaaatctaaatccaaagaccgcaagaacaacaagaagctggaaggcaaggtgtttgtagttgtggctgtgttttttgtttgctttgccccatttcattttgccagagtgccttatactcattcgcaaacgaacaacaagactgactgtcgccttcaaaatcaactgttcatcgctaaggaaaccactctgttcctagcggcaaccaatatatgtatggacccacttatctatatatttctgtgcaaaaagttcacagaaaagctcccctgcatgcagggccgaaagactactgcaagttcgcaggagaaccactcaagccaaactgacaacatcaccctgggttag

SEQ ID NO: 252468 - DNA, 2764 bp, Artificial Sequence
  derived and/or modified sequence
ctcatttgtaggctgaactaatgactgccgccataagaagacagagagaactgagtatcctcccaaaggtgacactggaagcaatgaacaccacagtgatgcaaggcttcaacagatctgagcggtgccccagagacactcggatagtacagctggtattcccagccctctacacagtggttttcttgaccggcatcctgctgaatactttggctctgtgggtgtttgttcacatccccagctcctccaccttcatcatctacctcaaaaacactttggtggccgacttgataatgacactcatgcttcctttcaaaatcctctctgactcacacctggcaccctggcagctcagagcttttgtgtgtcgtttttcttcggtgatattttatgagaccatgtatgtgggcatcgtgctgttagggctcatagcctttgacagattcctcaagatcatcagacctttgagaaatatttttctaaaaaaacctgtttttgcaaaaacggtctcaatcttcatctggttctttttgttcttcatctccctgccaaatacgatcttgagcaacaaggaagcaacaccatcgtctgtgaaaaagtgtgcttccttaaaggggcctctggggctgaaatggcatcaaatggtaaataacatatgccagtttattttctggactgtttttatcctaatgcttgtgttttatgtggttattgcaaaaaaagtatatgattcttatagaaagtccaaaagtaaggacagaaaaaacaacaaaaagctggaaggcaaagtatttgttgtcgtggctgtcttctttgtgtgttttgctccatttcattttgccagagttccatatactcacagtcaaaccaacaataagactgactgtagactgcaaaatcaactgtttattgctaaagaaacaactctctttttggcagcaactaacatttgtatggatcccttaatatacatattcttatgtaaaaaattcacagaaaagctaccatgtatgcaagggagaaagaccacagcatcaagccaagaaaatcatagcagtcagacagacaacataaccttaggctgacaactgtacatagggttaacttctatttattgatgagacttccgtagataatgtggaaatcaaatttaaccaagaaaaaaagattggaacaaatgctctcttacattttattatcctcgtgtacagaaaagattatataaaatttaaatccacatagatctattcataagctgaatgaaccattactaagagaatgcaacaggatacaaatggccactagaggtcattatttctttctttctttttttttttttttaatttcaagagcatttcactttaacattttggaaaagactaaggagaaacgtatatccctacaaacctcccctccaaacaccttctcacattcttttccacaattcacataacactactgcttttgtgccccttaaatgtagatatgtgctgaaagaaaaaaaaaacgcccaactcttgaagtccattgctgaaaactgcagccaggggttgaaagggatgcagacttgaagagtctgaggaactgaagtgggtcagcaagacctctgaaatcctgggtaaaggattttctccttacaattacaaacagcctctttcacattacaataatataccataggaggcacaagcaccattattaagccactttgcttacaccttaagtgtgtacaattcaagtgtgagaatgctgtgttaactattctttggaattctccttctgtccagcaaatactctaatgatggttaaacatggcacctactcagcaatgccttcctggaccacaacccctatccccctgccccaccctcctcattaaaaacaaatacttctactgtttgggtgtgtgatagggttctcaatgcagatctcccttttctagttagctatattcttgactgcatccgctaaaaatgttaaagcttcttgagagacagacatgccagattttcttggtatctcccataatacgacctacagtccatggtctacagatgttttaaatagaattgctattctcgatacatacaaagacgtaattgctgacccacaatcagtaacatccatattgagagatttttcaaaggatggtgaccctgcttgtatttatttaccttggtattttttcttgcatccttctgtgattcaaaaaagtaaaatgtggctttctgaaatgatggataagagtctacatcttctagaaaaaatacataaaggagtagttaagctctgtaaatgtgccacgagctccaacacgaccatcgtagggtgaagcccacgttttcttccatggcctcaaaggccctagaacttgcctacctttctggccttacctcctagctacttatccatctcttgaactttatactcttgtataaatttctaactttcagaaaatgccatactctgttttggcaccacacatgtatatttccccctggtacacttggaagactcttatccatctgtgaaaccctatgttgtcatcacttggtccatgaaatattacctggccaatatcccaccatcacctcaaacccaatcaccccctcctctgtatgctgtcacacctatattattaaacttatcacattgcattgtaattacttcctgacctttgtatctactcttttagtaactgatgtatatatctgaaaggagagattgtttcattgtgcaatcaataaatgtttgataaaataaa

SEQ ID NO: 252469 - protein, 285 aa, Artificial Sequence
  derived and/or modified sequence
MFDKTRLPYVALDVLCVLLASMPMAVLKLGQIYPFQRGFFCKDNSINYPYHDSTVTSTVLILVGVGLPISSIILGETLSVYCNLLHSNSFIRNNYIATIYKAIGTFLFGAAASQSLTDIAKYSIGRLRPHFLDVCDPDWSKINCSDGYIEYYICRGNAERVKEGRLSFYSGHSSFSMYCMLFVALYLQARMKGDWARLLRPTLQFGLVAVSIYVGLSRVSDYKHHWSDVLTGLIQGALVAILVAVYVSDFFKERTSFKERKEEDSHTTLHETPTTGNHYPSNHQP

SEQ ID NO: 252470 - DNA, 858 bp, Artificial Sequence
  derived and/or modified sequence
atgttcgacaagaccagactgccctacgtggccctggacgtgctgtgcgtgctgctggccagcatgcccatggccgtgctgaagctgggccagatctaccccttccagagaggcttcttctgcaaggacaacagcatcaactacccctaccacgacagcaccgtgaccagcaccgtgctgatcctggtgggcgtgggcctgcccatcagcagcatcatcctgggcgagaccctgagcgtgtactgcaacctgctgcacagcaacagcttcatcagaaacaactacatcgccaccatctacaaggccatcggcaccttcctgttcggcgccgccgccagccagagcctgaccgacatcgccaagtacagcatcggcagactgagaccccacttcctggacgtgtgcgaccccgactggagcaagatcaactgcagcgacggctacatcgagtactacatctgcagaggcaacgccgagagagtgaaggagggcagactgagcttctacagcggccacagcagcttcagcatgtactgcatgctgttcgtggccctgtacctgcaggccagaatgaagggcgactgggccagactgctgagacccaccctgcagttcggcctggtggccgtgagcatctacgtgggcctgagcagagtgagcgactacaagcaccactggagcgacgtgctgaccggcctgatccagggcgccctggtggccatcctggtggccgtgtacgtgagcgacttcttcaaggagagaaccagcttcaaggagagaaaggaggaggacagccacaccaccctgcacgagacccccaccaccggcaaccactaccccagcaaccaccagccctag

SEQ ID NO: 252471 - DNA, 858 bp, Artificial Sequence
  derived and/or modified sequence
atgttcgacaaaacccgcctgccctatgtggctctcgatgtcttgtgcgttttgcttgcgagcatgccaatggccgttctgaagctcggacagatatatccattccagagaggtttcttctgtaaagataactcaataaattacccttatcatgactccactgtgaccagcaccgtcctcatccttgtcggcgtcggcctccccatatcctctattattctgggtgagacgctcagcgtctactgtaacctgcttcactcaaatagtttcataagaaataattacatagcaaccatttacaaagcgataggtactttcctctttggggcagccgccagtcagtctctgacagacattgctaagtactccattggtaggctaagaccccacttcctagatgtgtgtgacccggactggtccaaaattaattgctccgatggatacatcgagtactatatatgtcggggcaatgcagaaagggtaaaagaaggtcgcctgtctttctattccggccacagctcattctctatgtactgcatgctattcgtcgcactctaccttcaggcccgtatgaagggggattgggccagactcctgagaccaaccctgcaattcgggctggtcgcagtcagcatctacgttggtctcagccgcgtgtcggattacaagcatcactggtccgacgttttaacaggcttaatccagggggcgctggtggcaatcctagtcgctgtctatgtctctgatttcttcaaagaaaggactagcttcaaagagagaaaggaggaggactcccacacaaccctacatgagacacccacaaccggcaaccattacccatcaaatcaccagccctag

SEQ ID NO: 252472 - DNA, 858 bp, Artificial Sequence
  derived and/or modified sequence
atgtttgacaagacccggctgccctacgtggccctggatgtgctgtgtgtgctgctggcctccatgcccatggctgtgctgaagctgggccagatctaccccttccagaggggcttcttctgcaaggacaacagcatcaactacccctaccatgacagcacagtgaccagcacagtgctgatcctggtgggcgtgggcctgcccatcagcagcatcatcctgggggagaccctgtctgtgtactgcaacctgctgcacagcaacagcttcatccggaacaactacatcgccaccatctacaaggccatcggcaccttcctgtttggagctgctgccagccagagcctgacagacatcgccaagtacagcatcggccgcctgcggccccacttcctggatgtgtgtgaccctgactggagcaagatcaactgcagtgatggctacatcgagtactacatctgcagaggaaatgctgagcgggtgaaggagggccgcctgtccttctacagcggccacagcagcttctccatgtactgcatgctgtttgtggccctgtacctgcaggccaggatgaagggggactgggcccggctgctgcggcccaccctgcagtttggcctggtggccgtgtccatctacgtgggcctgagccgggtgtctgactacaagcaccactggagcgatgtgctgaccggcctcatccagggcgccctggtggccatcctggtggccgtgtatgtgtctgacttcttcaaggagaggaccagcttcaaggagaggaaggaggaggacagccacaccaccctgcacgagacccccaccactggaaaccactaccccagcaaccaccagccctag

SEQ ID NO: 252473 - DNA, 858 bp, Artificial Sequence
  derived and/or modified sequence
atgttcgacaagacccggctgccctacgtggccctggacgtgctgtgtgtgttattggctagcatgccaatggccgttttaaagctcgggcagatctaccccttccaaagggggtttttttgtaaggataacagcattaattacccttatcatgactcaaccgttacgtcaacggtattgattcttgttggagtgggattgccaatctcatcaattatattaggagaaacactaagtgtgtattgtaacttgcttcactctaattcctttatacgcaacaattatatcgctactatctacaaggccatagggaccttcctgttcggagctgcagccagtcagagccttacagacattgctaaatattctattggcaggctcagacctcatttcctggatgtctgcgaccccgactggtctaaaattaattgttccgacggctacattgagtattacatttgcagaggaaatgcagagcgtgtaaaggaaggaagactgagcttttactcaggacactcttccttttccatgtattgcatgctgtttgttgcactctacctgcaggccagaatgaagggggattgggcaaggctgttgaggcctactctgcagtttggcctggtggcagtgtccatttacgtggggctttcccgggtcagcgactacaaacaccattggtctgatgttttaaccggactgatccagggcgcactcgtagccattctggtcgcagtttacgtctccgactttttcaaagaaagaaccagcttcaaggaacgcaaggaagaagacagccatactaccctccacgagacccctaccacgggcaatcactacccatcaaatcaccagccgtag

SEQ ID NO: 252474 - DNA, 1550 bp, Artificial Sequence
  derived and/or modified sequence
cctgtgggagagagcgccgggatccggacggggagcaaccggggcaggccgtgccggctgaggaggtcctgaggctacagagctgccgcggctggcacacgagcgcctcggcactaaccgagtgttcgcgggggctgtgaggggagggccccgggcgccattgctggcggtgggagcgccgcccggtctcagcccgccctcggctgctctcctcctccggctgggaggggccgtagctcggggccgtcgccagccccggcccgggctcgagaatcaagggcctcggccgccgtcccgcagctcagtccatcgcccttgccgggcagcccgggcagagaccatgtttgacaagacgcggctgccgtacgtggccctcgatgtgctctgcgtgttgctggcttccatgcctatggctgttctaaaattgggccaaatatatccatttcagagaggctttttctgtaaagacaacagcatcaactatccgtaccatgacagtaccgtcacatccactgtcctcatcctagtgggggttggcttgcccatttcctctattattcttggagaaaccctgtctgtttactgtaaccttttgcactcaaattcctttatcaggaataactacatagccactatttacaaagccattggaacctttttatttggtgcagctgctagtcagtccctgactgacattgccaagtattcaataggcagactgcggcctcacttcttggatgtttgtgatccagattggtcaaaaatcaactgcagcgatggttacattgaatactacatatgtcgagggaatgcagaaagagttaaggaaggcaggttgtccttctattcaggccactcttcgttttccatgtactgcatgctgtttgtggcactttatcttcaagccaggatgaagggagactgggcaagactcttacgccccacactgcaatttggtcttgttgccgtatccatttatgtgggcctttctcgagtttctgattataaacaccactggagcgatgtgttgactggactcattcagggagctctggttgcaatattagttgctgtatatgtatcggatttcttcaaagaaagaacttcttttaaagaaagaaaagaggaggactctcatacaactctgcatgaaacaccaacaactgggaatcactatccgagcaatcaccagccttgaaaggcagcagggtgcccaggtgaagctggcctgttttctaaaggaaaatgattgccacaaggcaagaggatgcatctttcttcctggtgtacaagcctttaaagacttctgctgctgctatgcctcttggatgcacactttgtgtgtacatagttacctttaactcagtggttatctaatagctctaaactcattaaaaaaactccaagccttccaccaaaacagtgccccacctgtatacatttttattaaaaaaatgtaatgcttatgtataaacatgtatgtaatatgctttctatgaatgatgtttgatttaaatataatacatattaaaatgtatgggagaaccaaa

SEQ ID NO: 252475 - DNA, 858 bp, Artificial Sequence
  derived and/or modified sequence
atgttcgacaagaccagactcccctacgtggctttagatgtgttgtgtgtactgttagcgtcaatgccaatggccgtgttgaagctggggcagatctacccatttcagagagggttcttctgcaaagacaacagtatcaattacccgtaccacgatagtacagtcacttctacagttctcattctcgtgggagtcggcctgcccatctcatccatcatcctcggagaaaccctgtccgtgtactgcaacctgttgcattcgaattctttcatccgaaataattacatcgccaccatctacaaagctatcggtacatttctgtttggagctgcagcctcccaatcccttacagatatcgccaaatactcgatagggagactgaggccgcatttcctagatgtatgcgaccccgactggagcaaaattaactgctctgatgggtatattgaatactatatatgtaggggtaatgccgagagggtaaaggaaggccgtctgtcattctatagcggccactcttctttctctatgtactgcatgctttttgtggctctgtacttgcaagccagaatgaagggggactgggctaggctgctcagacctacccttcagtttggcctcgtggcagtgtccatctacgtcggactgagcagggtttccgattataaacatcactggtctgacgtgttaaccgggctaattcagggcgcactggtggccatcctggtggccgtgtatgtatcagatttcttcaaggagcgcacctcattcaaggaacgcaaagaagaagacagtcacaccacactccacgaaacacctactactggcaaccattacccctcgaaccatcagccctag

SEQ ID NO: 252476 - protein, 277 aa, Artificial Sequence
  derived and/or modified sequence
MDTNRPGAFVLSSAPLAALHNMAEMKTSLFPYALQGPAGFKAPALGGLGAQLPLGTPHGISDILGRPVGAAGGGLLGGLPRLNGLASSAGVYFGPAAAVARGYPKPLAELPGRPPIFWPGVVQGAPWRDPRLAGPAPAGGVLDKDGKKKHSRPTFSGQQIFALEKTFEQTKYLAGPERARLAYSLGMTESQVKVWFQNRRTKWRKRHAVEMASAKKKQDSDAEKLKVGGSDAEDDDEYNRPLDPNSDDEKITRLLKKHKPSNLALVSPCGGGAGDAL

SEQ ID NO: 252477 - protein, 265 aa, Artificial Sequence
  derived and/or modified sequence
MESNLQGTFLLNNTPLAQFPEMKAPVCQYSVQNSFYKLSPPGLGPQLAAGTPHGITDILSRPVAAPNNSLLSGYPHVAGFGGLSSQGVYYSPQVGNFSKAGNEYPTRTRNCWADTGQDWRGGRQCSNTPDPLSDSIHKKKHTRPTFTGHQIFALEKTFEQTKYLAGPERARLAYSLGMTESQVKVWFQNRRTKWRKKSALEPSSSTPRAPGGAGAGAGGDRAPSENEDDEYNKPLDPDSDDEKIRLLLRKHRAAFSVLSLGAHSV

SEQ ID NO: 252478 - DNA, 1019 bp, Artificial Sequence
  derived and/or modified sequence
gccgcgcgcaaacttcccgggccggcgggcaggggcggcggcggcggggcccggatgggagcccgggccggcggcggcggcgcccatggacactaaccgcccgggcgcgttcgtgctgagcagtgccccgctggccgcgctgcacaacatggccgagatgaagacgtcgctgttcccctacgcgctgcagggtccggccggcttcaaggcgcccgcgctggggggcctgggcgcgcagctcccgctcgggaccccgcacggcatcagcgacatcctgggccggcccgtgggcgcggcgggcgggggcctcctgggggggctgccccggctcaacgggctcgcgtcgtccgccggcgtttacttcgggcccgcggccgctgtggcgcgcggctaccccaagcccctggccgagctgccggggcgcccgcccatcttctggcccggcgtggtgcagggcgcgccctggagggacccgcgtctggctggcccggccccggccggcggcgtcctggacaaggacgggaagaagaagcactcgcgcccgaccttctcgggccagcagatcttcgcgctggagaaaaccttcgagcagaccaagtacctggcgggcccggagcgcgcgcgtctcgcctactcgctgggcatgaccgagagccaggtgaaggtctggttccagaaccgccggaccaagtggcgcaagcggcacgcggcggagatggcgtcggccaagaagaagcaggactcggacgccgagaagctgaaggtgggcggctcggacgcggaggacgacgacgaatacaaccggcccctggaccccaactcggacgacgagaagatcacgcggctgctcaagaagcacaaaccctcgaacttggcgctggtcagcccgtgcggcggcggcgcgggggacgccttgtgaggacccgcggggtgggggcgaatctatttttgcagaatccgggggcggccccgggtgggcgcgagtcgctttgtatcatcaataaattatttaacgggtc

SEQ ID NO: 252479 - DNA, 834 bp, Artificial Sequence
  derived and/or modified sequence
atggatacaaaccgaccaggcgctttcgtcctctcaagcgctccccttgctgccctgcataacatggccgagatgaagactagtttatttccttacgccttgcaggggcctgccggctttaaggcacctgcacttggcggcctgggtgctcagttgccactaggaaccccacacgggatctcagatattttaggcaggcccgtgggcgcggcgggcgggggcctcttaggggggctgccacggctgaacgggctggcgtctagcgcgggggtgtattttggaccggccgcagcagtggctcgcggctaccccaagcccctggcggagctaccagggcgaccacctatattctggcctggggttgtgcaaggcgccccttggagggacccaagattggcaggccctgcccccgccggtggagtgctggacaaggacggcaaaaaaaaacactccaggcctacattctctggccagcagatttttgcccttgagaagacatttgaacagaccaaatatcttgccggtcctgagagagctcggctcgcctatagcctaggaatgaccgagtcgcaggtgaaagtgtggttccagaacagacgcactaaatggagaaaacgtcatgctgtcgaaatggcctcagccaagaagaagcaggactctgatgctgagaagttgaaagtggggggttcagatgccgaggatgacgacgaatacaaccgcccgctggatcccaattctgatgacgagaagatcacacgactgctcaaaaaacataagccaagtaacttggcacttgtttccccatgcggggggggggctggagacgccctgtag

SEQ ID NO: 252480 - DNA, 1061 bp, Artificial Sequence
  derived and/or modified sequence
gcagccgacgcccgcccgggccgcgcgcaaacttcccgggccggcgggcaggggcggcggcggcggggcccggatgggagcccgggccggcggcggcggcgcccatggacactaaccgcccgggcgcgttcgtgctgagcagtgccccgctggccgcgctgcacaacatggccgagatgaagacgtcgctgttcccctacgcgctgcagggtccggccggcttcaaggcgcccgcgctggggggcctgggcgcgcagctcccgctcgggaccccgcacggcatcagcgacatcctgggccggcccgtgggcgcggcgggcgggggcctcctgggggggctgccccggctcaacgggctcgcgtcgtccgccggcgtttacttcgggcccgcggccgctgtggcgcgcggctaccccaagcccctggccgagctgccggggcgcccgcccatcttctggcccggcgtggtgcagggcgcgccctggagggacccgcgtctggctggcccggccccggccggcggcgtcctggacaaggacgggaagaagaagcactcgcgcccgaccttctcgggccagcagatcttcgcgctggagaaaaccttcgagcagaccaagtacctggcgggcccggagcgcgcgcgtctcgcctactcgctgggcatgaccgagagccaggtgaaggtctggttccagaaccgccggaccaagtggcgcaagcggcacgcggtggagatggcgtcggccaagaagaagcaggactcggacgccgagaagctgaaggtgggcggctcggacgcggaggacgacgacgaatacaaccggcccctggaccccaactcggacgacgagaagatcacgcggctgctcaagaagcacaaaccctcgaacttggcgctggtcagcccgtgcggcggcggcgcgggggacgccttgtgaggacccgcggggtgggggcgaatctatttttgcagaatccgggggcggccccgggtgggcgcgagtcgctttgtatcatcaataaattatttaacgggtccccgtcggagccgtcgctccgga

SEQ ID NO: 252481 - DNA, 834 bp, Artificial Sequence
  derived and/or modified sequence
atggacaccaacagacctggggcctttgtgctgagcagcgcccccctggccgccctgcacaacatggccgagatgaagaccagcctcttcccctatgccctgcagggccctgctggcttcaaggccccagccctgggcggcctgggcgcccagctgcccctgggcaccccccacggcatcagtgacatcctgggccggcctgtgggcgctgctgggggcggcctgctgggcggcctgccccggctgaatggcctggccagcagcgctggggtgtactttggacctgctgctgctgtggcccggggctaccccaagcccctggccgagctgcccggccggccccccatcttctggccaggagtggtgcagggcgccccctggagggacccccggctggccggccctgccccagctgggggcgtgctggacaaggatggcaagaagaagcacagccggcccaccttcagcggccagcagatctttgccctggagaagacctttgagcagaccaagtacctggccggccctgagcgggcccggctggcctacagcctgggcatgacagagagccaggtgaaggtgtggttccagaacagaaggaccaagtggaggaagagacatgctgtggagatggccagcgccaagaagaagcaggacagtgatgctgagaagctgaaggtgggcggcagtgatgctgaagatgatgatgagtacaaccggcccctggaccccaacagtgatgatgagaagatcacccggctgctgaagaagcacaagcccagcaacctggccctggtgagcccctgtggcggcggcgctggagatgccctgtag

SEQ ID NO: 252482 - DNA, 834 bp, Artificial Sequence
  derived and/or modified sequence
atggacaccaaccggcccggcgccttcgtgctgagcagcgcccccctcgcagctttgcataacatggccgagatgaagacctcactgtttccttacgccttgcagggcccagccggatttaaggctccggccctcgggggtctgggggcacaactgcctctggggaccccccatggtatttccgacattttgggcaggcccgtcggtgctgcggggggagggctcttgggagggctgccaagattgaacggcctggcatctagcgcgggtgtatacttcggtccagcagcggccgttgcgagagggtaccctaagcccctggccgagctgcctgggcggcccccaatcttctggcctggggtggtccaaggcgccccctggcgggatccacggcttgccgggccggccccagcaggaggcgtgctcgataaggatggaaagaaaaaacactctcggccaacattcagcggtcaacaaatattcgccttagaaaagaccttcgagcagaccaagtatttggccggtcccgaaagggctcgcctggcctacagtctgggcatgacggagtctcaggtgaaagtatggttccagaatagacggaccaagtggagaaagaggcatgccgtggagatggcaagtgccaaaaagaaacaggacagtgatgctgagaagttaaaggtcggcgggagcgatgctgaggacgatgatgagtacaatcggccactagacccaaactcagacgatgagaagatcactcggctcctgaaaaagcacaagccctcgaacctcgccctcgtgagcccctgcggcgggggggcgggagatgctctctag

SEQ ID NO: 252483 - DNA, 834 bp, Artificial Sequence
  derived and/or modified sequence
atggatactaaccgacctggcgctttcgtgctatcgagcgcccctctcgcagcactgcacaacatggcggaaatgaaaacctcattgttcccgtatgctctccagggtcccgctggtttcaaagccccagcattgggtggactgggagctcagttgcccctcggaaccccgcacgggatatctgatatcctggggcgacctgtgggggctgccggaggtggactgttagggggactgccgcgattgaatggcctggcaagcagtgccggagtatatttcggcccagcagcagccgtggcgagaggataccctaagcccctggccgagctgcccggacgaccacctattttctggccgggtgtcgtccaaggcgctccctggagggatcctcgtcttgccggaccagcgcctgccggaggtgtcctggacaaggacggtaagaagaagcactcacggccaacattcagtggacagcagatttttgctctggagaagaccttcgaacaaacaaaatatctggctggcccagagcgggctcggctggcctacagcctgggtatgacagaatctcaagtaaaagtgtggtttcagaaccggcgaactaaatggcggaagcgccacgcagtggagatggcgtctgccaaaaagaagcaagattcggacgctgaaaaattgaaggtcggtgggtccgatgcagaagacgatgacgagtacaaccgccctctggatccaaatagtgatgatgagaagattactcgactgctcaaaaagcataagccttcaaacctggcactggttagcccatgcgggggaggggctggggatgcattatag

SEQ ID NO: 252484 - DNA, 834 bp, Artificial Sequence
  derived and/or modified sequence
atggacaccaacagacccggcgccttcgtgctgagcagcgcccccctggccgccctgcacaacatggccgagatgaagaccagcctgttcccctacgccctgcagggccccgccggcttcaaggcccccgccctgggcggcctgggcgcccagctgcccctgggcaccccccacggcatcagcgacatcctgggcagacccgtgggcgccgccggcggcggcctgctgggcggcctgcccagactgaacggcctggccagcagcgccggcgtgtacttcggccccgccgccgccgtggccagaggctaccccaagcccctggccgagctgcccggcagaccccccatcttctggcccggcgtggtgcagggcgccccctggagagaccccagactggccggccccgcccccgccggcggcgtgctggacaaggacggcaagaagaagcacagcagacccaccttcagcggccagcagatcttcgccctggagaagaccttcgagcagaccaagtacctggccggccccgagagagccagactggcctacagcctgggcatgaccgagagccaggtgaaggtgtggttccagaacagaagaaccaagtggagaaagagacacgccgtggagatggccagcgccaagaagaagcaggacagcgacgccgagaagctgaaggtgggcggcagcgacgccgaggacgacgacgagtacaacagacccctggaccccaacagcgacgacgagaagatcaccagactgctgaagaagcacaagcccagcaacctggccctggtgagcccctgcggcggcggcgccggcgacgccctgtag

SEQ ID NO: 252485 - DNA, 798 bp, Artificial Sequence
  derived and/or modified sequence
atggagtccaatctgcagggaacatttctgctgaacaacacgccactcgctcaattcccagagatgaaagctcctgtctgccaatacagtgttcagaacagcttttataagctcagtcctccaggactcggtccccagctcgcagccggaactccccatgggatcaccgacatcctttctcgaccagtggctgcacccaacaacagcctcctttccgggtaccctcacgtagcaggctttggcggcttaagttcccaaggagtttattattctccccaggtcggcaatttttccaaggctggcaacgaataccctacacgcacacggaattgctgggctgacaccggccaagactggagaggcgggaggcagtgtagcaacacgcctgatcctttaagcgattctatccacaaaaaaaagcatacaagaccgaccttcaccgggcaccagatctttgcattggagaagacctttgaacagaccaaatacctggccggtcccgaacgggccagattggcatactccttaggaatgacagagagtcaggttaaggtgtggttccaaaaccgccgaacaaagtggcgtaagaagtctgccctggagcccagttccagcacgcctcgggcccccgggggcgccggagccggtgccggaggggatagagcaccgtccgagaatgaggatgatgaatataataaacccttagatccagatagcgacgatgagaaaattcggctgctgcttcgcaaacatagagcagcgttttcagtgctgtcccttggcgcccacagtgtatag

SEQ ID NO: 252486 - DNA, 798 bp, Artificial Sequence
  derived and/or modified sequence
atggagagcaacctgcagggcaccttcctgctgaacaacacccccctggcccagtttcctgagatgaaggcccctgtgtgccagtacagcgtgcagaacagcttctacaagctgagccccccaggcctgggcccccagctggccgccggcacccctcatggcatcacagacatcctgagcaggcctgtggccgcccccaacaacagcctgctgagcggctacccccacgtggccggctttggaggcctgagcagccagggcgtgtactacagcccccaggtgggcaacttcagcaaggctggaaatgagtaccccaccaggaccaggaactgctgggccgacaccggccaggactggaggggcggccggcagtgcagcaacaccccagaccccctgagtgacagcatccacaagaagaagcacacccggcccaccttcaccggccaccagatctttgccctggagaagacctttgagcagaccaagtacctggccggccctgagcgggcccggctggcctacagcctgggcatgacagagagccaggtgaaggtgtggttccagaacagaaggaccaagtggaggaagaagagcgccctggagcccagcagcagcaccccccgggcccctgggggcgctggggccggggccggcggggaccgggcccccagtgaaaatgaagatgatgagtacaacaagcccctggaccctgacagtgatgatgagaagatccggctgctgctgaggaagcacagagctgccttctctgtgctgagcctgggcgcccacagcgtgtag

SEQ ID NO: 252487 - DNA, 798 bp, Artificial Sequence
  derived and/or modified sequence
atggagagcaacctgcagggcaccttcctgctgaacaacacccccctggctcaatttcccgagatgaaggcccctgtttgtcagtactccgtgcaaaactccttctacaaactctccccaccaggcttgggtccacagctggccgccggcactccacatggcatcaccgacatcttatcaaggcctgtcgcagccccgaacaactctctgctttcaggatacccccatgtcgcaggctttgggggtctcagctcacagggagtgtactactcaccccaggtgggaaactttagcaaagccggtaacgaataccctacacggactcgcaattgctgggcagatacggggcaggactggcggggaggaaggcagtgctctaatacccctgaccctttatcagattccatccataaaaagaagcacacgcgccccacgttcacaggccaccagatattcgccctagagaaaacttttgaacagaccaagtacctcgcaggcccagaaagggctaggttggcctatagtctgggaatgactgagagccaggtgaaggtatggttccagaatcggcgaactaagtggaggaagaaatcagccctggaacccagtagcagcactccgcgcgctcccggtggcgcaggtgctggggccggcggcgatagggctccaagtgagaacgaggacgacgaatacaataagcccctggatcctgactctgacgacgagaaaattagattgctcttacggaagcacagagctgcctttagcgtgctgtcattgggcgcccactccgtgtag

SEQ ID NO: 252488 - DNA, 937 bp, Artificial Sequence
  derived and/or modified sequence
atggagtccaacctgcaggggacgttcctgctgaacaacacgccgctggctcagtttccggagatgaaggccccggtgtgccagtactctgtgcagaactccttctacaagctcagccccccagggctgggcccccagctggccgccggaaccccccacgggatcacggacatcctgagcaggcccgtggctgcgccgaacaacagcctcctctccggctacccccacgtggcaggctttggggggctcagctcgcagggggtctactacagcccccaggtagggaatttttccaaggctgggaacgagtacccgacccggacccggaactgctgggcggacacgggccaagactggcgaggcgggcggcagtgcagcaacaccccagaccccctgagtgacagcatacacaagaagaagcacacccggcccaccttcacggggcaccagatctttgccctggagaaaacctttgagcagaccaagtacttggctggccccgagagggcacggctggcatactcactgggcatgaccgagtcgcaggtcaaggtgtggttccagaaccgcaggaccaagtggcggaagaagagcgccctggagccctcgtcctccacgccccgggccccgggcggcgcgggtgcaggcgcaggcggggaccgcgcaccctcggagaacgaggacgacgagtacaacaagccgctggaccccgactcggacgacgagaagatccgcctgctgctgcgcaagcaccgcgccgccttctcggtgctcagcctgggagcgcacagcgtctgacgcccgccgtccaggcccgggatcctggctgcagcctgcggggggacgccgaggagcctaccttcccctccccttccccacgctcctgggggcgcagggactgagtctttctttggatgaggggcgcgtggaggaggag

SEQ ID NO: 252489 - DNA, 798 bp, Artificial Sequence
  derived and/or modified sequence
atggagtcaaacctacagggaaccttcctgttgaacaacactccactggcacagtttcccgagatgaaggctccagtttgtcagtattcagtccagaactctttttacaagctaagtccccctggccttggaccccagcttgccgcaggcaccccgcatgggataaccgacatcctttcgagaccagttgccgcacctaacaatagcctcctgagtgggtacccgcatgtcgctggcttcgggggacttagttcccaaggggtctactactcacctcaagttggcaattttagcaaggcaggaaacgagtaccctacaagaactcgaaattgttgggctgacacaggccaggattggagaggagggaggcagtgttccaatactcctgatcccctgagcgacagtatccacaagaaaaaacacacccgcccaacattcactggacaccaaatcttcgccctggagaagacctttgagcagactaaatacctggctggtcccgagcgggcacgactcgcttatagtttaggtatgaccgaatctcaagttaaggtatggtttcagaaccgtcggaccaagtggaggaagaagagcgcgttagagcctagctcatcgactccgagggcacctggaggcgcaggcgctggcgctggcggtgatagggcaccatccgagaacgaggacgatgagtataacaagcccctggatcccgattctgacgacgaaaagatccgcttgctactcaggaagcacagggcagcgtttagcgtgctttccctgggggctcactctgtctag

SEQ ID NO: 252490 - DNA, 798 bp, Artificial Sequence
  derived and/or modified sequence
atggagagcaacctgcagggcaccttcctgctgaacaacacccccctggcccagttccccgagatgaaggcccccgtgtgccagtacagcgtgcagaacagcttctacaagctgagcccccccggcctgggcccccagctggccgccggcaccccccacggcatcaccgacatcctgagcagacccgtggccgcccccaacaacagcctgctgagcggctacccccacgtggccggcttcggcggcctgagcagccagggcgtgtactacagcccccaggtgggcaacttcagcaaggccggcaacgagtaccccaccagaaccagaaactgctgggccgacaccggccaggactggagaggcggcagacagtgcagcaacacccccgaccccctgagcgacagcatccacaagaagaagcacaccagacccaccttcaccggccaccagatcttcgccctggagaagaccttcgagcagaccaagtacctggccggccccgagagagccagactggcctacagcctgggcatgaccgagagccaggtgaaggtgtggttccagaacagaagaaccaagtggagaaagaagagcgccctggagcccagcagcagcacccccagagcccccggcggcgccggcgccggcgccggcggcgacagagcccccagcgagaacgaggacgacgagtacaacaagcccctggaccccgacagcgacgacgagaagatcagactgctgctgagaaagcacagagccgccttcagcgtgctgagcctgggcgcccacagcgtgtag

SEQ ID NO: 252491 - protein, 270 aa, Artificial Sequence
  derived and/or modified sequence
MDSLEWNWALVYELSGEHHDEEWSVKTYQEVAQKFVETHPEFIGIKIIYSDHRSKDVAVIAESIRMAMGLRIKFPTVVAGFDLVGHEDTGHSLHDYKEALMIPAKDGVKLPYFFHAGETDWQGTSIDRNILDALMLNTTRIGHGFALSKHPAVRTYSWKKDIPIEVCPISNQVLKLVSDLRNHPVATLMATGHPMVISSDDPAMFGAKGLSYDFYEVFMGIGGMKADLRTLKQLAMNSIKYSTLLESEKNTFMEIWKKRWDKFIADVATK

SEQ ID NO: 252492 - DNA, 813 bp, Artificial Sequence
  derived and/or modified sequence
atggatagcctggagtggaattgggccctcgtgtacgagctatcaggtgaacaccatgatgaggagtggagcgtgaaaacataccaggaggtggctcagaagttcgtagaaacccaccctgagttcattggtatcaagatcatctactcggaccatagatcaaaggacgtagctgttattgccgagtcaattagaatggctatgggcctccgtataaagttccccacagtggtcgccggttttgatcttgtaggccatgaagacaccggacattctctgcacgattataaggaagcattaatgattccagctaaggacggagtgaagctgccttacttcttccacgcaggggaaacagattggcagggcacaagtatcgatcggaacatcctcgacgctctgatgctgaataccaccagaattggtcatgggtttgcgctgagcaaacatcccgctgttcgcacctactcctggaaaaaggatatcccaatcgaagtgtgcccaatatccaaccaggtgttaaagctggtctcagaccttagaaaccacccagtggccactctgatggcaacagggcacccaatggtgatctcctctgatgacccagctatgttcggcgctaaaggccttagctacgacttctacgaggtgttcatgggcatcggaggaatgaaggcagacctccgcaccctcaagcagcttgccatgaactccatcaagtatagcacactgctcgagagcgaaaaaaatacatttatggagatatggaagaagaggtgggataaattcatcgctgatgtagctaccaaatag

SEQ ID NO: 252493 - DNA, 813 bp, Artificial Sequence
  derived and/or modified sequence
atggacagcctagaatggaactgggctctcgtatatgaactgtccggcgaacaccacgacgaggaatggagtgtcaagacatatcaggaagtggcacagaaatttgtggagacccaccctgaatttatcggcatcaaaatcatatactctgaccaccggtccaaggatgtcgccgttattgctgaatctatcagaatggctatggggcttagaataaagtttcccacagtggtcgccggcttcgacctggtcggacacgaggacacgggccattctctacacgactacaaggaagcgctaatgatcccagcaaaggatggagtgaaactgccatacttctttcatgccggcgagaccgactggcagggaacatcaattgacaggaacattttagacgctcttatgctgaataccactcggatcggccacggctttgccttatctaagcacccagctgtgcgaacttattcatggaagaaggacattcccattgaggtctgtccgatcagcaaccaggtactcaagcttgtctccgacctccgcaaccatcccgtagcaacattaatggccactggccaccctatggtgatcagcagcgacgatcccgccatgttcggggccaaaggactctcttacgacttctacgaagttttcatggggatcgggggcatgaaagctgatcttaggaccttgaaacagctcgcaatgaacagcatcaaatattctacgctgctggagagtgaaaagaatacgtttatggagatttggaagaagagatgggacaaattcatcgccgatgtggcaacaaagtag

SEQ ID NO: 252494 - DNA, 813 bp, Artificial Sequence
  derived and/or modified sequence
atggattctttagaatggaactgggccttagtgtacgagctgagcggagagcaccacgacgaggagtggtctgtaaagacttaccaggaagttgcccagaagttcgtcgagacccatcccgaattcattggcatcaaaattatttattcagaccaccgaagtaaagatgttgcagttatagctgagtctatccgtatggccatgggcctgaggatcaagtttcctacagtcgttgcagggttcgacctcgtgggacatgaggatacgggacacagccttcatgattacaaagaagcactcatgattccagcaaaggacggcgtgaagttaccatattttttccacgctggagagacggactggcagggaacgagcattgaccgcaatatcttggacgccctgatgctgaatacgacccggataggacacggattcgcactctccaagcaccccgccgtaaggacatacagctggaaaaaagacatccctattgaagtttgcccaatctcaaatcaggtactaaaactggtgagtgacctgcgtaaccaccctgtcgctacacttatggcaaccggacacccaatggttatatcctccgatgatccggcaatgttcggggcaaagggcctttcgtacgatttttacgaggtgttcatgggtattggaggtatgaaagccgatcttagaactctgaagcagctggctatgaacagtatcaagtatagcaccttactcgagtctgaaaaaaatacctttatggagatatggaaaaaacgatgggacaaattcatcgccgatgttgcaacaaaatag

SEQ ID NO: 252495 - DNA, 813 bp, Artificial Sequence
  derived and/or modified sequence
atggacagcctggagtggaactgggccctggtgtacgagctgagcggcgagcaccacgacgaggagtggagcgtgaagacctaccaggaggtggcccagaagttcgtggagacccaccccgagttcatcggcatcaagatcatctacagcgaccacagaagcaaggacgtggccgtgatcgccgagagcatcagaatggccatgggcctgagaatcaagttccccaccgtggtggccggcttcgacctggtgggccacgaggacaccggccacagcctgcacgactacaaggaggccctgatgatccccgccaaggacggcgtgaagctgccctacttcttccacgccggcgagaccgactggcagggcaccagcatcgacagaaacatcctggacgccctgatgctgaacaccaccagaatcggccacggcttcgccctgagcaagcaccccgccgtgagaacctacagctggaagaaggacatccccatcgaggtgtgccccatcagcaaccaggtgctgaagctggtgagcgacctgagaaaccaccccgtggccaccctgatggccaccggccaccccatggtgatcagcagcgacgaccccgccatgttcggcgccaagggcctgagctacgacttctacgaggtgttcatgggcatcggcggcatgaaggccgacctgagaaccctgaagcagctggccatgaacagcatcaagtacagcaccctgctggagagcgagaagaacaccttcatggagatctggaagaagagatgggacaagttcatcgccgacgtggccaccaagtag

SEQ ID NO: 252496 - DNA, 3195 bp, Artificial Sequence
  derived and/or modified sequence
gatgtcgaaactaaagcctggaaaggtcaaagagcttgatgaaggtcaaataggtagtaaggggtggctggacccagaccagggctcctaagttcgtcgctttcctcaccgcgctgggctctctgagcgtcctaatagccacgcccacctcaaatggcgatcccagagagcatctggcttcaattttcctttttccggaggggagatggattccctggaatggaactgggctctggtgtatgagctcagtggagagcaccatgacgaagagtggtcagtgaagacttaccaggaagtagctcagaagtttgtggaaactcaccctgagtttattggaatcaaaatcatttattcggatcacagatccaaagatgtggctgtcatcgcagaatccatccgaatggccatggggctccgaatcaagttccccacggtggtggcagggtttgacctggtggggcatgaggacactggccactccttgcatgactacaaggaagctctgatgatccccgccaaggatggcgttaagctgccttacttcttccacgccggagaaacagactggcagggtacttccatagacaggaacattctggatgctctgatgctgaacactaccagaatcggccatggatttgctttgagcaaacaccccgcagtcaggacttactcctggaaaaaggacatccccatagaagtctgtcccatctctaaccaggtgctgaaactggtgtctgacttgaggaaccaccctgtagccactctgatggccactgggcaccccatggtgatcagctctgatgacccagctatgtttggtgccaaaggcttgtcctatgatttctatgaggtcttcatgggcattggggggatgaaggctgacctgaggaccctcaaacagctggccatgaactctatcaagtacagtaccctgttggagagtgagaaaaatactttcatggaaatctggaagaagagatgggataagttcatagcagatgtggctacaaagtgaggagaagctagccagccctctacaagctgtcttcttgcacacgctgtcacttcctctcactcgttcttgaatcagctccatgtgcccatgaaatcaatggcctctgtatggagcgaccctgtgagaagcacttggctggctgagcaaattcatcctctggaaatattctctctcagccacagtgacattgaccctcttggttttctcctgtctctggccatttcttccagtttccctatttcagagtcttctcctctctctgatctctgtgctgtttcctcaggactcagtcctgggctctcttctattctggtctctttatttttttatttttgtattttttcgagatggagttttgctcttgttgcccaggctggagtacaatggtgcgatctcagctcagtgcaacctccgccacccgggttcaggcaattctcttgcatcagcctcgcgagtagttggaattataggcatgtgccaccacacccagctgatttttgcatttttagtagagacaggttttcaccatgttggcgaggctggtatccaactcttgacctcaggtgatccactcgccccttggctcccaaagtgctggaattacaggcattagccaccatgcctggcctattctggtctctttaactctctcctctttatttctcttctctctctgtacacttttcctgggtggtctcatccattcctttgctttttcataccatttatttgttaatgattcccacatttatttatgcacttggagagctcacaggaatctcagaaactgatgaggtacaattctgaaccctcagtctcttccctttaaacctttctttttctctactttaatttttctaaagagtgtcttgctatgttgcccaggctggtctccaactcaagtgatcctcctgccgcagtctcccgaagtgctgggattactgacatgagccaccacactcagccctttaaacctttccctggcctttcccatagctggtgaaggacacctccatccattccacgcagttgctcaaagcagaaattttcagtgcaagtcttgatgctgcgccgtcccccactccctacatcagaacgcatccctcatctggactccagcggtggcttcttgatgctgcgcggtcccccactccctacatcagaatgcatcccgcatccagactccagcggtggtgctctacctgcacgctgttgccaagtccaagctaccatactcctgcctgagctatgacaacagcctcctcactgatctcccctttcttccctttgcctcctccagctcatttttcacagtgtagaatgacattttgtttgtttgttttgttttgtttgagatggagtctcgctctgttgcccagggtggagtgcagcggtgcgatctcggctcactgcaacctccacctcccgggttcaagcggattctcgtgcctcagcctcctgagtagctgggattacaggcatgcaccaccatgcccggataatttttgtatttttagtagagatggggtttcactatgttggccaggctggtctcgaacacctgacctcgtggtccacccgcctcggcctcccaaagcactgggattacaggcgtgagccacccggcctggcctagaatgacttttaaaagatcaaattaaatcaggtcactcctttgcttacaacgcagtgcgtttagaggtacaccccatgtctccacagggcatacagcatccgatttaatctggatccattccggcgccttcctctcccagtcacccagagggccccaaccccggcggccctttcttcctcaaatgtcctcggctctataccgtgcctgggtcttttctctttctctctgcctggaagattccttctttccccttttgtcttgcccactcctgtttacccttcaagtttcaagttcatgtcactgtctcagagaggttttcctgtgctcgccctgtttctctcaggaagccttgctcttttccatcatgcctctaatcacagcttataatcggatatttatttctgtgtctacagtcttgccctgccagactgtatgccccatgtgggcaggcgctcatgattgtttctgattgtttcacgcatgctgctaacccagagcctgggcccaaagctagttagtactcaataaacaatgcattgaa

SEQ ID NO: 252497 - DNA, 813 bp, Artificial Sequence
  derived and/or modified sequence
atggactcactggaatggaactgggcactggtctacgagctgagcggcgaacaccacgatgaagagtggagtgttaagacctaccaagaagtggctcagaagtttgtggaaacgcacccagagtttattggaattaaaatcatttattctgatcatcgttccaaggacgtggcagttatagctgagtcgattcgcatggctatggggcttcgcattaagttcccaacagttgtggccggtttcgatctcgtgggccacgaggacactggacactccctgcatgactacaaggaagccctgatgatcccagccaaagatggcgtgaaactgccttacttcttccacgccggcgagacagactggcagggaaccagcatcgataggaacatcctcgatgcactcatgctgaacacaacaagaattggtcacggatttgccctgagtaagcatccggcagtacggacctatagctggaaaaaagatattcccatcgaggtgtgccccataagtaatcaagtcctcaagctagtgtcagatttacgtaatcacccggtggctacattaatggcaaccggacatcccatggtgatctctagcgatgaccccgcaatgttcggggcgaaaggcctaagttacgatttttatgaggtcttcatggggatcggcggcatgaaggctgacttgagaactttgaaacagctagcaatgaactcgattaaatattctacactgctggagtcagagaaaaacactttcatggagatttggaagaagaggtgggacaagttcatcgccgacgtcgcaacaaagtag

SEQ ID NO: 252498 - DNA, 813 bp, Artificial Sequence
  derived and/or modified sequence
atggacagcctggagtggaactgggccctggtgtatgagctgtctggagagcaccatgatgaggagtggagcgtgaagacctaccaggaggtggcccagaagtttgtggagacccaccctgagttcatcggcatcaagatcatctacagcgaccacaggagcaaggatgtggccgtgattgctgagagcatccgcatggccatgggcctgcgcatcaagttccccaccgtggtggccggctttgacctggtgggccacgaggacaccggccacagcctgcatgactacaaggaggccctgatgatcccagccaaggatggagtgaagctgccctacttcttccacgccggggagacagactggcagggcaccagcattgacaggaacatcctggatgccctgatgctgaacaccaccagaattggacatggctttgccctgagcaagcaccctgctgtgaggacctacagctggaagaaggacatccccatcgaggtgtgccccatcagcaaccaggtgctgaagctggtgtctgacctgaggaaccaccctgtggccaccctgatggccaccggccaccccatggtgatcagcagtgatgatcctgccatgtttggagccaagggcctgtcctatgacttctatgaggtgttcatgggcattggaggcatgaaggctgacctgcggaccctgaagcagctggccatgaacagcatcaagtacagcaccctgctggagagcgagaagaacaccttcatggagatctggaagaagcgctgggacaagttcatcgcagatgtggccaccaagtag

SEQ ID NO: 252499 - DNA, 813 bp, Artificial Sequence
  derived and/or modified sequence
atggacagcctggagtggaactgggccctggtgtacgagctgagcggagaacatcacgacgaggagtggtccgttaagacctatcaggaggtcgcacaaaaatttgtcgaaacccaccccgagtttattggcatcaagatcatttactcggatcacagatccaaggatgtggccgtgatagcggagagtattcgtatggccatgggactacggattaagtttcccacagttgtggcaggtttcgatctggtcgggcacgaggacactggccatagtctgcatgactacaaggaggcccttatgataccagctaaagacggggtgaaacttccctatttctttcacgccggcgagacagactggcaggggacctctattgaccggaacatactcgacgctctcatgctgaacaccacacggatagggcacgggtttgcattgtccaagcatccggccgtccgcacttattcctggaagaaagacatcccaatcgaggtatgccctatctccaatcaggtcctcaaattggtctccgatctgaggaaccaccccgtcgcaaccctcatggccacgggacaccccatggttatcagctccgacgatccagctatgtttggcgctaaagggctgtcttacgacttctatgaggtcttcatggggataggcgggatgaaggcagatctccgcacattaaaacaactcgcgatgaattcgataaaatatagcacattactagagtctgagaaaaacacttttatggagatatggaaaaagcgctgggacaagttcattgcagacgtcgcgacaaaatag

SEQ ID NO: 252500 - RNA, 813 nt, Artificial Sequence
  derived and/or modified sequence
auggacagccuagaauggaacugggcucucguauaugaacuguccggcgaacaccacgacgaggaauggagugucaagacauaucaggaaguggcacagaaauuuguggagacccacccugaauuuaucggcaucaaaaucauauacucugaccaccgguccaaggaugucgccguuauugcugaaucuaucagaauggcuauggggcuuagaauaaaguuucccacaguggucgccggcuucgaccuggucggacacgaggacacgggccauucucuacacgacuacaaggaagcgcuaaugaucccagcaaaggauggagugaaacugccauacuucuuucaugccggcgagaccgacuggcagggaacaucaauugacaggaacauuuuagacgcucuuaugcugaauaccacucggaucggccacggcuuugccuuaucuaagcacccagcugugcgaacuuauucauggaagaaggacauucccauugaggucuguccgaucagcaaccagguacucaagcuugucuccgaccuccgcaaccaucccguagcaacauuaauggccacuggccacccuauggugaucagcagcgacgaucccgccauguucggggccaaaggacucucuuacgacuucuacgaaguuuucauggggaucgggggcaugaaagcugaucuuaggaccuugaaacagcucgcaaugaacagcaucaaauauucuacgcugcuggagagugaaaagaauacguuuauggagauuuggaagaagagaugggacaaauucaucgccgauguggcaacaaaguag

SEQ ID NO: 252501 - RNA, 813 nt, Artificial Sequence
  derived and/or modified sequence
auggauucuuuagaauggaacugggccuuaguguacgagcugagcggagagcaccacgacgaggaguggucuguaaagacuuaccaggaaguugcccagaaguucgucgagacccaucccgaauucauuggcaucaaaauuauuuauucagaccaccgaaguaaagauguugcaguuauagcugagucuauccguauggccaugggccugaggaucaaguuuccuacagucguugcaggguucgaccucgugggacaugaggauacgggacacagccuucaugauuacaaagaagcacucaugauuccagcaaaggacggcgugaaguuaccauauuuuuuccacgcuggagagacggacuggcagggaacgagcauugaccgcaauaucuuggacgcccugaugcugaauacgacccggauaggacacggauucgcacucuccaagcaccccgccguaaggacauacagcuggaaaaaagacaucccuauugaaguuugcccaaucucaaaucagguacuaaaacuggugagugaccugcguaaccacccugucgcuacacuuauggcaaccggacacccaaugguuauauccuccgaugauccggcaauguucggggcaaagggccuuucguacgauuuuuacgagguguucauggguauuggagguaugaaagccgaucuuagaacucugaagcagcuggcuaugaacaguaucaaguauagcaccuuacucgagucugaaaaaaauaccuuuauggagauauggaaaaaacgaugggacaaauucaucgccgauguugcaacaaaauag

SEQ ID NO: 252502 - protein, 347 aa, Artificial Sequence
  derived and/or modified sequence
MPRGQKSKLRAREKRRKAREETQGLKVAHATAAEKEECPSSSPVLGDTPTSSPAAGIPQKPQGAPPTTTAAAAVSCTESDEGAKCQGEENASFSQATTSTESSVKDPVAWEAGMLMHFILRKYKMREPIMKADMLKVVDEKYKDHFTEILNGASRRLELVFGLDLKEDNPSGHTYTLVSKLNLTNDGNLSNDWDFPRNGLLMPLLGVIFLKGNSATEEEIWKFMNVLGAYDGEEHLIYGEPRKFITQDLVQEKYLKYEQVPNSDPPRYQFLWGPRAYAETTKMKVLEFLAKMNGATPRDFPSHYEEALRDEEERAQVRSSVRARRRTTATTFRARSRAPFSRSSHPM

SEQ ID NO: 252503 - DNA, 1044 bp, Artificial Sequence
  derived and/or modified sequence
atgccacgcggccaaaaatcaaaactgcgagcccgcgaaaaaagaagaaaagcgcgcgaggaaacacaaggattaaaggttgctcacgctacggcagccgaaaaagaggagtgtcctagctccagcccagtactgggggacacacccactagctcacccgccgcgggtattccccagaaacctcagggagctcctcccaccaccaccgccgctgccgccgtctcttgcaccgaaagtgatgaaggcgccaagtgccagggcgaggagaacgcctccttctcgcaggccactacatcaaccgagtctagcgttaaggatcccgtggcctgggaggcagggatgttgatgcactttatcctgcgaaagtacaaaatgagagagcctatcatgaaggcggacatgttgaaggtggtagacgagaaatacaaggatcatttcacagagatactcaatggcgccagccgtaggctggaactcgtctttgggctggacttgaaggaggacaacccaagcggccatacttatactttggtttccaaactgaaccttaccaatgacggcaacctctccaatgactgggacttcccccgaaacgggttattaatgccgctgctgggcgtcatcttcttaaaagggaactctgcaaccgaggaggagatctggaaattcatgaatgtactgggagcctatgatggtgaggaacatttaatctacggcgagccaaggaagtttatcacacaggatctggtccaggaaaagtatctgaaatacgaacaggtccctaactccgaccccccccggtatcagtttctctggggccctcgcgcatacgcggaaaccactaagatgaaagttctggaatttctggccaaaatgaacggggcgacgcccagggacttcccatcacactatgaggaggcccttcgagatgaggaggagagagcccaggtgagaagcagcgtaagagcacgcaggcggactactgccacaacgttccgcgccaggagccgggcaccattcagtcggtcatcccacccaatgtag

SEQ ID NO: 252504 - DNA, 1044 bp, Artificial Sequence
  derived and/or modified sequence
atgcctaggggacagaaatcaaagctgagagcccgcgaaaaacggagaaaggctagggaagaaacccaggggctcaaggtggcccatgccactgctgccgagaaggaagaatgtccgagttccagtccagtactgggggatacccccacctccagccctgcagccggtattccccagaaacctcaaggggccccacccaccacaactgcagcagccgctgttagctgcactgaaagcgacgaaggggccaaatgccaaggcgaggaaaacgccagtttctcacaggcaactacctctacggagagctctgtcaaagatcccgtggcttgggaggctggaatgctcatgcacttcattcttcgtaaatacaagatgcgggagcctatcatgaaagccgatatgctcaaagtggtggatgaaaagtacaaagatcacttcaccgaaatcctcaacggcgccagccgcagactggaactcgtgttcggtctggatctaaaagaagataatccatccggccatacatatacactcgtgagcaaacttaatctaacaaatgatgggaacctctctaatgactgggattttcctcggaacggcctgctgatgcccctcctcggcgtaatttttcttaagggcaactctgctacagaggaagaaatctggaagtttatgaacgtgctgggagcctatgatggagaggagcacctgatctacggtgaacctcgaaagttcatcacgcaggatctcgtgcaggagaagtacctgaaatatgagcaggtccccaattctgatccaccacgctaccagtttctgtggggtccacgcgcatatgccgagaccactaaaatgaaggttctcgaatttttggctaaaatgaatggtgccacgccccgcgacttcccttctcactacgaagaggctcttagagacgaggaggagagggctcaagtgaggtctagcgtgagggctcgcaggcgcacgaccgcaaccacatttagagcacgaagcagagcccctttctctcgaagctcccacccaatgtag

SEQ ID NO: 252505 - DNA, 1044 bp, Artificial Sequence
  derived and/or modified sequence
atgcctaggggtcaaaagtctaagctaagagctagggagaagcgacggaaagcgcgcgaggaaactcaagggcttaaggtggcacatgccaccgcggccgagaaagaggaatgtccttcctcatctccggtcctgggcgacacacctacctcatcccctgcggccgggatccctcagaaaccccaaggtgcaccccccactacgacggcagcggccgccgtctcatgtaccgagagcgacgaaggggccaagtgtcagggcgaagagaacgcatcattttcccaggctaccacatccaccgaaagtagcgtaaaagatcccgtggcctgggaggcggggatgctgatgcacttcatcctcaggaaatacaagatgagggaacccataatgaaggccgatatgctgaaagtagtcgacgagaagtataaagaccactttaccgagattttgaacggcgcttctagaagattggaacttgtgttcggcctggacttgaaggaagacaacccctcagggcacacctacaccctggtgagtaaactcaacctaactaatgacggaaatctgagtaacgattgggactttccaaggaatggcctgctcatgcccctgttaggtgtcatctttctaaaaggcaacagtgctacagaggaggaaatatggaagttcatgaatgttctgggcgcatatgacggagaagagcacctgatttacggtgagccacggaaattcattactcaggacctggtccaggagaaatacctgaaatatgagcaagtgcctaacagtgatcccccacgctaccagtttctttggggccccagagcttatgcggagaccacaaaaatgaaagtgcttgaatttctagcaaagatgaatggcgccactccccgtgacttcccctcgcattatgaagaagcgctgagagatgaggaagagcgggcacaggtgagaagcagcgtgcgcgcaagacgcaggacgaccgccaccaccttccgcgctcgaagcagggctccgttctccaggtccagccatccaatgtag

SEQ ID NO: 252506 - DNA, 1044 bp, Artificial Sequence
  derived and/or modified sequence
atgccccggggccagaagagcaagctgcgggcccgggagaagaggaggaaggcccgggaggagacccagggcctgaaggtggcccacgccacagctgctgagaaggaggagtgccccagcagcagccctgtgctgggggacacccccaccagcagccctgctgctggcatcccccagaagccccagggcgccccacccaccaccacagctgctgctgctgtgtcctgcacagaaagtgatgagggcgccaagtgccagggcgaggagaatgccagcttcagccaggccaccaccagcacagagagctctgtgaaggaccctgtggcctgggaggccggcatgctgatgcacttcatcctgaggaagtacaagatgagggagcccatcatgaaggctgacatgctgaaggtggtggatgagaagtacaaggaccacttcacagagatcctgaatggagccagccggcggctggagctggtgtttggcctggacctgaaggaggacaaccccagcggccacacctacaccctggtgtccaagctgaacctgaccaatgatggcaacctgagcaatgactgggacttccccagaaatggcctgctgatgcccctgctgggcgtcatcttcctgaagggcaacagcgccacagaggaggagatctggaagttcatgaatgtgctgggcgcctatgatggagaggagcacctgatctacggggagcccaggaagttcatcacccaggacctggtgcaggagaagtacctgaagtatgagcaggtgcccaacagcgaccccccacgctaccagttcctgtggggcccccgggcctatgcagagaccaccaagatgaaggtgctggagttcctggccaagatgaatggagccaccccccgggacttccccagccactatgaggaggccctgagagatgaggaggagcgggcccaggtgcgcagctctgtgcgggcccggcggaggaccacagccaccaccttccgggcccggagccgggcccccttcagccgcagcagccaccccatgtag

SEQ ID NO: 252507 - DNA, 1866 bp, Artificial Sequence
  derived and/or modified sequence
cagtgttgcaactgggcctggcatgtttcagtgtggtgtccagcagtgtctcccactccttgtgaagtctgaggttgcaaaaggactgtgatcatatgaagatcatccaggagtacaactcgaaattctcagaaaacaggaccttgatgtgagaggagcaggttcaggtaaacaaagggcgaggacccgagcgagcttaaggagtggggtgcagcgtctggtcagcggagggtgaattctcaggactggtcgggagtcaaggtgccacatctcctgcctttctgctcactttcctgcctgttttgcctgaccacagccatcatgcctcggggtcagaagagtaagctccgtgctcgtgagaaacgccgcaaggcgcgagaggagacccagggtctcaaggttgctcacgccactgcagcagagaaagaggagtgcccctcctcctctcctgttttaggggatactcccacaagctcccctgctgctggcattccccagaagcctcagggagctccacccaccaccactgctgctgcagctgtgtcatgtaccgaatctgacgaaggtgccaaatgccaaggtgaggaaaatgcaagtttctcccaggccacaacatccactgagagctcagtcaaagatcctgtagcctgggaggcaggaatgctgatgcacttcattctacgtaagtataaaatgagagagcccattatgaaggcagatatgctgaaggttgttgatgaaaagtacaaggatcacttcactgagatcctcaatggagcctctcgccgcttggagctcgtctttggccttgatttgaaggaagacaaccctagtggccacacctacaccctcgtcagtaagctaaacctcaccaatgatggaaacctgagcaatgattgggactttcccaggaatgggcttctgatgcctctcctgggtgtgatcttcttaaagggcaactctgccaccgaggaagagatctggaaattcatgaatgtgttgggagcctatgatggagaggagcacttaatctatggggaaccccgtaagttcatcacccaagatctggtgcaggaaaaatatctgaagtacgagcaggtgcccaacagtgatcccccacgctatcaattcctatggggtccgagagcctatgctgaaaccaccaagatgaaagtcctcgagtttttggccaagatgaatggtgccactccccgtgacttcccatcccattatgaagaggctttgagagatgaggaagagagagcccaagtccgatccagtgttagagccaggcgtcgcactactgccacgacttttagagcgcgttctagagccccattcagcaggtcctcccaccccatgtgagaactcaggcagattgttcactttgtttttgtggcaagatgccaaccttttgaagtagtgagcagccaagatatggctagagagatcatcatatatatctcctttgtgttcctgttaaacattagtatctttcaagtgtttttcttttaatagaatgtttatttagagttgggatctatgtctatgagcgacatggatcacacatttattggtgctgccagctttaagcatatgagttttgatattctatatttttcaaatccttgaatcttttttgggttgaagaagaagaaagcatagctttagaatagagattttctcagaaatgtgtgaaagaacctcacacaacataattggagtcttaaaatagaggaagagtaagcaaagcatgtcaagtttttgttttctgcattcagttttgtttttgtaaaatccaaagatacatacctggttgtttttagccttttcaagaatgcagataaaataaatagtaataaatta

SEQ ID NO: 252508 - DNA, 1708 bp, Artificial Sequence
  derived and/or modified sequence
ttccgctttgaaggcgaggaccccagcgagcgtaagggcgcagtgtccgcctggcggatttgggtcagcaggcggaagtcgtcccaggctgctagatactaaggtgccacatctcctgcctttctgctcactttcctgcctgttttgcctgaccacagccatcatgcctcggggtcagaagagtaagctccgtgctcgtgagaaacgccgcaaggcgcgagaggagacccagggtctcaaggttgctcacgccactgcagcagagaaagaggagtgcccctcctcctctcctgttttaggggatactcccacaagctcccctgctgctggcattccccagaagcctcagggagctccacccaccaccactgctgctgcagctgtgtcatgtaccgaatctgacgaaggtgccaaatgccaaggtgaggaaaatgcaagtttctcccaggccacaacatccactgagagctcagtcaaagatcctgtagcctgggaggcaggaatgctgatgcacttcattctacgtaagtataaaatgagagagcccattatgaaggcagatatgctgaaggttgttgatgaaaagtacaaggatcacttcactgagatcctcaatggagcctctcgccgcttggagctcgtctttggccttgatttgaaggaagacaaccctagtggccacacctacaccctcgtcagtaagctaaacctcaccaatgatggaaacctgagcaatgattgggactttcccaggaatgggcttctgatgcctctcctgggtgtgatcttcttaaagggcaactctgccaccgaggaagagatctggaaattcatgaatgtgttgggagcctatgatggagaggagcacttaatctatggggaaccccgtaagttcatcacccaagatctggtgcaggaaaaatatctgaagtacgagcaggtgcccaacagtgatcccccacgctatcaattcctatggggtccgagagcctatgctgaaaccaccaagatgaaagtcctcgagtttttggccaagatgaatggtgccactccccgtgacttcccatcccattatgaagaggctttgagagatgaggaagagagagcccaagtccgatccagtgttagagccaggcgtcgcactactgccacgacttttagagcgcgttctagagccccattcagcaggtcctcccaccccatgtgagaactcaggcagattgttcactttgtttttgtggcaagatgccaaccttttgaagtagtgagcagccaagatatggctagagagatcatcatatatatctcctttgtgttcctgttaaacattagtatctttcaagtgtttttcttttaatagaatgtttatttagagttgggatctatgtctatgagcgacatggatcacacatttattggtgctgccagctttaagcatatgagttttgatattctatatttttcaaatccttgaatcttttttgggttgaagaagaagaaagcatagctttagaatagagattttctcagaaatgtgtgaaagaacctcacacaacataattggagtcttaaaatagaggaagagtaagcaaagcatgtcaagtttttgttttctgcattcagttttgtttttgtaaaatccaaagatacatacctggttgtttttagccttttcaagaatgcagataaaataaatagtaataaatta

SEQ ID NO: 252509 - DNA, 1782 bp, Artificial Sequence
  derived and/or modified sequence
agtgttgcaactgggcctggcatgtttcagtgtggtgtccagcagtgtctcccactccttgtgaagtctgaggttgcaaaaggactgtgatcatatgaagatcatccaggagtacaactcgaaattctcagaaaacaggaccttgatgtgagaggagcaggttcaggtaaacaaagggtgccacatctcctgcctttctgctcactttcctgcctgttttgcctgaccacagccatcatgcctcggggtcagaagagtaagctccgtgctcgtgagaaacgccgcaaggcgcgagaggagacccagggtctcaaggttgctcacgccactgcagcagagaaagaggagtgcccctcctcctctcctgttttaggggatactcccacaagctcccctgctgctggcattccccagaagcctcagggagctccacccaccaccactgctgctgcagctgtgtcatgtaccgaatctgacgaaggtgccaaatgccaaggtgaggaaaatgcaagtttctcccaggccacaacatccactgagagctcagtcaaagatcctgtagcctgggaggcaggaatgctgatgcacttcattctacgtaagtataaaatgagagagcccattatgaaggcagatatgctgaaggttgttgatgaaaagtacaaggatcacttcactgagatcctcaatggagcctctcgccgcttggagctcgtctttggccttgatttgaaggaagacaaccctagtggccacacctacaccctcgtcagtaagctaaacctcaccaatgatggaaacctgagcaatgattgggactttcccaggaatgggcttctgatgcctctcctgggtgtgatcttcttaaagggcaactctgccaccgaggaagagatctggaaattcatgaatgtgttgggagcctatgatggagaggagcacttaatctatggggaaccccgtaagttcatcacccaagatctggtgcaggaaaaatatctgaagtacgagcaggtgcccaacagtgatcccccacgctatcaattcctatggggtccgagagcctatgctgaaaccaccaagatgaaagtcctcgagtttttggccaagatgaatggtgccactccccgtgacttcccatcccattatgaagaggctttgagagatgaggaagagagagcccaagtccgatccagtgttagagccaggcgtcgcactactgccacgacttttagagcgcgttctagagccccattcagcaggtcctcccaccccatgtgagaactcaggcagattgttcactttgtttttgtggcaagatgccaaccttttgaagtagtgagcagccaagatatggctagagagatcatcatatatatctcctttgtgttcctgttaaacattagtatctttcaagtgtttttcttttaatagaatgtttatttagagttgggatctatgtctatgagcgacatggatcacacatttattggtgctgccagctttaagcatatgagttttgatattctatatttttcaaatccttgaatcttttttgggttgaagaagaagaaagcatagctttagaatagagattttctcagaaatgtgtgaaagaacctcacacaacataattggagtcttaaaatagaggaagagtaagcaaagcatgtcaagtttttgttttctgcattcagttttgtttttgtaaaatccaaagatacatacctggttgtttttagccttttcaagaatgcagataaaataaatagtaataaatta

SEQ ID NO: 252510 - DNA, 1044 bp, Artificial Sequence
  derived and/or modified sequence
atgccccggggccagaagagcaagctgcgggcccgggagaagcggaggaaagctcgcgaagaaacacagggactcaaggtagcccatgccacggctgctgagaaagaagaatgccctagctcgtccccagtactaggtgatacaccaacttcctctcccgccgctggaattccccaaaaaccgcagggtgctccgcccaccaccacagccgccgccgccgtgtcctgtactgaatccgacgagggtgctaagtgtcagggagaggagaatgcctctttttcccaggccactactagtacagagtcttcagtgaaggatcccgttgcctgggaggctggcatgctaatgcatttcatcctccgaaagtacaagatgcgtgagcccatcatgaaagccgacatgctgaaagtggttgatgagaagtacaaggatcactttacagaaatactcaacggagcatctaggagactggagctcgtgtttggcctcgatcttaaagaggacaaccccagcggacacacgtatacattagtgtccaagctgaatctgaccaatgatggtaacctgagtaacgactgggacttccctcgcaatggcctcctcatgcctcttctgggcgttatcttcctgaagggaaactctgctactgaggaagagatatggaaatttatgaacgtgttgggggcctatgatggcgaggagcacctgatatacggcgaacccagaaaattcatcacacaggacctcgtacaggagaaatatttgaagtatgagcaggtgccaaatagcgacccacccaggtatcagtttctttggggcccaagggcatatgcagaaaccaccaaaatgaaggtgcttgagttcttggccaagatgaacggtgccacgcctagggactttccctcccactatgaggaggctctgcgcgacgaagaggaacgagctcaggtgcggagcagtgtgagggctaggagacgtaccaccgctaccacattcagagctagaagtcgcgctccgttcagtcggtcttcccacccaatgtag

SEQ ID NO: 252511 - DNA, 1044 bp, Artificial Sequence
  derived and/or modified sequence
atgccccggggccagaagagcaagctgcgggcccgggagaagcggagaaaagcccgggaagaaacacagggtttgaaggttgctcacgcgacagctgcggagaaagaagagtgcccatcttcatcaccagtgttgggggatacccctacatccagcccagccgcaggcattccacagaaacctcagggtgcacctcccacaacaactgctgccgctgccgtgtcgtgtaccgagtctgatgaaggggccaaatgccaaggggaggagaacgcttcattttctcaggcaaccacatcgaccgaatcaagcgtgaaggatcctgtcgcttgggaggccggcatgctcatgcactttatactgaggaaatacaaaatgcgcgagcctataatgaaagcggacatgctgaaagttgtcgatgaaaagtacaaggaccacttcacggagatcctcaatggcgcaagtcgaagactcgagttggtgtttggcctggacctgaaagaggacaaccctagtggccatacatacaccctggtctctaagttaaatcttactaatgatggcaacctgagcaatgattgggacttcccaagaaatgggctgctgatgcctctgctcggcgtgatctttcttaagggcaatagcgctaccgaagaagagatctggaaattcatgaatgtccttggcgcctatgacggtgaggagcacctaatttacggcgagccgcggaagttcattacacaggaccttgttcaggagaaatatctcaaatatgaacaggtacctaattcggacccaccacgttaccaattcctgtggggacctcgagcctacgccgaaacaacaaaaatgaaggtcctggagtttctggccaaaatgaacggagcgacaccccgagattttcctagccattatgaagaggccctacgggacgaggaggagagggctcaggtccggtcatccgtgagagctcgcagacggacaacagccacaacctttcgagcaaggagcagggcccctttcagccgctcttcacatcctatgtag

SEQ ID NO: 252512 - DNA, 1044 bp, Artificial Sequence
  derived and/or modified sequence
atgccccggggccagaagagcaagctgcgggcccgggagaagcggaggaaggcccgggaggagacccaaggacttaaggttgcccacgccacagctgccgagaaggaagagtgtccatccagcagcccagtcctcggggatactcccacctccagtcccgcagccgggataccacagaagccgcagggggcccctcccacaaccacagcggctgccgccgtttcatgtaccgaatcggacgaaggggccaaatgtcagggagaggaaaacgcctccttctcgcaggctaccacatccacagaatcgtccgtcaaggatccggtggcatgggaggcggggatgctgatgcactttatcctaaggaagtacaagatgcgcgagcctatcatgaaggccgacatgctcaaggtggtggacgaaaaatacaaagatcattttacagagatactgaacggcgcctcccgcagactggaactcgtctttggtctcgacctcaaggaggataatccttccgggcatacatacaccctcgtcagtaaacttaatctgaccaatgacggaaatcttagtaacgattgggactttccgcgcaatgggttactaatgccactcttgggcgttatcttcctcaaaggaaacagtgccaccgaagaggagatttggaagttcatgaacgtgctaggcgcgtacgacggagaagagcatttaatatacggcgagccccgcaaatttatcacccaggacttggtacaagagaaatacctaaagtacgaacaggtgcctaattctgatcctccacgctatcagttcttatggggacccagggcctatgctgagacaaccaagatgaaggtgttagaatttctagctaaaatgaacggcgccacgcctcgcgacttcccgagccattacgaggaggctttgcgggatgaagaggaacgggcccaggtgagaagctctgtgcgggcccggcgaagaactacagctaccaccttcagagctagatcaagggcacccttttctagatccagtcatcctatgtag

SEQ ID NO: 252513 - DNA, 1044 bp, Artificial Sequence
  derived and/or modified sequence
atgccccgtggccagaagagcaagctccgagctagagagaaaagaagaaaagcaagagaagagacgcagggcctgaaagtcgcccatgctacagcagccgaaaaagaggaatgcccatcgtcctctccggtgctaggcgacactcccaccagttcgccagcggcaggaattccccagaaaccgcagggcgcaccacccactactaccgcggctgccgctgtaagctgtacagagagcgatgaaggtgctaagtgccagggggaggagaacgcctccttcagccaagcaacaacctcaaccgagtcctctgtgaaggatcccgtggcatgggaggcaggcatgctcatgcactttatcctgagaaagtataaaatgcgggagccaattatgaaagccgatatgcttaaggtggttgatgagaaatacaaagatcactttaccgagattctgaacggcgcaagtcggcgtctggagttggtgttcggcctcgacctgaaggaggataatccctctggtcacacatacacactggtgtccaaactgaatcttaccaacgacggcaatctgtccaatgattgggattttccgcgtaatggacttttgatgcccttgctgggtgtcattttcctgaaaggtaattctgccactgaggaagaaatctggaagttcatgaacgtgctgggcgcttatgacggagaggagcatttaatttatggtgagccacgtaaatttatcacacaagacctggtgcaggagaagtatctgaagtatgaacaagtcccaaactctgatcctccaagataccaattcctttgggggccacgcgcttacgctgagacaactaagatgaaggtcctcgagtttctggccaaaatgaacggcgctacacctagagacttcccaagccattacgaagaggctctgcgagatgaggaggagcgagcacaagtcagatcttcggtgcgggcacgacgcagaacaacagcgactacttttcgcgcacgcagtcgcgcaccattctctcgctcctcccatcctatgtag

SEQ ID NO: 252514 - DNA, 1044 bp, Artificial Sequence
  derived and/or modified sequence
atgccacggggtcagaaaagcaagctgcgagccagggagaagagacgcaaagctagggaagaaacccaaggcctcaaagtcgcccacgctaccgccgcagaaaaggaagagtgcccaagctcgagtccagttctgggagacacccctaccagtagcccagccgcaggaattcctcaaaaacctcagggcgctccaccaaccaccaccgccgctgccgctgtgagctgtacggagagcgacgaaggcgcaaagtgccaaggtgaagagaacgcgtccttctcccaggccactacgagcaccgaaagtagcgtgaaagatccagtcgcctgggaagctggaatgctgatgcatttcatcctacggaagtacaagatgcgtgaacctatcatgaaggctgacatgctcaaggttgtcgatgaaaaatacaaagatcattttacagaaatcctgaatggagccagtaggcggctggagttggttttcgggctggatctgaaggaggataatccttcaggacatacctataccctggtatccaaactgaacttgacgaatgatgggaacctgtctaatgattgggattttcctagaaatggtctgctcatgccactcctcggtgttatcttcctgaaggggaactcggctactgaggaagaaatatggaaattcatgaacgtactgggcgcttacgatggcgaggagcaccttatatatggggagccaagaaaatttatcacacaagacctggtgcaggaaaaatacttgaagtacgaacaggtgcctaactctgatccaccccgatatcagtttctgtggggaccacgggcttacgcggagacaaccaagatgaaggtgctggaattcctggccaaaatgaacggcgcaacgcctcgggacttcccctcccattacgaggaagctctccgagacgaggaggagcgggctcaggtgcggtcctcagtgcgcgcaaggaggcgtaccacagccaccactttcagagctaggagccgggctccattttcaaggtcatcccacccaatgtag

SEQ ID NO: 252515 - DNA, 1044 bp, Artificial Sequence
  derived and/or modified sequence
atgccacgaggacagaagagcaaattgagagcaagggagaaaaggagaaaagcgagggaggaaacccagggtctgaaagtggctcatgctaccgccgctgagaaagaagagtgcccgagctcttcccccgtccttggagatacacccacaagctcgccagccgcaggcattccacagaaaccccaaggcgcacctcccaccaccacagcagctgcagcggtctcttgcacggagtcggatgagggcgctaagtgtcagggcgaagaaaatgcctctttcagtcaggccacaacctcgacagaaagctcggtgaaagaccctgtggcttgggaagccggaatgctcatgcactttattcttagaaagtacaaaatgagggagcctatcatgaaggcagatatgttaaaggtcgtagacgagaagtacaaggatcactttactgaaatcctgaacggagccagtcggaggctcgagctcgtcttcggcctggacctgaaagaagacaacccctccggacatacctacacgctggtgtctaagctaaatctcactaacgacgggaatctgagtaatgactgggacttccctcggaatggccttctcatgcccctgctgggggtgatttttctcaagggtaactcagcaaccgaagaggaaatttggaagttcatgaacgtcctcggagcctacgatggagaggaacatctgatttatggggagccaagaaagtttatcactcaagacttggtgcaggaaaagtatctgaagtacgaacaggtgccaaactcagaccctcccagataccagtttttgtggggccctcgcgcatacgccgagactacaaagatgaaggtgttggagtttctagccaaaatgaacggcgctaccccgagggattttccaagtcactatgaagaagctctacgtgacgaggaggaaagggctcaggtcaggagttcagtgagggcaagacgccgaaccaccgcaaccacttttagagccagatcccgggctccatttagccggtcttcacaccctatgtag

SEQ ID NO: 252516 - DNA, 1044 bp, Artificial Sequence
  derived and/or modified sequence
atgcccagaggccagaagagcaagctgagagccagagagaagagaagaaaggccagagaggagacccagggcctgaaggtggcccacgccaccgccgccgagaaggaggagtgccccagcagcagccccgtgctgggcgacacccccaccagcagccccgccgccggcatcccccagaagccccagggcgccccccccaccaccaccgccgccgccgccgtgagctgcaccgagagcgacgagggcgccaagtgccagggcgaggagaacgccagcttcagccaggccaccaccagcaccgagagcagcgtgaaggaccccgtggcctgggaggccggcatgctgatgcacttcatcctgagaaagtacaagatgagagagcccatcatgaaggccgacatgctgaaggtggtggacgagaagtacaaggaccacttcaccgagatcctgaacggcgccagcagaagactggagctggtgttcggcctggacctgaaggaggacaaccccagcggccacacctacaccctggtgagcaagctgaacctgaccaacgacggcaacctgagcaacgactgggacttccccagaaacggcctgctgatgcccctgctgggcgtgatcttcctgaagggcaacagcgccaccgaggaggagatctggaagttcatgaacgtgctgggcgcctacgacggcgaggagcacctgatctacggcgagcccagaaagttcatcacccaggacctggtgcaggagaagtacctgaagtacgagcaggtgcccaacagcgacccccccagataccagttcctgtggggccccagagcctacgccgagaccaccaagatgaaggtgctggagttcctggccaagatgaacggcgccacccccagagacttccccagccactacgaggaggccctgagagacgaggaggagagagcccaggtgagaagcagcgtgagagccagaagaagaaccaccgccaccaccttcagagccagaagcagagcccccttcagcagaagcagccaccccatgtag

SEQ ID NO: 252517 - protein, 1185 aa, Artificial Sequence
  derived and/or modified sequence
MMCEVMPTISEAEGPPGGGGGHGSGSPSQPDADSHFEQLMVSMLEERDRLLDTLRETQETLALTQGKLHEVGHERDSLQRQLNTALPQEFAALTKELNVCREQLLEREEEIAELKAERNNTRLLLEHLECLVSRHERSLRMTVVKRQAQSPAGVSSEVEVLKALKSLFEHHKALDEKVRERLRVALERCSLLEEELGATHKELMILKEQNNQKKTLTDGVLDINHEQENTPSTSGKRSSDGSLSHEEDLAKVIELQEIISKQSREQSQMKERLASLSSHVTELEEDLDTARKDLIKSEEMNTKLQRDVREAMAQKEDMEERITTLEKRYLAAQREATSVHDLNDKLENEIANKDSMHRQTEDKNRQLQERLELAEQKLQQTLRKAETLPEVEAELAQRVAALSKAEERHGNIEERLRQMEAQLEEKNQELQRARQREKMNEEHNKRLSDTVDKLLSESNERLQLHLKERMAALEDKNSLLREVESAKKQLEETQHDKDQLVLNIEALRAELDHMRLRGASLHHGRPHLGSVPDFRFPMADGHTDSYSTSAVLRRPQKGRLAALRDEPSKVQTLNEQDWERAQQASVLANVAQAFESDADVSDGEDDRDTLLSSVDLLSPSGQADAHTLAMMLQEQLDAINKEIRLIQEEKENTEQRAEEIESRVGSGSLDNLGRFRSMSSIPPYPASSLASSSPPGSGRSTPRRIPHSPAREVDRLGVMTLLPPSREEVRDDKTTIKCETSPPSSPRALRLDRLHKGALHTVSHEDIRDIRNSTGSQDGPVSNPSSSNSSQDSLHKAPKKKGIKSSIGRLFGKKEKGRPGQTGKEALGQAGVSETDNSSQDALGLSKLGGQAEKNRKLQKKHELLEEARRQGLPFAQWDGPTVVVWLELWVGMPAWYVAACRANVKSGAIMSALSDTEIQREIGISNPLHRLKLRLAIQEIMSLTSPSAPPTSRTTLAYGDMNHEWIGNEWLPSLGLPQYRSYFMECLVDARMLDHLTKKDLRGQLKMVDSFHRNSFQCGIMCLRRLNYDRKELERKREESQSEIKDVLVWSNDRVIRWILSIGLKEYANNLIESGVHGALLALDETFDFSALALLLQIPTQNTQARAVLEREFNNLLVMGTDRRFDEDDDKSFRRAPSWRKKFRPKDIRGLAAGSAETLPANFRVTSSMSSPSMQPKKMQMDGM

SEQ ID NO: 252518 - DNA, 3558 bp, Artificial Sequence
  derived and/or modified sequence
atgatgtgtgaagtaatgcccacaatctccgaggcggagggacctccagggggcggcgggggacacgggtctggatcgccctcccaaccagatgccgatagccacttcgaacagctgatggttagcatgctcgaggagcgcgacagactgctggacaccctcagggagacgcaggagacactggctttgactcagggcaagcttcacgaggtgggccatgagagagattctttacagagacagctaaacactgcacttccacaggagttcgccgccttaacgaaagagttgaacgtctgccgcgaacagctgcttgaacgggaggaggagatcgccgagctgaaagcagaacgcaacaacacgagattactgttggaacacctggagtgtctcgtgtccaggcacgaacgttcactccgaatgaccgtggttaagcggcaggcccagagccctgctggggtgtcctccgaagtggaggtcctcaaggcactgaagagcttattcgagcaccacaaggcactggacgagaaagtcagagagaggctccgcgttgctttagaaaggtgttctctgctcgaggaggaattgggcgccacccataaagagctgatgatccttaaggagcagaataatcagaaaaaaactctcaccgacggagtgctcgacatcaaccatgagcaagagaatactccttctacttccggaaaacgatcatcagacgggtccctgagccacgaagaggacctggcaaaggtgatcgagctgcaggaaatcattagtaagcaatctcgagagcagagtcaaatgaaagagcggctcgcctctctgagttctcatgtgactgaactcgaagaggatcttgacactgccaggaaggacctgattaagagtgaggagatgaacactaaactacaacgtgacgttcgtgaagcgatggcccagaaggaggacatggaagaaagaattacgacattagagaaaagatatcttgccgcccagcgggaggccactagcgtgcatgacttaaacgacaagctggaaaatgagattgcaaataaggactccatgcaccggcaaacagaggataagaacagacagctccaagagcggctggagctcgctgagcagaaattgcaacagaccctgcggaaggcagagacgctgccggaggtggaagccgagctggcccagcgtgtggccgccttgtccaaggcggaggaaagacatggaaacattgaagagaggcttaggcagatggaggcccagctggaggaaaagaatcaagagttgcaacgggcgagacagagggaaaagatgaatgaggaacacaacaagcgactctctgatacagtagacaaactactgtccgagtctaacgagcgcctgcagctgcacctcaaggaaaggatggccgcacttgaggacaagaattcattgctacgcgaagtggagtccgctaaaaagcaactggaggagacgcagcatgataaggaccagttggtattgaatatcgaagctctcagggccgaacttgaccatatgcgcctacgaggcgcatcgcttcatcacggtagacctcacctcgggtcagttcctgactttcgattccctatggcagacggccataccgactcttattccacgtcagctgtgctgaggagaccccagaagggccggcttgccgctctgcgagacgaacctagcaaggtgcaaacgcttaacgagcaggattgggagcgggcccaacaggcatccgtcctggccaatgtggctcaggcttttgagtctgacgcagacgtaagcgatggcgaagatgatagggacaccctgctatcctcggttgatttactgagccctagtggccaagctgacgctcacacactggccatgatgcttcaagagcagctggacgccatcaacaaagaaatcagactgattcaggaggagaaagaaaacacagaacaacgagccgaggagattgaaagcagagtcgggagtggcagcctagataacctcggacgcttccgatctatgtcgagtatccccccctacccagcctcttccctggcatcgtcttctcccccaggctccggaagaagcacgccccgaagaattccacactctccagcccgcgaggtcgatcgattgggcgtcatgaccctgctccccccgtctagggaggaggtgagggacgataaaaccaccatcaaatgtgagacctcacctccttcctcaccccgcgctctgcgccttgatagactgcacaagggggcccttcacaccgtctcccacgaagatataagagacattcgtaattcgaccggcagtcaagatggtcctgtgtcaaacccttctagctctaattctagccaggacagcctgcacaaggcacctaagaaaaaagggatcaagagctcaatcggcaggctttttggtaagaaggaaaaaggccggcctgggcagactgggaaggaggccctcggccaggccggtgtatctgaaacagacaactcatcgcaagatgcacttggcctgtctaaactgggggggcaggccgagaagaatcggaagctccagaagaagcatgaattgctggaggaggcccgaaggcagggactgcctttcgcgcagtgggacgggcctacagtggtagtgtggttagagctctgggtcggaatgcccgcgtggtacgtagcggcatgtcgggcgaacgtgaaaagtggcgccattatgtctgcactaagcgacacagaaatccagagagagatcggaatctccaatccgttgcataggcttaagctgagactggctatacaggagatcatgtcactgactagcccatccgctccgccaacctcgagaaccaccttggcttatggggatatgaaccatgagtggataggaaacgaatggttgccgtccttgggactgccccaatatcgaagttatttcatggagtgcctggtggatgctcgcatgcttgaccacttaactaaaaaagatcttcgcggacagctgaagatggtggactcgtttcaccgcaatagcttccagtgtgggatcatgtgcttgagaaggctgaactatgatagaaaagagctcgagcgcaagagggaagagagccagagcgagataaaggacgtcctcgtgtggtctaacgatagggtgatcaggtggattctgtcaatcgggcttaaggaatacgccaataatctgatagaatcgggtgttcacggggccctcctggccctggacgagacctttgatttcagtgccttggcactactgctgcagattcccacacaaaatacccaggcccgagccgtcctggaacgcgagtttaataacctgctggttatgggcacagaccggaggtttgacgaggatgacgacaagagttttaggcgggctcccagctggcggaagaaatttcggcccaaggatattcggggcctggcagccggttccgccgaaacactgcccgcgaactttcgagtcacttcaagcatgtcctctccaagcatgcagccaaagaagatgcagatggatggcatgtag

SEQ ID NO: 252519 - DNA, 477 bp, Artificial Sequence
  derived and/or modified sequence
atgatgtgcgaggtgatgcctacaattagcgaagctgaaggcccaccaggtggtgggggaggacacggatctggctctccctcccaaccggacgctgattcccacttcgaacagcttatggtgagtatgctagaggagcgcgaccggttgctggacaccctacgggagacacaagagactctggcactgactcaggggaaactgcacgaagttggccatgaaagagactcccttcagaggcagctcaacaccgcccttccacaggagtttgccgcgctgactaaggaactaaacgtatgtcgggagcagttgttagaacgagaggaggaaatcgccgaactgaaagccgagaggaataatacacgactgcttctggaacacctcgagtgtctagtaagtcgacatgagagaagtctccggatgaccgtggtaaagcgccaggctcaatctccagctggtgtatctagtgaagtctag

SEQ ID NO: 252520 - DNA, 300 bp, Artificial Sequence
  derived and/or modified sequence
atgatgtgcgaagtgatgccaactatctctgaggctgaaggccccccgggaggcggaggcgggcacgggtccgggtccccctctcagcccgacgcagattcccatttcgaacagcttatggtatctatgctggaagagcgcgacagattattggacacgctccgggaaactcaggagacccttgcgctcacccaaggcaagctgcacgaggtgggccacgagcgtgacagccttcagaggcaacttaacaccgctctgccccaggagtttgctgccttgacgaaagaacttaatgtgtag

SEQ ID NO: 252521 - DNA, 3558 bp, Artificial Sequence
  derived and/or modified sequence
atgatgtgtgaggtgatgcccaccatcagcgaggccgagggccccccaggcggcggcggcggccacggcagcggcagccccagccagccagatgctgacagccactttgagcagctgatggtgtccatgctggaggagcgggaccggctgctggacaccctgcgggagacccaggagaccctggccctgacccagggcaagctgcacgaggtgggccacgagcgggacagcctgcagaggcagctgaacacagccctgccccaggagtttgctgccctgaccaaggagctgaatgtgtgccgggagcagctgctggagcgggaggaggagattgctgagctgaaggccgagaggaacaacacccggctgctgctggagcacctggagtgcctggtgtccagacatgagaggagcctgaggatgacagtggtgaagaggcaggcccagagccctgctggggtgagcagcgaggtggaggtgctgaaggccctgaagagcctgtttgagcaccacaaggccctggatgagaaggtgcgggagcggctgcgggtggccctggagcgctgcagcctgctggaggaggagctgggcgccacccacaaggagctgatgatcctgaaggagcagaacaaccagaagaagaccctgacagatggagtgctggacatcaaccacgagcaggagaacacccccagcaccagcggcaagaggagcagtgatggcagcctgagccatgaggaggacctggccaaggtgattgagctgcaggagatcatcagcaagcagagccgggagcagagccagatgaaggagcggctggccagcctgagcagccacgtgacagagctggaggaggacctggacacagccaggaaggacctgatcaagtctgaggagatgaacaccaagctgcagagagatgtgcgggaggccatggcccagaaggaggacatggaggagcgcatcaccaccctggagaagcgctacctggccgcccagcgggaggccacctctgtgcatgacctgaatgacaagctggagaatgagatcgccaacaaggacagcatgcaccggcagacagaggacaagaaccggcagctgcaggagcggctggagctggccgagcagaagctgcagcagaccctgaggaaggccgagaccctgcctgaggtggaggccgagctggcccagagggtggccgccctgagcaaggccgaggagagacatggcaacatcgaggagcggctgcggcagatggaggcccagctggaggagaagaaccaggagctgcagagggcccggcagcgggagaagatgaatgaggagcacaacaagaggctgagtgacacagtggacaagctgctgtctgagagcaatgaaaggctgcagctgcacctgaaggagaggatggccgccctggaggacaagaacagcctgctgcgggaggtggagagcgccaagaagcagctggaggagacccagcacgacaaggaccagctggtgctgaacatcgaggccctgcgggcagagctggaccacatgaggctgcggggggccagcctgcaccacggccggccccacctgggctctgtgcctgacttccgcttccccatggctgatggccacacagacagctacagcaccagcgctgtgctgcggcggccccagaagggccgcctggccgccctgagagatgagcccagcaaggtgcagaccctgaatgagcaggactgggagcgggcccagcaggcctctgtgctggccaacgtggcccaggcctttgaaagtgatgctgatgtgtctgatggagaagatgaccgggacaccctgctgagctctgtggacctgctgagccccagcggccaggctgatgcccacaccctggccatgatgctgcaggagcagctggatgccatcaacaaggagatccgcctcatccaggaggagaaggaaaatacagagcagagagctgaggagattgagagccgggtgggcagcggcagcctggacaacctgggccgcttccgctccatgagcagcatccccccctacccagccagcagcctggccagcagcagccccccaggcagcggccgcagcaccccccggcgcatcccccacagccctgcccgggaggtggaccggctgggcgtgatgaccctgctgccccccagccgggaggaggtgagagatgacaagaccaccatcaagtgtgagaccagcccccccagcagcccccgggccctgcggctggaccggctgcacaagggggccctgcacacagtgtcccatgaggacatccgggacatccggaacagcacaggcagccaggacggccctgtgagcaaccccagcagcagcaacagcagccaggacagcctgcacaaggcccccaagaagaagggcatcaagagcagcatcggccgcctgtttgggaagaaggagaagggccggcccggccagacaggcaaggaggccctgggccaggccggcgtgtctgaaacagacaacagcagccaggatgccctgggcctgagcaagctgggcggccaggccgagaagaacaggaagctgcagaagaagcatgagctgctggaggaggcccggcggcagggcctgccctttgcccagtgggatggccccaccgtggtggtgtggctggagctgtgggtgggcatgcctgcctggtacgtggccgcctgccgggccaacgtgaagagcggggccatcatgtctgccctgagtgacacagagatccagcgggagatcggcatcagcaaccccctgcaccggctgaagctgcggctggccatccaggagatcatgagcctgaccagccccagcgccccacccaccagcaggaccaccctggcctatggagacatgaaccacgagtggattggaaatgagtggctgcccagcctgggcctgccccagtaccgcagctacttcatggagtgcctggtggatgccaggatgctggaccacctgaccaagaaggacctgcggggccagctgaagatggtggacagcttccacaggaacagcttccagtgtggcatcatgtgcctgcggcggctgaactatgacaggaaggagctggagaggaagcgggaggagagccagagcgagatcaaggatgtgctggtgtggagcaatgacagagtcatccgctggatcctgagcatcggcctgaaggagtatgccaacaacctgattgaaagtggagtgcacggggccctgctggccctggatgagacctttgacttcagcgccctggccctgctgctgcagatccccacccagaacacccaggcccgggctgtgctggagcgggagttcaacaacctgctggtgatgggcacagacagaagatttgatgaagatgatgacaagagcttcagaagagcccccagctggaggaagaagttccggcccaaggacatccggggcctggccgccggcagcgctgagaccctgcctgccaacttccgggtgaccagctccatgagcagccccagcatgcagcccaagaagatgcagatggatggcatgtag

SEQ ID NO: 252522 - DNA, 477 bp, Artificial Sequence
  derived and/or modified sequence
atgatgtgtgaggtgatgcccaccatcagcgaggccgagggccccccaggcggcggcggcggccacggcagcggcagccccagccagccagatgctgacagccactttgagcagctgatggtgtccatgctggaggagcgggaccggctgctggacaccctgcgggagacccaggagaccctggccctgacccagggcaagctgcacgaggtgggccacgagcgggacagcctgcagaggcagctgaacacagccctgccccaggagtttgctgccctgaccaaggagctgaatgtgtgccgggagcagctgctggagcgggaggaggagattgctgagctgaaggccgagaggaacaacacccggctgctgctggagcacctggagtgcctggtgtccagacatgagaggagcctgaggatgacagtggtgaagaggcaggcccagagccctgctggggtgagcagcgaggtgtag

SEQ ID NO: 252523 - DNA, 300 bp, Artificial Sequence
  derived and/or modified sequence
atgatgtgtgaggtgatgcccaccatcagcgaggccgagggccccccaggcggcggcggcggccacggcagcggcagccccagccagccagatgctgacagccactttgagcagctgatggtgtccatgctggaggagcgggaccggctgctggacaccctgcgggagacccaggagaccctggccctgacccagggcaagctgcacgaggtgggccacgagcgggacagcctgcagaggcagctgaacacagccctgccccaggagtttgctgccctgaccaaggagctgaatgtgtag

SEQ ID NO: 252524 - DNA, 3558 bp, Artificial Sequence
  derived and/or modified sequence
atgatgtgcgaggtgatgcccaccatcagcgaggccgagggccccccaggaggaggcgggggacatggaagcgggtcaccgagtcagcccgatgctgactcccatttcgaacaactgatggtctccatgctagaggagagagatcggctgctggacacccttagagaaacacaggagacactggccctgacgcagggcaaacttcacgaagtgggccatgaacgcgacagcctccagcggcaactcaataccgctcttcctcaggagtttgccgccctcactaaagagctgaacgtttgtcgggagcagctcctggagcgcgaagaggagattgccgaactgaaagccgagaggaacaacacacgtcttttgcttgagcacttggagtgccttgtctctcggcatgagcgctccctgagaatgactgtcgtcaagagacaggcccaatccccagctggcgtaagctctgaggtggaagtcctgaaagctcttaaaagcctttttgaacatcataaggccctcgatgagaaagttcgtgagagactaagagtggcactggagagatgctcccttctcgaggaagaacttggcgctacacataaggaactgatgatcttgaaagaacagaataaccaaaaaaagacactgacagatggagtgcttgatattaatcacgaacaggaaaacacgcccagcacctctggcaaaaggtccagcgacggatccctgtctcatgaggaggatctggccaaggtgattgaactgcaggaaattatcagcaaacagagccgggagcaatcccaaatgaaagaaaggttggccagcctatcaagccatgtgacagagctggaggaagatctggatacagctaggaaggacctgatcaagtctgaggaaatgaacaccaaactgcaaagggatgtgcgcgaggctatggcacaaaaagaagatatggaagaaaggattacaacactggagaaacgttacctagcggctcaaagggaggcaacctccgtgcacgatttaaatgacaaactggagaatgagatcgcaaacaaagattctatgcacaggcaaaccgaagataaaaatcgccagttgcaggagcgattggagctggcagagcagaaactgcaacaaactctccgtaaggcggaaacactgccggaggtggaggccgaattagcccagagagtcgcggcattgtccaaggccgaagaacgacacggaaacatcgaggagcggttacggcagatggaggctcaactggaagagaagaatcaggagctgcagcgcgccagacagcgagagaaaatgaatgaggagcacaacaaaaggctttctgacaccgtggataagcttctttcggaaagcaatgagcggctgcagctgcaccttaaggagagaatggccgccctcgaggataagaactcactgctccgggaggtggaatcagcaaagaaacagttagaagagacacagcatgacaaagatcaactggtgctgaacattgaggcccttcgggccgaattagaccacatgcgcctccgtggagcatcactccatcatgggcggccccatctaggatctgtccctgactttcgtttcccaatggccgatggccatacagatagctactcgacctctgccgtcctgcggcgccctcagaagggacgacttgctgccctaagagacgagccatcaaaggttcagacacttaatgagcaggattgggagagagcacagcaggcttcagtgttggccaatgtcgcccaggccttcgagtccgacgctgatgttagcgatggagaagatgatagagataccttgctgtcttcagtggacctgttgagcccaagcggtcaggccgacgctcatactctggccatgatgttgcaggagcaactggatgcaattaacaaagaaatcaggctcatacaggaagagaaagaaaacaccgagcaacgagccgaggagatcgagagccgggttggctcagggagcctcgataatttgggcaggttccgatctatgagttcaatccccccatatcctgccagcagtcttgcctcttcatcgcctcctggatccggacgaagcacacccagaaggatcccacactcccctgcacgggaggtggatcgtttgggtgttatgacactgctcccccctagccgggaagaggtgcgagatgacaaaacgaccatcaaatgcgagacgagcccgccctctagcccaagagctcttagattggaccgactgcacaaaggggcactgcatactgtgtcacacgaggatatccgggacattagaaacagcaccggctcacaggacgggcccgtgtcaaacccttcctcatctaattcctcccaggacagcttgcataaggcccctaagaaaaagggcataaagagctcaatagggaggctatttggtaaaaaggaaaaaggcagaccggggcagaccgggaaagaagcactagggcaagcgggggtgagcgaaactgacaacagcagccaggatgcactgggcctcagtaaactgggcggccaggccgagaagaatagaaaattgcagaaaaagcatgaactactcgaggaggccaggcgccagggcttaccctttgcccagtgggacgggccgaccgtagtggtgtggctggagctgtgggtggggatgcctgcatggtatgtcgcagcttgcagagctaacgtcaagtccggggccatcatgtcagccctgtccgatactgaaattcagcgggagattggtattagcaacccactccatcgcctcaagttgaggctggctatacaggaaatcatgtctttaacctctccgtctgctccgcctacaagccgcacaaccctggcttatggcgacatgaatcatgagtggataggtaatgagtggctccccagcctgggcctgccccaataccggtcatattttatggagtgcctggtggatgctcggatgctcgaccatcttaccaaaaaagacctgcgggggcagctgaagatggttgactctttccaccgtaactccttccagtgcgggattatgtgtctaaggcggctcaactatgacaggaaggagctggagcggaaacgggaggagtcacaatctgagattaaggacgtcctggtgtggagcaacgacagagtgatccgctggatcctgtcgattggcttaaaggaatatgccaataacctgatcgaatctggggtacacggggccctgctggctcttgacgagacttttgatttcagtgcattagcactgctcctgcaaatccccacacagaacactcaagctagggcggtcctggaaagagagttcaataacttgttagtcatgggaaccgaccgtcggttcgacgaagacgacgataaatcatttagacgggcccccagctggcggaagaaattccgaccgaaggacatccgaggactcgccgcggggtcggcagaaactttgccagccaattttcgtgtgacctctagtatgtcttcaccgagcatgcagcccaaaaagatgcagatggacggcatgtag

SEQ ID NO: 252525 - DNA, 477 bp, Artificial Sequence
  derived and/or modified sequence
atgatgtgcgaggtgatgcccaccatcagcgaggccgagggccccccgggaggtgggggcggacatggcagcggcagtcctagccagcctgacgcagattctcacttcgagcagctgatggtgtcaatgctggaggaaagggaccgtttgttggatacgttgagggaaacacaggagacattggcgttgactcagggtaagctccacgaggtgggccacgaaagagatagtctgcagagacagctcaacacggctctgccccaggaattcgctgctctgactaaagagctgaacgtatgccgcgaacagctgctggagagggaagaggagatagctgagctaaaggccgagcggaacaacacgcggctattactcgagcacctggaatgtctcgtcagtcgccacgagcgctctctgcgcatgaccgtagttaagaggcaggctcagtcacccgccggagttagcagcgaggtttag

SEQ ID NO: 252526 - DNA, 300 bp, Artificial Sequence
  derived and/or modified sequence
atgatgtgcgaggtgatgcccaccatcagcgaggccgagggccccccaggcgggggtggcggacacggcagcgggtctccatctcagccagatgcggactctcatttcgagcaattaatggtctccatgcttgaagagcgggacagacttctggacacactccgtgagactcaggaaactttggcactcacacagggcaaactccacgaggttggacacgaacgggattcactgcagcggcagctcaacacagctctaccacaggagtttgccgcattaacaaaagagctgaacgtgtag

SEQ ID NO: 252527 - DNA, 3558 bp, Artificial Sequence
  derived and/or modified sequence
atgatgtgcgaggtgatgccaactatcagcgaggcggaagggcctcccggaggcggtggaggccacggatctggcagccccagtcagccggacgcagactctcacttcgagcaactgatggttagcatgctggaggagcgtgataggttgctggatacactcagagagacccaggaaacccttgccctgactcagggaaagctgcacgaggtcggacatgagcgagacagtctccaaaggcaactgaacactgcccttcctcaggagttcgccgcactgaccaaggagctgaacgtatgtcgtgaacaactgctcgagcgggaagaggagattgccgagctgaaagccgagagaaacaacacccgactattactcgagcacctggaatgtcttgtctcccgtcacgagcgaagtcttagaatgaccgttgtcaagaggcaggcccagagtcccgcaggtgtgtcaagcgaggtggaggtgctaaaggctctaaagagcctatttgaacatcacaaggccctagatgaaaaagtccgagaaagacttagggtggctctggaacggtgttccctgctagaagaagaactcggggctactcataaggaactgatgatcttgaaggaacagaacaaccaaaaaaagaccctgaccgacggcgttctcgacattaaccatgagcaggagaataccccctctacctccggcaagcgcagctccgatggttcacttagccatgaagaggatttggcaaaggttatcgagttgcaagagattatatccaaacagagccgggagcagagccagatgaaagagagactggcttcattgtctagtcacgtcacagagttggaggaggacctggatactgctcgcaaggatcttattaagtccgaagagatgaatacaaagctccagagggatgtacgcgaggcaatggcccagaaagaagacatggaggagcgcattaccacccttgagaaacgctacttagccgctcaacgggaagccacatccgtccatgatctcaatgacaaactcgagaacgagatcgccaacaaggactcaatgcataggcagaccgaagataagaaccggcaactgcaagagcgtcttgagctggcagaacaaaagcttcagcagacgctgagaaaggcggagactctccctgaagtcgaagccgagttggcacaacgggttgccgcactctccaaagctgaagaacgacacggaaacatagaggaacgcctcagacaaatggaggctcagctggaggagaagaatcaggagctccagcgggctcgccaacgcgaaaaaatgaacgaagaacacaacaaaaggctgtctgataccgtcgataaactcctatctgagagtaacgagagactacagttacatctgaaagagagaatggccgctctagaagacaaaaactccttgctacgcgaggtggagtcggccaagaagcagctggaagagacgcagcatgacaaggatcaactggtgctgaatatagaggctctgagagcggaactggaccacatgaggctgcgtggtgcttctttgcaccatgggcgaccacatctcggttctgtgccggactttaggtttccaatggcagacggccatacagactcgtacagcacatctgccgtcctcagaagacctcagaaaggacgcctggctgccctgcgcgacgagccgagcaaggttcagacccttaacgagcaggactgggagagagctcagcaggcttccgtactcgccaatgtagcccaggccttcgagagtgatgccgatgtgagcgacggcgaggatgatcgtgataccctcctaagctctgtcgacctgctttcccctagtggccaggcggacgcccacacactggccatgatgctgcaggagcagcttgatgcaatcaataaagaaatcagattgatccaggaggagaaagaaaacaccgagcagcgcgcagaagaaatcgagtcaagagtgggctctggatcgcttgataacctcgggagattcagaagcatgtcctctatcccaccttatccagccagctcacttgcctcttctagtcccccagggtccggacgcagcacccctagacgcatcccccattcaccagcccgtgaagtggatcggcttggcgtaatgacccttctgccgcctagtcgtgaggaagtacgggatgacaagactactatcaaatgcgaaacctcccccccatcctctcctagggcactgagactcgacaggctgcataagggcgctctgcatacagtgagccatgaggacatcagagatattcgtaactctacagggtcccaagatggtccagtatcaaacccttcttcttccaatagttctcaggatagcctgcacaaggcccctaaaaaaaagggtattaaatcttctattgggaggcttttcggtaagaaagaaaaggggagacctgggcagacaggtaaggaagctctgggccaagcaggggtgtccgagacggataacagcagccaggatgcacttggcttgtcaaaattgggagggcaggcagagaagaatcggaagctccagaagaagcacgagttgttagaagaggctaggagacagggactcccattcgctcaatgggatggaccaacagttgttgtctggttggaactgtgggtgggcatgcctgcttggtacgtcgccgcttgccgggcaaatgtcaaatctggagctataatgtccgctctgtccgacactgagatccagagagagataggtatatcgaacccgctgcaccgactgaagttaaggttggctatccaagaaattatgtccctgacctcccccagcgcgccacccacgagtcgaacaacgttggcctacggcgatatgaaccacgagtggattggaaacgaatggctgccttctctcggtctgccgcaatacaggagttacttcatggagtgtcttgtagacgcacggatgctggaccacctgacgaaaaaggatctgcgcggtcaattgaagatggtggactccttccataggaactcgtttcagtgtggcattatgtgtctgcgcaggctgaattacgaccgcaaagagctggagagaaagagggaagagagccagtcggagatcaaagatgtcctagtctggagcaacgatcgcgtcatacggtggatcctgagcatcggcctcaaagagtatgccaacaacttaatcgaatcaggggtgcatggtgctcttctggccctggatgagaccttcgacttttctgctctagctctcctactgcagatccctacccagaatacacaggctagagcagttctcgaaagagaattcaacaatctcctggttatgggcaccgacagaagattcgacgaagacgatgacaaaagctttcggcgagccccatcctggcggaagaagtttagacctaaagacatacgaggccttgccgctgggagcgctgaaactctcccagccaacttccgcgtaacctctagtatgagttccccttctatgcagcccaaaaaaatgcaaatggacgggatgtag

SEQ ID NO: 252528 - DNA, 477 bp, Artificial Sequence
  derived and/or modified sequence
atgatgtgtgaagtgatgcccaccatctccgaagccgagggccctccaggaggcggaggcggacatggttcaggcagtccctctcagccagacgcagattctcatttcgagcagttgatggtgtctatgctagaggagcgtgacagattgttggacactctacgtgagacacaggagaccctggccttaacacagggcaaattacatgaagtcggtcacgaacgagactccctccagcgccagttgaataccgcccttccgcaagagtttgcagctttgacgaaggaacttaacgtgtgtagagagcagctattggagagggaagaagaaattgctgagctgaaggcagagcgcaacaatacccgattgctgctggaacatctggagtgtctggtcagccgacatgaacggagcctgagaatgacagtagttaagaggcaggcgcaatcaccagccggtgtttcttctgaagtgtag

SEQ ID NO: 252529 - DNA, 300 bp, Artificial Sequence
  derived and/or modified sequence
atgatgtgcgaagtaatgcccacaattagcgaagctgagggtccacccggtgggggtggcggtcatggtagcggcagtccctcacagcccgacgcggactctcatttcgagcagctcatggtgagcatgctggaagaacgcgacaggctgctggacactctccgggagacgcaggagaccctggctctgacacagggtaagcttcacgaagtgggacacgagcgagatagtcttcagagacagttgaacaccgccctgcctcaggagtttgctgctctgaccaaggaactcaatgtgtag

SEQ ID NO: 252530 - DNA, 4133 bp, Artificial Sequence
  derived and/or modified sequence
gctcctcctccgctccgccagtgtccggccgcgggccggccttagtgactggggcggcgggccccggggccgcggcgtggggcgggcaggcggacgccggccgcgggctgctttcgtcggctcccaagctctcccggagcgagcagccgcccgcgagccgccgcggagcctcctcgcccgctcccgccggcgagcaagatgatgtgcgaggtgatgccgaccatcagcgaagcagaaggcccccctggaggaggtggaggccatggttccggctccccttcacagccagatgcagattcacattttgaacagttgatggtctccatgctagaagaaagggaccgccttcttgatacactgagagagactcaagaaacgctggccttaacccaggggaagttacacgaggttggtcatgaaagagattccttgcagagacagctcaacacggcacttccacaggagttcgcagcacttactaaagaactcaatgtatgcagggaacagctccttgaaagggaagaagaaattgctgaactgaaagcagaaaggaataacaccaggctgctgttagagcatttggaatgccttgtctccaggcatgagcggtctcttaggatgaccgtggtgaagagacaagcgcagtctccagcaggcgtgtccagcgaagtggaagtgctgaaagcactgaagtccttatttgaacaccacaaagctctggatgaaaaggtgagagagcgattacgagtagcacttgaaagatgtagtttgttagaagaggaattaggtgccacacacaaagagctaatgattcttaaagaacagaataatcagaaaaaaactctaacagatggagtgctggacataaaccatgaacaagaaaatacaccaagcacgagtggaaagagatcttctgatggttctttaagccacgaggaagaccttgctaaagtaattgagctccaagaaatcataagtaagcagtcaagggaacagagccaaatgaaagaacgcctggcttccctttccagtcatgtgacagaactggaagaggatctggacacggctagaaaagatctcatcaaatctgaagaaatgaacacaaaattgcaacgagatgtccgtgaagccatggcccaaaaggaagatatggaagagagaatcactactcttgaaaaacgctacctcgctgcacagcgtgaagccacatctgtgcatgacctcaatgataaacttgaaaatgaaattgcaaataaagattctatgcatcgacagactgaagataaaaaccgccagttacaggagcgcttggaattggcagagcaaaagctgcaacagacactgaggaaggcagagacgctcccggaggtggaggcggagctggcccagagggtggcagcgctttccaaggctgaagagagacacggcaacattgaagaaaggttacgacagatggaagcacagttggaggagaagaatcaagaactgcagcgggcaaggcaaagagaaaaaatgaacgaagaacataataaacgtttatcagacactgttgacaagctgctttcagaatctaatgagaggcttcaacttcatcttaaagagagaatggctgctttggaagataagaactctcttttaagagaagttgaaagtgcaaaaaagcagttagaagaaacacaacacgataaggatcagcttgtcctaaacattgaagcactgagggctgaactagaccacatgagactaagaggtgcttcacttcatcatggccgaccccacttgggcagtgtcccagatttcaggttccccatggcagacggccacacagactcctacagcaccagtgcagtgctgcggcgcccacagaaaggccggctggcagccctgcgagatgagccttccaaggtacaaactcttaatgagcaggattgggaacgtgcccagcaagctagtgtcttggcaaatgtagcacaagcattcgagagtgatgctgacgtgtctgatggtgaagatgacagggacactctcctcagctcagttgacctgctatcgcccagcgggcaggccgacgcgcacacactagccatgatgcttcaggagcagctggacgccatcaacaaagagatcaggttgattcaggaagaaaaagaaaatacagagcagcgggcagaggagattgaaagtcgagttggcagtggaagtctagacaatcttggtcgttttagatcaatgagctccattcccccctaccctgcttcctcgcttgctagctcctcccctccgggcagtgggcgctccaccccacgaaggatccctcacagcccagctcgggaagtggacagactgggcgtcatgacccttttgccaccttccagagaagaggtacgagatgacaagacaaccataaagtgtgaaacctccccgccttcctccccgagagcccttcggttagaccggctgcacaaaggggcgctgcacaccgtcagccacgaggacatcagggacataaggaactccacaggctcccaggatggtcccgtgagcaaccccagcagtagcaacagtagccaggactcgctccacaaagccccaaagaagaaaggcattaagtcctccattggccgcttgtttggcaagaaagaaaagggccgacctggacaaactggcaaagaagcattaggacaagctggtgtttccgagacggataactcatctcaggatgccttgggacttagcaaattggggggacaggctgaaaaaaatcgtaaacttcaaaaaaagcatgaattgctggaggaagcccggagacaaggtttaccttttgcccaatgggacgggccaacggttgtggtctggctagagctctgggttgggatgccagcctggtatgtggctgcctgccgagcaaacgtgaaaagcggggccatcatgtcggccctgtccgacacagagatccagcgtgagattggcatcagcaaccccctgcacaggctgaagctgaggctggccatccaggagatcatgtcgctgaccagcccgtctgccccgcccacatctagaacgacactcgcctatggggacatgaaccacgagtggatcggcaacgagtggctccccagcctgggcctcccccagtaccgcagctacttcatggagtgccttgtagacgccaggatgctggaccacttgaccaagaaagaccttcgagggcagctgaaaatggtcgacagttttcacagaaacagtttccagtgtggaattatgtgcctgagaaggttaaattatgaccggaaagaactggaaagaaaaagagaagaaagtcagagtgaaataaaagacgtgcttgtttggagcaatgatcgagtgattcgctggatcctgtcaattggccttaaagaatatgcaaacaatcttatagagagtggtgttcacggagcacttctggccttagatgaaaccttcgacttcagtgcactggcactgctgttacagatcccgacgcagaacacacaggctcgtgctgtcttggaaagagaatttaacaaccttttggtcatggggactgatagaaggtttgatgaagatgatgataaaagctttaggagagcaccttcatggagaaaaaagtttagaccaaaggacattcgtggcttagctgctgggtcagcagagactctccctgcaaacttccgggtgacttcttctatgtcttccccctctatgcagccaaagaagatgcagatggacggtatgtgatgggtcacactaacctgtcacttgttgggagcatgagcagctttctgtctggaacattaataatgatctaaaacggcctatttaatatgttacaaggcacttgagtatggttgcatgtccaaatataaatgtttttaaattaactctaacatttgtttataaaagtttaaccataataatagaatttttaaaacacgcttgtctggttgaatcttagcatatttttccaactaataaagctcagtattcgtctgtgttctcagagagagactgaggcatacttgtaaatttgtgtctgtgacaggccgtgctagaaagctctttcaggaaatagtagtgtagtagtagcttccaaaccacataatttactgctctcc

SEQ ID NO: 252531 - DNA, 575 bp, Artificial Sequence
  derived and/or modified sequence
tcaacggtcctcaccccccggggttcggggcttccgccgcacctgatacaggaggggaggagtgcggctcgagcaggctggaggtcaccatccccatcagatgatgtgcgaggtgatgccgaccatcagcgaagcagaaggcccccctggaggaggtggaggccatggttccggctccccttcacagccagatgcagattcacattttgaacagttgatggtctccatgctagaagaaagggaccgccttcttgatacactgagagagactcaagaaacgctggccttaacccaggggaagttacacgaggttggtcatgaaagagattccttgcagagacagctcaacacggcacttccacaggagttcgcagcacttactaaagaactcaatgtatgcagggaacagctccttgaaagggaagaagaaattgctgaactgaaagcagaaaggaataacaccaggctgctgttagagcatttggaatgccttgtctccaggcatgagcggtctcttaggatgaccgtggtgaagagacaagcgcagtctccagcaggcgtgtccagcgaagtgg

SEQ ID NO: 252532 - DNA, 563 bp, Artificial Sequence
  derived and/or modified sequence
ggcttgcccttttttgtgagggtagtcctttgggatcttgaccccttccctggatttttgtctgtgttaatgtcttcatgttgtgtatttttgcacttaatatttgccctgtgtatgttttcccagcttatttacacacaaagcataacagatctgagcataatgagactgcccatctttttagctacagatacctgtaaagttgcatatttgtgggaacctgtattctgagcttaattactgtagcctgggtctttcatttcaagatgatgtgcgaggtgatgccgaccatcagcgaagcagaaggcccccctggaggaggtggaggccatggttccggctccccttcacagccagatgcagattcacattttgaacagttgatggtctccatgctagaagaaagggaccgccttcttgatacactgagagagactcaagaaacgctggccttaacccaggggaagttacacgaggttggtcatgaaagagattccttgcagagacagctcaacacggcacttccacaggagttcgcagcacttactaaagaactcaatgta

SEQ ID NO: 252533 - DNA, 3558 bp, Artificial Sequence
  derived and/or modified sequence
atgatgtgcgaggtgatgcccaccatcagcgaggccgagggcccccccggcggcggcggcggccacggcagcggcagccccagccagcccgacgccgacagccacttcgagcagctgatggtgagcatgctggaggagagagacagactgctggacaccctgagagagacccaggagaccctggccctgacccagggcaagctgcacgaggtgggccacgagagagacagcctgcagagacagctgaacaccgccctgccccaggagttcgccgccctgaccaaggagctgaacgtgtgcagagagcagctgctggagagagaggaggagatcgccgagctgaaggccgagagaaacaacaccagactgctgctggagcacctggagtgcctggtgagcagacacgagagaagcctgagaatgaccgtggtgaagagacaggcccagagccccgccggcgtgagcagcgaggtggaggtgctgaaggccctgaagagcctgttcgagcaccacaaggccctggacgagaaggtgagagagagactgagagtggccctggagagatgcagcctgctggaggaggagctgggcgccacccacaaggagctgatgatcctgaaggagcagaacaaccagaagaagaccctgaccgacggcgtgctggacatcaaccacgagcaggagaacacccccagcaccagcggcaagagaagcagcgacggcagcctgagccacgaggaggacctggccaaggtgatcgagctgcaggagatcatcagcaagcagagcagagagcagagccagatgaaggagagactggccagcctgagcagccacgtgaccgagctggaggaggacctggacaccgccagaaaggacctgatcaagagcgaggagatgaacaccaagctgcagagagacgtgagagaggccatggcccagaaggaggacatggaggagagaatcaccaccctggagaagagatacctggccgcccagagagaggccaccagcgtgcacgacctgaacgacaagctggagaacgagatcgccaacaaggacagcatgcacagacagaccgaggacaagaacagacagctgcaggagagactggagctggccgagcagaagctgcagcagaccctgagaaaggccgagaccctgcccgaggtggaggccgagctggcccagagagtggccgccctgagcaaggccgaggagagacacggcaacatcgaggagagactgagacagatggaggcccagctggaggagaagaaccaggagctgcagagagccagacagagagagaagatgaacgaggagcacaacaagagactgagcgacaccgtggacaagctgctgagcgagagcaacgagagactgcagctgcacctgaaggagagaatggccgccctggaggacaagaacagcctgctgagagaggtggagagcgccaagaagcagctggaggagacccagcacgacaaggaccagctggtgctgaacatcgaggccctgagagccgagctggaccacatgagactgagaggcgccagcctgcaccacggcagaccccacctgggcagcgtgcccgacttcagattccccatggccgacggccacaccgacagctacagcaccagcgccgtgctgagaagaccccagaagggcagactggccgccctgagagacgagcccagcaaggtgcagaccctgaacgagcaggactgggagagagcccagcaggccagcgtgctggccaacgtggcccaggccttcgagagcgacgccgacgtgagcgacggcgaggacgacagagacaccctgctgagcagcgtggacctgctgagccccagcggccaggccgacgcccacaccctggccatgatgctgcaggagcagctggacgccatcaacaaggagatcagactgatccaggaggagaaggagaacaccgagcagagagccgaggagatcgagagcagagtgggcagcggcagcctggacaacctgggcagattcagaagcatgagcagcatccccccctaccccgccagcagcctggccagcagcagcccccccggcagcggcagaagcacccccagaagaatcccccacagccccgccagagaggtggacagactgggcgtgatgaccctgctgccccccagcagagaggaggtgagagacgacaagaccaccatcaagtgcgagaccagcccccccagcagccccagagccctgagactggacagactgcacaagggcgccctgcacaccgtgagccacgaggacatcagagacatcagaaacagcaccggcagccaggacggccccgtgagcaaccccagcagcagcaacagcagccaggacagcctgcacaaggcccccaagaagaagggcatcaagagcagcatcggcagactgttcggcaagaaggagaagggcagacccggccagaccggcaaggaggccctgggccaggccggcgtgagcgagaccgacaacagcagccaggacgccctgggcctgagcaagctgggcggccaggccgagaagaacagaaagctgcagaagaagcacgagctgctggaggaggccagaagacagggcctgcccttcgcccagtgggacggccccaccgtggtggtgtggctggagctgtgggtgggcatgcccgcctggtacgtggccgcctgcagagccaacgtgaagagcggcgccatcatgagcgccctgagcgacaccgagatccagagagagatcggcatcagcaaccccctgcacagactgaagctgagactggccatccaggagatcatgagcctgaccagccccagcgccccccccaccagcagaaccaccctggcctacggcgacatgaaccacgagtggatcggcaacgagtggctgcccagcctgggcctgccccagtacagaagctacttcatggagtgcctggtggacgccagaatgctggaccacctgaccaagaaggacctgagaggccagctgaagatggtggacagcttccacagaaacagcttccagtgcggcatcatgtgcctgagaagactgaactacgacagaaaggagctggagagaaagagagaggagagccagagcgagatcaaggacgtgctggtgtggagcaacgacagagtgatcagatggatcctgagcatcggcctgaaggagtacgccaacaacctgatcgagagcggcgtgcacggcgccctgctggccctggacgagaccttcgacttcagcgccctggccctgctgctgcagatccccacccagaacacccaggccagagccgtgctggagagagagttcaacaacctgctggtgatgggcaccgacagaagattcgacgaggacgacgacaagagcttcagaagagcccccagctggagaaagaagttcagacccaaggacatcagaggcctggccgccggcagcgccgagaccctgcccgccaacttcagagtgaccagcagcatgagcagccccagcatgcagcccaagaagatgcagatggacggcatgtag

SEQ ID NO: 252534 - DNA, 477 bp, Artificial Sequence
  derived and/or modified sequence
atgatgtgcgaggtgatgcccaccatcagcgaggccgagggcccccccggcggcggcggcggccacggcagcggcagccccagccagcccgacgccgacagccacttcgagcagctgatggtgagcatgctggaggagagagacagactgctggacaccctgagagagacccaggagaccctggccctgacccagggcaagctgcacgaggtgggccacgagagagacagcctgcagagacagctgaacaccgccctgccccaggagttcgccgccctgaccaaggagctgaacgtgtgcagagagcagctgctggagagagaggaggagatcgccgagctgaaggccgagagaaacaacaccagactgctgctggagcacctggagtgcctggtgagcagacacgagagaagcctgagaatgaccgtggtgaagagacaggcccagagccccgccggcgtgagcagcgaggtgtag

SEQ ID NO: 252535 - DNA, 300 bp, Artificial Sequence
  derived and/or modified sequence
atgatgtgcgaggtgatgcccaccatcagcgaggccgagggcccccccggcggcggcggcggccacggcagcggcagccccagccagcccgacgccgacagccacttcgagcagctgatggtgagcatgctggaggagagagacagactgctggacaccctgagagagacccaggagaccctggccctgacccagggcaagctgcacgaggtgggccacgagagagacagcctgcagagacagctgaacaccgccctgccccaggagttcgccgccctgaccaaggagctgaacgtgtag

SEQ ID NO: 252536 - protein, 361 aa, Artificial Sequence
  derived and/or modified sequence
MEQPQEEAPEVREEEEKEEVAEAEGAPELNGGPQHALPSSSYTDLSRSSSPPSLLDQLQMGCDGASCGSLNMECRVCGDKASGFHYGVHACEGCKGFFRRTIRMKLEYEKCERSCKIQKKNRNKCQYCRFQKCLALGMSHNAIRFGRMPEAEKRKLVAGLTANEGSQYNPQVADLKAFSKHIYNAYLKNFNMTKKKARSILTGKASHTAPFVIHDIETLWQAEKGLVWKQLVNGLPPYKEISVHVFYRCQCTTVETVRELTEFAKSIPSFSSLFLNDQVTLLKYGVHEAIFAMLASIVNKDGLLVANGSGFVTREFLRSLRKPFSDIIEPKFEFAVKFNALELDDSDLALFIAAIILCGGE

SEQ ID NO: 252537 - DNA, 1086 bp, Artificial Sequence
  derived and/or modified sequence
atggagcagccccaagaggaagcccctgaagtgcgcgaagaggaggagaaggaggaagtggcagaagccgagggggctcctgagctgaacggtggccctcagcacgcgttacccagttcctcgtatacagatctcagtagatcaagcagtccaccttccctattggatcagctccaaatgggatgtgatggggcaagttgtggtagtctgaatatggagtgccgtgtttgcggagataaggccagcgggtttcactatggtgtgcacgcttgtgagggttgtaagggatttttccgtaggaccattcggatgaaattagagtatgagaagtgcgagaggagttgcaagatccagaagaagaacaggaacaaatgccaatattgtcgatttcagaaatgcctggcccttggcatgtcacacaacgctatccggttcggaagaatgcctgaagccgagaaacgcaagctggtagccggattgacggccaacgagggcagccagtacaacccccaagtggctgacctcaaggccttcagcaagcacatatacaacgcatatcttaagaattttaatatgactaaaaagaaggcccggtccatcctcaccgggaaggcctctcataccgcaccctttgtaatccatgacattgaaaccctttggcaggccgagaagggcctggtctggaagcagctggtgaacggcctgcctccttacaaggagatcagtgttcatgtgttttaccgatgtcagtgtacgactgtggagactgtgcgcgaactcaccgagttcgccaagagcatccccagcttctcatctctgttcttaaacgaccaagttacgctcctgaaatatggcgtccacgaggccatattcgcaatgcttgcgtccattgtcaataaggacggactcctggtcgcgaatggatcagggtttgtgacacgggagtttttgaggagtttgagaaagccgttttcagatattattgaacccaagtttgaatttgccgtcaagtttaacgctttagaactggacgattcagacctcgccctgtttattgctgccatcatcctgtgtgggggagagtag

SEQ ID NO: 252538 - DNA, 1086 bp, Artificial Sequence
  derived and/or modified sequence
atggaacagccccaagaagaggctccagaagtgagagaagaggaggagaaagaagaggttgccgaggctgagggggctccagaactgaacggagggccccagcacgccctcccctcatcatcttataccgatctcagtcggtcttcctctcccccttctctcctggaccagctgcaaatgggatgcgacggggcctcatgtggatcacttaatatggaatgcagagtatgcggcgacaaagccagcgggtttcattacggagtccatgcctgtgagggatgtaagggcttcttccgacggacaataagaatgaagctggagtacgaaaaatgtgagcgatcttgtaagattcagaagaagaaccgtaacaagtgtcagtattgcagatttcaaaaatgtctggccctgggtatgagccataatgccatccgattcgggaggatgccggaggcggagaagcgaaagctcgtcgcgggcttgaccgctaacgaagggtcccaatacaatcctcaggtggctgacctcaaagctttttccaaacatatctacaatgcctacctgaagaactttaacatgactaagaagaaagcacgttcaattcttaccggcaaggcatctcacacagctcctttcgtgattcacgatattgaaacattgtggcaggctgagaagggactggtctggaaacaacttgtaaatggtcttccgccatacaaggagattagcgtgcatgtcttttatcggtgccagtgcaccacggtagagactgtgcgtgaattaaccgaattcgccaagagcataccttcgttctctagcctttttctcaatgaccaggttactttgttaaagtatggagtgcacgaggccatctttgccatgctcgcatctattgttaacaaagacggcctgctggtagccaacggctctggattcgtaacccgcgagtttctgcgctccctgcgcaaaccattctcggacataattgagcctaaatttgagttcgcagtcaaatttaatgcactggagctagatgacagcgatctggcgctgtttattgcagccatcattctatgtgggggtgagtag

SEQ ID NO: 252539 - DNA, 1086 bp, Artificial Sequence
  derived and/or modified sequence
atggagcagccccaggaggaggcccctgaggtgcgggaggaggaggagaaggaggaggtggccgaggccgagggcgcccctgagctgaatggaggcccccagcacgccctgcccagcagcagctacacagacctgagccgcagcagcagcccccccagcctgctggaccagctgcagatgggctgtgatggagccagctgtggcagcctgaacatggagtgccgggtgtgtggggacaaggccagcggcttccactacggcgtgcacgcctgtgagggctgcaagggcttcttccggaggaccatccgcatgaagctggagtatgagaagtgtgagaggagctgcaagatccagaagaagaacagaaacaagtgccagtactgccgcttccagaagtgcctggccctgggcatgagccacaatgccatccgctttggaaggatgcctgaggccgagaagaggaagctggtggccggcctgacagccaatgaaggcagccagtacaacccccaggtggccgacctgaaggccttcagcaagcacatctacaatgcctacctgaagaacttcaacatgaccaagaagaaggcccggagcatcctgaccgggaaggccagccacacagccccctttgtgattcatgacatcgagaccctgtggcaggccgagaagggcctggtgtggaagcagctggtgaatggcctgcccccctacaaggagatctctgtgcacgtgttctaccgctgccagtgcaccaccgtggagaccgtgcgggagctgacagaatttgccaagagcatccccagcttcagcagcctcttcctgaatgaccaggtgaccctgctgaagtatggagtgcatgaggccatctttgccatgctggccagcatcgtgaacaaggatggcctgctggtggccaatggaagtggctttgtgacccgggagttcctgcggagcctgaggaagcccttcagtgacatcatcgagcccaagtttgaatttgctgtgaagttcaatgccctggagctggatgacagcgacctggccctcttcatcgccgccatcatcctgtgtggcggggagtag

SEQ ID NO: 252540 - DNA, 1086 bp, Artificial Sequence
  derived and/or modified sequence
atggagcagccccaggaggaggcccccgaggtgcgggaggaggaggagaaagaagaggtcgcggaagccgaaggtgcaccagaactgaacggtgggcctcaacacgccctcccttcaagttcatacacagatcttagtagaagcagcagccctccgtccctgcttgatcagctgcagatggggtgcgacggggctagctgcgggagcctgaacatggaatgccgggtgtgcggtgataaagcatcaggctttcactatggagtgcacgcttgcgagggctgcaagggattttttagaagaaccataaggatgaagctcgagtatgaaaaatgcgagaggagctgcaagatccagaagaaaaacaggaataaatgtcagtattgccgttttcagaaatgtctcgccctgggaatgtctcataacgcaataagattcggtcgtatgccggaggccgagaaacgcaaacttgttgcgggacttacagccaacgaaggcagccaatataacccccaagtcgctgatctgaaggccttttctaaacacatatataacgcctacctgaagaactttaacatgacaaagaaaaaagcacggtcaattctgaccgggaaggcctcgcataccgccccgtttgtcattcacgatatcgaaaccttatggcaagcagaaaaaggattggtgtggaagcaattggtgaacgggctgccaccgtacaaagaaattagcgtccatgttttttatcgatgtcaatgtaccacggttgagaccgtcagagagctgaccgagtttgccaagtccattcccagtttcagctccctgtttctcaatgatcaggtcacgctcctaaagtatggcgtccacgaagccattttcgcaatgttagcctccatcgttaataaagatggcctgttagtggctaatggtagtggattcgttacaagggagttcctgcggtccttgagaaaacctttctctgatatcatcgaacctaaattcgagtttgcagtgaagttcaacgctctggagctggacgattccgacctggctctatttatagccgctatcatactgtgcggcggggaatag

SEQ ID NO: 252541 - DNA, 1086 bp, Artificial Sequence
  derived and/or modified sequence
atggagcagccccaggaggaggcccccgaggtgcgggaggaggaggagaaagaggaagtcgcagaggctgagggagctcccgaactgaacggtggtccacagcacgccctaccttcatctagttataccgacttatcaagatcatcgtcacctccatctctgctagaccagctgcaaatgggctgcgacggcgcttcctgtggaagccttaatatggagtgtcgggtttgtggcgataaagcgagcgggttccattacggagttcatgcgtgcgagggatgcaagggcttttttcgaaggacgattcggatgaagctcgaatacgagaagtgcgagagatcatgcaagatacagaagaaaaatcggaacaaatgccaatactgtaggttccagaagtgcctagccctcggtatgagccataacgccattaggttcggtcggatgccggaggcggaaaagcgcaagctggtggctgggttaacggcaaacgaaggaagccagtacaacccccaggtagctgacctaaaggccttcagcaaacatatctataatgcatatcttaaaaattttaacatgacaaaaaaaaaggcgagaagcatcctgaccggaaaggcctctcacacggctccctttgtgattcatgacatcgagaccctttggcaggctgagaagggcttagtttggaaacagctggtgaacggcctcccaccctataaagaaatcagcgtacacgtcttttatagatgccagtgtacgaccgtggagaccgttcgcgagttaaccgagttcgcaaagagcataccaagcttctcatctttattccttaacgaccaggtgacactgttaaagtacggtgtacatgaggcaatatttgcgatgctcgctagtattgtgaacaaggatggactgttggtggctaatggctcaggcttcgtgacgcgtgaattcctccggagcctcagaaaacccttttcagacataatagaaccgaagttcgagttcgcagtcaaattcaacgccctcgaactggatgactcagacctggcattgttcattgcggcaattatactgtgtggaggcgagtag

SEQ ID NO: 252542 - DNA, 2041 bp, Artificial Sequence
  derived and/or modified sequence
ggcaggagcgggagaattctgcggagcctgcgggacggcggcggtggcgccgtaggcagccgggacagtgttgtacagtgttttgggcatgcacgtgatactcacacagtggcttctgctcaccaacagatgaagacagatgcaccaacgagggtctggaatggtctggagtggtctggaaagcagggtcagatacccctggaaaactgaagcccgtggagcagtgatctctacaggactgcttcaaggctgatgggaaccaccctgtagaggtccatctgcgttcagacccagacgatgccagagctatgactgggcctgcaggtgtggcgccgaggggagatcagccatggagcagccacaggaggaagcccctgaggtccgggaagaggaggagaaagaggaagtggcagaggcagaaggagccccagagctcaatgggggaccacagcatgcacttccttccagcagctacacagacctctcccggagctcctcgccaccctcactgctggaccaactgcagatgggctgtgacggggcctcatgcggcagcctcaacatggagtgccgggtgtgcggggacaaggcatcgggcttccactacggtgttcatgcatgtgaggggtgcaagggcttcttccgtcgtacgatccgcatgaagctggagtacgagaagtgtgagcgcagctgcaagattcagaagaagaaccgcaacaagtgccagtactgccgcttccagaagtgcctggcactgggcatgtcacacaacgctatccgttttggtcggatgccggaggctgagaagaggaagctggtggcagggctgactgcaaacgaggggagccagtacaacccacaggtggccgacctgaaggccttctccaagcacatctacaatgcctacctgaaaaacttcaacatgaccaaaaagaaggcccgcagcatcctcaccggcaaagccagccacacggcgccctttgtgatccacgacatcgagacattgtggcaggcagagaaggggctggtgtggaagcagttggtgaatggcctgcctccctacaaggagatcagcgtgcacgtcttctaccgctgccagtgcaccacagtggagaccgtgcgggagctcactgagttcgccaagagcatccccagcttcagcagcctcttcctcaacgaccaggttacccttctcaagtatggcgtgcacgaggccatcttcgccatgctggcctctatcgtcaacaaggacgggctgctggtagccaacggcagtggctttgtcacccgtgagttcctgcgcagcctccgcaaacccttcagtgatatcattgagcctaagtttgaatttgctgtcaagttcaacgccctggaacttgatgacagtgacctggccctattcattgcggccatcattctgtgtggaggtgagtgagagtggggcaggtgggctggcctggcacacccagtcgtcctgggggttggccctcactgcagggcactgtgcctgagctctgacagtgtggggaagtgtccctgtgatcttggcagtggaacatgcaaggcactgactgagcatgcaggatcagctccatctcattatgtacgtagatagaggtggagacaggaaaaagactaagccagacgtggtggctcacacctgtaatcccagcactttggcaggccgaggcgggtggatcacttgaggtcaggagttcgaaaccagcctggccaacatggtgaaaccccgtctctactaaaaatacaaaaaattagccagatgtggtggcacgcgcctgtaatcccagctacttgggaggctgagccaggagaatcgcttgaacccgagaggtggaggttgcagtgagccaaaatcccaccactgcactccagcctgggtgacagagtgagaccctgtctcaaaaaaaaggaaaaggactaacaggcagtatgctgtcatgttaatgtggggtggaaaaattgtctgcattttttctgcatttttaaaattccaacacaataaatacaataataactatgc

SEQ ID NO: 252543 - DNA, 2002 bp, Artificial Sequence
  derived and/or modified sequence
gcggagcgtgtgacgctgcggccgccgcggacctggggattaatgggaaaagttttggcaggagcgggagaattctgcggagcctgcgggacggcggcggtggcgccgtaggcagccgggacagtgttgtacagtgttttgggcatgcacgtgatactcacacagtggcttctgctcaccaacagatgaagacagatgcaccaacgaggctgatgggaaccaccctgtagaggtccatctgcgttcagacccagacgatgccagagctatgactgggcctgcaggtgtggcgccgaggggagatcagccatggagcagccacaggaggaagcccctgaggtccgggaagaggaggagaaagaggaagtggcagaggcagaaggagccccagagctcaatgggggaccacagcatgcacttccttccagcagctacacagacctctcccggagctcctcgccaccctcactgctggaccaactgcagatgggctgtgacggggcctcatgcggcagcctcaacatggagtgccgggtgtgcggggacaaggcatcgggcttccactacggtgttcatgcatgtgaggggtgcaagggcttcttccgtcgtacgatccgcatgaagctggagtacgagaagtgtgagcgcagctgcaagattcagaagaagaaccgcaacaagtgccagtactgccgcttccagaagtgcctggcactgggcatgtcacacaacgctatccgttttggtcggatgccggaggctgagaagaggaagctggtggcagggctgactgcaaacgaggggagccagtacaacccacaggtggccgacctgaaggccttctccaagcacatctacaatgcctacctgaaaaacttcaacatgaccaaaaagaaggcccgcagcatcctcaccggcaaagccagccacacggcgccctttgtgatccacgacatcgagacattgtggcaggcagagaaggggctggtgtggaagcagttggtgaatggcctgcctccctacaaggagatcagcgtgcacgtcttctaccgctgccagtgcaccacagtggagaccgtgcgggagctcactgagttcgccaagagcatccccagcttcagcagcctcttcctcaacgaccaggttacccttctcaagtatggcgtgcacgaggccatcttcgccatgctggcctctatcgtcaacaaggacgggctgctggtagccaacggcagtggctttgtcacccgtgagttcctgcgcagcctccgcaaacccttcagtgatatcattgagcctaagtttgaatttgctgtcaagttcaacgccctggaacttgatgacagtgacctggccctattcattgcggccatcattctgtgtggaggtgagtgagagtggggcaggtgggctggcctggcacacccagtcgtcctgggggttggccctcactgcagggcactgtgcctgagctctgacagtgtggggaagtgtccctgtgatcttggcagtggaacatgcaaggcactgactgagcatgcaggatcagctccatctcattatgtacgtagatagaggtggagacaggaaaaagactaagccagacgtggtggctcacacctgtaatcccagcactttggcaggccgaggcgggtggatcacttgaggtcaggagttcgaaaccagcctggccaacatggtgaaaccccgtctctactaaaaatacaaaaaattagccagatgtggtggcacgcgcctgtaatcccagctacttgggaggctgagccaggagaatcgcttgaacccgagaggtggaggttgcagtgagccaaaatcccaccactgcactccagcctgggtgacagagtgagaccctgtctcaaaaaaaaggaaaaggactaacaggcagtatgctgtcatgttaatgtggggtggaaaaattgtctgcattttttctgcatttttaaaattccaacacaataaatacaataataactatgct

SEQ ID NO: 252544 - DNA, 1086 bp, Artificial Sequence
  derived and/or modified sequence
atggaacaacctcaggaagaagcaccagaggttcgtgaggaagaggagaaggaggaggtggctgaagctgagggtgcaccagagctgaacggcggaccacaacatgcactgcccagttccagctatactgatttgtctcggagttcgtcacctcctagcttgttggatcagttgcagatgggctgtgacggcgcaagctgcggatcactaaacatggaatgcagagtttgcggtgacaaagcatccggctttcattatggggttcacgcttgcgagggatgtaaggggttctttcgacggactatccgcatgaaattagaatatgaaaagtgtgaacggtcatgtaagatccagaaaaagaatcggaacaaatgccaatactgccgattccagaagtgtctggcgctaggcatgtcgcataatgctattcgttttggcagaatgcccgaggcggagaagcggaagctggtggcaggcctgactgccaatgagggtagccaatataatccccaggttgcagacctgaaagcgtttagtaagcacatctacaatgcctacctcaagaattttaatatgacaaagaagaaagccagatccattcttacagggaaagctagtcatactgccccatttgttatccacgacatcgaaacgctgtggcaggccgaaaaggggctggtgtggaagcaattggtgaacggactcccaccctataaggagatctcagtgcatgtgttctaccgctgtcaatgtactacagtcgagaccgtgcgggaacttacagaatttgctaaaagcataccatcttttagctccctgttcctcaacgatcaggtgactcttctcaagtacggcgtgcatgaggcaatctttgcgatgctcgcatccatcgtcaataaagatggactacttgtcgccaacgggtccggtttcgtgacaagagagttcctgagatctctgcgaaaaccctttagtgatattatcgagccgaagtttgagtttgccgtcaaattcaatgctttagagttggacgacagtgatttggcccttttcattgctgccatcatactttgcggaggtgagtag

SEQ ID NO: 252545 - DNA, 1086 bp, Artificial Sequence
  derived and/or modified sequence
atggaacaacctcaggaggaggcaccagaagtgagagaggaagaggagaaagaggaggtggccgaggccgaaggggctcctgagctgaacggaggcccacaacacgccctgccgagcagcagttacactgatctttccagatccagctccccccctagtttactcgatcagttacaaatgggatgtgacggagcttcgtgtgggtccctcaacatggaatgtcgcgtgtgcggagataaggctagcggctttcactatggtgtccacgcgtgtgaaggctgtaaaggattctttagaaggacaattcggatgaaactcgagtacgaaaagtgcgaacgctcctgtaaaattcagaagaagaatcgcaacaagtgccagtattgccgattccaaaaatgtctggccctggggatgtcccacaatgctattagattcggccgtatgccagaggccgaaaaacgcaagttggtcgccggtctcacagcgaacgaaggatcacagtacaaccctcaggtggccgatctcaaagctttcagcaaacacatttataacgcctacctgaaaaatttcaacatgacgaagaagaaggcgcgttccatactgacagggaaagctagtcacacagctccttttgttattcatgatatcgagaccctctggcaagccgaaaaaggattggtgtggaagcagttggttaacgggctccctccatataaggagattagcgtccacgtcttttatagatgccaatgtacaaccgttgagaccgtgagagaactcactgaattcgctaaaagcatcccttccttttctagcttgtttctgaacgaccaggtgaccctgttgaaatacggtgttcatgaggccatcttcgcaatgttagcctccatcgtaaataaggatggtctgctcgtggcaaatggctccgggtttgtgacgagagagttcttgcggagtctccggaagcccttttctgacataatcgaacccaagttcgagttcgccgtcaagtttaatgctctggagctggacgatagcgacctagctctctttatcgcggctataattctttgcggcggagagtag

SEQ ID NO: 252546 - DNA, 1086 bp, Artificial Sequence
  derived and/or modified sequence
atggagcagccccaggaggaggcccccgaggtgagagaggaggaggagaaggaggaggtggccgaggccgagggcgcccccgagctgaacggcggcccccagcacgccctgcccagcagcagctacaccgacctgagcagaagcagcagcccccccagcctgctggaccagctgcagatgggctgcgacggcgccagctgcggcagcctgaacatggagtgcagagtgtgcggcgacaaggccagcggcttccactacggcgtgcacgcctgcgagggctgcaagggcttcttcagaagaaccatcagaatgaagctggagtacgagaagtgcgagagaagctgcaagatccagaagaagaacagaaacaagtgccagtactgcagattccagaagtgcctggccctgggcatgagccacaacgccatcagattcggcagaatgcccgaggccgagaagagaaagctggtggccggcctgaccgccaacgagggcagccagtacaacccccaggtggccgacctgaaggccttcagcaagcacatctacaacgcctacctgaagaacttcaacatgaccaagaagaaggccagaagcatcctgaccggcaaggccagccacaccgcccccttcgtgatccacgacatcgagaccctgtggcaggccgagaagggcctggtgtggaagcagctggtgaacggcctgcccccctacaaggagatcagcgtgcacgtgttctacagatgccagtgcaccaccgtggagaccgtgagagagctgaccgagttcgccaagagcatccccagcttcagcagcctgttcctgaacgaccaggtgaccctgctgaagtacggcgtgcacgaggccatcttcgccatgctggccagcatcgtgaacaaggacggcctgctggtggccaacggcagcggcttcgtgaccagagagttcctgagaagcctgagaaagcccttcagcgacatcatcgagcccaagttcgagttcgccgtgaagttcaacgccctggagctggacgacagcgacctggccctgttcatcgccgccatcatcctgtgcggcggcgagtag

SEQ ID NO: 252547 - protein, 318 aa, Artificial Sequence
  derived and/or modified sequence
MNGDHMVLGSSVTDKKAIILVTILLLLRLVAIAGNGFITAALGVEWVLRRMLLPCDKLLVSLGASRFCLQSVVMGKTIYVFLHPMAFPYNPVLQFLAFQWDFLNAATLWSSTWLSVFYCVKIATFTHPVFFWLKHKLSGWLPWMLFSSVGLSSFTTILFFIGNHRMYQNYLRNHLQPWNVTGDSIRSYCEKFYLFPLKMITWTMPTAVFFICMILLITSLGRHRKKALLTTSGFREPSVQAHIKALLALLSFAMLFISYFLSLVFSAAGIFPPLDFKFWVWESVIYLCAAVHPIILLFSNCRLRAVLKSRRSSRCGTP

SEQ ID NO: 252548 - DNA, 957 bp, Artificial Sequence
  derived and/or modified sequence
atgaacggcgaccacatggtgctgggcagcagcgtgaccgacaagaaggccatcatcctggtgaccatcctgctgctgctgagactggtggccatcgccggcaacggcttcatcaccgccgccctgggcgtggagtgggtgctgagaagaatgctgctgccctgcgacaagctgctggtgagcctgggcgccagcagattctgcctgcagagcgtggtgatgggcaagaccatctacgtgttcctgcaccccatggccttcccctacaaccccgtgctgcagttcctggccttccagtgggacttcctgaacgccgccaccctgtggagcagcacctggctgagcgtgttctactgcgtgaagatcgccaccttcacccaccccgtgttcttctggctgaagcacaagctgagcggctggctgccctggatgctgttcagcagcgtgggcctgagcagcttcaccaccatcctgttcttcatcggcaaccacagaatgtaccagaactacctgagaaaccacctgcagccctggaacgtgaccggcgacagcatcagaagctactgcgagaagttctacctgttccccctgaagatgatcacctggaccatgcccaccgccgtgttcttcatctgcatgatcctgctgatcaccagcctgggcagacacagaaagaaggccctgctgaccaccagcggcttcagagagcccagcgtgcaggcccacatcaaggccctgctggccctgctgagcttcgccatgctgttcatcagctacttcctgagcctggtgttcagcgccgccggcatcttcccccccctggacttcaagttctgggtgtgggagagcgtgatctacctgtgcgccgccgtgcaccccatcatcctgctgttcagcaactgcagactgagagccgtgctgaagagcagaagaagcagcagatgcggcaccccctag

SEQ ID NO: 252549 - DNA, 957 bp, Artificial Sequence
  derived and/or modified sequence
atgaacggggatcatatggtcctgggttcaagtgtaacggataaaaaagcgatcattctcgtcacaatcttgcttctgctgaggttggtggctattgccgggaacggtttcatcacagctgcactgggagtggaatgggtgctgcggaggatgctcttgccttgcgataaactgctcgttagcctgggtgccagcaggttttgtctgcagtcagtagtgatgggcaaaactatttacgtgtttctgcacccgatggctttcccctataaccctgtactccagttcctggctttccagtgggattttctcaatgctgctaccttgtggtccagcacttggttgtctgttttctactgcgtaaagatcgcaacattcacacatcccgtgtttttttggctgaagcacaagctcagtggatggctcccctggatgctcttttccagcgtgggccttagttctttcaccaccatccttttctttatcggtaaccacaggatgtaccagaattacctccgcaaccacctgcagccttggaacgtcaccggggattccattcgctcatattgtgagaaattctatctgttccctctgaagatgatcacatggaccatgccgacagccgtgttcttcatctgtatgatcctgctgatcacttccttagggcgccacagaaaaaaagccttgctgaccacatccgggttccgcgagccaagcgtccaagcccacataaaagcgctgttggccctactgagtttcgcgatgctgtttatctcgtactttctgagccttgtgttctctgcagccggcatattcccacctctggattttaagttctgggtatgggaatcggtgatttacctatgtgccgctgtgcaccccatcatccttctgttcagcaactgccgattaagggccgtgcttaagagcagacggagctccagatgcggtacaccctag

SEQ ID NO: 252550 - DNA, 957 bp, Artificial Sequence
  derived and/or modified sequence
atgaatggagaccacatggtgctgggcagctctgtgacagacaagaaggccatcatcctggtgaccatcctgctgctgctgcggctggtggccatcgctggaaatggcttcatcacagctgccctgggcgtggagtgggtgctgcggaggatgctgctgccctgtgacaagctgctggtgtccctgggcgccagccgcttctgcctgcagagcgtggtgatgggcaagaccatctacgtgttcctgcaccccatggccttcccctacaaccctgtgctgcagttcctggccttccagtgggacttcctgaatgctgccaccctgtggagcagcacctggctgtctgtgttctactgtgtgaagatcgccaccttcacccaccctgtgttcttctggctgaagcacaagctgagcggctggctgccctggatgctgttcagctctgtgggcctgagcagcttcaccaccatcctcttcttcatcggcaaccacaggatgtaccagaactacctgaggaaccacctgcagccctggaatgtgactggagacagcatccgcagctactgtgagaagttctacctgttccccctgaagatgatcacctggaccatgcccacagctgtgttcttcatctgcatgatcctgctgatcaccagcctgggccgccacaggaagaaggccctgctgaccaccagcggcttccgggagcccagcgtgcaggcccacatcaaggccctgctggccctgctgagctttgccatgctgttcatctcctacttcctgagcctggtgttttctgctgctggcatcttcccccccctggacttcaagttctgggtgtgggagagcgtcatctacctgtgtgccgctgtgcaccccatcatcctgctcttcagcaactgccgcctgcgggctgtgctgaagagccgccgcagcagccgctgtggcaccccctag

SEQ ID NO: 252551 - DNA, 957 bp, Artificial Sequence
  derived and/or modified sequence
atgaacggcgaccacatggtgctgggcagcagcgtgaccgacaagaaggctatcatcctggtgaccattcttctgctgcttcgtctggtggcgatagccggcaacggttttattaccgccgccttgggggtggaatgggtgttgaggcgcatgctgttgccatgtgacaagcttctcgtctctcttggggctagcaggttttgtctgcaatccgtcgttatgggcaagacgatctacgtctttctgcatcctatggcttttccttacaacccagtgctgcagttcttggcgttccaatgggattttctgaacgccgccacactttggtccagcacctggttgagcgtattctactgtgtcaagatcgccacgttcacacacccagtcttcttttggcttaagcacaaactgtccggttggctcccctggatgctgttttcctcagtcgggctgtcctctttcacgacaatcctttttttcatcgggaaccaccgcatgtatcagaattacctgcggaaccacctccaaccatggaacgtcaccggagatagtatcagatcatactgtgagaaattttatctgtttcctttgaaaatgatcacttggacaatgcctacggcggtcttctttatctgtatgatactcctgatcacctccctggggcgccaccgaaagaaggccctcttgaccacctccggtttccgcgaaccctccgtgcaggctcatatcaaggcactgctggctctcctttcatttgcgatgctgtttatctcttacttcctgtccctggtttttagtgctgctggtatattccctcccttggattttaaattttgggtttgggagagcgtcatctacctctgcgccgccgtgcatccaatcatccttctgtttagcaactgccgcctgagagctgtgctgaaatcccgcagatcatcaaggtgtggaacaccttag

SEQ ID NO: 252552 - DNA, 957 bp, Artificial Sequence
  derived and/or modified sequence
atgaacggggatcatatggtgcttgggagtagcgttacagataaaaaggcgattattctggtgacaatccttctactacttcggctggtcgccattgctggcaacggtttcatcacggctgccctaggagttgaatgggtgctgcgcaggatgttactaccatgcgacaagctgctcgtgtctcttggggctagccgcttctgtctgcagagtgtggtgatggggaaaactatttacgttttcctgcatcctatggcgttcccatataaccctgttttgcagttcctagccttccaatgggacttcctgaatgccgctaccttatggtcttccacttggctgagtgtgttctattgtgtcaagatagccacattcacccacccagtgttcttctggttaaagcataagctcagtgggtggctgccttggatgttgttttcatccgtaggcttgagcagcttcactacgatcctgtttttcatagggaaccaccgaatgtatcagaattacctccgcaatcacctccagccctggaacgttacaggcgactctatacggtcctattgcgaaaagttctacctgttcccgctgaagatgatcacctggactatgccgaccgctgttttcttcatctgcatgatacttcttataacatccctggggcgtcacaggaaaaaagccctgttgaccacgtcagggtttcgtgaacccagcgtgcaggcccacattaaggccctccttgctctgctgagttttgcaatgctatttatctcctacttcctgtcccttgtgttttctgcagcgggaatctttcctccactcgactttaaattctgggtctgggaaagcgttatctacctctgcgctgcggtgcacccgatcattcttctgtttagtaactgtaggttgagggcagtattgaaatctaggagatcaagtaggtgtggtacaccttag

SEQ ID NO: 252553 - DNA, 957 bp, Artificial Sequence
  derived and/or modified sequence
atgaatggagaccacatggttctaggatcttcggtgactgacaagaaggccatcatcttggttaccattttactccttttacgcctggtagcaatagcaggcaatggcttcatcactgctgctctgggcgtggagtgggtgctacggagaatgttgttgccttgtgataagttattggttagcctaggggcctctcgcttctgtctgcagtcagtggtaatgggtaagaccatttatgttttcttgcatccgatggccttcccatacaaccctgtactgcagtttctagctttccagtgggacttcctgaatgctgccaccttatggtcctctacctggctcagtgtcttctattgtgtgaaaattgctaccttcacccaccctgtcttcttctggctaaagcacaagttgtctgggtggctaccatggatgctcttcagctctgtagggctctccagcttcaccaccattctatttttcataggcaaccacagaatgtatcagaactatttaaggaaccatctacaaccttggaatgtcactggcgatagcatacggagctactgtgagaaattctatctcttccctctaaaaatgattacttggacaatgcccactgctgtctttttcatttgcatgattttgctcatcacatctctgggaagacacaggaagaaggctctccttacaacctcaggattccgagagcccagtgtgcaggcacacataaaggctctgctggctctcctctcttttgccatgctcttcatctcatatttcctgtcactggtgttcagtgctgcaggtatttttccacctctggactttaaattctgggtgtgggagtcagtgatttatctgtgtgcagcagttcaccccatcattctgctcttcagcaactgcaggctgagagctgtgctgaagagtcgtcgttcctcaaggtgtgggacaccttga

SEQ ID NO: 252554 - protein, 327 aa, Artificial Sequence
  derived and/or modified sequence
MGRTSKDKRDVYYRLAKENGWRARSAFKLLQLDKEFQLFQGVTRAVDLCAAPGSWSQVLSQKIGGQGSGHVVAVDLQAMAPLPGVVQIQGDITQLSTAKEIIQHFKGCPADLVVCDGAPDVTGLHDVDEYMQAQLLLAALNIATHVLKPGGCFVAKIFRGRDVTLLYSQLQVFFSSVLCAKPRSSRNSSIEAFAVCQGYDPPEGFIPDLSKPLLDHSYDFNQLDGPTRIIVPFVTCGDLSSYDSDRSYPLDLEGGSEYKYTPPTQPPISPPYQEACTLKRKGQLAKEIRPQDCPISRVDTFPQPLAAPQCHTLLAPEMEDNEMSCSP

SEQ ID NO: 252555 - DNA, 984 bp, Artificial Sequence
  derived and/or modified sequence
atgggcagaaccagcaaggacaagagagacgtgtactacagactggccaaggagaacggctggagagccagaagcgccttcaagctgctgcagctggacaaggagttccagctgttccagggcgtgaccagagccgtggacctgtgcgccgcccccggcagctggagccaggtgctgagccagaagatcggcggccagggcagcggccacgtggtggccgtggacctgcaggccatggcccccctgcccggcgtggtgcagatccagggcgacatcacccagctgagcaccgccaaggagatcatccagcacttcaagggctgccccgccgacctggtggtgtgcgacggcgcccccgacgtgaccggcctgcacgacgtggacgagtacatgcaggcccagctgctgctggccgccctgaacatcgccacccacgtgctgaagcccggcggctgcttcgtggccaagatcttcagaggcagagacgtgaccctgctgtacagccagctgcaggtgttcttcagcagcgtgctgtgcgccaagcccagaagcagcagaaacagcagcatcgaggccttcgccgtgtgccagggctacgacccccccgagggcttcatccccgacctgagcaagcccctgctggaccacagctacgacttcaaccagctggacggccccaccagaatcatcgtgcccttcgtgacctgcggcgacctgagcagctacgacagcgacagaagctaccccctggacctggagggcggcagcgagtacaagtacaccccccccacccagccccccatcagccccccctaccaggaggcctgcaccctgaagagaaagggccagctggccaaggagatcagaccccaggactgccccatcagcagagtggacaccttcccccagcccctggccgccccccagtgccacaccctgctggcccccgagatggaggacaacgagatgagctgcagcccctag

SEQ ID NO: 252556 - DNA, 984 bp, Artificial Sequence
  derived and/or modified sequence
atgggccgtacctctaaggacaagagggacgtgtactatcgcttagctaaagagaatggctggagagcacgcagtgcatttaaattgcttcagctcgataaggagttccaactatttcagggtgtgacccgggccgtcgacctgtgcgcggcccccggtagttggagccaagtgcttagtcaaaaaattggggggcaggggagcggccacgtggttgctgtggacctgcaggcaatggccccactgcctggtgtcgtgcagatccagggcgatatcacccagctgagtaccgccaaggagataatccaacacttcaaaggctgtcccgccgaccttgtggtctgtgacggcgcccccgatgttacaggactgcacgacgtggacgaatacatgcaggcccaattgcttctggctgccctgaacatcgccacacatgtgctaaagcccggagggtgctttgttgccaagatcttcagggggcgcgatgttaccctgctttactcacagctacaagtctttttttcttccgttttgtgcgcaaaaccgcggtcgagtaggaatagcagtatagaagccttcgcagtgtgccaaggctacgatccacctgaaggatttattccggacctgtcaaagcccctgctcgatcattcttacgatttcaaccagctggacggccctaccaggattatagtcccatttgtcacatgtggtgatctgtcaagttacgatagcgacaggtcttaccctctcgaccttgaggggggcagtgagtataaatacacacctcccacccagccccccatcagtcccccataccaggaggcatgcaccctcaaaagaaagggtcagctggcaaaagagataagacctcaggattgtcctatcagccgggtagacacattcccgcaacccctcgccgctccacagtgccatacgctgctggctcccgagatggaggacaatgaaatgtcttgctccccttag

SEQ ID NO: 252557 - DNA, 984 bp, Artificial Sequence
  derived and/or modified sequence
atgggccggacctccaaagacaagcgggacgtctattaccggctggcaaaggagaatggctggcgcgcccgtagcgcattcaaactactgcagttagataaagagttccaattatttcagggggtaacaagagcagtcgacctctgcgccgcacctgggtcatggtctcaggttctatcacaaaagatcggcgggcaggggagcgggcatgttgtggccgtcgatctgcaggccatggctcctttacccggcgtagtgcagatacaaggagacattacacagctgtctactgctaaggaaataatacagcatttcaagggttgccctgccgatctcgtcgtgtgcgacggcgcccctgacgtcaccggtctgcacgacgtggatgaatacatgcaggcccaactgctactggcagcccttaacattgctactcacgttctgaaacctggcggctgctttgtcgctaagatctttagaggtcgcgacgtgactttgctgtatagccagttacaggtattcttctccagtgtattgtgcgctaagccaaggtcatctcgaaattcctctatcgaggcgtttgccgtgtgtcagggatatgacccacccgaagggtttatccccgacttaagtaagccgctccttgaccacagttacgattttaatcagctagacggacccaccaggatcatagtccctttcgtgacctgcggcgatctttcctcctatgactctgaccgcagttacccgttagacctcgagggggggtctgaatacaagtacaccccacccacacaaccaccaatatctcctccgtaccaggaagcatgcacgctcaagaggaaaggccagctggctaaggagatccgcccccaggactgccctatatctagagtcgacaccttcccacagccgcttgccgctccccagtgtcatactcttctggcgcccgaaatggaggacaacgagatgtcatgttccccttag

SEQ ID NO: 252558 - DNA, 984 bp, Artificial Sequence
  derived and/or modified sequence
atgggccgcaccagcaaggacaagagagatgtgtactaccgcctggccaaggaaaatggctggagggcccggagcgccttcaagctgctgcagctggacaaggagttccagctgttccagggcgtgaccagggctgtggacctgtgtgccgcccctggctcctggagccaggtgctgagccagaagattggaggccagggcagcggccacgtggtggccgtggacctgcaggccatggcccccctgcccggggtggtgcagatccagggcgacatcacccagctgagcacagccaaggagatcatccagcacttcaagggctgcccagctgacctggtggtgtgtgatggagccccagatgtgacaggcctgcatgatgtggatgagtacatgcaggcccagctgctgctggccgccctgaacatcgccacccacgtgctgaagccaggcggctgctttgtggccaagatcttccggggcagagatgtgaccctgctgtacagccagctgcaggtgttcttcagctctgtgctgtgtgccaagcccaggagcagcaggaacagcagcattgaggcctttgctgtgtgccagggctatgaccccccagagggcttcatcccagacctgagcaagcccctgctggaccacagctatgacttcaaccagctggatggccccacccgcatcatcgtgccctttgtgacctgtggggacctgagcagctatgacagcgacaggagctaccccctggacctggagggcggcagcgagtacaagtacaccccacccacccagccccccatcagccccccctaccaggaggcctgcaccctgaagaggaagggccagctggccaaggagatccggccccaggactgccccatcagccgggtggacaccttcccccagcccctggccgccccccagtgccacaccctgctggcccctgagatggaggacaatgagatgagctgcagcccctag

SEQ ID NO: 252559 - DNA, 1678 bp, Artificial Sequence
  derived and/or modified sequence
gatactggccggcatcagtggactgtcggcaggtccttgagcaactggtgtgtgaaatgggacggacgtcaaaggacaagcgggatgtctactaccgcctggccaaggagaatggctggcgtgctcgcagcgccttcaaactgctacaactggataaggaattccaactcttccaaggcgtgacacgggcagttgacctgtgtgcagccccaggcagctggagccaggtgctgagccagaagatcgggggccaagggtccggccacgtggtggctgtggacctgcaggctatggctccactaccaggtgtggtacagatccagggggacatcacccagctgtccactgccaaggagatcatccagcactttaagggctgccctgcggacctagtggtgtgtgacggggctcctgatgtaaccggtctccatgatgttgatgagtatatgcaggcccagctcctcctagctgctctgaacattgctacacatgtcctgaagccagggggctgctttgtggccaagatattccgaggccgggatgtgacgctcctctacagccagctgcaggtcttcttctccagcgtgctgtgtgccaagcccaggagcagccggaactctagcatcgaggccttcgctgtctgtcagggctatgaccctcccgagggcttcatcccggacctgagcaaacccctgctggaccattcttacgatttcaaccagctggatggtcccacccgcatcattgtgccttttgtgacctgtggggacctgagctcctatgattcggaccgcagttacccactggacctagagggcggctcagagtacaagtacactccacccacacagccccccatctcgccaccataccaggaggcctgcacgttgaagaggaaggggcagctggccaaggagatccgcccccaggactgccccatcagcagagtggacacgtttccccagcccctggccgcccctcagtgccacaccctgctggcccctgagatggaagacaatgaaatgagttgttcaccttaacccattacgctggcaaactgatacaactcagaaactgctcaatgtcaggaaaaccggaacttgttgatgaacttgttttcaaaatatcatctcatcaacgaggcctggacaaacaagccctgaggagggatctgcaacaaccctgaagacaacaaggaaagaaaccatgaaagtctgtctgtactgcagtgggaattcttgagtgaggtcttacctcttctttaaacctcttcaggagtgtcctgattatgtccagaattttccctaaaggcagggattcttaacctggatagaagccaggggtaaccatgaacttgatggaagaaaatgttacatctttattttcagcaatgaaactgaaatttagccttactcccaagttataaatgctggcaacaaatcacagtagtaaaagcagtacctgggattttcccaccaatacaaaccagttacagcaactgtaatgtaacataaaaagggcatcttgaagtattgttcatatttgtcacctcttggaatgatagcagatcctgtaagttgatgtattaattaaaaagcccatatattactgcatctcaattttgtttcaatttaatatatagtaataattgtaattcaatgtaattggcttccattgt

SEQ ID NO: 252560 - DNA, 1986 bp, Artificial Sequence
  derived and/or modified sequence
ggatacgtcgacaatagatgacggggctcacgttgtacgttcacatcaggtcccggcccgccggaacctgggcgatccacgatgccgagtttgccacgctgcgacagcccataggcttgcccccccgggcattcgggtggactacgaacacaaactgaagccctaggacttgtcgcccgtttgcgctctcgccgaggcacaggctgctcgcggaccaccctgctccgaaaactaagaaggggaccagtagacggggtggattcgaggtggggacatgggacgcagcggtcggagccgcctggaggggtacccggtggtcccgatggagctatcatctttgagaggtaggtggtagcccattcatctggttactgatactggccggcatcagtggactgtcggcaggtccttgagcaactggtgtgtgaaatgggacggacgtcaaaggacaagcgggatgtctactaccgcctggccaaggagaatggctggcgtgctcgcagcgccttcaaactgctacaactggataaggaattccaactcttccaaggcgtgacacgggcagttgacctgtgtgcagccccaggcagctggagccaggtgctgagccagaagatcgggggccaagggtccggccacgtggtggctgtggacctgcaggctatggctccactaccaggtgtggtacagatccagggggacatcacccagctgtccactgccaaggagatcatccagcactttaagggctgccctgcggacctagtggtgtgtgacggggctcctgatgtaaccggtctccatgatgttgatgagtatatgcaggcccagctcctcctagctgctctgaacattgctacacatgtcctgaagccagggggctgctttgtggccaagatattccgaggccgggatgtgacgctcctctacagccagctgcaggtcttcttctccagcgtgctgtgtgccaagcccaggagcagccggaactctagcatcgaggccttcgctgtctgtcagggctatgaccctcccgagggcttcatcccggacctgagcaaacccctgctggaccattcttacgatttcaaccagctggatggtcccacccgcatcattgtgccttttgtgacctgtggggacctgagctcctatgattcggaccgcagttacccactggacctagagggcggctcagagtacaagtacactccacccacacagccccccatctcgccaccataccaggaggcctgcacgttgaagaggaaggggcagctggccaaggagatccgcccccaggactgccccatcagcagagtggacacgtttccccagcccctggccgcccctcagtgccacaccctgctggcccctgagatggaagacaatgaaatgagttgttcaccttaacccattacgctggcaaactgatacaactcagaaactgctcaatgtcaggaaaaccggaacttgttgatgaacttgttttcaaaatatcatctcatcaacgaggcctggacaaacaagccctgaggagggatctgcaacaaccctgaagacaacaaggaaagaaaccatgaaagtctgtctgtactgcagtgggaattcttgagtgaggtcttacctcttctttaaacctcttcaggagtgtcctgattatgtccagaattttccctaaaggcagggattcttaacctggatagaagccaggggtaaccatgaacttgatggaagaaaatgttacatctttattttcagcaatgaaactgaaatttagccttactcccaagttataaatgctggcaacaaatcacagtagtaaaagcagtacctgggattttcccaccaatacaaaccagttacagcaactgtaatgtaacataaaaagggcatcttgaagtattgttcatatttgtcacctcttggaatgatagcagatcctgtaagttgatgtattaattaaaaagcccatatattactgca

SEQ ID NO: 252561 - DNA, 984 bp, Artificial Sequence
  derived and/or modified sequence
atgggccggaccagcaaggacaagcgggacgtgtactaccggctggccaaagaaaatggatggcgcgcccggtccgccttcaaattgctgcagctggataaggagtttcagctgttccagggagtgacaagagctgtggatttgtgtgccgcgccaggtagttggtcccaggtcctgtcacaaaaaatcggcggacaggggtcgggtcatgtcgtggccgtggatctgcaggcgatggccccactgccaggggttgtccagatacagggcgatatcactcagttgagtactgccaaagagattatccagcacttcaaaggttgtcccgccgatttggtggtctgtgatggggctcctgacgtgacagggctacatgacgtggacgagtatatgcaggcacaactgctgttagcagcacttaacatcgcaacacacgtattgaagcccggaggatgctttgtggccaagattttccgcggacgcgacgtgactttactgtactcccagctccaagtgtttttcagctcagtactgtgcgccaagccacggagctcccggaactccagcattgaagcctttgcagtatgccaggggtacgaccctcctgagggatttataccagatctttccaagcccctcctcgatcacagttatgactttaatcagttggacggacccacgagaatcattgtcccgtttgtgacatgtggagacctgtcgtcttacgattcagatcggtcttaccccttggacctggaaggcggaagcgaatacaagtacacccccccgacacaacctcccatctcgcctccttatcaggaagcatgcacgttaaagcgcaaaggtcagctggccaaggaaattcgtcctcaggattgccccatctcccgggtagatacatttccccagcccctggcagctcctcagtgtcacaccttactcgcgcctgaaatggaagataatgagatgtcttgcagcccatag

SEQ ID NO: 252562 - DNA, 984 bp, Artificial Sequence
  derived and/or modified sequence
atgggccggaccagcaaggacaagcgggacgtgtactaccggctggccaaagagaatgggtggagagctcgcagcgctttcaaactactacaactggacaaggagttccagttgtttcagggcgttacccgagcagtggatctgtgcgctgcaccaggctcttggtctcaggtcctgtcccagaagattggtggccagggctcgggacacgtcgttgcggttgacctgcaagccatggcccctctgcctggtgtagtgcaaattcaaggggacatcacgcaacttagcaccgccaaggagatcatccaacacttcaagggttgccctgccgacttggtggtgtgcgacggcgctccagatgtgactggcctgcatgacgttgatgaatatatgcaggcccagctgctgctggccgcgctgaatatcgctactcacgtactcaagcccgggggctgcttcgtagccaagatatttcggggcagggacgtgactctgctttactctcagcttcaggtgtttttctcgagcgtgttgtgcgcaaagcctagatcttcccggaatagttccattgaggcttttgccgtgtgccaaggctacgatcctccagaaggctttattcccgatctcagcaaaccgctgcttgatcacagttacgatttcaaccaattggacggcccaactaggattatagtaccttttgtcacttgcggggacctatctagctacgattcagaccggtcctacccgctcgaccttgaagggggctcagaatacaagtacacacctcccacccagccacccattagcccaccttaccaggaagcttgtacgctgaagcgcaaggggcagttagccaaagaaatccggcctcaagattgtcccatatccagagtcgacacatttccccagcctctggctgctcctcagtgtcataccctcctggcccctgagatggaagataatgagatgtcttgctcgccctag

SEQ ID NO: 252563 - DNA, 984 bp, Artificial Sequence
  derived and/or modified sequence
atgggccgtacctccaaagataagagagacgtgtactaccgtctggccaaggaaaacggctggcgtgccaggtccgcttttaagttgctccaactggataaggagttccagctattccagggcgtcacccgggctgtggatctatgcgcagccccagggtcatggagtcaagtcttgtcccagaagatcgggggacagggcagtggacacgtggttgctgtggaccttcaggcaatggcccctctccccggtgtggtgcaaattcagggagatatcacacagctgtctaccgccaaggagatcatccaacactttaaaggatgccctgctgatctggtggtgtgtgacggcgctcccgacgtcacagggctgcatgatgtggacgagtatatgcaggcacagctcctcctggcagccttaaacattgcaacgcacgtgctgaagcccggaggatgcttcgtggcaaagattttccgtgggagagacgttacgttactgtattctcaactccaggtgttcttcagctctgtgctgtgcgccaagcccaggtcatccagaaactctagtatagaggcctttgccgtgtgccagggttatgacccacccgaggggtttatcccagatctgtctaagcctctactcgatcacagttatgactttaatcagcttgacgggcctactagaatcattgtccccttcgtgacatgcggcgatctgtccagctacgattcagaccggagttacccactggacctagaagggggaagtgagtataagtacaccccgccaacccaaccgcctatcagtcctccttatcaggaggcgtgcaccctgaaacggaaagggcagttggctaaggagattagaccccaagattgcccaatttcacgcgtggacacctttccgcagcccctcgccgctccccagtgtcacacactgctcgcccctgagatggaggataacgagatgagctgcagtccgtag

SEQ ID NO: 252564 - DNA, 984 bp, Artificial Sequence
  derived and/or modified sequence
atgggcagaacttccaaggacaaacgagatgtctactatcgtctcgcaaaagagaatgggtggcgggctagaagtgcattcaaactgctgcaactggataaagagttccaactattccaaggggtgacacgggcagttgacctgtgtgctgcaccgggttcttggtcacaggttctatcccagaagatcgggggacagggcagcggccatgtggtggccgtggatttacaggccatggcaccacttcctggcgtggtccaaatacagggagatataacgcaactatctactgccaaagaaatcatccaacacttcaagggatgtcccgcagacctcgtggtttgtgacggggcacccgatgtaaccgggctccacgacgtggatgagtatatgcaggcccagctgctcctagctgccctgaatatcgcaacccatgttctgaaaccaggcggatgcttcgtagcgaagatcttcagaggaagggacgtgactcttctgtactcccaacttcaggtgttcttcagttctgttttgtgcgctaagcctagaagctctagaaactcttctatagaagcattcgccgtgtgccagggttatgaccctcctgaaggtttcattcctgatctatctaaaccacttcttgaccatagttacgacttcaatcagttagatggcccaaccaggattatcgtgccattcgtgacctgcggggacctgtccagttatgatagcgatagatcataccccctggacttagaagggggttccgaatacaaatataccccccctacccaacctccaatcagccctccttaccaggaggcttgcactctaaagagaaaagggcagttggctaaggagatcagacctcaagattgccccatatctagagtggatacatttccccagcctcttgccgctcctcaatgtcacacactgctcgcccctgagatggaagataatgagatgtcgtgctctccgtag

SEQ ID NO: 252565 - DNA, 984 bp, Artificial Sequence
  derived and/or modified sequence
atgggcagaacaagtaaagacaagcgcgacgtgtattacaggctggccaaggaaaacggctggcgcgcgcgctccgcctttaaattactccagctcgacaaggaattccaactgtttcagggggtcacacgggctgtggatctgtgcgctgcccctggttcttggtcacaggtccttagtcagaagataggaggacaaggatccgggcacgtagtggccgtggacctccaggcaatggcgcccctcccgggggtggtgcagatccagggtgatataacgcaattgagtactgccaaggaaattatccaacactttaaaggatgtccagcggacttggtggtttgtgatggagcacctgatgttaccggtctgcacgatgtggatgagtacatgcaggcccagctcttacttgctgcgctgaacattgccactcacgtcctgaaaccaggcggatgctttgtggcaaagatatttcgcggacgagacgtgaccttgttatattcacaacttcaggtttttttcagcagcgtactgtgtgccaaacccagatctagcaggaactccagcatcgaagcctttgctgtatgtcaagggtatgacccccccgagggtttcatcccagacctttctaagcctctgttggatcactcctacgattttaatcagctagacggacccactaggatcatcgttccatttgtgacttgcggtgatcttagcagctacgactccgatcgctcttatccactcgacctggaaggaggaagcgagtataaatacacacctccaacgcagccccctattagccccccataccaggaagcttgcactctgaaacgcaagggacaactggcgaaggagatacggccacaagactgtcccatctcacgagtcgatacttttcctcaacctctggccgcccctcaatgccatacactcttggcccctgagatggaggacaatgagatgagctgttctccttag

SEQ ID NO: 252566 - DNA, 984 bp, Artificial Sequence
  derived and/or modified sequence
atggggagaacgtccaaagacaagcgtgacgtatactaccgccttgctaaagagaacgggtggagagccaggagtgcattcaaattactccagttggacaaggaatttcagctcttccaaggggtcacccgagctgtagatttatgtgccgctccgggctcatggagtcaggtccttagtcagaagatcggcggacagggctccggacacgttgtggccgtagatttgcaggctatggctcctcttcccggagtggtgcagatacaaggggatatcacgcagcttagcactgcaaaggagattattcaacactttaaaggctgcccagctgatctggtagtgtgtgacggcgcaccagatgtaacaggacttcacgacgtcgatgagtacatgcaggctcagttgctgttggccgctttaaatattgctacccacgtgcttaagcccggcggatgttttgtagctaagatttttcgggggcgtgacgtgacactcttgtattcacagttacaggtcttcttttcaagtgttctctgcgctaagccgcgttccagccggaattcatccattgaggcctttgctgtctgccaaggctacgatcctcccgagggcttcattccagacttgagcaaaccactgcttgaccattcatatgactttaaccagctcgatggccccactcgcatcatcgtgccctttgtgacttgtggggatctctcgagctatgacagcgatcgcagctaccccctggatcttgaagggggctctgagtacaaatacacccccccaacacagccccctatcagccccccataccaggaagcatgcacgctgaagcgtaagggacagctggccaaagaaatcaggccccaggactgtccaatctctagggtggataccttcccccaacccctggcggccccgcagtgccataccctacttgcccctgaaatggaagataatgaaatgtcctgcagtccatag

SEQ ID NO: 252567 - DNA, 984 bp, Artificial Sequence
  derived and/or modified sequence
atgggccggaccagcaaggacaagcgggacgtgtactaccggctggcaaaggagaatggatggcgtgcaaggtccgctttcaagttactgcagctggataaggagtttcagctgtttcaaggcgttactcgggctgtggacttgtgcgcagcaccaggctcttggtcccaggtattaagccagaaaatcggcggacaaggatccggccacgtggtcgccgttgatctgcaggctatggcacctttgccaggtgtggtgcagatccagggtgatattacccagctgtctaccgccaaggagataatccaacatttcaagggctgtccggcggatctggtggtttgcgatggagctccggacgtaactggcctgcatgacgtagacgagtatatgcaggcacagctgttattggcagccctaaatattgccacccacgtgctgaagccgggaggttgcttcgtggcaaagatctttcggggaagagatgtgaccctgctttattcccagcttcaggtgttcttttcatccgttttatgcgcgaaaccgcgatccagccgaaattcttctatcgaagcctttgctgtttgtcagggctacgatcccccggaaggctttattcccgacctctcgaagcctctgctggaccattcctatgattttaatcaactagacggcccaaccagaataatcgtcccttttgtgacatgcggtgacctcagtagttacgactccgatagatcgtatcctttggatttagaaggtgggtcagaatataagtacaccccccctacacaaccacctatcagtccaccctatcaggaagcctgtactttgaagcgcaagggacagcttgccaaagagattcggccacaggattgtcctatcagccgcgtcgatacattcccccagcccctagcggcccctcaatgtcacacacttctagcaccagagatggaggataacgaaatgtcctgttctccttag

SEQ ID NO: 252568 - DNA, 984 bp, Artificial Sequence
  derived and/or modified sequence
atgggccggaccagcaaggacaagcgggacgtgtactaccggctggctaaggagaatggatggagggcgcggtctgcttttaagctgctgcaactggacaaggagtttcagttattccagggggttacacgggccgtcgacctctgtgctgcccccggcagctggtctcaggtgctgagtcagaagattgggggccaagggagcggccacgtggttgccgtagatctccaggcgatggccccccttcctggggtcgtccagattcagggcgatatcacacagcttagcaccgccaaagagattatccagcattttaagggatgtccagccgacttggtggtctgcgacggagctcctgacgtcacaggattacacgacgttgatgaatatatgcaagcccagttgctgctggcagccttaaatatcgcgacgcacgtcctgaaacctggcggatgtttcgtagctaagatcttcagggggagggatgtcactctgctctattcacagcttcaggtattctttagctccgtgctgtgtgctaaacctcgcagtagcaggaatagctccatagaggcttttgccgtgtgccagggttacgacccgcctgaggggttcattcctgacctgagcaaaccgctccttgaccatagctacgacttcaaccagctggacgggccaacacggatcatcgtcccatttgtcacttgtggagacctaagttcctatgattccgatagaagttatcccctcgatctggagggcggttccgagtataagtatacccccccgacacaaccgcccattagccctccttaccaggaggcctgtaccctcaaaagaaagggccagctcgcaaaggaaattagaccccaggactgccctatctctagggtggatacattccctcagcccctcgctgccccgcagtgccatacgttgctcgcacctgaaatggaggacaatgaaatgtcatgttctccttag

SEQ ID NO: 252569 - DNA, 984 bp, Artificial Sequence
  derived and/or modified sequence
atgggaagaacgagcaaagacaaacgcgacgtttactaccggctggccaaggaaaatggttggcgggctcgttccgcatttaagttgctgcaattggacaaggagttccagctgttccagggcgttactcgcgctgttgatttatgtgccgcacccggaagctggagccaggttctgagtcagaaaatagggggtcagggctccgggcacgtggtggcagtggatcttcaggctatggcaccgctgcctggagtggttcagatccaaggggacatcacccagctttccacagccaaagagatcattcagcactttaagggttgtcccgctgacctagtggtatgtgacggagcaccagatgtgacgggcctccacgacgttgacgagtatatgcaggcccaactgttgcttgccgcactgaacatcgctacacatgtgttgaagcccggtggctgcttcgtcgccaagatcttcagggggagggatgtcacactcctatattctcaattgcaagtgtttttctctagcgtgttatgtgctaagccacgaagtagccgaaacagttcaatcgaggcatttgcagtgtgtcagggatatgaccccccagaagggttcatcccggatctgtctaagccccttcttgatcactcctacgatttcaaccagctggatggtcccacacgaataatcgtcccatttgtaacttgtggagacctgagctcatacgactctgaccggtcctatccactggatctagaaggagggagcgaatacaagtacacaccacctacgcagcctcctataagtcctccttatcaggaggcatgcactctgaaacggaaaggacaattagcgaaggagataagacctcaggactgtccaatttcacgcgtcgatacctttccccaaccactcgccgctccccagtgtcatacactgctcgcccctgagatggaggataacgagatgtcctgctctccctag

SEQ ID NO: 252570 - DNA, 984 bp, Artificial Sequence
  derived and/or modified sequence
atggggcgtacttcaaaggataagcgcgatgtgtactatagactcgccaaagagaacgggtggcgtgctcgaagcgcattcaaactgctacagctggacaaggagttccagctcttccagggagtgaccagggcagtggacctgtgtgccgcacctggatcctggtcgcaagtcctttcccagaaaattgggggacaaggatctgggcacgtggtggccgtggacctgcaagcaatggcccctcttccaggagtagtgcagatccagggcgatattactcaactttctaccgcaaaggaaatcatacaacacttcaaagggtgccctgccgaccttgtggtatgtgatggtgctcccgatgtaacggggttacatgacgttgacgagtatatgcaagcccagttactccttgccgctttgaatatcgccactcacgtccttaagcctgggggatgctttgttgcgaagattttccgaggcagggacgtaacccttttgtactcacagctccaggtgtttttctcaagcgtattatgtgccaaacctagaagctctaggaattcttcaatagaagccttcgcagtgtgccagggatacgatcctcctgagggtttcataccggacttgtctaaaccacttctggatcactcttatgattttaaccaactggacggccctacgaggatcattgtgcctttcgttacatgcggggacctatcgtcatacgattccgataggagctatccactcgacctcgagggcggatctgaatataagtatacacctcccacccagcctccaatatcccccccatatcaagaagcttgcacactgaagagaaagggtcagctggcgaaggagatccgaccacaagattgtcctatctcacgtgtggacaccttcccgcagcccttggcggcacctcaatgccatactctccttgccccagagatggaagataacgaaatgagttgttccccttag

SEQ ID NO: 252571 - DNA, 984 bp, Artificial Sequence
  derived and/or modified sequence
atgggaaggacttctaaagacaagcgggacgtgtattaccgtttggcaaaagaaaatggctggcgtgctcgctcggcattcaaactcctgcagcttgataaagagtttcaactgttccagggggttacaagagccgttgacctctgcgctgccccaggctcttggtcacaggtactcagtcagaaaatcggcggtcaaggctccggtcatgtggtggctgttgatctgcaggcaatggctccactaccaggcgtcgtccaaattcagggagacattacccaactgtctactgccaaagagatcattcaacacttcaaggggtgccccgccgatttggtggtgtgcgacggcgcacctgatgtgactggcctgcacgatgtggatgagtacatgcaggcacagctgctcctcgctgccctgaatatcgccacacacgtcttgaagccagggggatgctttgtagcaaagatttttcgtggacgcgatgtgaccctgctctatagtcaacttcaggtgttcttcagttccgtcctgtgcgcaaagccgcgttcctctcggaatagttccatcgaggcctttgccgtttgtcagggatacgatccacccgaggggtttatacccgatctgtcaaaacccctgctggaccacagctacgattttaaccagctggatggacctacaaggattatcgtgcccttcgtcacttgcggagacctgagcagctatgatagcgaccgctcatacccactcgacctggaaggtggttctgaatataagtatacgcctccaactcagccccctatctcccccccataccaggaagcttgcactctgaagagaaagggccaactagcaaaagagatacggccgcaggattgtccgatctctcgagtcgatacattcccgcagcctcttgcagcgccccaatgtcacacgcttctggctcccgaaatggaggacaatgaaatgtcgtgtagtccctag

SEQ ID NO: 252572 - DNA, 984 bp, Artificial Sequence
  derived and/or modified sequence
atgggtcgtacaagcaaagataaacgggatgtgtattacaggctggctaaagaaaacggctggcgggctagatctgcctttaagttgctccagctagataaagagttccagctgtttcagggagtcactagggccgtagacctttgcgccgcacccggctcatggtcacaggtactgtctcaaaagatcggagggcagggatccggacacgtcgtagcagttgacctacaagctatggctcccctccctggcgttgttcagattcaaggagatattacgcaactttctaccgccaaagaaattatccagcacttcaaggggtgcccggctgatcttgttgtgtgtgatggggcacctgatgtgacgggcttacatgatgtcgacgagtatatgcaggcccagcttcttctggcagcattgaatatagccacgcacgtattaaagccgggcggttgttttgtggcaaaaatttttagaggacgcgacgtgacacttctctactcccaactgcaagtcttcttcagctccgtgctctgcgccaaaccgagaagttcccggaattcttccatcgaagccttcgccgtgtgtcaggggtacgaccctccagaaggtttcatccctgacctcagcaagcctctgctggatcattcttacgactttaaccagctcgatggcccaaccagaattattgtgccattcgttacctgcggtgacctgtcctcatatgacagcgaccgctcctatccacttgacttggaaggcggatctgaatacaaatacacccctcccacccagccgcccatctcacccccctatcaggaagcatgtacacttaaacgcaagggtcaattagcgaaagagatacgaccccaggactgccctatcagtcgtgtggacaccttcccacagccccttgccgctccccaatgccatacacttcttgcaccagaaatggaagataacgaaatgtcatgctctccctag

SEQ ID NO: 252573 - protein, 1011 aa, Artificial Sequence
  derived and/or modified sequence
MMSDASDMLAAALEQMDGIIAGSKALEYSNGIFDCQSPTSPFMGSLRALHLVEDLRGLLEMMETDEKEGLRCQIPDSTAETLVEWLQSQMTNGHLPGNGDVYQERLARLENDKESLVLQVSVLTDQVEAQGEKIRDLEFCLEEHREKVNATEEMLQQELLSRTSLETQKLDLMAEISNLKLKLTAVEKDRLDYEDKFRDTEGLIQEINDLRLKVSEMDSERLQYEKKLKSTKSLMAKLSSMKIKVGQMQYEKQRMEQKWESLKDELASLKEQLEEKESEVKRLQEKLVCKMKGEGVEIVDRDIEVQKMKKAVESLMAANEEKDRKIEDLRQCLNRYKKMQDTVVLAQGKDGEYEELLNSSSISSLLDAQGFSDLEKSPSPTPVMGSPSCDPFNTSVPEEFHTTILQVSIPSLLPATVSMETSEKSKLTPKPETSFEENDGNIILGATVDTQLCDKLLTSSLQKSSSLGNLKKETSDGEKETIQKTSEDRAPAESRPFGTLPPRPPGQDTSMDDNPFGTRKVRSSFGRGFFKIKSNKRTASAPNLAETEKETAEHLDLAGASSRPKDSQRNSPFQIPPPSPDSKKKSRGIMKLFGKLRRSQSTTFNPDDMSEPEFKRGGTRATAGPRLGWSRDLGQSNSDLDMPFAKWTKEQVCNWLMEQGLGSYLNSGKHWIASGQTLLQASQQDLEKELGIKHSLHRKKLQLALQALGSEEETNHGKLDFNWVTRWLDDIGLPQYKTQFDEGRVDGRMLHYMTVDDLLSLKVVSVLHHLSIKRAIQVLRINNFEPNCLRRRPSDENTIAPSEVQKWTNHRVMEWLRSVDLAEYAPNLRGSGVHGGLMVLEPRFNVETMAQLLNIPPNKTLLRRHLATHFNLLIGAEAQHQKRDAMELPDYVLLTATAKVKPKKLAFSNFGNLRKKKQEDGEEYVCPMELGQASGSASKKGFKPGLDMRLYEEDDLDRLEQMEDSEGTVRQIGAFSEGINNLTHMLKEDDMFKDFAARSPSASITDEDSNV

SEQ ID NO: 252574 - DNA, 3036 bp, Artificial Sequence
  derived and/or modified sequence
atgatgagcgacgccagcgacatgctggccgccgccctggagcagatggacggcatcatcgccggcagcaaggccctggagtacagcaacggcatcttcgactgccagagccccaccagccccttcatgggcagcctgagagccctgcacctggtggaggacctgagaggcctgctggagatgatggagaccgacgagaaggagggcctgagatgccagatccccgacagcaccgccgagaccctggtggagtggctgcagagccagatgaccaacggccacctgcccggcaacggcgacgtgtaccaggagagactggccagactggagaacgacaaggagagcctggtgctgcaggtgagcgtgctgaccgaccaggtggaggcccagggcgagaagatcagagacctggagttctgcctggaggagcacagagagaaggtgaacgccaccgaggagatgctgcagcaggagctgctgagcagaaccagcctggagacccagaagctggacctgatggccgagatcagcaacctgaagctgaagctgaccgccgtggagaaggacagactggactacgaggacaagttcagagacaccgagggcctgatccaggagatcaacgacctgagactgaaggtgagcgagatggacagcgagagactgcagtacgagaagaagctgaagagcaccaagagcctgatggccaagctgagcagcatgaagatcaaggtgggccagatgcagtacgagaagcagagaatggagcagaagtgggagagcctgaaggacgagctggccagcctgaaggagcagctggaggagaaggagagcgaggtgaagagactgcaggagaagctggtgtgcaagatgaagggcgagggcgtggagatcgtggacagagacatcgaggtgcagaagatgaagaaggccgtggagagcctgatggccgccaacgaggagaaggacagaaagatcgaggacctgagacagtgcctgaacagatacaagaagatgcaggacaccgtggtgctggcccagggcaaggacggcgagtacgaggagctgctgaacagcagcagcatcagcagcctgctggacgcccagggcttcagcgacctggagaagagccccagccccacccccgtgatgggcagccccagctgcgaccccttcaacaccagcgtgcccgaggagttccacaccaccatcctgcaggtgagcatccccagcctgctgcccgccaccgtgagcatggagaccagcgagaagagcaagctgacccccaagcccgagaccagcttcgaggagaacgacggcaacatcatcctgggcgccaccgtggacacccagctgtgcgacaagctgctgaccagcagcctgcagaagagcagcagcctgggcaacctgaagaaggagaccagcgacggcgagaaggagaccatccagaagaccagcgaggacagagcccccgccgagagcagacccttcggcaccctgccccccagaccccccggccaggacaccagcatggacgacaaccccttcggcaccagaaaggtgagaagcagcttcggcagaggcttcttcaagatcaagagcaacaagagaaccgccagcgcccccaacctggccgagaccgagaaggagaccgccgagcacctggacctggccggcgccagcagcagacccaaggacagccagagaaacagccccttccagatccccccccccagccccgacagcaagaagaagagcagaggcatcatgaagctgttcggcaagctgagaagaagccagagcaccaccttcaaccccgacgacatgagcgagcccgagttcaagagaggcggcaccagagccaccgccggccccagactgggctggagcagagacctgggccagagcaacagcgacctggacatgcccttcgccaagtggaccaaggagcaggtgtgcaactggctgatggagcagggcctgggcagctacctgaacagcggcaagcactggatcgccagcggccagaccctgctgcaggccagccagcaggacctggagaaggagctgggcatcaagcacagcctgcacagaaagaagctgcagctggccctgcaggccctgggcagcgaggaggagaccaaccacggcaagctggacttcaactgggtgaccagatggctggacgacatcggcctgccccagtacaagacccagttcgacgagggcagagtggacggcagaatgctgcactacatgaccgtggacgacctgctgagcctgaaggtggtgagcgtgctgcaccacctgagcatcaagagagccatccaggtgctgagaatcaacaacttcgagcccaactgcctgagaagaagacccagcgacgagaacaccatcgcccccagcgaggtgcagaagtggaccaaccacagagtgatggagtggctgagaagcgtggacctggccgagtacgcccccaacctgagaggcagcggcgtgcacggcggcctgatggtgctggagcccagattcaacgtggagaccatggcccagctgctgaacatcccccccaacaagaccctgctgagaagacacctggccacccacttcaacctgctgatcggcgccgaggcccagcaccagaagagagacgccatggagctgcccgactacgtgctgctgaccgccaccgccaaggtgaagcccaagaagctggccttcagcaacttcggcaacctgagaaagaagaagcaggaggacggcgaggagtacgtgtgccccatggagctgggccaggccagcggcagcgccagcaagaagggcttcaagcccggcctggacatgagactgtacgaggaggacgacctggacagactggagcagatggaggacagcgagggcaccgtgagacagatcggcgccttcagcgagggcatcaacaacctgacccacatgctgaaggaggacgacatgttcaaggacttcgccgccagaagccccagcgccagcatcaccgacgaggacagcaacgtgtag

SEQ ID NO: 252575 - DNA, 2577 bp, Artificial Sequence
  derived and/or modified sequence
atgctgcagcaggagctgctgagcagaaccagcctggagacccagaagctggacctgatggccgagatcagcaacctgaagctgaagctgaccgccgtggagaaggacagactggactacgaggacaagttcagagacaccgagggcctgatccaggagatcaacgacctgagactgaaggtgagcgagatggacagcgagagactgcagtacgagaagaagctgaagagcaccaagagcctgatggccaagctgagcagcatgaagatcaaggtgggccagatgcagtacgagaagcagagaatggagcagaagtgggagagcctgaaggacgagctggccagcctgaaggagcagctggaggagaaggagagcgaggtgaagagactgcaggagaagctggtgtgcaagatgaagggcgagggcgtggagatcgtggacagagacatcgaggtgcagaagatgaagaaggccgtggagagcctgatggccgccaacgaggagaaggacagaaagatcgaggacctgagacagtgcctgaacagatacaagaagatgcaggacaccgtggtgctggcccagggcaaggacggcgagtacgaggagctgctgaacagcagcagcatcagcagcctgctggacgcccagggcttcagcgacctggagaagagccccagccccacccccgtgatgggcagccccagctgcgaccccttcaacaccagcgtgcccgaggagttccacaccaccatcctgcaggtgagcatccccagcctgctgcccgccaccgtgagcatggagaccagcgagaagagcaagctgacccccaagcccgagaccagcttcgaggagaacgacggcaacatcatcctgggcgccaccgtggacacccagctgtgcgacaagctgctgaccagcagcctgcagaagagcagcagcctgggcaacctgaagaaggagaccagcgacggcgagaaggagaccatccagaagaccagcgaggacagagcccccgccgagagcagacccttcggcaccctgccccccagaccccccggccaggacaccagcatggacgacaaccccttcggcaccagaaaggtgagaagcagcttcggcagaggcttcttcaagatcaagagcaacaagagaaccgccagcgcccccaacctggccgagaccgagaaggagaccgccgagcacctggacctggccggcgccagcagcagacccaaggacagccagagaaacagccccttccagatccccccccccagccccgacagcaagaagaagagcagaggcatcatgaagctgttcggcaagctgagaagaagccagagcaccaccttcaaccccgacgacatgagcgagcccgagttcaagagaggcggcaccagagccaccgccggccccagactgggctggagcagagacctgggccagagcaacagcgacctggacatgcccttcgccaagtggaccaaggagcaggtgtgcaactggctgatggagcagggcctgggcagctacctgaacagcggcaagcactggatcgccagcggccagaccctgctgcaggccagccagcaggacctggagaaggagctgggcatcaagcacagcctgcacagaaagaagctgcagctggccctgcaggccctgggcagcgaggaggagaccaaccacggcaagctggacttcaactgggtgaccagatggctggacgacatcggcctgccccagtacaagacccagttcgacgagggcagagtggacggcagaatgctgcactacatgaccgtggacgacctgctgagcctgaaggtggtgagcgtgctgcaccacctgagcatcaagagagccatccaggtgctgagaatcaacaacttcgagcccaactgcctgagaagaagacccagcgacgagaacaccatcgcccccagcgaggtgcagaagtggaccaaccacagagtgatggagtggctgagaagcgtggacctggccgagtacgcccccaacctgagaggcagcggcgtgcacggcggcctgatggtgctggagcccagattcaacgtggagaccatggcccagctgctgaacatcccccccaacaagaccctgctgagaagacacctggccacccacttcaacctgctgatcggcgccgaggcccagcaccagaagagagacgccatggagctgcccgactacgtgctgctgaccgccaccgccaaggtgaagcccaagaagctggccttcagcaacttcggcaacctgagaaagaagaagcaggaggacggcgaggagtacgtgtgccccatggagctgggccaggccagcggcagcgccagcaagaagggcttcaagcccggcctggacatgagactgtacgaggaggacgacctggacagactggagcagatggaggacagcgagggcaccgtgagacagatcggcgccttcagcgagggcatcaacaacctgacccacatgctgaaggaggacgacatgttcaaggacttcgccgccagaagccccagcgccagcatcaccgacgaggacagcaacgtgtag

SEQ ID NO: 252576 - DNA, 3036 bp, Artificial Sequence
  derived and/or modified sequence
atgatgtccgacgcgtctgatatgctggctgcagcactcgaacagatggatggcattatcgccggaagtaaagccctcgagtactctaatggtatcttcgattgccagtcaccaacatcacccttcatgggctccctgcgcgctcttcacttggtcgaagaccttcggggtcttcttgaaatgatggagaccgatgaaaaagagggattaaggtgccagatccctgattcaacagccgagacactcgtcgagtggctgcagagccagatgaccaacggtcacctgccaggcaacggcgacgtgtaccaagagagattagcgcggctagagaacgataaggaaagcctagtgctgcaggtgtctgtgctgaccgatcaggtggaggcgcagggggagaagatcagagatctggagttctgcttggaggagcatcgcgaaaaggtaaatgcgacagaggagatgcttcaacaggaattgctgagcaggacctcactagagacccagaagctggacttgatggccgagatttctaacctcaagctcaaactgacagctgttgaaaaggacagattggattatgaggacaaatttagggatacggagggccttatccaggagatcaacgatctgcgcttgaaggtttccgagatggatagcgaacgcctgcagtacgagaagaaactgaaaagcactaaatctttgatggctaagctgagttccatgaaaatcaaagtcggtcaaatgcagtacgaaaagcagaggatggaacagaagtgggaatctctcaaagatgaactcgcctcgctgaaggagcagctggaggaaaaggagagtgaggtgaagcgcctacaggagaaactggtgtgtaagatgaaaggtgagggggtcgagatcgtcgacagagatatcgaagtacaaaagatgaagaaggcagtagaaagccttatggctgcaaatgaagaaaaggatcgaaagatcgaagatctacggcagtgcttgaatcgctacaagaagatgcaagacacagttgtgctggcccagggcaaggacggcgagtacgaagaactcctcaattcaagcagcatctcttcactcttggatgcgcaggggttcagtgatctcgagaagtccccttcaccaacaccagtcatgggctcgccctcgtgtgacccttttaatacctccgtgccagaggaattccatactactatcctgcaggtgagtatcccatccctgcttcctgctacagtgagcatggagacttcagagaagtccaaacttacgccaaagcccgagacaagcttcgaggagaatgacggaaacataatcttgggcgccactgtggatactcagctttgtgacaaactccttacctcgagcttgcagaagtctagctcgcttggcaacctcaagaaagagacatccgatggggaaaaggagaccatacaaaaaaccagtgaagacagagcgcccgccgagtcacgacctttcggaaccctgccccctaggcccccgggccaggacaccagcatggacgataaccccttcggtacaagaaaggtccgtagctcattcggcaggggtttctttaaaatcaagtcaaataagcggactgcaagcgcccccaatctggcggagaccgagaaagagaccgcagagcatctggatctggcaggtgcctcatctcgtcccaaggactcccaacggaattcaccattccaaatcccacctccttcccctgacagtaagaagaaaagccgtgggattatgaagcttttcggtaaattgcgaaggtcccagtcaaccacctttaacccagacgacatgtccgaacctgaatttaagcgtggggggacacgcgctaccgctgggcccaggctcgggtggtccagggacctgggacaatcgaatagcgacttggacatgccgtttgccaagtggactaaagagcaagtttgcaattggctaatggagcagggcctgggtagttacctcaacagtgggaagcactggatcgctagcggccagacgctgttacaagcaagccagcaggacctcgaaaaggaattggggataaagcatagcctgcacaggaagaaacttcagctggctctacaggcgctgggctccgaagaggagaccaatcacggcaagctcgacttcaattgggtgactcgctggctcgatgacatcgggctcccccagtataaaacccagttcgatgaaggcagggttgacggccgcatgctacattatatgacagtagacgatcttctctcactgaaggtcgtcagcgtccttcaccacctaagcatcaagcgcgccatacaggttctgcgtatcaataatttcgaacctaattgcctgagacggcgcccatcagacgaaaacactatcgccccgagcgaggtccagaagtggacaaaccacagggtcatggagtggctgcgttcagtggacctagccgagtatgcgcctaacctgagagggtcaggggtacacggaggattaatggtgttggaaccacgctttaacgtggagaccatggctcagttactgaatattccaccaaacaagaccttgctgcgacggcacctagccacccattttaacctactgatcggggctgaagcccaacatcaaaaacgggatgcaatggaactgccagattatgtactgctcactgccaccgcaaaggtcaaacctaaaaaactggccttctccaactttggtaatctgcgaaaaaagaaacaggaagacggtgaagaatacgtatgtcccatggaacttggccaggcgtcaggcagcgcatctaagaagggctttaagcctggactcgacatgagactgtacgaggaagatgatctggatagactggagcaaatggaggactctgagggcaccgttaggcaaatcggggcttttagtgaaggcattaataatttaacccacatgttgaaggaggatgatatgttcaaggactttgctgccaggagccctagtgcttctatcaccgacgaggattctaatgtgtag

SEQ ID NO: 252577 - DNA, 2577 bp, Artificial Sequence
  derived and/or modified sequence
atgctgcagcaggagctgctatcacggacttccctggagacacagaagttggaccttatggccgaaatttctaatctgaaattaaaactgactgctgtcgagaaggatcggctcgattatgaggacaaattcagagatactgaaggccttatccaagagatcaacgatctgcggttaaaagtctccgagatggactccgagcgactccaatatgagaaaaaactcaaaagtactaaaagcctgatggcaaagctgtctagcatgaagatcaaggtcggacagatgcagtatgagaagcagaggatggagcaaaagtgggaatctcttaaagacgagctggcatctctgaaagagcagctcgaggagaaggagtccgaggttaaaaggttacaggagaaattggtctgtaaaatgaagggggaaggtgtggagattgttgaccgggatatcgaagtacaaaagatgaagaaagcggtggagagtctgatggctgcgaacgaagaaaaggataggaagattgaggacctaagacagtgcctcaatcgctacaagaaaatgcaagatacggtggtgctggcccaaggcaaagatggagagtacgaggaactcctgaactctagctcaatctccagtttgctggacgcccaagggttctcagatctggaaaagagcccctccccaacccctgtgatgggctcgccttcttgcgacccatttaacacctcagttccagaagaattccacactacaatcctgcaagttagcataccaagtcttttaccagctaccgtgtctatggagaccagcgagaagagcaagcttaccccgaagcccgagaccagctttgaggagaatgacggaaatatcatcctcggggctactgtggatactcagctctgcgacaagttgctgactagcagtctgcagaagtccagctcattaggcaacctcaaaaaggagactagcgacggcgagaaggaaacaattcagaaaaccagtgaagatcgggcccccgcggaaagcagaccattcggaacactgcctcctagaccccctgggcaggacacatccatggacgataacccatttgggacacgcaaggtgcgcagctctttcgggcgcgggttttttaagatcaaatcaaataagaggactgcttccgcccctaatctggccgagactgagaaggagactgctgaacatctggacctcgccggggcatcatcacggccaaaagactctcaaagaaattctccttttcagattcctcctccttcccccgatagtaagaagaaaagccgaggtattatgaagcttttcggcaagttgcggaggtctcagagtaccaccttcaatcccgatgatatgtctgagcccgagtttaagagagggggaacccgggccacagctggcccacgtttaggttggtccagagacttaggacagtccaactctgatctggatatgcctttcgccaaatggacaaaggaacaagtgtgcaattggctgatggagcaggggctggggtcttatctgaattctgggaagcactggatcgccagtggccagaccctgctgcaggcctcgcaacaagatctcgagaaagaactgggcattaagcactccctgcaccggaaaaaactgcagctggctctccaggccctgggctcagaggaggagacaaatcatggcaaactggatttcaactgggtcaccaggtggctggatgacattggtctccctcagtacaagacccagttcgatgagggacgcgtcgatggccgcatgttgcactacatgactgtggatgacctgttgagtctcaaggtggttagcgtgctgcaccatctgagtattaaacgtgctatccaggtgctgcggatcaataattttgagcccaactgcctgagaaggcggccaagcgatgaaaatacgattgcccccagtgaggtccagaaatggacaaatcatcgtgtaatggaatggttgcgatccgtcgacctggctgagtacgcacccaatctgaggggtagtggggtgcacggtggccttatggttcttgaacctaggttcaatgtcgaaactatggctcagttgttaaatattccccctaacaagactttgctgaggagacatctcgctacacacttcaatctgctgattggcgctgaggcacagcatcagaagcgggacgcaatggagctgcccgactatgtccttctgacagcgaccgctaaagtgaaacctaagaagctcgcatttagcaatttcgggaatctgcggaaaaaaaagcaggaagacggcgaggagtacgtttgtccaatggagttagggcaggcttcgggcagcgccagcaaaaagggctttaagcccggactcgacatgagactgtatgaggaggacgaccttgacagactcgagcaaatggaggacagcgaagggaccgtgcgtcaaatcggggcattctctgagggcatcaacaacctcacgcatatgttgaaggaagatgacatgtttaaagacttcgctgctaggagcccctctgctagcatcaccgacgaagactctaatgtgtag

SEQ ID NO: 252578 - DNA, 3036 bp, Artificial Sequence
  derived and/or modified sequence
atgatgtctgatgccagtgacatgctggccgccgccctggagcagatggatggcatcatcgccggcagcaaggccctggagtacagcaatggcatctttgactgccagagccccaccagccccttcatgggcagcctgcgggccctgcacctggtggaggacctgcggggcctgctggagatgatggagacagatgagaaggagggcctgcgctgccagatcccagacagcacagctgagaccctggtggagtggctgcagagccagatgaccaacggccacctgcctggaaatggagatgtgtaccaggagcggctggcccggctggagaatgacaaggagagcctggtgctgcaggtgtctgtgctgacagaccaggtggaggcccagggcgagaagatccgggacctggagttctgcctggaggagcaccgggagaaggtgaatgccacagaggagatgctgcagcaggagctgctgagcaggaccagcctggagacccagaagctggacctgatggccgagatcagcaacctgaagctgaagctgacagctgtggagaaggaccggctggactatgaggacaagttccgggacacagagggcctcatccaggagatcaatgacctgcggctgaaggtgtctgagatggattctgagcggctgcagtatgagaagaagctgaagagcaccaagagcctgatggccaagctgagctccatgaagatcaaggtgggccagatgcagtatgagaagcagaggatggagcagaagtgggagagcctgaaggatgagctggccagcctgaaggagcagctggaggagaaggagagcgaggtgaagaggctgcaggagaagctggtgtgcaagatgaagggggagggcgtggagatcgtggaccgggacatcgaggtgcagaagatgaagaaggctgtggagagcctgatggccgccaatgaggagaaggacaggaagattgaggacctgcggcagtgcctgaaccgctacaagaagatgcaggacacagtggtgctggcccagggcaaggatggagaatatgaggagctgctgaacagcagcagcatcagcagcctgctggatgcccagggcttcagtgacctggagaagagccccagccccacccctgtgatgggcagccccagctgtgaccccttcaacacctctgtgcctgaggagttccacaccaccatcctgcaggtgtccatccccagcctgctgcctgccaccgtgtccatggagaccagcgagaagagcaagctgacccccaagccagagaccagctttgaagaaaatgatggcaacatcatcctgggcgccaccgtggacacccagctgtgtgacaagctgctgaccagcagcctgcagaagagcagcagcctgggcaacctgaagaaggagaccagtgatggagagaaggagaccatccagaagaccagtgaagatcgggccccagctgagagccggcccttcggcaccctgcccccccggcccccaggccaggacacctccatggatgacaaccccttcggcaccaggaaggtgcgcagcagctttggccggggcttcttcaagatcaagagcaacaagaggacagccagcgcccccaacctggccgagacagagaaggagacagctgagcacctggacctggccggggccagcagccggcccaaggacagccagaggaacagccccttccagatccccccacccagcccagacagcaagaagaagagccggggcatcatgaagctgtttgggaagctgcggcgcagccagagcaccaccttcaacccagatgacatgtctgagcctgagttcaagagaggaggcacccgggccacagctggcccccggctgggctggagccgggacctgggccagagcaacagcgacctggacatgccctttgccaagtggaccaaggagcaggtgtgcaactggctgatggagcagggcctgggcagctacctgaacagcggcaagcactggatcgccagcggccagaccctgctgcaggccagccagcaggacctggagaaggagctgggcatcaagcacagcctgcacaggaagaagctgcagctggccctgcaggccctgggcagcgaggaggagaccaaccacggcaagctggacttcaactgggtgacccgctggctggatgacatcggcctgccccagtacaagacccagtttgatgagggccgggtggatggccgcatgctgcactacatgacagtggatgacctgctgagcctgaaggtggtgtctgtgctgcaccacctgagcatcaagagggccatccaggtgctgcgcatcaacaactttgagcccaactgcctgcggcggcggcccagtgatgagaacaccatcgcccccagcgaggtgcagaagtggaccaaccaccgggtgatggagtggctgcggtctgtggacctggccgagtatgcccccaacctgcggggcagcggcgtgcacggcggcctgatggtgctggagccccgcttcaacgtggagaccatggcccagctgctgaacatcccccccaacaagaccctgctgcggcggcacctggccacccacttcaacctgctgattggagctgaggcccagcaccagaagagagatgccatggagctgcctgactatgtgctgctgacagccacagccaaggtgaagcccaagaagctggccttcagcaactttggaaacctgaggaagaagaagcaggaggatggagaggagtatgtgtgccccatggagctgggccaggccagcggcagcgccagcaagaagggcttcaagccaggcctggacatgaggctgtatgaagaagatgacctggaccggctggagcagatggaggacagcgagggcaccgtgcggcagatcggggccttcagcgagggcatcaacaacctgacccacatgctgaaggaggatgacatgttcaaggactttgctgcccggagccccagcgccagcatcacagatgaggacagcaatgtgtag

SEQ ID NO: 252579 - DNA, 2577 bp, Artificial Sequence
  derived and/or modified sequence
atgctgcagcaggagctgctgagcaggaccagcctggagacccagaagctggacctgatggccgagatcagcaacctgaagctgaagctgacagctgtggagaaggaccggctggactatgaggacaagttccgggacacagagggcctcatccaggagatcaatgacctgcggctgaaggtgtctgagatggacagcgagcggctgcagtatgagaagaagctgaagagcaccaagagcctgatggccaagctgagctccatgaagatcaaggtgggccagatgcagtatgagaagcagaggatggagcagaagtgggagagcctgaaggatgagctggccagcctgaaggagcagctggaggagaaggagagcgaggtgaagaggctgcaggagaagctggtgtgcaagatgaagggggagggcgtggagatcgtggaccgggacatcgaggtgcagaagatgaagaaggctgtggagagcctgatggccgccaatgaggagaaggacaggaagattgaggacctgcggcagtgcctgaaccgctacaagaagatgcaggacacagtggtgctggcccagggcaaggatggagaatatgaggagctgctgaacagcagcagcatcagcagcctgctggatgcccagggcttcagtgacctggagaagagccccagccccacccctgtgatgggcagccccagctgtgaccccttcaacacctctgtgcctgaggagttccacaccaccatcctgcaggtgtccatccccagcctgctgcctgccaccgtgtccatggagaccagcgagaagagcaagctgacccccaagccagagaccagctttgaggagaatgatggcaacatcatcctgggcgccaccgtggacacccagctgtgtgacaagctgctgaccagcagcctgcagaagagcagcagcctgggcaacctgaagaaggagaccagtgatggagagaaggagaccatccagaagaccagcgaggaccgggccccagctgagagccggcccttcggcaccctgccccccaggcctcctggccaggacacctccatggatgacaaccccttcggcaccaggaaggtgcgcagcagctttggccggggcttcttcaagatcaagagcaacaagaggacagccagcgcccccaacctggccgagacagagaaggagacagctgagcacctggacctggccggggccagcagccggcccaaggacagccagaggaacagccccttccagatccccccacccagcccagacagcaagaagaagagccggggcatcatgaagctgtttgggaagctgcggcgcagccagagcaccaccttcaacccagatgacatgtctgagcctgagttcaagaggggcggcacccgggccacagctggcccccggctgggctggagccgggacctgggccagagcaacagcgacctggacatgccctttgccaagtggaccaaggagcaggtgtgcaactggctgatggagcagggcctgggcagctacctgaacagcggcaagcactggatcgccagcggccagaccctgctgcaggccagccagcaggacctggagaaggagctgggcatcaagcacagcctgcacaggaagaagctgcagctggccctgcaggccctgggcagcgaggaggagaccaaccacggcaagctggacttcaactgggtgacccgctggctggatgacatcggcctgccccagtacaagacccagtttgatgagggccgggtggatggccgcatgctgcactacatgacagtggatgacctgctgagcctgaaggtggtgtctgtgctgcaccacctgagcatcaagagggccatccaggtgctgcgcatcaacaactttgagcccaactgcctgcggcggcggcccagtgatgagaacaccatcgcccccagcgaggtgcagaagtggaccaaccaccgggtgatggagtggctgcggtctgtggacctggccgagtatgcccccaacctgcggggcagcggcgtgcatggaggcctgatggtgctggagccccgcttcaacgtggagaccatggcccagctgctgaacatcccccccaacaagaccctgctgcggcggcacctggccacccacttcaacctgctgattggagctgaggcccagcaccagaagagagatgccatggagctgcctgactatgtgctgctgacagccacagccaaggtgaagcccaagaagctggccttcagcaactttggaaacctgaggaagaagaagcaggaggatggagaggagtatgtgtgccccatggagctgggccaggccagcggcagcgccagcaagaagggcttcaagccaggcctggacatgaggctgtatgaggaggatgacctggaccggctggagcagatggaggacagcgagggcaccgtgcggcagattggagccttcagcgagggcatcaacaacctgacccacatgctgaaggaggatgacatgttcaaggactttgctgcccggagccccagcgccagcatcacagatgaggacagcaatgtgtag

SEQ ID NO: 252580 - DNA, 3036 bp, Artificial Sequence
  derived and/or modified sequence
atgatgagcgacgccagcgacatgctggccgccgccctggagcagatggacggaattatcgctggcagtaaagccctggagtattctaacggaatctttgactgtcagagcccaacctcaccctttatgggatctctgagagcactccacttggtagaggatctgcgcggactattggaaatgatggaaacagacgagaaggaagggctgagatgccagattcccgattcaaccgcagagactttggtggaatggctgcagtcacagatgactaacggccatcttcctggcaacggagacgtgtaccaagagcgcctggctaggctcgaaaacgacaaagaatcactcgttctgcaagtcagcgtgttgacggaccaggtggaggcccagggcgagaaaatccgggatttggagttctgcctagaagagcatcgggaaaaggtgaatgccacggaggaaatgttgcaacaggagctgctatcacgaaccagcctcgagactcaaaagctagatctcatggccgagattagcaacttgaagctaaaactgactgccgtggagaaggataggctggactacgaggataaattcagggacactgaaggccttatccaagaaataaacgatttacggttaaaagtgagtgagatggattcagagcgtctgcagtacgaaaagaagctcaaatctacaaagtcattaatggcaaagcttagttcaatgaagattaaggtaggccagatgcagtatgaaaagcaacgaatggagcagaaatgggagtcactaaaagatgagctggctagccttaaggaacaactggaggagaaagaatccgaagtaaaacggctgcaggaaaagctcgtgtgcaagatgaagggcgagggggtggagattgtcgacagagacatcgaggtgcaaaaaatgaagaaagctgttgaatctctgatggcagctaacgaagaaaaggaccggaagatcgaggacttgagacagtgtctcaatagatacaaaaaaatgcaggataccgtggttcttgcccagggcaaggacggtgagtacgaggagctcctgaacagtagctccattagctcactgctagatgctcaaggcttttcagatctggagaagagcccatctcccacccccgtgatgggttccccctcatgcgatcctttcaatacatccgtgcctgaagagttccataccaccatccttcaagtcagcataccctccctgctgccagcaactgtctctatggagactagcgagaagagcaaactgactccaaagcctgagacttcatttgaggagaacgatgggaacattattctgggcgccaccgtggatacgcaactttgtgacaagttgctaaccagctcgctgcagaaatcctccagtctcggtaatctcaagaaagaaacttccgacggcgagaaggaaaccattcagaagactagcgaagatcgggcccccgctgagagccggccatttgggaccctccctcccaggcctcccgggcaggatacatcgatggatgacaacccttttggaacgcgtaaggtgcgttcaagctttggacgcggcttttttaaaataaagtccaacaagcgaactgcatccgcgcccaatcttgccgagaccgaaaaagagacggccgaacatttggatctggccggcgcctccagcagacccaaggattcccagcgtaatagcccctttcagatcccaccgcccagccctgacagtaaaaagaaaagcagaggaattatgaagctgtttggcaagctgaggaggtcacagtctaccactttcaacccagatgatatgagtgagcccgagtttaaaagaggtgggacgcgagccaccgcggggccacgcttgggatggagtagggatctagggcaaagcaactcagatctggatatgccctttgccaaatggaccaaagagcaggtgtgtaactggctcatggagcaggggctgggaagttatctgaactccggcaagcattggattgcctcagggcagacattattacaagcatcccagcaggatctggagaaagagctgggcattaagcattcgctccatcggaaaaagctacagctggccttgcaggctcttgggtccgaagaggagacaaatcatggaaagcttgatttcaattgggtcacaaggtggctggacgatattgggcttccgcagtataaaactcagtttgacgagggcagagtcgatggaagaatgcttcactacatgacagtcgacgacctgctgagcctcaaagtggtgtccgtgctacaccatctgagcatcaaacgggcaattcaagtcctgcgaatcaataattttgaacccaattgtcttagacggcgcccttcggatgaaaatacaatcgcaccaagtgaggtacagaagtggaccaatcaccgggtgatggagtggctgaggtctgttgatctggcagagtacgcccccaacctacgagggagtggagtgcatggaggcctcatggttctggagcctaggttcaatgtggagaccatggcacagttgctgaatatccctccaaataagacccttctgcgccgacaccttgccacgcacttcaacctgctgatcggcgccgaggctcaacaccagaaaagagatgcgatggagttgcccgattacgttctccttactgccacggccaaagttaaacctaaaaaattggcatttagcaactttggtaatctgcggaagaagaagcaggaggatggtgaggagtatgtgtgcccaatggagctcgggcaggctagtgggtccgcctcaaaaaaaggcttcaagccagggctcgatatgagattatacgaggaggatgacctcgacagactcgagcagatggaagattctgaaggtactgttagacagataggagcattctctgaaggtattaataacttgacacacatgctgaaggaagatgatatgtttaaagattttgccgccaggtctcccagcgcttcaattactgatgaagacagcaatgtctag

SEQ ID NO: 252581 - DNA, 2577 bp, Artificial Sequence
  derived and/or modified sequence
atgctgcagcaggagctgctgagccggaccagcctggagacccagaaactagacctgatggccgagattagcaacctgaagttgaagctgaccgcagtcgagaaggacaggctggactacgaagacaaatttcgagataccgaaggtttgatccaggagataaatgacttgagattaaaagtttcggaaatggactcagagcgcctgcaatacgagaagaagttgaaaagcaccaaatccctgatggcaaagctgtctagcatgaagattaaggtcgggcaaatgcagtatgagaagcagcgcatggagcaaaagtgggagtcactgaaggatgaactggcatctctcaaggaacaactcgaggagaaggaatccgaagtcaagcgactgcaggagaaactggtgtgtaagatgaaaggagagggcgtggagattgtggaccgggacatcgaggtgcagaaaatgaaaaaagctgttgaaagcctgatggccgctaatgaggaaaaagatcgtaagattgaggacctgaggcagtgcctcaatagatataaaaagatgcaggatacggtcgtcctcgcacaagggaaggacggagaatacgaggagctgctgaattccagctccatctcctctctgcttgacgctcagggcttttccgacttggagaaaagtccatcaccaacacctgtaatgggatcgccctcctgcgatccgtttaacacttcagtgccggaagaattccacacaacaattttacaggtaagcatcccctctctcttgccggccaccgtgtccatggaaacctctgagaagtcaaaactcaccccgaagcccgagacatcatttgaggagaatgatgggaatataattcttggcgcaacggtagacactcagctgtgtgacaagctgttgacatcgtctcttcagaagtctagctcactgggaaatttaaaaaaggaaacatctgacggagaaaaagagacaatccaaaaaacttcggaagacagagctcccgctgagtcaagaccattcggcactctgcccccacggccaccaggacaggatacatcaatggacgacaatccattcgggacacgcaaagtaagatcaagcttcggccgggggttttttaaaattaaatcgaataagaggaccgcgagtgcacccaatctggctgagaccgaaaaggagactgccgagcacctcgatctggcaggagcctccagccgtcctaaggactctcagaggaatagtccatttcaaattccgcctccctccccagattccaagaaaaagtcccgcggaatcatgaaactctttggtaagctgaggaggagccagagcaccacattcaatccggacgacatgtcagaaccagagttcaagcggggtgggacacgtgcgaccgccggcccacggttgggatggtctagagatctgggacagtctaattcggaccttgatatgccttttgccaaatggacgaaggagcaggtgtgcaactggctcatggagcagggtctgggaagttacctgaactctgggaagcactggattgctagcggccagaccctgttacaggcttcccaacaagatttggagaaggaactgggaattaagcattccctacacagaaagaagctccagctggctttacaggcactgggtagtgaagaagagaccaaccatggcaaactggatttcaattgggtaacccggtggctggatgatattggtttacctcagtataagacccagtttgacgaggggagagtggacgggagaatgctccactatatgaccgttgacgacctcctgtcgcttaaggtggtgagtgtgctccatcaccttagtattaagcgggccattcaggtcctgcggatcaataactttgagccaaattgtcttcggcggaggcccagcgatgagaacacaatagccccatccgaagttcaaaagtggacgaaccatcgggtcatggaatggctccgctccgtggaccttgcggagtacgccccaaacctccgggggtcaggggtgcatggcggcctgatggttctggagcctcgctttaacgtggagaccatggcgcagttactcaacatccccccgaataagacactgcttcgtcgccatctggctactcatttcaatctcctcatcggagctgaagcacaacaccagaaacgggacgccatggaattgcccgactacgttctgttaacggcaactgccaaagtgaagcccaaaaagctggctttctctaactttggcaacctccggaagaaaaaacaggaggatggggaggagtatgtctgtcccatggagctgggtcaggcaagcggatcggcttccaagaaggggttcaaaccaggcttggatatgagattgtacgaagaagacgacctggataggttagagcagatggaggacagtgagggtactgtgcgccagataggcgccttcagcgaagggatcaataacctcacccatatgcttaaggaggacgatatgttcaaggacttcgccgctcgatctcctagcgccagcataactgacgaggacagtaacgtgtag

SEQ ID NO: 252582 - DNA, 6001 bp, Artificial Sequence
  derived and/or modified sequence
ggattcctgacatggtgtagtgcaggcagggtggggaaaggacggggaaggactcgtgtgctgcgagctggcggccgggccggagtgctggggctttgaactccgagaggaggtggaccagaacttttggaactagtgccggcggctctccaccccccagtataaaagaacgtgtggatcactttgctgagtacatccaagatttgaagaactgaaataaatcagctttaaacctgctttttaaaaatatctgggttggaatttgcccctgacaaataataaaatgatgagtgatgcaagtgacatgttggctgcagcgttggagcagatggatggtatcatagcaggttctaaggctctggaatattccaatgggatttttgattgccaatctcccacctctccattcatgggaagtttgcgagctctgcaccttgtggaagacctgcgtggattgttagagatgatggaaacagatgagaaagaaggcttgagatgccagatcccagattcaacagcagaaacgcttgttgaatggcttcagagtcaaatgacaaatggacacctaccagggaacggagatgtgtatcaagaaaggctggcacgtttagaaaatgataaagaatccctcgttcttcaggtaagtgtgttaacagaccaggtggaggctcagggagagaagattcgagatttggagttttgtcttgaagagcacagagagaaggtgaatgccacagaagaaatgctgcagcaggagcttctaagtaggacatccttagaaactcagaagttggatctgatggctgaaatatctaacttgaagttgaaactgacagctgtagagaaggacagattggattatgaagataagttcagagacacagaggggctgattcaggagatcaatgatttgaggttaaaagttagtgaaatggacagtgagagacttcagtatgaaaaaaagcttaaatcaaccaaatctttaatggccaaactttctagcatgaaaatcaaggtgggtcagatgcagtatgaaaagcagcggatggaacaaaaatgggagtcactgaaggatgaactggcatctttaaaagaacaactagaagaaaaggaatctgaagtaaaaaggctacaagaaaaattggtttgcaagatgaaaggagaaggggttgaaattgttgatagagacatcgaagtacaaaaaatgaaaaaagctgtggagtccttgatggcagcaaatgaagaaaaggatcggaaaatagaagatcttcgacagtgcctgaacaggtacaagaaaatgcaagacacggtggtactggcccaaggcaaagatggagaatatgaagagctgctcaattccagttccatctcctctttgctggatgcacagggtttcagtgatctggagaaaagtccatcacccactccagtaatgggatctcccagttgtgacccatttaacacaagtgttcccgaagagttccatactaccatcttgcaagtttccatcccttcattattgccagcaactgtaagcatggaaacttctgaaaaatcaaagttgactcctaagccagagacttcatttgaagaaaatgatggaaacataatccttggtgccactgttgatacccaactgtgtgataaacttttaacttcaagtctgcagaagtccagcagcctgggcaatctgaagaaagagacatctgatggggaaaaggaaactattcagaagacttcagaggacagagctccggcagaaagcaggccatttgggacccttcctcccaggcccccagggcaggacacctccatggatgacaaccccttcggcactcgaaaagtcagatcttcctttggccggggcttttttaaaatcaaaagtaacaagagaacagcaagtgcaccaaacttagctgaaacagaaaaagagacagcagagcacctagatctggctggtgcttcttctcggccaaaagattcacagaggaacagtcccttccagataccgcctccatctccagattccaaaaagaaatccagaggtatcatgaaactctttggaaaacttaggagaagtcaatcaactacattcaacccagatgacatgtctgagcctgaattcaaaagaggagggacaagggcaaccgcggggccccgattaggttggtctcgagacttgggacagtctaacagtgacttggatatgccatttgccaagtggaccaaggagcaggtttgcaattggctgatggaacagggcttgggctcgtacctgaattctggcaagcactggattgcatctggccaaacgcttttgcaggcttctcaacaagatctagagaaggaacttggaatcaagcattcacttcatcgaaagaaactccagctagcactccaagccctgggatctgaagaagaaaccaatcatgggaagctggatttcaactgggtcactagatggttggatgacattggcctccctcaatataagacccagtttgatgaaggacgggttgatggtcgaatgctacattacatgactgttgatgacttactgtctctgaaggttgtaagtgtgctacaccatctcagtatcaaaagggccatccaggtcctgaggatcaataactttgaaccaaactgtctacggaggcggccatctgatgagaataccatcgccccatcagaagttcagaagtggactaaccatcgagtgatggagtggctgcgctccgtggacttggcagaatatgcgcccaatctcagaggcagtggtgtccatggtgggctcatggttctagagcctcgttttaacgtagaaacaatggctcagttattgaacatcccacccaataagactttgctgcgaagacatttggccactcatttcaaccttctgattggggctgaggcacagcaccagaagcgagatgccatggagctgccggattatgtacttctaacagctactgccaaagtgaagccaaagaaacttgcctttagcaattttgggaatttgagaaagaagaaacaggaagatggtgaagaatatgtttgtccaatggaattgggacaggcatcaggaagtgcatctaagaaaggatttaaacctggtttggatatgcgcctgtatgaggaagatgatttggaccggttagagcagatggaagattcagaagggacagtgagacagataggtgcattctctgaaggcatcaacaatctgacgcacatgttaaaagaagatgacatgtttaaagattttgctgcccgttcccccagtgccagcattacagatgaagactcaaacgtttgaccgtagcacctggatgaacattaggagtgcttagtcttttttctacttgcttttccaaacactcacagtatatacaacaggcagcggattgtctattgtttgttgttccaacttctgctgtcgagaagtttaaacagaaagcaggagtaatgtgccgattctgaagttgccacaaaaaataagacactggtgaatgagagtataattgtttttcttctatttaatgtaaaaatctgtgatatattatatttaaagtgttgcatttaagatgagtattttaccagagtgtttccattcatatccgcggtatggaggatttgaggaacagtaaccaggatgtgaatgattttgttacatcagtgttcactgtagccacctaagtaggacattatatgatttcagaatcaatatgtggaacttctttaagcattcagtgtgcccactaaatgccagccacacctccacttgcctcttattgtcttatttttatatatttttctaaatatatgtatatatacagtacatagaaaatagaacttttattttgtgacctaaggacgatggtgaaaagatcacgttttcaaaacaatctggtgatcagaatgttcatataccagctggtttctgaagaggtcagaatgatctttctccatactgacttttaacaatgttgatcattgaggctaaattaatatatatgaaatattcctttttgatgacaccacaaaattgttgaacagtttaagaatttcaaccttaatcttggatccctttacctcatatggaagaacttgagggacattagtatacttttttttaagatggagtcttgctctgtcacccaggttggagtgccatggcatgatcttggctcactgcaacctccacctcctgggtcaagccattctgcttcagccccaagtaggtgggactccaggcatgcaccaccatgcctggctaatttttgcatttttagtagagacagggtttcaccatattggccaggctgggactcgaactcctgaccttgtgatctgcccgcctcagcctcccaaagtactgggattataggcatgagccaccacgcccagcctgttatttttttattattattgtttttttttagtgacagagtctcattctgttgcccatgctggagtgcagtggcgtgatcatagctcactgcagccttgaattcctaggctccagtgatcctctcacctcagcttccctaatagctaggattacaggtgtgtggcctcccaccccaccccacccttcacacctggctgatttttcaaaaagtttttttgtagaaacagggtctcaccatgttgtccagcctggtctcaaactcctgtcctcaagtgatcctcccacctcagcctttcaaagtgctggaattacaggtgtgagccactctgcctggcctaccactaacttgaatacattcagaatcacctcctctccccaaaatttgtagaaatagtttttgaggaagccaaaagcaaagcagaaacctttacagtattgtttcttttctctttgttaactgtgtcattacagcaaaatactagcagtctgcctaaacatgttcattgtacatttctcaggctatcaatgaatggaggtttttaaaaagttgaatatttgtctgaacattttatttcaaagttcaaaaaaacagaggctgcaaaattcattttataatggctattttgtgacgataagatgtagttcatgtttttctgtagcactgggcccaaatattctttgtaaagaaaatcgctgcagcaaaaactgttactgtgtttattatatttgtagaagtattagaaaaatattctattttttattcagtgctgcgtaattacccatggtagccaaccctacaaaagacaggttttcacaaattgaggtggaggtgggcggttcagtatctgccactggacttgattataaactgtatttgaatatcagtggtattatcttttaagttgtcagcaagttaccaaggtattcattaaagaacttgtaatatcaaattactatttattcataacaattgatttgatgctaataataattttctttaaactctaccattcattatgtggtaactgtattgaacttactttatttggattttattttaatgtgactagatgtcaccacttcaaaaaatcaatttgttcttagaacctggttgaaaataccaggaaactgttacagacgccattttttttttttttgagacggagtcttgctctgttgcccaggctggagtgcagtggcacaatctcagctcactgcaagctccgcctcctgggttcacgccattctcccacctcagcttcccaagcagctgggactacaggtacctgccaccacgcctggctaattttgtttttgtatttttagtagagacggggtttcaccgtgttagccaggaaggtctcaatctcctgacctcgtgaatcgcccccctcggtctcccaaagtgctgggattacaggcgtgagccaccatgcccggcccaaatattttttattcaggatggtataacctaactgataataggtaataaggttaaatttttttatgacgtattttatttacaaatatcatacactgctggtgttaccatatgaaaggaaataaagtcaattgataattgcctca

SEQ ID NO: 252583 - DNA, 5719 bp, Artificial Sequence
  derived and/or modified sequence
cagctcccagctcggtgcctgcccggattcctgacatggtgtagtgcaggcagggtggggaaaggacggggaaggactcgtgtgctgcgagctggcggccgggccggagtgctggggctttgaactccgagaggaggtggaccagaacttttggaactagtgccggcggctctccaccccccagtataaaagaacgtgtggatcactttgctgagtacatccaagatttgaagaactgaaataaatcagctttaaacctgctttttaaaaatacaaatggacacctaccagggaacggagatgtgtatcaagaaaggctggcacgtttagaaaatgataaagaatccctcgttcttcaggtaagtgtgttaacagaccaggtggaggctcagggagagaagattcgagatttggagttttgtcttgaagagcacagagagaaggtgaatgccacagaagaaatgctgcagcaggagcttctaagtaggacatccttagaaactcagaagttggatctgatggctgaaatatctaacttgaagttgaaactgacagctgtagagaaggacagattggattatgaagataagttcagagacacagaggggctgattcaggagatcaatgatttgaggttaaaagttagtgaaatggacagtgagagacttcagtatgaaaaaaagcttaaatcaaccaaatctttaatggccaaactttctagcatgaaaatcaaggtgggtcagatgcagtatgaaaagcagcggatggaacaaaaatgggagtcactgaaggatgaactggcatctttaaaagaacaactagaagaaaaggaatctgaagtaaaaaggctacaagaaaaattggtttgcaagatgaaaggagaaggggttgaaattgttgatagagacatcgaagtacaaaaaatgaaaaaagctgtggagtccttgatggcagcaaatgaagaaaaggatcggaaaatagaagatcttcgacagtgcctgaacaggtacaagaaaatgcaagacacggtggtactggcccaaggcaaagatggagaatatgaagagctgctcaattccagttccatctcctctttgctggatgcacagggtttcagtgatctggagaaaagtccatcacccactccagtaatgggatctcccagttgtgacccatttaacacaagtgttcccgaagagttccatactaccatcttgcaagtttccatcccttcattattgccagcaactgtaagcatggaaacttctgaaaaatcaaagttgactcctaagccagagacttcatttgaagaaaatgatggaaacataatccttggtgccactgttgatacccaactgtgtgataaacttttaacttcaagtctgcagaagtccagcagcctgggcaatctgaagaaagagacatctgatggggaaaaggaaactattcagaagacttcagaggacagagctccggcagaaagcaggccatttgggacccttcctcccaggcccccagggcaggacacctccatggatgacaaccccttcggcactcgaaaagtcagatcttcctttggccggggcttttttaaaatcaaaagtaacaagagaacagcaagtgcaccaaacttagctgaaacagaaaaagagacagcagagcacctagatctggctggtgcttcttctcggccaaaagattcacagaggaacagtcccttccagataccgcctccatctccagattccaaaaagaaatccagaggtatcatgaaactctttggaaaacttaggagaagtcaatcaactacattcaacccagatgacatgtctgagcctgaattcaaaagaggagggacaagggcaaccgcggggccccgattaggttggtctcgagacttgggacagtctaacagtgacttggatatgccatttgccaagtggaccaaggagcaggtttgcaattggctgatggaacagggcttgggctcgtacctgaattctggcaagcactggattgcatctggccaaacgcttttgcaggcttctcaacaagatctagagaaggaacttggaatcaagcattcacttcatcgaaagaaactccagctagcactccaagccctgggatctgaagaagaaaccaatcatgggaagctggatttcaactgggtcactagatggttggatgacattggcctccctcaatataagacccagtttgatgaaggacgggttgatggtcgaatgctacattacatgactgttgatgacttactgtctctgaaggttgtaagtgtgctacaccatctcagtatcaaaagggccatccaggtcctgaggatcaataactttgaaccaaactgtctacggaggcggccatctgatgagaataccatcgccccatcagaagttcagaagtggactaaccatcgagtgatggagtggctgcgctccgtggacttggcagaatatgcgcccaatctcagaggcagtggtgtccatggtgggctcatggttctagagcctcgttttaacgtagaaacaatggctcagttattgaacatcccacccaataagactttgctgcgaagacatttggccactcatttcaaccttctgattggggctgaggcacagcaccagaagcgagatgccatggagctgccggattatgtacttctaacagctactgccaaagtgaagccaaagaaacttgcctttagcaattttgggaatttgagaaagaagaaacaggaagatggtgaagaatatgtttgtccaatggaattgggacaggcatcaggaagtgcatctaagaaaggatttaaacctggtttggatatgcgcctgtatgaggaagatgatttggaccggttagagcagatggaagattcagaagggacagtgagacagataggtgcattctctgaaggcatcaacaatctgacgcacatgttaaaagaagatgacatgtttaaagattttgctgcccgttcccccagtgccagcattacagatgaagactcaaacgtttgaccgtagcacctggatgaacattaggagtgcttagtcttttttctacttgcttttccaaacactcacagtatatacaacaggcagcggattgtctattgtttgttgttccaacttctgctgtcgagaagtttaaacagaaagcaggagtaatgtgccgattctgaagttgccacaaaaaataagacactggtgaatgagagtataattgtttttcttctatttaatgtaaaaatctgtgatatattatatttaaagtgttgcatttaagatgagtattttaccagagtgtttccattcatatccgcggtatggaggatttgaggaacagtaaccaggatgtgaatgattttgttacatcagtgttcactgtagccacctaagtaggacattatatgatttcagaatcaatatgtggaacttctttaagcattcagtgtgcccactaaatgccagccacacctccacttgcctcttattgtcttatttttatatatttttctaaatatatgtatatatacagtacatagaaaatagaacttttattttgtgacctaaggacgatggtgaaaagatcacgttttcaaaacaatctggtgatcagaatgttcatataccagctggtttctgaagaggtcagaatgatctttctccatactgacttttaacaatgttgatcattgaggctaaattaatatatatgaaatattcctttttgatgacaccacaaaattgttgaacagtttaagaatttcaaccttaatcttggatccctttacctcatatggaagaacttgagggacattagtatacttttttttaagatggagtcttgctctgtcacccaggttggagtgccatggcatgatcttggctcactgcaacctccacctcctgggtcaagccattctgcttcagccccaagtaggtgggactccaggcatgcaccaccatgcctggctaatttttgcatttttagtagagacagggtttcaccatattggccaggctgggactcgaactcctgaccttgtgatctgcccgcctcagcctcccaaagtactgggattataggcatgagccaccacgcccagcctgttatttttttattattattgtttttttttagtgacagagtctcattctgttgcccatgctggagtgcagtggcgtgatcatagctcactgcagccttgaattcctaggctccagtgatcctctcacctcagcttccctaatagctaggattacaggtgtgtggcctcccaccccaccccacccttcacacctggctgatttttcaaaaagtttttttgtagaaacagggtctcaccatgttgtccagcctggtctcaaactcctgtcctcaagtgatcctcccacctcagcctttcaaagtgctggaattacaggtgtgagccactctgcctggcctaccactaacttgaatacattcagaatcacctcctctccccaaaatttgtagaaatagtttttgaggaagccaaaagcaaagcagaaacctttacagtattgtttcttttctctttgttaactgtgtcattacagcaaaatactagcagtctgcctaaacatgttcattgtacatttctcaggctatcaatgaatggaggtttttaaaaagttgaatatttgtctgaacattttatttcaaagttcaaaaaaacagaggctgcaaaattcattttataatggctattttgtgacgataagatgtagttcatgtttttctgtagcactgggcccaaatattctttgtaaagaaaatcgctgcagcaaaaactgttactgtgtttattatatttgtagaagtattagaaaaatattctattttttattcagtgctgcgtaattacccatggtagccaaccctacaaaagacaggttttcacaaattgaggtggaggtgggcggttcagtatctgccactggacttgattataaactgtatttgaatatcagtggtattatcttttaagttgtcagcaagttaccaaggtattcattaaagaacttgtaatatcaaattactatttattcataacaattgatttgatgctaataataattttctttaaactctaccattcattatgtggtaactgtattgaacttactttatttggattttattttaatgtgactagatgtcaccacttcaaaaaatcaatttgttcttagaacctggttgaaaataccaggaaactgttacagacgccattttttttttttttgagacggagtcttgctctgttgcccaggctggagtgcagtggcacaatctcagctcactgcaagctccgcctcctgggttcacgccattctcccacctcagcttcccaagcagctgggactacaggtacctgccaccacgcctggctaattttgtttttgtatttttagtagagacggggtttcaccgtgttagccaggaaggtctcaatctcctgacctcgtgaatcgcccccctcggtctcccaaagtgctgggattacaggcgtgagccaccatgcccggcccaaatattttttattcaggatggtataacctaactgataataggtaataaggttaaatttttttatgacgtattttatttacaaatatcatacactgctggtgttaccatatgaaaggaaataaagtcaattgataattgcctc

SEQ ID NO: 252584 - DNA, 3036 bp, Artificial Sequence
  derived and/or modified sequence
atgatgagtgacgcgtccgacatgcttgccgctgccttggagcagatggacggcataatcgcaggaagtaaggctctggaatactccaatggtattttcgactgtcaatcgccgacttcgccatttatgggtagccttcgagcattgcacctggtggaagatctgcgtggcctgctggagatgatggagaccgatgagaaggaagggctgcgatgtcaaattccagacagtacagctgaaacactggttgaatggcttcaaagtcagatgaccaatggacacttacctgggaacggggatgtgtaccaggagcgtctggcacgcctggaaaatgataaggaaagtctagtgcttcaggtctccgtcttgaccgatcaggtcgaggcccagggggagaagatcagggatctggagttctgcttagaggaacatagggaaaaggttaatgccaccgaggaaatgctgcagcaagagttgctgagtagaacctctttagagactcaaaaactggatctgatggccgaaatcagtaacctgaagctgaaactcactgcggtggagaaagatagattggattacgaagataagttccgagacacagaagggttaatccaggagatcaacgatctacgtttgaaggtgagcgagatggacagtgagcgtttgcagtatgagaagaagttgaaaagcacgaaatccctgatggctaagctgtccagcatgaagattaaggtgggccagatgcagtatgagaaacagagaatggagcagaaatgggaaagtctgaaggacgagctcgcatcgctcaaagagcaacttgaagaaaaagaatctgaggtaaaaaggcttcaggagaagttggtttgtaagatgaagggcgagggagtggagatcgtcgatagagatattgaagtgcagaaaatgaagaaggctgtagagtcgctgatggccgcaaacgaggagaaagatcgcaagatcgaagacttacgccagtgtctgaacaggtacaagaaaatgcaagatactgtggtgctcgcacaggggaaggatggagagtatgaggaactcctgaatagcagcagcatctcttcactactggatgcccaaggtttcagcgacctggaaaagagcccgagccccacaccagtgatggggtccccatcttgtgacccattcaatacgtctgttccggaagaattccacacaactattcttcaagtgagcatcccgagcttactgcccgctacggtgtctatggagacgtcagaaaaaagcaaactgacgcccaagcctgagacttcttttgaagagaatgacggcaacattatattaggcgcaaccgtggacacccagctgtgtgataaacttcttacttcctccctccagaaaagctcatccctcggcaatttgaaaaaagagacaagtgatggagagaaggaaacaatccagaaaacctcagaagaccgcgctcccgctgaatcaagaccattcggtaccctgccaccaagaccccctggtcaggacacctcaatggatgacaacccttttggtacgcggaaggtaaggtctagctttgggaggggcttctttaagatcaaaagcaacaagcgcaccgcaagtgccccaaacttagctgaaacagagaaggaaaccgctgagcacttagatctcgcaggagcttctagccgtcccaaagattcccagcgcaactctcctttccaaattcctcctccgtctcctgacagcaaaaaaaagagtcggggtattatgaagctgtttgggaagctgagacgctctcaaagcacaacatttaatccggatgacatgtccgagcccgagttcaagaggggtggaacacgagccactgctggccctcgcctcggctggtccagggatttggggcaatccaactccgaccttgacatgccatttgctaaatggacgaaagagcaagtctgtaactggctcatggaacagggcctggggagctaccttaactccggtaagcactggatcgccagcggtcagaccctgctgcaggctagccagcaagacctggaaaaagagctcggaatcaaacactctttacaccggaagaagctgcagctggccctgcaggccctgggcagcgaggaagagacaaaccatgggaaattggactttaactgggtcacgcggtggctcgacgacataggattacctcagtacaagacacagtttgatgagggccgtgtggatgggagaatgcttcattatatgacggtggacgatttactgtcactgaaggtagttagcgtgctgcatcacctgtctataaagagagctatacaggtgctgcggattaataacttcgaacccaactgtctgcgacggaggcccagcgacgagaatacaatcgccccttcagaagttcagaagtggacaaaccaccgtgtgatggagtggctaaggagcgtcgatctggccgaatatgcccctaatctgcgtgggtccggcgttcacggaggcctgatggtccttgagcctaggttcaatgtcgagacgatggcccagcttctgaatatcccccctaataaaacactcctgcgcaggcatcttgccacccattttaacctgctgatcggggctgaggcgcaacaccagaaaagggatgccatggaacttcccgattacgtgttgctgaccgccacagcgaaagttaagcctaagaaattagcttttagcaacttcggcaatctacggaagaaaaaacaagaggatggagaggagtatgtgtgtccaatggagctcggtcaagcaagtggatccgcctcgaagaagggctttaaacccggtctcgacatgcgactctacgaggaggatgatttggacaggctcgagcaaatggaggattccgaagggacagtgcgacaaatcggcgcattctcggaggggattaataatctgacgcacatgcttaaggaggacgatatgtttaaagacttcgcagccaggagccccagtgctagcatcaccgatgaggactccaacgtctag

SEQ ID NO: 252585 - DNA, 2577 bp, Artificial Sequence
  derived and/or modified sequence
atgttgcaacaggagcttctgagcaggacgagcctggaaacccagaagttggatctgatggcggaaatttcgaatctaaagcttaagctgactgctgtggaaaaggataggctggactatgaagacaagttccgcgatacagagggacttattcaggaaatcaacgacctccggttaaaagtgtctgagatggactctgaaagactgcagtatgagaaaaagcttaaatccacgaaaagtttaatggcaaagctctctagcatgaaaatcaaagtagggcagatgcagtacgaaaagcagcgcatggaacagaagtgggaaagcctcaaggatgagctggcgtctctgaaggagcaactcgaagagaaggagagtgaggtaaagagactgcaggaaaagcttgtatgcaaaatgaagggcgagggagtcgagatagtggatagagacatcgaggtgcaaaagatgaagaaagctgtggaatctctgatggctgccaacgaagaaaaagaccgaaagatagaggatctgcgccagtgtcttaatcgatacaagaagatgcaggatacagttgtgctggcacaaggaaaggatggcgaatacgaagaactactgaacagcagctccatcagttctctgcttgacgcccaggggtttagcgatcttgaaaagtcaccctcgccgacccccgtgatgggtagccctagttgcgacccgtttaacacaagtgtgccagaagaatttcatactaccatcctgcaggtgagcattccgtctcttctgccagcaacagtgtctatggaaacctcggagaaatccaagctcacacccaaaccggaaaccagcttcgaggagaatgatggaaacatcattcttggcgctaccgtagacacccaactgtgcgataagctattaacatctagcttacagaaatcgagctccctgggaaatctgaagaaagagactagcgacggggagaaagaaacgatacagaaaaccagcgaggacagagcaccagccgagagcaggccttttggcactctgccacctaggccaccaggccaggacacatcaatggacgacaatcctttcgggacacgtaaagtccggagcagttttggacggggattttttaaaataaagagcaacaaacggacagctagtgccccaaaccttgccgaaacggagaaagaaacagcagagcatctggacctcgcgggtgcaagtagtcgcccaaaggacagtcagagaaattctccttttcagatcccaccacctagcccggactcaaagaaaaagtctcggggtatcatgaagctgtttggaaaattgaggaggagtcaatcaaccacgttcaacccggatgacatgtccgagcccgaattcaaaagaggtggcacaagagccaccgccggacccaggcttggctggtctcgggatcttgggcaatcgaactcggatcttgatatgcctttcgctaagtggacaaaggagcaggtttgcaactggctgatggaacagggcctgggaagttatctcaattctggcaaacattggatagcatccggacaaacgctgctccaagcctcccaacaggatttagaaaaggaactcggcatcaaacactcactgcatcgcaaaaagcttcaactcgcactgcaagccctaggtagtgaggaggagaccaaccacggaaagctggactttaattgggtcactaggtggctcgacgatattggactgcctcagtacaagactcagttcgatgaaggccgagttgacgggcgaatgctccattacatgacagtcgatgacctgctgagtctcaaggtcgtatcagtgctgcaccacctctcaatcaagcgagcaattcaggtgcttaggatcaataacttcgaacccaactgcctgagacggaggccatccgatgaaaatactatagcccctagcgaagttcaaaagtggactaatcatcgcgtcatggagtggctgcgctctgtcgatctcgctgagtacgcacctaacttgcgaggttcaggagtgcacggcggactcatggtactggaacccaggtttaacgtcgagacaatggctcagcttctcaacatcccccctaacaaaacactgctgagaagacatcttgcaacccactttaatctgttgatcggggctgaggctcagcatcagaagcgagacgcaatggaacttccggactacgtcctgctcactgccacggctaaagtcaagcctaagaagctggcgttcagcaattttggcaatctcaggaagaagaaacaggaagacggtgaggaatatgtttgccccatggagttaggccaggcctcaggctccgctagcaagaaaggcttcaaacctggcctggatatgagattgtacgaagaagatgatctcgatcgcctagaacaaatggaggacagtgaagggacagtgcgacagataggtgccttctctgaaggcataaacaatttgactcatatgttgaaagaggatgatatgttcaaggactttgcagccaggtctccttcagcatctatcaccgacgaggattccaacgtttag

SEQ ID NO: 252586 - protein, 189 aa, Artificial Sequence
  derived and/or modified sequence
MKTKNRPPRRRAPVQDTEATPGEGTPDGSLPNPGPEPAKGLRSRPARAAARAPGEGRRRRPGPSGPGGRRDSSIQRRLESNERERQRMHKLNNAFQALREVIPHVRADKKLSKIETLTLAKNYIKSLTATILTMSSSRLPGLEGPGPKLYQHYQQQQQVAGGALGATEAQPQGHLQRYSTQIHSFREGT

SEQ ID NO: 252587 - DNA, 570 bp, Artificial Sequence
  derived and/or modified sequence
atgaaaactaagaatcgcccaccacgccgtcgtgcccctgtgcaggacaccgaagcaactccgggagaagggacccctgatggatccctgcccaaccccggtcccgagcctgccaagggactgcggtctaggcctgctcgggcagctgctcgtgcacctggcgaagggagaaggagaagaccagggcctagcggtcctggcggtcgcagggacagcagcatccagaggaggctggagtccaatgagagagagaggcagaggatgcacaagttaaataatgcatttcaagcattacgggaagtgatcccacatgtcagagccgataaaaaactctcaaaaatcgagacactcaccctggctaaaaactatatcaagagcctgaccgctaccatcctgaccatgtcttcttccagactgcccgggctggaggggcccgggcccaagctttaccagcactaccagcaacagcaacaggtagcaggtggggctctgggagccacagaagcccagccacagggccatttgcagcggtactcaacccaaattcactcctttagagaggggacctag

SEQ ID NO: 252588 - DNA, 570 bp, Artificial Sequence
  derived and/or modified sequence
atgaagaccaagaacagacctccaagaagaagagcccctgtgcaggacacagaggccaccccaggagagggcaccccagatggcagcctgcccaaccctggccctgagcccgccaagggcctgcggagcaggcctgcccgggctgctgcccgggcccctggagagggcagaagaagaagacctggccccagcggccctgggggcagaagagacagcagcatccagaggcggctggagagcaatgaaagagagcggcagaggatgcacaagctgaacaatgccttccaggccctgcgggaggtgatcccccacgtgcgggctgacaagaagctgagcaagattgagaccctgaccctggccaagaactacatcaagagcctgacagccaccatcctgaccatgagcagcagccggctgcccggcctggagggccctggccccaagctgtaccagcactaccagcagcagcagcaggtggccggcggggccctgggcgccacagaggcccagccccagggccacctgcagcgctacagcacccagatccacagcttccgggagggcacctag

SEQ ID NO: 252589 - DNA, 570 bp, Artificial Sequence
  derived and/or modified sequence
atgaagaccaagaaccggcccccccggcggcgggcccccgtgcaggatacagaggcaacgcccggggagggaactcccgatggaagcctgcccaatcctggtcccgaacccgccaaaggcctacgatcacgacccgcgcgcgctgctgccagggcccctggagagggcaggagaaggcgaccaggaccatctggccccggcggacggcgagactccagcatccagcgacgtctcgagagcaatgagcgggaaagacaacgcatgcacaagctcaacaacgccttccaggccttgagggaggtgatcccccacgttagagccgacaaaaaattgagcaagatcgaaacgctgacgctcgcgaaaaattatataaaatccctgactgcgaccatcctgacaatgagttctagccgcctgcctgggctggaaggccctggtcctaagctataccagcactaccagcagcagcagcaggtcgctggaggcgctctgggcgctacggaggctcagccccagggacatctgcagcgctattctacacaaatacactcatttagagaaggtacatag

SEQ ID NO: 252590 - DNA, 570 bp, Artificial Sequence
  derived and/or modified sequence
atgaagaccaaaaacagaccgccacgccgtagggcccctgttcaagacactgaagcaacccctggggagggcaccccagatgggtccctgcccaacccaggccctgaaccagccaaagggctgaggtcacggccagccagagccgcagcacgtgccccaggagaagggagacgtagacggccaggaccttccgggccaggcggaagaagggactcaagcatccagcgtagactggagagtaatgaacgtgaaagacagcggatgcataagctgaacaatgccttccaagcacttagagaagtgataccacatgtcagggccgacaagaagttgagtaaaatcgaaacgctcaccctggccaaaaactatatcaaaagcctcactgctactattctgaccatgagctcaagtaggctgcccggattggaagggcctggtcccaagctgtaccagcattaccagcagcagcagcaggtagccggaggtgctctgggcgctacagaggcacagccccaaggccacctgcagcgatactccacacagatccattccttccgagaaggtacctag

SEQ ID NO: 252591 - DNA, 706 bp, Artificial Sequence
  derived and/or modified sequence
agctccaagggcctcaccttcctgccgccacctcctaggacagccagtccagggccatgaagaccaagaaccggcccccacggcgccgggccccggtgcaggacacagaggccacccccggggaggggacgcccgacgggtccctgccgaacccggggccagagccggccaagggtctgcggagccggccggcccgggccgcagcaagggctccgggcgagggcaggcgcaggcggccaggaccctccgggcccggtggccgtcgtgacagcagcatccagcggcggctggagagcaacgagagggagcggcagcggatgcacaagctaaataacgccttccaggccctgcgtgaagtcatcccccacgtgcgcgcggacaagaagctctccaagatcgagacgctcacgctggccaagaactacatcaaatcgctgacggccaccatcctgaccatgtccagcagccgcctcccaggcctggaggggccgggccccaagctctaccagcactaccagcagcagcagcaggtggctgggggtgcgttgggggccacggaggcccagccccagggccacctgcagaggtactccacgcagatccacagcttccgagagggcacctagcgcccagtcctgggtgggggtggcggtggccgcagctgcctggcctgctcctcccagccccagtccctccaagccacgag

SEQ ID NO: 252592 - DNA, 570 bp, Artificial Sequence
  derived and/or modified sequence
atgaagaccaagaacagaccccccagaagaagagcccccgtgcaggacaccgaggccacccccggcgagggcacccccgacggcagcctgcccaaccccggccccgagcccgccaagggcctgagaagcagacccgccagagccgccgccagagcccccggcgagggcagaagaagaagacccggccccagcggccccggcggcagaagagacagcagcatccagagaagactggagagcaacgagagagagagacagagaatgcacaagctgaacaacgccttccaggccctgagagaggtgatcccccacgtgagagccgacaagaagctgagcaagatcgagaccctgaccctggccaagaactacatcaagagcctgaccgccaccatcctgaccatgagcagcagcagactgcccggcctggagggccccggccccaagctgtaccagcactaccagcagcagcagcaggtggccggcggcgccctgggcgccaccgaggcccagccccagggccacctgcagagatacagcacccagatccacagcttcagagagggcacctag

SEQ ID NO: 252593 - protein, 97 aa, Artificial Sequence
  derived and/or modified sequence
MQLGTGLLLAAVLSLQLAAAEAIWCHQCTGFGGCSHGSRCLRDSTHCVTTATRVLSNTEDLPLVTKMCHIGCPDIPSLGLGPYVSIACCQTSLCNHD

SEQ ID NO: 252594 - DNA, 294 bp, Artificial Sequence
  derived and/or modified sequence
atgcagctgggcaccggcctgctgctggccgccgtgctgagcctgcagctggccgccgccgaggccatctggtgccaccagtgcaccggcttcggcggctgcagccacggcagcagatgcctgagagacagcacccactgcgtgaccaccgccaccagagtgctgagcaacaccgaggacctgcccctggtgaccaagatgtgccacatcggctgccccgacatccccagcctgggcctgggcccctacgtgagcatcgcctgctgccagaccagcctgtgcaaccacgactag

SEQ ID NO: 252595 - DNA, 294 bp, Artificial Sequence
  derived and/or modified sequence
atgcagctgggcactggacttttgctcgcagctgtcctgtcgctgcaactagcagccgctgaggccatttggtgtcaccagtgcacagggtttggcggatgtagccacggatcgcggtgtctgagagacagcacacattgcgtaaccactgccacccgcgtgttgagtaacacagaagacctccccttagtgaccaaaatgtgtcacatcggctgcccagatatcccctccctgggccttggcccctacgtctccattgcctgctgccagacgtcgctgtgcaatcatgattag

SEQ ID NO: 252596 - DNA, 294 bp, Artificial Sequence
  derived and/or modified sequence
atgcagctgggcaccggcctgctgctggccgctgtgctgagcctgcagctggccgctgctgaggccatctggtgccaccagtgcaccggctttggaggctgcagccacggcagccgctgcctgcgggacagcacccactgtgtgaccacagccaccagggtgctgagcaacacagaggacctgcccctggtgaccaagatgtgccacatcggctgcccagacatccccagcctgggcctgggcccctacgtgtccatcgcctgctgccagaccagcctgtgcaaccacgactag

SEQ ID NO: 252597 - DNA, 294 bp, Artificial Sequence
  derived and/or modified sequence
atgcagctgggcaccggcctgctgctggccgccgtgctgagcctgcagttggctgccgctgaagcaatttggtgccaccagtgtacaggctttggtggctgcagccacggaagcagatgtcttcgcgattctactcactgtgtgaccacagccacccgtgtgctgtccaatacagaggacttgccattggtaacgaagatgtgtcatattggctgccctgatatcccctcgcttggcttgggcccatatgtgagcattgcctgttgccagacgagcctgtgtaaccatgactag

SEQ ID NO: 252598 - DNA, 294 bp, Artificial Sequence
  derived and/or modified sequence
atgcaattgggtacagggttactgttggccgcagtgttgagtctgcagttagctgcagcggaagccatctggtgccaccagtgcaccggattcggcggatgtagccatgggtcccgctgcctgagggactccacacattgtgtgacaacagcaacgagggtcctgtcgaatacagaggatctgcccttggtaacaaagatgtgtcatataggctgtccagacatcccgtcattggggctgggcccatacgtgagcattgcttgctgccagacctccctttgtaaccacgactag

SEQ ID NO: 252599 - DNA, 599 bp, Artificial Sequence
  derived and/or modified sequence
cggccagggcgccgacagcccgacctcaccaggagaacatgcagctcggcactgggctcctgctggccgccgtcctgagcctgcagctggctgcagccgaagccatatggtgtcaccagtgcacgggcttcggagggtgctcccatggatccagatgcctgagggactccacccactgtgtcaccactgccacccgggtcctcagcaacaccgaggatttgcctctggtcaccaagatgtgccacataggctgccccgatatccccagcctgggcctgggcccctacgtatccatcgcttgctgccagaccagcctctgcaaccatgactgacggctgccctcctccaggcccccggacgctcagcccccacagcccccacagcctggcgccagggctcacagctgcccctccctcgagactggccagcccacctctcccggcctctgcagccaccgtccagcaccgcttgtcctagggaagtcctgcgtggagtcttgcctcaatctgctgccgtccaagcctggggcccatcgtgcctgccgccccttcaggtcccgacctccccacaataaaatgtgattggatcgtgtggtacaa

SEQ ID NO: 252600 - protein, 116 aa, Artificial Sequence
  derived and/or modified sequence
MTPLLTLILVVLMGLPLAQALDCHVCAYNGDNCFNPMRCPAMVAYCMTTRTYYTPTRMKVSKSCVPRCFETVYDGYSKHASTTSCCQYDLCNGTGLATPATLALAPILLATLWGLL

SEQ ID NO: 252601 - protein, 82 aa, Artificial Sequence
  derived and/or modified sequence
MTPLLTLILVVLMGLPLAQALDCHVCAYNGDNCFNPMRCPAMVAYCMTTRTYYTPTRMKVSKSCVPRCFETVYDGYSKHAST

SEQ ID NO: 252602 - protein, 84 aa, Artificial Sequence
  derived and/or modified sequence
MTPLLTLILVVLMGLPLAQALDCHVCAYNGDNCFNPMRCPAMVAYCMTTRTYYTPTRMKVSKSCVPRCFETVYDGYSKHASTTS

SEQ ID NO: 252603 - DNA, 351 bp, Artificial Sequence
  derived and/or modified sequence
atgaccccattgctaacgcttatcttggtggtgctgatggggctacccttggcacaggccctggattgtcacgtgtgcgcttataacggagacaactgtttcaaccccatgagatgtcccgctatggtagcttattgtatgactacacgcacgtactacacccctacacggatgaaagtcagcaagtcttgcgtgcctagatgcttcgagactgtttatgacggatattctaagcacgcgtctaccactagctgctgtcagtatgacctctgcaatggaacagggctggcgacccccgcaaccctagcactagcacccatactactggcaaccctgtggggactactctag

SEQ ID NO: 252604 - DNA, 351 bp, Artificial Sequence
  derived and/or modified sequence
atgacgcccctgctgaccctgatcctggttgtgctgatgggcctgcctctggcacaggcccttgattgtcatgtgtgtgcgtataatggggacaactgtttcaaccccatgaggtgcccagcaatggttgcctactgtatgacaacaagaacttattacactcctactaggatgaaggtttctaagagttgtgtgccccggtgtttcgaaactgtatatgacggatatagcaaacacgcatcaacaacaagttgctgccagtatgatctatgcaacgggacgggcttagccacccctgcaaccctagccttagctcctatactgctagcaactctgtggggcctcctgtag

SEQ ID NO: 252605 - DNA, 351 bp, Artificial Sequence
  derived and/or modified sequence
atgacacccctgctgaccctcatcctggtggttttaatggggctccccctggctcaggccctagattgccacgtatgcgcgtataacggggacaattgcttcaaccccatgcgctgtccagctatggtggcttactgtatgaccactcggacgtactatacaccaacccgtatgaaggtgtcaaaatcctgtgttccccgatgttttgagactgtgtacgacggatatagcaagcacgcaagcacaacctcttgttgccagtatgatctgtgcaatggcaccggcttagccaccccagcaaccctggctctggcccccattctgctggccacactgtggggactgttgtag

SEQ ID NO: 252606 - DNA, 249 bp, Artificial Sequence
  derived and/or modified sequence
atgacccctctattgacccttatcctcgtggttctcatgggtttgcctctggcacaggctctggattgtcatgtttgtgcgtacaatggcgacaactgtttcaatcccatgaggtgccctgctatggtagcctactgcatgaccaccagaacctattacactccaacgcgcatgaaagtctcaaaatcctgtgtgcccaggtgcttcgagacagtatacgatggttattccaaacacgccagcacatag

SEQ ID NO: 252607 - DNA, 255 bp, Artificial Sequence
  derived and/or modified sequence
atgacccccctcttgacgcttattctggtcgtcttgatgggcctgcctctagcccaagccttagactgccacgtctgcgcctacaatggcgacaactgctttaaccccatgaggtgccccgcaatggtggcttattgcatgactaccaggacatattacacacctacaagaatgaaagtctcaaagtcctgcgtgccacgctgcttcgagacagtgtacgacggctacagcaagcacgcctctactacctcgtag

SEQ ID NO: 252608 - DNA, 351 bp, Artificial Sequence
  derived and/or modified sequence
atgacccccctgctgaccctcatcctggtggtgctgatgggcctgcccctggcccaggccctggactgccacgtgtgtgcctacaatggagacaactgcttcaaccccatgcgctgcccagccatggtggcctactgcatgaccaccaggacctactacacccccaccaggatgaaggtgtccaagagctgtgtgccccgctgctttgaaacagtgtatgatggctacagcaagcacgccagcaccaccagctgctgccagtatgacctgtgcaatggcaccggcctggccaccccagccaccctggccctggcccccatcctgctggccaccctgtggggcctgctgtag

SEQ ID NO: 252609 - DNA, 249 bp, Artificial Sequence
  derived and/or modified sequence
atgacccccctgctgaccctcatcctggtggtgctgatgggcctgcccctggcccaggccctggactgccacgtgtgtgcctacaatggagacaactgcttcaaccccatgcgctgcccagccatggtggcctactgcatgaccaccaggacctactacacccccaccaggatgaaggtgtccaagagctgtgtgccccgctgctttgaaacagtgtatgatggctacagcaagcacgccagcacctag

SEQ ID NO: 252610 - DNA, 255 bp, Artificial Sequence
  derived and/or modified sequence
atgacccccctgctgaccctcatcctggtggtgctgatgggcctgcccctggcccaggccctggactgccacgtgtgtgcctacaatggagacaactgcttcaaccccatgcgctgcccagccatggtggcctactgcatgaccaccaggacctactacacccccaccaggatgaaggtgtccaagagctgtgtgccccgctgctttgaaacagtgtatgatggctacagcaagcacgccagcaccaccagctag

SEQ ID NO: 252611 - DNA, 866 bp, Artificial Sequence
  derived and/or modified sequence
gagggggttgggaagctcgaagccgcaggcctgactctggcctttggcatcctggggttggcctgggcaaatgtgtcgtgagagacggatttgttgttctcgggaaggcggttgcagcactcccagtagaccaggagctccgggaggcagggccggccccacgtcctctgcgcaccaccctgagttggatcctctgtgcgccacctgagttggatccagggctagctgctgttgacctccccactcccacgctgccctcctgcctgcagccatgacgcccctgctcaccctgatcctggtggtcctcatgggcttacctctggcccaggccttggactgccacgtgtgtgcctacaacggagacaactgcttcaaccccatgcgctgcccggctatggttgcctactgcatgaccacgcgcacctactacacccccaccaggatgaaggtcagtaagtcctgcgtgccccgctgcttcgagactgtgtatgatggctactccaagcacgcgtccaccacctcctgctgccagtacgacctctgcaacggcaccggccttgccaccccggccaccctggccctggcccccatcctcctggccaccctctggggtctcctctaaagcccccgaggcagacccactcaagaacaaagctctcgagacacactgctacaccctcgcacccagctcaccctgcctcaccctccacactccctgcgacctcctcagccatgcccagggtcaggactgtgggcaagaagacacccgacctcccccaaccaccacacgacctcacttcgaggccttgacctttcgatgctgtgtgggatcccaaaagtgtccggctttgatgggctgatcagcc

SEQ ID NO: 252612 - DNA, 4535 bp, Artificial Sequence
  derived and/or modified sequence
ggctgccgcgggacgcggtgaagatagcctgcggagtgtccgggctgaacacggttgcagcactcccagtagaccaggagctccgggaggcagggccggccccacgtcctctgcgcaccaccctgagttggatcctctgtgcgccacctgagttggatccagggctagctgctgttgacctccccactcccacgctgccctcctgcctgcagccatgacgcccctgctcaccctgatcctggtggtcctcatgggcttacctctggcccaggccttggactgccacgtgtgtgcctacaacggagacaactgcttcaaccccatgcgctgcccggctatggttgcctactgcatgaccacgcgcacctactacacccccaccaggatgaaggtcagtaagtcctgcgtgccccgctgcttcgagactgtgtatgatggctactccaagcacgcgtccaccacctcctgctgccagtacgacctctgcaacggcaccggccttgccaccccggccaccctggccctggcccccatcctcctggccaccctctggggtctcctctaaagcccccgaggcagacccactcaagaacaaagctctcgagacacactgctacaccctcgcacccagctcaccctgcctcaccctccacactccctgcgacctcctcagccatgcccagggtcaggactgtgggcaagaagacacccgacctcccccaaccaccacacgacctcacttcgaggccttgacctttcgatgctgtgtgggatcccaaaagtgtccggctttgatgggctgatcagcccctcgcctgtccagggctatttatggggaggggcccagtcaggcagggagcactgagcagatgggagctgtggccaagcccaccttctgggaagccctaggagaggcccctgcctcagtctgcccctggtgtgctggggcagggggaagacaaggaatgcccgcaggtggggtggtggggagactcttaggaggaaaggctcctccaggcctagtcacgcttcctactgaggccaggagctgccaggaccggtacgggatcagggctgtgggaggagggcctttggcaccggcccctgtgctaggaagtctgccaggcccgagttggagccaccccctgcaggggagggggcggctctgcctcagcaggccccagggcccccgaagtcacagaagctttttcgggtccagcaaggggtgtgtgtcctctcagtcaaaccccttgacgtttcccaccccctcacggggagggcaccaggcctgaagctggcaggagctagggccatgctatatttggtgggtcctggacgctgacccggccagcgctattctgggcagggagggaaaggggcagagcaggtggtcccccgagtcctggtccccaaccacagcaggacccagccgagcaaggcaaaagacgcaggactgggggatgcgcgcacaggctgggggttgggagcagcctggggccggcgcgggcctgggcgtgggaaggcggagcatgccaccctctcgtggccgtgcgggggcgggagtggggagggtggggtggggagggcggagacccagcccctcccccgcagcgggatgcgcacagtgagtgggtccctccatcaccttccacctggggatgcacccactgggagggcagggtggaagccccagctgggtgtgtggactcccagggaccccaccccaggcctgggaagcaggggtcagcccaacacgcaccaatccatccccgatgcaggtagcccagggagcacctgcccctgctgtgaatggggcattcgggggcgtgagaccttttggtgccagcggtcacgctgcacctgaggcccccacctgaccagtgctcccagctctggtgtcctgagaaacccttcaagccatcccgcatgggcaggatggtgacatatccatgtggtaggattgtcccggccccaaagtatggccctggtcaggggagcccctgctggaaattgcatctccagagctttgatgcaggacccctgggggatcagggaatgagggtctccaccccaggggtctccttgcagtgagtctatatgcaggcctgcgttctgctcctggggctggttctgagtgcccagcttcagtctcctgagaacatgaggatgggagggggcagagtcttgctgagggcacacccagttcccgctggaggaggacagtgccagtcttctgcaaagggaccttgggtgggaacgggcccggagcgggaggaacgtgactccccagagggaagatgggcatcatactgggcccagagctgggaaggagttgctgccagcacagggtgggcctggactcccctcgcccctacccccagtggttgtggctgtagccctaagcctggagagcaggaccggcccggggtgtctgggaggctgccaggtgcctcccagagctcccaagggcccccacctgcaagtgccagcctcagggcagtgcccaaatgaggccctctcagctgcagccagcgatgccttgggatgcttaccgggagggaggcggctttgggctcctaagtccttgggagaggctgggagcagtcactgcgcggcttgcgcaagcccattgtcgggttgggtggcttcctcagccagggctgggagggactccaggatcaggtcctccctgtctcgagtctcagtggggtgatggggaggagacctggccacccatggctcaggggcagctgagaacaaggacctgctggagctggaagtgctgtggtgttgaggggtggggtgggcagcttctcacacctgcctcctgcctccttctgtccacctttccaccaccctgacctgtcccagccccacacatggttctgcctggctggcctgcccttggcacctggcgtagagcacacagaaggcactcagctaatgctgggcaggcccactcatggggagtgcgtggctgtgcagcaccagggaaccggcacagcagcgccggcagaaatcacagcagtaaacttgtccgggttgtatgcatcaaggtggcgatggacgtgggtccccccactgcactgtggccctgagcactgtatagcagcccggcaatgggagccattatcttgcccctttgacagaggaggacacagaggcacagggaggtgaagtagctgccccacactagtgcctcctcgctcactcaccaccccctgcaccacagtgcagccgcttctcccaccagctggggttccttggacccccaagcctgggaagggggaggtgagtttacaaaatggaaagcttaaaaggagaaaagtggaaccagaggtttgagaagccctgagtggtagagtaaggcctccagcgctgcctctgggtgcagggcagagtggcagaggagagggggagaggcactgggcaccatgggggcccagttcccacttcggggatctctctcgcagaaccgagggtccccttcatgggggtagatgcccagggctagctgttgccactgtctgtgtggacctgagtcctggacatgcccgagtgactcaggagtggctgcttgggcgggctctgtcaccctaggatgttatacattctgggaactggacaggagtggctgcttgggcgggctctggcaccctgggatgttatacattctgggaactggacaggagtggctgcttgggtgggctctggcaccctgggatgttatacattctgggaactgcaatcagccactagagaagtcggagctacaggaagtgaccctggggtgggacctggggacatggccaggtcagcatggggacacccggctccagcaggagctctggtctgtcctggggtctttgggggcagggctgcggccctgggcaggcttcctccaggcggaggtcctggggaagtgggggagccaggccagctgccgcctcccccactatgtagcatctgattcgtcatctctcatgaaggcgatttggttcataactctgaaactctgaaaaaggtcaaaagaagcagagaggccctcggtggatatgccagcttttctgccggtgctttctcccactactctgggtggtctgctctcctcttcaaacctcagctcgcagggagggcctgaatctgccagcccctcaggatctccttccctctgggccctccccagccttaaggagcctcccagacagaagggtggacagagccacctgggcagcccgagagacacacgggggtcctccctgtggacagccctgccagcttccgcccagccctgagcttcatttgcatcttgaggagtaaggggtggtgaaatgggaatgctggtctggctcagctggtcgtgggcataagtgcccgctgaatggatggcatctctccctcctgtcttatgttctggggtccaggtgcttcccagggccatgcccctgctgctaatgcttgccctaacccttaccctaaccagcgtccagcgtcgtctcaccgagccgtaaataaatcaacagattcgcattgtc

SEQ ID NO: 252613 - DNA, 4706 bp, Artificial Sequence
  derived and/or modified sequence
ggggccggggcaggcctggggcggggcctgcggtgagctcgcgctgggcgggctgttccgggggcgggactgggctgggcctgcggtgagcatcaggcgatgcggcacgggtgctgcgggacacacagacacgcctacgattagactcaggcaggcacctaccggcgagcggccgcgggtgactcccaggcgcggcggtacctcacggtggtgaaggtcacagggttgcagcactcccagtagaccaggagctccgggaggcagggccggccccacgtcctctgcgcaccaccctgagttggatcctctgtgcgccacctgagttggatccagggctagctgctgttgacctccccactcccacgctgccctcctgcctgcagccatgacgcccctgctcaccctgatcctggtggtcctcatgggcttacctctggcccaggccttggactgccacgtgtgtgcctacaacggagacaactgcttcaaccccatgcgctgcccggctatggttgcctactgcatgaccacgcgcacctactacacccccaccaggatgaaggtcagtaagtcctgcgtgccccgctgcttcgagactgtgtatgatggctactccaagcacgcgtccaccacctcctgctgccagtacgacctctgcaacggcaccggccttgccaccccggccaccctggccctggcccccatcctcctggccaccctctggggtctcctctaaagcccccgaggcagacccactcaagaacaaagctctcgagacacactgctacaccctcgcacccagctcaccctgcctcaccctccacactccctgcgacctcctcagccatgcccagggtcaggactgtgggcaagaagacacccgacctcccccaaccaccacacgacctcacttcgaggccttgacctttcgatgctgtgtgggatcccaaaagtgtccggctttgatgggctgatcagcccctcgcctgtccagggctatttatggggaggggcccagtcaggcagggagcactgagcagatgggagctgtggccaagcccaccttctgggaagccctaggagaggcccctgcctcagtctgcccctggtgtgctggggcagggggaagacaaggaatgcccgcaggtggggtggtggggagactcttaggaggaaaggctcctccaggcctagtcacgcttcctactgaggccaggagctgccaggaccggtacgggatcagggctgtgggaggagggcctttggcaccggcccctgtgctaggaagtctgccaggcccgagttggagccaccccctgcaggggagggggcggctctgcctcagcaggccccagggcccccgaagtcacagaagctttttcgggtccagcaaggggtgtgtgtcctctcagtcaaaccccttgacgtttcccaccccctcacggggagggcaccaggcctgaagctggcaggagctagggccatgctatatttggtgggtcctggacgctgacccggccagcgctattctgggcagggagggaaaggggcagagcaggtggtcccccgagtcctggtccccaaccacagcaggacccagccgagcaaggcaaaagacgcaggactgggggatgcgcgcacaggctgggggttgggagcagcctggggccggcgcgggcctgggcgtgggaaggcggagcatgccaccctctcgtggccgtgcgggggcgggagtggggagggtggggtggggagggcggagacccagcccctcccccgcagcgggatgcgcacagtgagtgggtccctccatcaccttccacctggggatgcacccactgggagggcagggtggaagccccagctgggtgtgtggactcccagggaccccaccccaggcctgggaagcaggggtcagcccaacacgcaccaatccatccccgatgcaggtagcccagggagcacctgcccctgctgtgaatggggcattcgggggcgtgagaccttttggtgccagcggtcacgctgcacctgaggcccccacctgaccagtgctcccagctctggtgtcctgagaaacccttcaagccatcccgcatgggcaggatggtgacatatccatgtggtaggattgtcccggccccaaagtatggccctggtcaggggagcccctgctggaaattgcatctccagagctttgatgcaggacccctgggggatcagggaatgagggtctccaccccaggggtctccttgcagtgagtctatatgcaggcctgcgttctgctcctggggctggttctgagtgcccagcttcagtctcctgagaacatgaggatgggagggggcagagtcttgctgagggcacacccagttcccgctggaggaggacagtgccagtcttctgcaaagggaccttgggtgggaacgggcccggagcgggaggaacgtgactccccagagggaagatgggcatcatactgggcccagagctgggaaggagttgctgccagcacagggtgggcctggactcccctcgcccctacccccagtggttgtggctgtagccctaagcctggagagcaggaccggcccggggtgtctgggaggctgccaggtgcctcccagagctcccaagggcccccacctgcaagtgccagcctcagggcagtgcccaaatgaggccctctcagctgcagccagcgatgccttgggatgcttaccgggagggaggcggctttgggctcctaagtccttgggagaggctgggagcagtcactgcgcggcttgcgcaagcccattgtcgggttgggtggcttcctcagccagggctgggagggactccaggatcaggtcctccctgtctcgagtctcagtggggtgatggggaggagacctggccacccatggctcaggggcagctgagaacaaggacctgctggagctggaagtgctgtggtgttgaggggtggggtgggcagcttctcacacctgcctcctgcctccttctgtccacctttccaccaccctgacctgtcccagccccacacatggttctgcctggctggcctgcccttggcacctggcgtagagcacacagaaggcactcagctaatgctgggcaggcccactcatggggagtgcgtggctgtgcagcaccagggaaccggcacagcagcgccggcagaaatcacagcagtaaacttgtccgggttgtatgcatcaaggtggcgatggacgtgggtccccccactgcactgtggccctgagcactgtatagcagcccggcaatgggagccattatcttgcccctttgacagaggaggacacagaggcacagggaggtgaagtagctgccccacactagtgcctcctcgctcactcaccaccccctgcaccacagtgcagccgcttctcccaccagctggggttccttggacccccaagcctgggaagggggaggtgagtttacaaaatggaaagcttaaaaggagaaaagtggaaccagaggtttgagaagccctgagtggtagagtaaggcctccagcgctgcctctgggtgcagggcagagtggcagaggagagggggagaggcactgggcaccatgggggcccagttcccacttcggggatctctctcgcagaaccgagggtccccttcatgggggtagatgcccagggctagctgttgccactgtctgtgtggacctgagtcctggacatgcccgagtgactcaggagtggctgcttgggcgggctctgtcaccctaggatgttatacattctgggaactggacaggagtggctgcttgggcgggctctggcaccctgggatgttatacattctgggaactggacaggagtggctgcttgggtgggctctggcaccctgggatgttatacattctgggaactgcaatcagccactagagaagtcggagctacaggaagtgaccctggggtgggacctggggacatggccaggtcagcatggggacacccggctccagcaggagctctggtctgtcctggggtctttgggggcagggctgcggccctgggcaggcttcctccaggcggaggtcctggggaagtgggggagccaggccagctgccgcctcccccactatgtagcatctgattcgtcatctctcatgaaggcgatttggttcataactctgaaactctgaaaaaggtcaaaagaagcagagaggccctcggtggatatgccagcttttctgccggtgctttctcccactactctgggtggtctgctctcctcttcaaacctcagctcgcagggagggcctgaatctgccagcccctcaggatctccttccctctgggccctccccagccttaaggagcctcccagacagaagggtggacagagccacctgggcagcccgagagacacacgggggtcctccctgtggacagccctgccagcttccgcccagccctgagcttcatttgcatcttgaggagtaaggggtggtgaaatgggaatgctggtctggctcagctggtcgtgggcataagtgcccgctgaatggatggcatctctccctcctgtcttatgttctggggtccaggtgcttcccagggccatgcccctgctgctaatgcttgccctaacccttaccctaaccagcgtccagcgtcgtctcaccgagccgtaaataaatcaacagattcgcattgtc

SEQ ID NO: 252614 - DNA, 561 bp, Artificial Sequence
  derived and/or modified sequence
gacaccccaggagcagagaggaggggaacagcgagaagagacccagcttttgggcccagtcctgccatggccagccatccggcccccagggccctgcttgggatggggctgcagaccacctcccatgggacctctgcaccaaccatcccctggggttgcagcactcccagtagaccaggagctccgggaggcagggccggccccacgtcctctgcgcaccaccctgagttggatcctctgtgcgccacctgagttggatccagggctagctgctgttgacctccccactcccacgctgccctcctgcctgcagccatgacgcccctgctcaccctgatcctggtggtcctcatgggcttacctctggcccaggccttggactgccacgtgtgtgcctacaacggagacaactgcttcaaccccatgcgctgcccggctatggttgcctactgcatgaccacgcgcacctactacacccccaccaggatgaaggtcagtaagtcctgcgtgccccgctgcttcgagactgtgtatgatggctactccaagcacgcgtccacc

SEQ ID NO: 252615 - DNA, 637 bp, Artificial Sequence
  derived and/or modified sequence
ggggccggggcaggcctggggcggggcctgcggtgagctcgcgctgggcgggctgttccgggggcgggactgggctgggcctgcggtgagcatcaggcgatgcggcacgggtgctgcgggacacacagacacgcctacgattagactcaggcaggcacctaccggcgagcggccgcgggtgactcccaggcgcggcggtacctcacggtggtgaaggtcacagggttgcagcactcccagtagaccaggagctccgggaggcagggccggccccacgtcctctgcgcaccaccctgagttggatcctctgtgcgccacctgagttggatccagggctagctgctgttgacctccccactcccacgctgccctcctgcctgcagccatgacgcccctgctcaccctgatcctggtggtcctcatgggcttacctctggcccaggccttggactgccacgtgtgtgcctacaacggagacaactgcttcaaccccatgcgctgcccggctatggttgcctactgcatgaccacgcgcacctactacacccccaccaggatgaaggtcagtaagtcctgcgtgccccgctgcttcgagactgtgtatgatggctactccaagcacgcgtccaccacctcc

SEQ ID NO: 252616 - DNA, 351 bp, Artificial Sequence
  derived and/or modified sequence
atgacccccctgctgaccctgatcctggtggtgctgatgggcctgccactggctcaggccttagattgtcatgtctgtgcctacaacggtgacaactgctttaatccgatgagatgcccagctatggtagcttactgtatgacaactcggacatactatacgccaaccagaatgaaagtcagcaaatcgtgtgtgccacggtgcttcgaaactgtttatgacggatatagcaagcatgcttccacaacaagttgctgccaatatgatctgtgcaatgggaccggtctggctactcctgccactctggctttagcacccatcctcttggctacactgtgggggctgctctag

SEQ ID NO: 252617 - DNA, 351 bp, Artificial Sequence
  derived and/or modified sequence
atgacccccctgctgaccctgatcctggtggtgctgatgggcctgccactggcccaagcactggattgccacgtttgcgcctataatggcgacaactgcttcaaccctatgaggtgccccgcaatggttgcctactgtatgacaacaaggacatactacacacccaccaggatgaaagtgtcaaaatcctgtgtgcctcggtgtttcgagacagtatatgacgggtatagtaaacatgcgtccacaacatcctgctgtcagtatgacttgtgcaatggtaccgggctcgctacgcccgccaccctggctctcgcccctatcctcttagctacactctgggggctgttgtag

SEQ ID NO: 252618 - DNA, 351 bp, Artificial Sequence
  derived and/or modified sequence
atgacccccctgctgaccctgatcctggtggtgctgatgggcctgcccttggcacaggcactagactgccacgtctgcgcatacaacggtgacaattgcttcaatcctatgagatgcccggctatggtggcttattgtatgacgacgcgcacatattacacacctactcggatgaaggtcagtaaatcctgtgtccccagatgcttcgaaacggtctatgatggctacagcaagcatgcatccaccacctcatgctgccagtatgacctctgtaacgggactgggctcgccactccagccaccctcgccctggctccaatcctccttgctaccctgtggggactactgtag

SEQ ID NO: 252619 - DNA, 249 bp, Artificial Sequence
  derived and/or modified sequence
atgacccccctgctgaccctgatcctggtggtgctgatgggcctgcccctggcccaggctttggactgtcacgtgtgtgcatataatggtgacaattgtttcaatcccatgaggtgccccgcgatggtggcgtactgtatgaccaccaggacctactacacgcctacacggatgaaggtgagcaagagctgcgttccgagatgctttgaaaccgtgtatgacggatatagcaagcacgcctctacttag

SEQ ID NO: 252620 - DNA, 255 bp, Artificial Sequence
  derived and/or modified sequence
atgacccccctgctgaccctgatcctggtggtgctgatgggcctgcccctggcacaggctctcgattgtcacgtgtgtgcctacaacggggacaactgcttcaatcccatgcgatgcccagcaatggtcgcttactgtatgaccactagaacatactatactccgacaagaatgaaagtctccaaaagttgtgtcccaaggtgttttgaaactgtatacgatgggtactctaaacacgctagcacgacctcatag

SEQ ID NO: 252621 - DNA, 351 bp, Artificial Sequence
  derived and/or modified sequence
atgactcctctcctgacactgatcttggtggtgctgatgggactgcctcttgcgcaggccctcgactgccatgtctgcgcatacaacggggataactgcttcaatcctatgagatgtcctgcaatggttgcttattgtatgactactcggacttattatactcccaccagaatgaaagtcagtaagtcatgtgtcccacgctgctttgaaactgtttatgatggctacagtaaacacgcctccaccacttcttgttgtcaatacgatctgtgtaacgggaccggtctagctactccagccacgttggctttagcgcctatcctgcttgctacattgtgggggctactgtag

SEQ ID NO: 252622 - DNA, 351 bp, Artificial Sequence
  derived and/or modified sequence
atgaccccacttctgacgctcatcctcgtggtgctgatgggactcccgttagcccaggctttggattgtcacgtttgcgcgtacaatggagataattgtttcaaccctatgagatgccctgcaatggtggcctattgcatgaccactagaacctactacactccaacaaggatgaaggtttccaaaagttgcgtccctcggtgcttcgaaacggtgtacgacggatatagtaaacacgcatctacaacctcctgttgccagtacgacctttgtaatggcaccgggctggccacacctgctaccctggccctggcacctatcctcctggccaccctgtggggtttgttgtag

SEQ ID NO: 252623 - DNA, 351 bp, Artificial Sequence
  derived and/or modified sequence
atgactccccttctaactctgattttagtcgtgctaatgggattacctcttgctcaggccctcgattgtcacgtgtgtgcatacaacggcgacaactgtttcaaccccatgaggtgccctgctatggttgcctactgcatgacaaccagaacctactatacacctacccgcatgaaggtgtctaaatcttgcgtgccaagatgttttgagaccgtgtatgacggctattccaaacacgcttccaccacctcctgctgtcagtacgatctgtgcaacggaaccggtctggctaccccggctacgcttgccctggcacccattttgctcgctacactgtgggggttgctctag

SEQ ID NO: 252624 - DNA, 249 bp, Artificial Sequence
  derived and/or modified sequence
atgacccctctgctcacacttattctggtggtgctcatggggcttcctttggcccaggctctggactgccacgtttgcgcctataacggagacaattgcttcaaccctatgagatgcccggcaatggtggcgtactgcatgactaccaggacttattacacccctacacgaatgaaggtctctaagagctgtgtgcccaggtgttttgaaaccgtgtatgatggatactccaaacatgcctctacctag

SEQ ID NO: 252625 - DNA, 255 bp, Artificial Sequence
  derived and/or modified sequence
atgacacctcttttgacattgatcctcgtggtactgatggggctcccactggctcaggccctggattgccatgtgtgtgcgtacaatggagataactgttttaaccccatgcgatgtcctgctatggtggcctactgtatgaccaccaggacctactatactcccacccgcatgaaggtcagcaagagctgtgtaccccgttgctttgaaactgtctatgatggctatagcaagcacgcctctacgacatcatag

SEQ ID NO: 252626 - DNA, 351 bp, Artificial Sequence
  derived and/or modified sequence
atgacccccctgctgaccctgatcctggtggtgctgatgggcctgcccctggcccaggccctggactgccacgtgtgcgcctacaacggcgacaactgcttcaaccccatgagatgccccgccatggtggcctactgcatgaccaccagaacctactacacccccaccagaatgaaggtgagcaagagctgcgtgcccagatgcttcgagaccgtgtacgacggctacagcaagcacgccagcaccaccagctgctgccagtacgacctgtgcaacggcaccggcctggccacccccgccaccctggccctggcccccatcctgctggccaccctgtggggcctgctgtag

SEQ ID NO: 252627 - DNA, 249 bp, Artificial Sequence
  derived and/or modified sequence
atgacccccctgctgaccctgatcctggtggtgctgatgggcctgcccctggcccaggccctggactgccacgtgtgcgcctacaacggcgacaactgcttcaaccccatgagatgccccgccatggtggcctactgcatgaccaccagaacctactacacccccaccagaatgaaggtgagcaagagctgcgtgcccagatgcttcgagaccgtgtacgacggctacagcaagcacgccagcacctag

SEQ ID NO: 252628 - DNA, 255 bp, Artificial Sequence
  derived and/or modified sequence
atgacccccctgctgaccctgatcctggtggtgctgatgggcctgcccctggcccaggccctggactgccacgtgtgcgcctacaacggcgacaactgcttcaaccccatgagatgccccgccatggtggcctactgcatgaccaccagaacctactacacccccaccagaatgaaggtgagcaagagctgcgtgcccagatgcttcgagaccgtgtacgacggctacagcaagcacgccagcaccaccagctag

SEQ ID NO: 252629 - protein, 242 aa, Artificial Sequence [sequence omitted]

SEQ ID NO: 252630 - DNA, 870 bp, Artificial Sequence
  derived and/or modified sequence
ggcggcgctatgctgtcctgcttcaggctcctctccaggcacatcagcccttcgctggcgtctctgcgcccggtgcgctgctgcttcgcgctcccgctgcgttgggccccggggcgccccttggaccccaggcagatcgccccccgccgccccctggccgcagccgcctcctcccgggaccctaccgggcccgccgccggcccctctcgggtgcgccagaacttccaccccgactccgaggctgccatcaaccgccagatcaacctcgagctctatgcgtcctacgtgtacttgtccatggcctattacttctcccgggatgacgtggccttgaacaacttctccaggtatttccttcaccagtcccgggaggagaccgagcacgcggagaagctgatgaggctgcagaaccagcgaggaggccggatccgcctgcaggacatcaagaagccggaacaggacgactgggaaagcgggctgcatgccatggagtgtgctctactcttggaaaagaacgtgaaccagtcgttgctggaattgcacgctctagcctcagataaaggtgacccccatttgtgcgatttcctggaaacctactacctgaatgagcaggtgaagtctatcaaagaactaggtgaccacgtgcacaacttagtgaagatgggggccccggatgctggcctggcggagtacctttttgacacacatacccttggaaatgaaaacaagcagaactaagccacgagctgccttcctcccaggctagtggatccaaagaccaaagtcagctgtctcctgctttcttgcccttaaaatcacctccatctttatattcttctgttatactattcctccaataaagtgatttgt

SEQ ID NO: 252631 - DNA, 729 bp, Artificial Sequence
  derived and/or modified sequence
atgctcagttgcttccgactgctgtcccgccacataagcccttctctggcctctctccgacccgttcgttgttgttttgcgctgcctctccgctgggcaccgggacgtccactggacccaagacaaattgccccccggagacctctggcagctgcagcctcctcgcgagatcccaccggacctgctgcagggcctagtagagtgagacagaatttccacccggactccgaagctgcaatcaatcggcaaattaacctcgagctgtacgcttcttacgtctacctgtcaatggcttattacttttcccgtgacgacgtggccttgaacaacttctctagatattttctgcatcagtcacgggaggagaccgaacacgcagaaaagctcatgaggttgcagaaccagcgtggaggccggatcaggctgcaagacatcaagaagccagagcaggacgactgggaatccgggctgcatgctatggagtgtgcgcttctcctggagaaaaatgttaaccaatcccttctagaattacacgctctcgcctcagacaaaggcgaccctcacctgtgcgattttctggaaacatattacttgaacgaacaggtgaaaagcatcaaggagttgggcgatcacgttcacaacctcgttaagatgggcgcacccgatgcaggattagccgagtatctgttcgatactcacacactgggtaatgagaataagcaaaactag

SEQ ID NO: 252632 - DNA, 729 bp, Artificial Sequence
  derived and/or modified sequence
atgctgagctgcttccggctgctgagccgccacatcagccccagcctggccagcctgcggcctgtgcgctgctgctttgccctgcccctgcgctgggcccctggccggcccctggacccccggcagatcgccccccggcggcccctggccgccgccgccagcagccgggaccccactggacctgctgctggccccagccgggtgcggcagaacttccacccagacagcgaggccgccatcaaccggcagatcaacctggagctgtatgccagctatgtgtacctgtccatggcctactacttcagcagagatgatgtggccctgaacaacttcagccgctacttcctgcaccagagccgggaggagacagaacatgctgagaagctgatgaggctgcagaaccagagaggaggccgcatccggctgcaggacatcaagaagccagagcaggatgactgggagagcggcctgcacgccatggagtgtgccctgctgctggagaagaatgtgaaccagagcctgctggagctgcacgccctggccagtgacaagggggacccccacctgtgtgacttcctggagacctactacctgaatgagcaggtgaagagcatcaaggagctgggggaccacgtgcacaacctggtgaagatgggcgccccagatgctggcctggccgagtacctgtttgacacccacaccctgggcaatgaaaacaagcagaactag

SEQ ID NO: 252633 - DNA, 729 bp, Artificial Sequence
  derived and/or modified sequence
atgctgagctgcttccggctgctgagccggcacatcagccccagcctggccagcttgagacctgtccgctgctgcttcgccctgccactgagatgggcccccggccgaccactggacccccgccagatcgctccaaggaggcctctcgcagccgcggcctctagccgtgaccccacaggccctgcagccggccccagccgggtccgtcagaatttccatccagacagcgaggccgccataaaccgccaaatcaacttagagctttatgcttcctacgtatatctgtccatggcctactacttctcccgagacgacgtagctttgaacaatttcagcaggtactttctccatcagagcagggaagagacggagcacgccgagaagctgatgcgcctgcaaaaccagcgcggcggtagaatcaggctccaggacatcaaaaagcccgagcaggacgactgggagagcggactgcacgcgatggagtgcgcactgttgctggagaagaatgtaaaccagagcttgctggagctgcatgcgctggcttccgacaaaggagatccccacctctgtgactttcttgagacctattacctcaatgaacaggttaagagtattaaagagctaggagatcatgtccacaatcttgtgaaaatgggagccccagatgctggactggccgagtacctctttgacacacatacactgggaaacgagaacaaacagaactag

SEQ ID NO: 252634 - DNA, 729 bp, Artificial Sequence
  derived and/or modified sequence
atgctctcctgctttaggctgctctccaggcacatcagtccctctcttgcatcactcagacctgtgcggtgctgcttcgccttacctctgcgctgggccccaggcagaccgctcgatccccgtcagattgctccacgccgacccctggctgcagctgcatcatcacgcgaccctactggccctgcggcaggaccctcgagggtgagacaaaattttcacccggactccgaggctgccattaaccggcagattaatctcgagctgtacgccagctacgtgtatctgtcaatggcctattacttttctcgggacgacgtggctttaaataacttctctcgctatttcttacaccagtccagagaggagaccgagcacgccgagaagctgatgcgactgcagaatcagcgagggggtcggattaggttgcaggatattaagaagcctgagcaggatgattgggaatcaggactccacgcaatggagtgcgctctcctgctcgaaaagaacgtgaaccagtcacttcttgagctgcacgctttagcctctgataagggagacccacatctgtgcgattttctggaaacctactacctgaatgaacaggttaagtccattaaggaactgggcgatcacgtgcacaacctagtgaaaatgggtgctcccgacgcagggctcgccgagtatttgtttgacacccacacccttggaaacgagaacaagcagaactag

SEQ ID NO: 252635 - DNA, 729 bp, Artificial Sequence
  derived and/or modified sequence
atgctgagctgcttcagactgctgagcagacacatcagccccagcctggccagcctgagacccgtgagatgctgcttcgccctgcccctgagatgggcccccggcagacccctggaccccagacagatcgcccccagaagacccctggccgccgccgccagcagcagagaccccaccggccccgccgccggccccagcagagtgagacagaacttccaccccgacagcgaggccgccatcaacagacagatcaacctggagctgtacgccagctacgtgtacctgagcatggcctactacttcagcagagacgacgtggccctgaacaacttcagcagatacttcctgcaccagagcagagaggagaccgagcacgccgagaagctgatgagactgcagaaccagagaggcggcagaatcagactgcaggacatcaagaagcccgagcaggacgactgggagagcggcctgcacgccatggagtgcgccctgctgctggagaagaacgtgaaccagagcctgctggagctgcacgccctggccagcgacaagggcgacccccacctgtgcgacttcctggagacctactacctgaacgagcaggtgaagagcatcaaggagctgggcgaccacgtgcacaacctggtgaagatgggcgcccccgacgccggcctggccgagtacctgttcgacacccacaccctgggcaacgagaacaagcagaactag

SEQ ID NO: 252636 - protein, 326 aa, Artificial Sequence
  derived and/or modified sequence
MREWWVQVGLLAVPLLAAYLHIPPPQLSPALHSWKSSGKFFTYKGLRIFYQDSVGVVGSPEIVVLLHGFPTSSYDWYKIWEGLTLRFHRVIALDFLGFGFSDKPRPHHYSIFEQASIVEALLRHLGLQNRRINLLSHDYGDIVAQELLYRYKQNRSGRLTIKSLCLSNGGIFPETHRPLLLQKLLKDGGVLSPILTRLMNFFVFSRGLTPVFGPYTRPSESELWDMWAGIRNNDGNLVIDSLLQYINQRKKFRRRWVGALASVTIPIHFIYGPLDPVNPYPEFLELYRKTLPRSTVSILDDHISHYPQLEDPMGFLNAYMGFINSF

SEQ ID NO: 252637 - DNA, 981 bp, Artificial Sequence
  derived and/or modified sequence
atgagagagtggtgggtgcaggtgggcctgctggccgtgcccctgctggccgcctacctgcacatcccccccccccagctgagccccgccctgcacagctggaagagcagcggcaagttcttcacctacaagggcctgagaatcttctaccaggacagcgtgggcgtggtgggcagccccgagatcgtggtgctgctgcacggcttccccaccagcagctacgactggtacaagatctgggagggcctgaccctgagattccacagagtgatcgccctggacttcctgggcttcggcttcagcgacaagcccagaccccaccactacagcatcttcgagcaggccagcatcgtggaggccctgctgagacacctgggcctgcagaacagaagaatcaacctgctgagccacgactacggcgacatcgtggcccaggagctgctgtacagatacaagcagaacagaagcggcagactgaccatcaagagcctgtgcctgagcaacggcggcatcttccccgagacccacagacccctgctgctgcagaagctgctgaaggacggcggcgtgctgagccccatcctgaccagactgatgaacttcttcgtgttcagcagaggcctgacccccgtgttcggcccctacaccagacccagcgagagcgagctgtgggacatgtgggccggcatcagaaacaacgacggcaacctggtgatcgacagcctgctgcagtacatcaaccagagaaagaagttcagaagaagatgggtgggcgccctggccagcgtgaccatccccatccacttcatctacggccccctggaccccgtgaacccctaccccgagttcctggagctgtacagaaagaccctgcccagaagcaccgtgagcatcctggacgaccacatcagccactacccccagctggaggaccccatgggcttcctgaacgcctacatgggcttcatcaacagcttctag

SEQ ID NO: 252638 - DNA, 981 bp, Artificial Sequence
  derived and/or modified sequence
atgcgcgaatggtgggtacaagtggggctcctcgcggttcctctcctcgcggcctacctccacattccaccaccgcagttgtcaccggcgctgcacagctggaaatcttcgggcaagtttttcacatataagggattgcgaatattctaccaggactccgtcggtgtcgtcggcagtcccgagatcgtcgtgcttttgcacggattccctaccagttcttacgattggtataagatttgggaggggctgacgctgagatttcatcgcgtgatcgcccttgattttctgggcttcggttttagcgacaagccccgaccacaccattatagtattttcgagcaggcttcgatagtcgaggcattactgagacaccttggtttgcaaaaccgacgaattaatctactgtcacacgattatggcgacattgtagctcaggaactgttatatagatataagcagaaccggtcaggcagactaactatcaagagcctatgtctgagcaatggagggatttttcccgaaacccatcgccccctgctcctgcagaagctgctcaaggatggaggagtgctcagccccatcctcactcggctgatgaactttttcgttttttcccggggtctcactcctgtcttcggtccatatacacgtccgagcgaatcagaactgtgggatatgtgggctggcattaggaataacgatggaaacctggtgatcgattctctgctccagtatatcaatcaacgcaaaaagtttcgtcggcgctgggtcggagctctcgccagcgtgaccatccctatccacttcatttatggccctttagacccagtgaacccatatccagaattccttgagttgtaccgcaaaacccttcccagatccaccgtgtcaatcctcgacgaccatatctcccattacccacagttggaggatcctatgggtttcctgaacgcttacatgggatttattaactctttctag

SEQ ID NO: 252639 - DNA, 981 bp, Artificial Sequence
  derived and/or modified sequence
atgcgagaatggtgggtgcaggtcggccttctcgctgtcccgttgctcgccgcgtatttacatatacctccgcctcagttgagccccgcccttcacagttggaagagttcgggcaagttcttcacttacaaggggctacgcattttttaccaggattctgtgggcgtagtggggagccccgagatcgtcgtgctgctgcacggattccccacttcttcgtatgattggtataaaatctgggaaggcctgacgctccggtttcatagagtgattgctcttgacttcctgggattcgggttctcagataagccccgcccccaccattatagcatttttgagcaggcctccatagtagaggcactattgcggcacttgggcctgcagaatagacgtattaacctgttgtcacatgattatggcgatatcgtcgcccaggaattgctgtacagatacaagcagaaccgcagtggccgcctgacaatcaaaagcttatgcctgtccaatggcggaatcttccctgagacgcacagaccactcctgctacagaagctgctgaaggacgggggggtcctctcgcctattctgacacggctaatgaattttttcgttttttctaggggtcttacccccgtgtttggaccttatactagaccgagcgagtccgaactctgggatatgtgggccggaatccgaaacaatgatggcaacttggtaatcgatagcttgcttcagtatataaaccagaggaaaaagttcagaagaaggtgggtgggggcgctcgccagtgttaccatcccgattcatttcatttacggcccattggacccagtcaacccatacccagaattcctggaactctaccgtaaaacactgccacggtctaccgtgtccatcctcgacgatcacatatctcactatccacagttagaagacccaatgggcttcctgaatgcttacatggggttcatcaacagtttctag

SEQ ID NO: 252640 - DNA, 981 bp, Artificial Sequence
  derived and/or modified sequence
atgagggagtggtgggtgcaggtgggcctgctggccgtgcccctgctggccgcctacctgcacatccccccaccccagctgagccctgccctgcacagctggaagagcagcggcaagttcttcacctacaagggcctgcgcatcttctaccaggacagcgtgggcgtggtgggcagccctgagatcgtggtgctgctgcacggcttccccaccagcagctatgactggtacaagatctgggagggcctgaccctgcgcttccaccgggtgattgccctggacttcctgggcttcggcttcagtgacaagccccggccccaccactacagcatctttgagcaggccagcatcgtggaggccctgctgcggcacctgggcctgcagaacagacgcatcaacctgctgagccatgactatggagacatcgtggcccaggagctgctgtaccgctacaagcagaacagaagtggccgcctgaccatcaagagcctgtgcctgagcaatggaggcatcttccctgagacccaccggcccctgctgctgcagaagctgctgaaggatggaggagtgctgagccccatcctgacccggctgatgaacttctttgtgttcagccggggcctgacccctgtgtttggcccctacacccggcccagcgagagcgagctgtgggacatgtgggccggcatcagaaataatgatggcaacctggtgattgacagcctgctgcagtacatcaaccagaggaagaagttcagaagacgctgggtgggcgccctggcctctgtgaccatccccatccacttcatctacggccccctggaccctgtgaacccctacccagagttcctggagctgtacaggaagaccctgcccaggagcacagtgtccatcctggatgaccacatcagccactacccccagctggaggaccccatgggcttcctgaatgcctacatgggcttcatcaacagcttctag

SEQ ID NO: 252641 - DNA, 981 bp, Artificial Sequence
  derived and/or modified sequence
atgcgggagtggtgggtgcaggtgggcctgctggccgtgcccctgctcgctgcatatttgcacatcccacctccacagctcagcccggcccttcactcatggaaatctagtggaaaatttttcacctataaagggctgcggatcttttaccaggactcagtcggcgtcgtcggctcaccagagattgtggtcttgcttcacggattccccacttcgtcttacgattggtataaaatttgggagggccttacactgcgattccaccgcgtgatcgctctggacttccttgggtttggattctccgacaagcctaggcctcaccattactcaatttttgagcaggcctctatcgtcgaagccttgctgcgccacctggggctacagaatagaagaattaacctcttgagtcacgattacggagacatcgtggcccaggagctgctttacaggtataagcagaatcgctctggacggctgaccattaaatccctatgcttatcaaatggagggatattcccagagacacaccgaccactcctgctgcagaaactcttgaaggatggtggagttctctctcctatattaacccggttgatgaatttctttgtattctctcgcggcctgacacccgtgttcgggccgtacacacggccctcggaatcggagctgtgggatatgtgggctggaatcagaaataatgatggcaacttggtcattgattccttactgcagtacattaatcagcgcaagaaatttcggagacgctgggtcggtgccttagccagcgtgacaatcccgattcactttatttacgggcctctcgatccagtgaatccctatccagaatttcttgaactgtatcgcaaaactctgccacgctctactgtctcaattttggacgaccacatttcccactacccgcaattggaagatcctatggggttcctgaatgcctatatggggtttattaattctttctag

SEQ ID NO: 252642 - DNA, 981 bp, Artificial Sequence
  derived and/or modified sequence
atgcgggagtggtgggtgcaggtgggcctgctggccgtgcccctgcttgcggcataccttcacatacccccaccccagctttcacctgctcttcactcctggaagtcttcggggaagttcttcacatataagggcttgcgtatcttctaccaggactccgtgggggtcgttggttctcccgagatcgtcgtgcttctgcatggctttcctacatccagctacgactggtataaaatatgggagggtctgacgctgcggtttcaccgcgttatcgctctagacttcctcgggttcggcttctccgacaagcctagacctcatcattattctattttcgagcaggcttcaattgtcgaggcactgcttcgccatctaggcctgcagaatagacgcattaatctcctgagtcacgactacggggatatcgtagcgcaggagttactgtaccggtataaacagaatcggagcggccgcctgaccattaaatccctctgtctcagcaatggtggcatcttccccgagacacaccgtcccctgcttctccagaaactgttgaaggatggaggcgtcctatctcctattttgaccaggctgatgaacttcttcgtgtttagtagaggcttaacaccggtgtttggtccctacacaaggccatctgagtccgaactgtgggatatgtgggccgggattaggaacaatgatggcaaccttgtgatcgatagccttttgcaatatataaaccaaagaaagaaattcagacgtcgctgggtcggggctttagcatccgtaaccattccgattcactttatctacggtcccctggatcccgttaacccttatccagaatttttggaattatacagaaaaaccctccctcgctcgacagtgtcgatcctggatgaccatatttctcactacccccaactggaagatcctatgggttttttgaatgcctatatggggtttatcaactcattctag

SEQ ID NO: 252643 - DNA, 2367 bp, Artificial Sequence
  derived and/or modified sequence
cgctgctgtggccaggcgtctggcatgctgaccacgtcgcgctgctgtaaaggaaacctgccccgcgcagcggcggtggctggagcgggagaaaccggactttgtgcaactttggccatagtggccatcccatgaatctgtttactagcttggtggatgagggagtggtgggtccaggtggggctgctggccgtgcccctgcttgctgcgtacctgcacatcccaccccctcagctctcccctgcccttcactcatggaagtcttcaggcaagtttttcacttacaagggactgcgtatcttctaccaagactctgtgggtgtggttggaagtccagagatagttgtgcttttacacggttttccaacatccagctacgactggtacaagatttgggaaggtctgaccttgaggtttcatcgggtgattgcccttgatttcttaggctttggcttcagtgacaaaccgagaccacatcactattccatatttgagcaggccagcatcgtggaagcgcttttgcggcatctggggctccagaaccgcaggatcaaccttctttctcatgactatggagatattgttgctcaggagcttctctacaggtacaagcagaatcgatctggtcggcttaccataaagagtctctgtctgtcaaatggaggtatctttcctgagactcaccgtccactccttctccaaaagctactcaaagatggaggtgtgctgtcacccatcctcacacgactgatgaacttctttgtattctctcgaggtctcaccccagtctttgggccgtatactcggccctctgagagtgagctgtgggacatgtgggcagggatccgcaacaatgacgggaacttagtcattgacagtctcttacagtacatcaatcagaggaagaagttcagaaggcgctgggtgggagctcttgcctctgtaactatccccattcattttatctatgggccattggatcctgtaaatccctatccagagtttttggagctgtacaggaaaacgctgccgcggtccacagtgtcgattctggatgaccacattagccactatccacagctagaggatcccatgggcttcttgaatgcatatatgggcttcatcaactccttctgagctggaaagagtagcttccctgtattacctcccctactcccttatgtgttgtgtattccacttaggaagaaatgcccaaaagaggtcctggccatcaaacataattctctcacaaagtccactttactcaaattggtgaacagtgtataggaagaagccagcaggagctctgactaaggttgacataatagtccacctcccattactttgatatctgatcaaatgtatagacttggctttgttttttgtgctattaggaaattctgatgagcattactattcactgatgcagaaagacgttcttttgcataaaagacttttttttaacactttggacttctctgaaatatttagaagtgctaatttctggcccacccccaacaggaattctatagtaaggaggaggagaaggggggctccttccctctcctcgaatgacgttatgggcacatgccttttaaaagttctttaagcaacacagagctgagtcctctttgtcatacctttggatttagtgtttcatcagctgtttttagttataaacattttgttaaaatagatattggtttaaatgatacagtattttaggtatgatttaagactatgatttacctatacattatatatattttataaagatactaaaccagcatacccttactctgccagagtagtgaagctaattaaacacatttggtttctgaataaattgaactaaatccaaactatttcctaaaatcacaggacattaaggaccaatagcatctgtgccagagatgtactgttattagctgggaagaccaattctaacagcaaataacagtctgagactcctcatacctcagtggttagaagcatgtctctcttgagctacagtagaggggaagggattgttgtgtagtcaagtcaccatgctgaatgtacactgattcctttatgatgactgcttaactccccactgcctgtcccagagaggctttccaatgtagctcagtaattcctgttactttacagacaggaaagttccagaaactttaagaacaaactctgaaagacctatgagcaaatggtgctgaatactttttttttaaagccacatttcattgtcttagtcaaagcaggattattaagtgattatttaaaattcgtttttttaaattagcaacttcaagtataacaactttgaaactggaataagtgtttattttctattaataaaaatgaattgtg

SEQ ID NO: 252644 - DNA, 981 bp, Artificial Sequence
  derived and/or modified sequence
atgcgcgagtggtgggtgcaggtggggctcctagctgtaccccttctggcagcctacctccacattcccccaccccagttatctccggcactccatagctggaagtcttccggaaagttttttacttacaaaggcctgcgaatcttctaccaggacagcgtgggtgtagttggatctccagaaatagtggtgcttctacacgggtttccaacatcttcctacgactggtacaaaatctgggaaggcttaacactgagatttcacagagtgatcgctcttgacttcctagggttcggtttttctgataaacccagacctcatcactacagcatctttgaacaggcctccattgtggaggctcttcttcgacacctgggtctgcaaaacaggagaattaatctgcttagccacgactacggcgacatcgtggcccaagaacttctctacaggtataaacagaacaggtcaggcagattaactataaagtctctgtgcctctccaacggcggtatatttccggaaactcacaggcctctgctgctacagaaactcttaaaagacggcggtgtgcttagccccattttgactaggcttatgaatttctttgtctttagtcgcggactgactccggtattcggaccctataccagacccagcgaatccgagctgtgggatatgtgggcaggcatacgaaacaacgatggcaacctggtcatagacagcctgcttcagtacatcaatcagcgaaagaaatttcgtcgtaggtgggtcggagccctggcctcagtcacaatccctattcattttatctatggaccactcgaccctgtgaacccttatcccgagttcctagaactttacaggaagacactgcccagatccacagtgagcatccttgatgaccatatcagccattaccctcaactggaggatcctatgggcttcctgaatgcctatatgggttttatcaattcattttag

SEQ ID NO: 252645 - DNA, 981 bp, Artificial Sequence
  derived and/or modified sequence
atgcgagagtggtgggtccaggtgggactcttagccgtgccactgcttgccgcatacctccacatcccccctccgcagctgagcccagcattgcattcatggaaatctagtggcaaattttttacatataagggcttgagaatcttttatcaggactcagttggcgtagtgggaagcccggagatcgtcgtactgctccacggcttcccaacatccagttatgactggtacaagatttgggaggggttgacccttcgatttcacagggttatcgctctagactttctggggttcggattctcagataaacccagaccacaccactactccatattcgagcaggcatccatcgtggaagcactgctcaggcacctcgggctgcagaatcgtcggattaacctcctgtctcacgattacggggatatcgtggcccaggagctgttataccgttataaacagaacaggagtggtcggctcaccataaaatccctttgtctctcaaatggagggatctttcccgaaactcacagacctcttctgctacagaaacttctgaaggacggcggtgtgctgtctccgatcctaactcgtcttatgaacttcttcgtgttcagcagggggcttacacccgtgttcggtccctataccaggccctcggagtccgagctgtgggacatgtgggccggaatccgtaacaatgacggaaacctggtgattgattcccttcttcagtatatcaatcaaagaaagaagtttcgaagacgctgggtgggagcgctggcatctgtgacaatcccgattcatttcatttacggaccgttggaccctgtcaatccatatccagagttcctcgaattgtacagaaagaccctgcctcggtcaaccgtgagtatactcgatgaccatatttcccactatcctcagctggaagatcctatgggcttcctgaatgcttacatgggctttataaattctttttag

SEQ ID NO: 252646 - DNA, 981 bp, Artificial Sequence
  derived and/or modified sequence
atgagagaatggtgggttcaggtcggtctgctggccgtaccactgctcgctgcgtatctgcacatcccccccccccagctgagccctgcgctccactcttggaaaagtagtgggaagttcttcacttataagggactccgtatcttctaccaggactccgttggtgtagtcggctcacccgagatcgtcgtgctgctccacggatttccaacttcctcctacgattggtacaagatttgggagggtctcaccctgcgatttcatcgggtcatcgcactcgacttcctggggttcggattctctgataaacctagaccacaccactattcaattttcgagcaagctagtattgtggaggccctgctgcggcacttgggactgcaaaatagaaggattaatctcctgtcccatgactatggagacatcgtggcccaggaattgttgtatagatataagcagaatcggtccggaaggctaaccatcaagagcctgtgtcttagcaatggcggcatttttcccgaaacacataggcccctcttactccagaagctgctcaaagacggaggtgtgctgtctccaatcttaactcgtctcatgaacttttttgtcttcagcagagggctgactcctgtgttcggaccatacactagaccctccgagagtgaattgtgggatatgtgggccggaatcagaaacaatgatggcaatcttgttattgactctttgctacagtatattaaccagcggaaaaagtttcggaggaggtgggtcggagcgctggccagcgtgactatcccgattcactttatttacggaccccttgacccagttaacccttaccccgaattcctggagctctacagaaaaaccctgcctaggtccacagtctccatcctggatgaccacatctctcattatccccagttggaagacccaatgggctttctgaatgcctatatgggcttcataaactctttctag

SEQ ID NO: 252647 - DNA, 981 bp, Artificial Sequence
  derived and/or modified sequence
atgcgcgagtggtgggtacaggtcgggctactcgcggttcccctgctcgccgcctacctccacatcccacccccgcagctctctcctgctcttcattcttggaaatcgagcggcaagttcttcacctacaagggtctgagaattttttatcaggattcagtgggcgtcgtagggtctcccgaaatcgtcgtcctgctgcatgggttccctacctccagctacgattggtacaaaatttgggagggactgaccttaaggtttcatcgggtgatcgccttggatttcttgggtttcggcttctctgataagccacggccccaccattactcaatttttgagcaggctagcattgtggaggccctcctgcgccacctggggctgcaaaatagacgcataaatctcctcagtcatgactatggagatatcgttgcacaggaactgctataccggtataagcaaaaccgaagcggaagactgaccatcaagtccctctgtctaagtaatggaggcatctttccggagacccaccgccccctattgctccaaaagctcttgaaggatgggggagtgttatctccaatcctcaccaggcttatgaacttcttcgtcttctccagaggtctgacgcccgtgtttgggccatatactcggccttctgagagtgagttgtgggacatgtgggccggcatccggaataatgatggcaatctggttatcgacagccttctccagtatatcaatcagagaaaaaaattcaggcgacgatgggttggagccctagcatcagttaccattcctattcacttcatctacggcccattggatcccgtgaacccttatccagagttcctagaactgtatcgcaaaacgctgcctcgctccacagtcagcattttagacgaccacatctctcactatccgcaactggaagacccgatgggcttcctgaacgcctacatgggcttcatcaattcattctag

SEQ ID NO: 252648 - DNA, 1008 bp, Artificial Sequence
  derived and/or modified sequence
atggtcagacgggataggctgcgaagaatgcgggagtggtgggtgcaggtgggtctgctcgctgtccctcttttggccgcgtacctgcacatcccccctccacagctctcaccggctcttcatagctggaagtcttccggaaagttttttacttacaaaggattgcggattttctatcaggatagcgttggggtcgtaggcagccctgagattgtggttctcctgcacggctttcccacctccagctacgactggtacaaaatctgggaggggctgactctgcggtttcatcgtgtcatcgcactagattttctgggcttcggcttttcggacaaaccgagacctcaccactactctattttcgaacaggcatcgattgtggaagctcttctgcggcatctggggctccaaaaccgacgcattaacctgctaagtcatgactacggagatatcgtggcccaggagcttctctatcggtacaagcagaatcgcagcggaagattgacaattaagagcctatgtttatccaatggaggcatctttcccgaaacacatcgtccgttgttgctccagaagctccttaaggacggcggggtcctgtcacccatcctgacccgactcatgaacttctttgtattcagcagaggattaacaccggtgtttggtccctacactcgtccctcggaatccgaactgtgggatatgtgggcaggcattcgtaataatgatggcaacctggtgatcgatagtttgttacagtacataaatcagagaaagaaattcaggagacgttgggtgggggcactcgcatcagtgaccatccccattcactttatctacgggcctttggacccagtgaatccgtatcccgagtttctagagctctatagaaaaactcttccacggtccaccgtaagcatcttggatgaccacatttcccattaccctcaattagaggatcccatgggttttctgaatgcctacatgggttttattaactccttttag

SEQ ID NO: 252649 - DNA, 1008 bp, Artificial Sequence
  derived and/or modified sequence
atggtgagaagagaccggctgcggaggatgagggagtggtgggtgcaggtgggcctgctggccgtgcccctgctggccgcctacctgcacatccccccaccccagctgagccctgccctgcacagctggaagagcagcggcaagttcttcacctacaagggcctgcgcatcttctaccaggacagcgtgggcgtggtgggcagccctgagatcgtggtgctgctgcacggcttccccaccagcagctatgactggtacaagatctgggagggcctgaccctgcgcttccacagggtcatcgccctggacttcctgggcttcggcttcagtgacaagccccggccccaccactacagcatctttgagcaggccagcatcgtggaggccctgctgcggcacctgggcctgcagaacagacgcatcaacctgctgagccatgactatggagacatcgtggcccaggagctgctgtaccgctacaagcagaacagaagtggccgcctgaccatcaagagcctgtgcctgagcaatggaggcatcttccctgagacccaccggcccctgctgctgcagaagctgctgaaggatggcggcgtgctgagccccatcctgacccggctgatgaacttctttgtgttcagccggggcctgacccctgtgtttggcccctacacccggcccagcgagagcgagctgtgggacatgtgggccggcatccggaacaatgatggcaacctggtgattgacagcctgctgcagtacatcaaccagaggaagaagttcagaagacgctgggtgggcgccctggcctctgtgaccatccccatccacttcatctacggccccctggaccctgtgaacccctacccagagttcctggagctgtacaggaagaccctgcccaggagcacagtgtccatcctggatgaccacatcagccactacccccagctggaggaccccatgggcttcctgaatgcctacatgggcttcatcaacagcttctag

SEQ ID NO: 252650 - DNA, 2465 bp, Artificial Sequence
  derived and/or modified sequence
caaccagcacaccccggcacctcctctgcggcagctgcgcctcgcaagcgcagtgccgcagcgcacgccggagtggctgtagctgcccggcgcggcgccgccctgcgcgggctgtgggctgcgggctgcgcccccgctgctggccagctctgcacggctgcgggctctgcggcgcccggtgctctgcaacgctgcggcgggcggcatgggataacgcggccatggtgcgccgagatcgcctccgcaggatgagggagtggtgggtccaggtggggctgctggccgtgcccctgcttgctgcgtacctgcacatcccaccccctcagctctcccctgcccttcactcatggaagtcttcaggcaagtttttcacttacaagggactgcgtatcttctaccaagactctgtgggtgtggttggaagtccagagatagttgtgcttttacacggttttccaacatccagctacgactggtacaagatttgggaaggtctgaccttgaggtttcatcgggtgattgcccttgatttcttaggctttggcttcagtgacaaaccgagaccacatcactattccatatttgagcaggccagcatcgtggaagcgcttttgcggcatctggggctccagaaccgcaggatcaaccttctttctcatgactatggagatattgttgctcaggagcttctctacaggtacaagcagaatcgatctggtcggcttaccataaagagtctctgtctgtcaaatggaggtatctttcctgagactcaccgtccactccttctccaaaagctactcaaagatggaggtgtgctgtcacccatcctcacacgactgatgaacttctttgtattctctcgaggtctcaccccagtctttgggccgtatactcggccctctgagagtgagctgtgggacatgtgggcagggatccgcaacaatgacgggaacttagtcattgacagtctcttacagtacatcaatcagaggaagaagttcagaaggcgctgggtgggagctcttgcctctgtaactatccccattcattttatctatgggccattggatcctgtaaatccctatccagagtttttggagctgtacaggaaaacgctgccgcggtccacagtgtcgattctggatgaccacattagccactatccacagctagaggatcccatgggcttcttgaatgcatatatgggcttcatcaactccttctgagctggaaagagtagcttccctgtattacctcccctactcccttatgtgttgtgtattccacttaggaagaaatgcccaaaagaggtcctggccatcaaacataattctctcacaaagtccactttactcaaattggtgaacagtgtataggaagaagccagcaggagctctgactaaggttgacataatagtccacctcccattactttgatatctgatcaaatgtatagacttggctttgttttttgtgctattaggaaattctgatgagcattactattcactgatgcagaaagacgttcttttgcataaaagacttttttttaacactttggacttctctgaaatatttagaagtgctaatttctggcccacccccaacaggaattctatagtaaggaggaggagaaggggggctccttccctctcctcgaatgacgttatgggcacatgccttttaaaagttctttaagcaacacagagctgagtcctctttgtcatacctttggatttagtgtttcatcagctgtttttagttataaacattttgttaaaatagatattggtttaaatgatacagtattttaggtatgatttaagactatgatttacctatacattatatatattttataaagatactaaaccagcatacccttactctgccagagtagtgaagctaattaaacacatttggtttctgaataaattgaactaaatccaaactatttcctaaaatcacaggacattaaggaccaatagcatctgtgccagagatgtactgttattagctgggaagaccaattctaacagcaaataacagtctgagactcctcatacctcagtggttagaagcatgtctctcttgagctacagtagaggggaagggattgttgtgtagtcaagtcaccatgctgaatgtacactgattcctttatgatgactgcttaactccccactgcctgtcccagagaggctttccaatgtagctcagtaattcctgttactttacagacaggaaagttccagaaactttaagaacaaactctgaaagacctatgagcaaatggtgctgaatactttttttttaaagccacatttcattgtcttagtcaaagcaggattattaagtgattatttaaaattcgtttttttaaattagcaacttcaagtataacaactttgaaactggaataagtgtttattttctattaataaaaatgaattgtgacaaaa

SEQ ID NO: 252651 - DNA, 981 bp, Artificial Sequence
  derived and/or modified sequence
atgcgggagtggtgggtgcaggtgggcctgctggccgtgcccctgctcgctgcttatttgcatatcccgcccccacagctctctcctgcactgcattcctggaaatcctcagggaaattctttacctacaagggcctcagaatcttttaccaggatagcgtaggggttgtggggagccccgaaattgtggttttgcttcatggctttcccacttccagctatgactggtacaaaatttgggagggactgactctcagatttcatagggtcattgctctcgactttttaggattcggcttttcggataaaccacgtccccaccactattccatcttcgaacaggcctcaatcgtggaggccttactgcgacatttgggtcttcagaataggcggattaacctgctgtcccatgactacggcgacatcgttgcccaggagctcctctatcgctacaaacaaaatcgtagtggtcggctgactattaagtccttatgtctctccaacggtggaatcttccccgaaacacaccgtccactactcctgcaaaagttgctcaaagacgggggggttctgtctccgattctgactaggctgatgaatttttttgtattctcaagaggcctgacccctgtgttcggaccgtacacaaggccctcagaatctgaattgtgggacatgtgggcaggaattcggaacaatgatgggaacctggtcatagattctctgctccaatatattaatcagcggaagaaatttaggcgacgttgggtcggggcactggcaagcgtcacaatcccaattcatttcatctacggtcctctggatcctgtgaatccttatcccgaattccttgagctgtataggaaaaccttaccccgcagcacagtcagtatactggacgaccacatttcacattaccctcaacttgaagacccgatgggttttcttaacgcgtatatgggcttcatcaattcattttag

SEQ ID NO: 252652 - DNA, 981 bp, Artificial Sequence
  derived and/or modified sequence
atgcgggagtggtgggtgcaggtgggcctgctggccgtgcccctgctggccgcatatctgcatattcccccgcctcagctcagtccggcattgcattcttggaagtcaagcggcaagttctttacttacaaaggtctgaggattttttatcaggactcggtgggcgttgtggggagcccagaaatagttgtcctgctgcacggcttccccacaagcagctatgactggtataaaatctgggagggattgacactcagattccatcgggtgatcgcgctcgactttctcggctttggattttccgacaagccaagacctcaccattattccatctttgagcaagctagtatagtggaggccctactgagacacctgggtctgcagaaccgccggataaatctgctgagccacgactacggcgacatcgtagcgcaggagctgttgtaccgatataaacagaaccgcagcggcaggctaacaatcaagagcctgtgcctgagtaatggcggaattttccctgagactcatcgtcccctcctcctgcagaaactcctgaaagatggcggtgtgctgtcccccatactgacgcggctgatgaacttcttcgtgttctcaagagggctgacacccgtatttggcccatatacacggcctagtgaaagcgaactttgggatatgtgggcaggaattcgcaataacgacggtaacctcgttattgattccttgttgcagtatatcaatcagagaaagaaatttaggcgcagatgggtgggcgcacttgccagcgtgaccatcccaatacacttcatttatgggcctttggatcccgtgaatccataccctgagtttctggaactctacaggaagaccttgcctagatctacggtaagcatcctggatgatcatattagtcattatccccagttggaagatcctatgggattcttaaacgcttatatggggtttattaactccttctag

SEQ ID NO: 252653 - DNA, 1008 bp, Artificial Sequence
  derived and/or modified sequence
atggtgcggcgggaccggctgcggcggatgcgggagtggtgggtgcaggttggactgcttgcggtaccacttctcgccgcatacctgcacatccctccaccccagctgtctcctgctttgcactcctggaaatcctccggaaaatttttcacctataaggggctgaggattttctaccaggattctgtcggcgtcgttgggtctccagaaattgtcgtcctgctgcacgggttcccaaccagttcgtatgattggtataaaatctgggagggcctaactctccggtttcacagagtgattgccctcgactttctgggctttgggttttccgacaagcctcgaccacaccattatagtatattcgagcaggccagtattgttgaggcacttctgcgccatttgggacttcagaacagacggataaatctactgtcccacgattacggagacatagtggcgcaggaactactgtatcggtacaagcagaatagatcaggccgcttgaccattaaaagcctgtgtctgtcaaacggaggcatctttcccgagacccacagacctctcttgttgcaaaagctgctgaaagatggcggagtcctctcaccaatattaactcgactgatgaatttttttgtattcagtagaggtctgacacctgtttttgggccctacacgaggccatctgaaagcgaattatgggacatgtgggccgggatcaggaataatgacggcaatcttgtaatcgactctctgcttcagtacataaatcaacgaaaaaaattccgcagaagatgggtcggggccctcgctagcgtaactatccccatccactttatctacggacccctggatccagtaaatccgtacccagagtttctggagctgtataggaaaactttgccccggtctacagtgagcattctggatgaccatatctcacattacccacaactggaggaccctatgggcttcttgaatgcctacatgggcttcattaacagtttctag

SEQ ID NO: 252654 - DNA, 981 bp, Artificial Sequence
  derived and/or modified sequence
atgagagaatggtgggtgcaggttgggttactggcagtgccactgctggctgcctatcttcatatccctcccccacagttgtcccccgctctgcactcatggaaatctagcggaaagttttttacatataagggtttacgaatattttaccaggacagcgttggggttgtgggtagtcccgagatcgtggtcctccttcacggctttccaacctctagctacgactggtacaagatctgggagggtctcactttaaggtttcaccgcgtgatcgccttggacttcctgggctttggtttctccgacaagcccagaccccaccactactccatcttcgagcaagccagcatcgtcgaagccctgctcaggcaccttggactccagaaccgacggatcaatctgcttagccacgactatggtgatatagtggctcaagagctcctatacaggtacaagcagaatagaagcgggagactgacaatcaaaagcttgtgcctttcaaatggaggaatcttccccgagacccaccgtcctttgcttctgcagaaactgctcaaggatggcggtgtcttaagtcctatcctcacccggctgatgaacttttttgtgttctcaagggggctgacccctgtatttggtccatacactcgcccttcagagagtgagctgtgggatatgtgggcagggataaggaacaacgacggaaatctagttatagacagtctactgcagtatatcaaccagagaaagaaatttcggcgtagatgggtcggcgctcttgcatcagttaccattcctatacactttatctacggaccacttgatcccgttaacccataccctgagtttctggagctctatagaaagacgctcccacggtctacagtgagcatattggatgaccacatttcccactatcctcagctggaagaccctatgggcttcttaaacgcatacatggggttcattaactccttctag

SEQ ID NO: 252655 - DNA, 981 bp, Artificial Sequence
  derived and/or modified sequence
atgcgcgaatggtgggtccaggttggccttcttgctgtgcctctgctggccgcttatctccacatccctcctccccagctgtctcccgctttacactcatggaagtcttcaggcaagtttttcacctacaaaggattgagaatcttttaccaagactccgtaggggtcgtcgggtctcctgagatagttgtccttctgcatggctttcccacctcgagctacgattggtacaagatatgggagggattgactcttaggttccacagagtcatcgcactcgacttcctcgggtttggcttttctgacaagcctcgaccccaccattatagcatattcgaacaagcctcaatcgttgaagccctcctacgccacctcggcctccagaaccggagaataaaccttttatcacacgattacggagatatagtagcccaagaactgctctacagatacaagcagaatcgaagcggacgactcaccatcaaaagcctctgcctttctaacggaggtattttcccggagacccacagacccctgttgttacagaagctgctaaaagacggcggagttctgtcccctattttaacccgcctcatgaatttttttgtcttctcacggggattgacgccggtctttggtccatacacaaggcccagcgagtctgaactttgggacatgtgggccggaattcggaacaatgacgggaatcttgtgattgactctcttctacagtatatcaatcagagaaaaaagttcagaaggcggtgggtgggggcattggcctcggtcacaatccctatccatttcatctacggaccactggatccagtgaacccctatcccgagttcctggaactttatcgaaagacgctccctagatctaccgtatcaattctggatgatcacatctcacactatcctcaactggaggaccccatgggcttccttaacgcatacatgggattcataaactctttttag

SEQ ID NO: 252656 - DNA, 1008 bp, Artificial Sequence
  derived and/or modified sequence
atggtccgccgtgatcggctgcgcaggatgagggagtggtgggtgcaggtaggcttactggccgtccctttgcttgcagcttacctgcacattccaccaccccagctctcaccagccctgcacagctggaagtctagcggcaagttcttcacgtacaaaggcttaagaattttttatcaggattcagtgggcgtggtaggatccccagagatcgtcgttctgctgcacggatttcctacatcgtcttatgactggtacaagatttgggaaggactgaccttgaggttccatagagtgattgctttagactttctggggttcggcttttccgacaagccccgtcctcaccactatagcatattcgagcaggcctctattgtcgaagcactcctaagacatcttggtctacagaataggcgaataaatttgctgtcgcatgactacggcgatattgtcgcccaggaattactctatagatacaagcagaatcggtcagggagactgacaattaagagcctctgcttaagcaatggcggaatcttccccgaaacccaccggcctctactattacagaagttgctcaaagacggcggtgttctcagccccattctcacccggctgatgaacttcttcgtgtttagcaggggactgacacccgtgtttgggccatacactaggccaagcgaatctgaactttgggacatgtgggccggtattcggaacaatgatggcaacctggtcattgattctctgttgcagtacatcaatcaaaggaagaagttccgccgaagatgggtgggagctctggcgagcgtgaccatccccatccatttcatctacggccctcttgaccccgtgaacccatatccggagtttctcgagctgtatcggaagaccctgccgcgatcaacggtttccattctggacgatcacattagtcattatcctcagctggaggatccaatgggcttcttaaacgcgtatatgggcttcattaatagcttttag

SEQ ID NO: 252657 - DNA, 1008 bp, Artificial Sequence
  derived and/or modified sequence
atggtgagaagagacagactgagaagaatgagagagtggtgggtgcaggtgggcctgctggccgtgcccctgctggccgcctacctgcacatcccccccccccagctgagccccgccctgcacagctggaagagcagcggcaagttcttcacctacaagggcctgagaatcttctaccaggacagcgtgggcgtggtgggcagccccgagatcgtggtgctgctgcacggcttccccaccagcagctacgactggtacaagatctgggagggcctgaccctgagattccacagagtgatcgccctggacttcctgggcttcggcttcagcgacaagcccagaccccaccactacagcatcttcgagcaggccagcatcgtggaggccctgctgagacacctgggcctgcagaacagaagaatcaacctgctgagccacgactacggcgacatcgtggcccaggagctgctgtacagatacaagcagaacagaagcggcagactgaccatcaagagcctgtgcctgagcaacggcggcatcttccccgagacccacagacccctgctgctgcagaagctgctgaaggacggcggcgtgctgagccccatcctgaccagactgatgaacttcttcgtgttcagcagaggcctgacccccgtgttcggcccctacaccagacccagcgagagcgagctgtgggacatgtgggccggcatcagaaacaacgacggcaacctggtgatcgacagcctgctgcagtacatcaaccagagaaagaagttcagaagaagatgggtgggcgccctggccagcgtgaccatccccatccacttcatctacggccccctggaccccgtgaacccctaccccgagttcctggagctgtacagaaagaccctgcccagaagcaccgtgagcatcctggacgaccacatcagccactacccccagctggaggaccccatgggcttcctgaacgcctacatgggcttcatcaacagcttctag

SEQ ID NO: 252658 - protein, 232 aa, Artificial Sequence
  derived and/or modified sequence
MAGVTITATVILVSAGEAYLVYTDRLYSRSDFNNYVAAVYKVLGTFLFGAAVSQSLTDLAKYMIGRLRPNFLAVCDPDWSRVNCSVYVQLEKVCRGNPADVTEARLSFYSGHSSFGMYCMVFLALYVQARLCWKWARLLRPTVQFFLVAFALYVGYTRVSDYKHHWSDVLVGLLQGALVAALTVCYISDFFKARPPQHCLKEEELERKPSLSLTLTLGEADHNHYGYPHSSS

SEQ ID NO: 252659 - DNA, 699 bp, Artificial Sequence
  derived and/or modified sequence
atggccggcgtgaccatcaccgccaccgtgatcctggtgagcgccggcgaggcctacctggtgtacaccgacagactgtacagcagaagcgacttcaacaactacgtggccgccgtgtacaaggtgctgggcaccttcctgttcggcgccgccgtgagccagagcctgaccgacctggccaagtacatgatcggcagactgagacccaacttcctggccgtgtgcgaccccgactggagcagagtgaactgcagcgtgtacgtgcagctggagaaggtgtgcagaggcaaccccgccgacgtgaccgaggccagactgagcttctacagcggccacagcagcttcggcatgtactgcatggtgttcctggccctgtacgtgcaggccagactgtgctggaagtgggccagactgctgagacccaccgtgcagttcttcctggtggccttcgccctgtacgtgggctacaccagagtgagcgactacaagcaccactggagcgacgtgctggtgggcctgctgcagggcgccctggtggccgccctgaccgtgtgctacatcagcgacttcttcaaggccagacccccccagcactgcctgaaggaggaggagctggagagaaagcccagcctgagcctgaccctgaccctgggcgaggccgaccacaaccactacggctacccccacagcagcagctag

SEQ ID NO: 252660 - DNA, 699 bp, Artificial Sequence
  derived and/or modified sequence
atggcgggggtcacgatcaccgctacagtgatcttagtgtccgccggagaagcttacctggtgtacaccgacagactatactctcgaagcgactttaacaattatgttgctgctgtctacaaggtactagggacctttctttttggcgcagctgtatcacagagcctcaccgatctggctaagtacatgatcggtcgcctcagacctaatttcttagctgtgtgtgaccctgattggagccgcgtgaattgctctgtgtatgtacagctcgaaaaggtctgccgaggtaatcccgcagacgttacagaggcccggctatcattctattccggacatagttcatttggaatgtattgtatggtgttccttgctttgtacgttcaggcccgcctttgctggaaatgggccagactgctccgaccaaccgtccaattttttctagtcgctttcgcgctgtatgttggttacacaagagtcagcgactacaaacaccactggagtgatgtgctggtcggtctgctccaaggcgcactcgtggcggcattgaccgtctgttatatctccgatttctttaaggcaaggcctccccagcactgcttgaaggaggaggagcttgagcggaaaccctccctctctctgaccttgactcttggagaggcggaccacaaccactatgggtatccccacagttcttcttag

SEQ ID NO: 252661 - DNA, 699 bp, Artificial Sequence
  derived and/or modified sequence
atggccggcgtgaccatcacagccaccgtcatcctggtgtctgctggggaggcctacctggtgtacacagaccggctgtacagcagaagtgacttcaacaactacgtggccgctgtgtacaaggtgctgggcaccttcctgtttggagctgctgtgtcccagagcctgacagacctggccaagtacatgattggccgcctgcggcccaacttcctggccgtgtgtgaccctgactggagccgggtgaactgcagcgtgtatgtgcagctggagaaggtgtgccggggcaacccagcagatgtgacagaggcccggctgtccttctacagcggccacagcagctttggcatgtactgcatggtgttcctggccctgtatgtgcaggcccggctgtgctggaagtgggcccggctgctgcggcccaccgtgcagttcttcctggtggcctttgccctgtatgtgggctacaccagggtgtctgactacaagcaccactggagcgatgtgctggtgggcctgctgcagggcgccctggtggccgccctgactgtgtgctacatcagtgacttcttcaaggcccggcccccccagcactgcctgaaggaggaggagctggagaggaagcccagcctgagcctgaccctgaccctgggggaggccgaccacaaccactacggctacccccacagcagcagctag

SEQ ID NO: 252662 - DNA, 699 bp, Artificial Sequence
  derived and/or modified sequence
atggccggcgtgaccatcaccgccaccgtgatcctggtgagcgccggcgaggcatacctggtgtatacggaccgtctctacagcagaagcgacttcaacaactatgtcgccgcagtgtataaggttctggggacgttcctctttggagcagcagtgagtcaatccttgacagatcttgccaaatatatgatcggtagactgcgccctaatttcctggcagtgtgcgacccagactggtctcgagtgaactgttctgtttacgtgcagctcgagaaagtgtgtcgcggcaatccagctgacgtgaccgaggctaggctgtcattctattccgggcacagctctttcggtatgtattgtatggtgttcttggcattatatgtgcaggccaggttgtgctggaagtgggctcggcttctgcggccaacggtgcaatttttccttgttgcttttgctctgtacgtgggctatactcgggtgagcgattacaaacatcactggagtgatgtgctggtagggttgctccagggggctttagtggcagctctgacagtctgttacataagcgatttctttaaagccagacccccacagcattgtcttaaggaagaagagctcgaacggaaaccttctttgagcctgacactgacattgggcgaagccgaccataatcattatggttacccccactcttccagctag

SEQ ID NO: 252663 - DNA, 699 bp, Artificial Sequence
  derived and/or modified sequence
atggctggtgtcactataacggctactgtaatcttggtttccgccggagaggcatacctggtgtataccgatcgactttactccagatctgacttcaacaattacgtggctgccgtctacaaagttcttggcacattccttttcggtgccgctgtcagccaatccctcaccgacttggctaagtatatgataggcaggcttcggccaaactttctagccgtgtgtgatccagactggtccagagtcaactgttccgtatatgtgcagttggaaaaggtttgcaggggtaacccagccgacgtgactgaagcaagactgagtttctactcagggcattcaagttttggaatgtattgcatggtatttttggcattatacgtgcaggcgaggctctgctggaagtgggcaaggctccttcggccaacagttcagtttttcctcgtagcttttgccctgtatgtgggctacacgcgggtttctgattacaaacaccactggagtgatgtgttggtgggcctccttcagggggctctggtagccgctctgacggtctgttacatctctgacttcttcaaggcacggcctcctcaacactgtttaaaggaggaggagttggaaaggaagccctctctcagtctgacattgacgctgggcgaggccgaccacaaccactatggctacccgcatagctcttcgtag

SEQ ID NO: 252664 - DNA, 579 bp, Artificial Sequence
  derived and/or modified sequence
atggagctgatccaggacatcagcagaccccccctggagtacgtgaagggcgtgcccctgatcaagtacttcgccgaggccctgggccccctgcagagcttccaggccagacccgacgacctgctgatcagcacctaccccaagagcggcaccacctgggtgagccagatcctggacatgatctaccagggcggcgacctggagaagtgccacagagcccccatcttcatgagagtgcccttcctggagttcaaggtgcccggcatccccagcggcatggagaccctgaagaacacccccgcccccagactgctgaagacccacctgcccctggccctgctgccccagaccctgctggaccagaaggtgaaggtggtgtacgtggccagaaacgccaaggacgtggccgtgagctactaccacttctaccacatggccaaggtgtacccccaccccggcacctgggagagcttcctggagaagttcatggccggcgaggtgagctacggcagctggtaccagcacgtgcaggagtggtgggagctgagcagaacccaccccgtgctgtacctgttctag

SEQ ID NO: 252665 - DNA, 579 bp, Artificial Sequence
  derived and/or modified sequence
atggagctgatccaagacatcagtaggcctccactcgagtacgtaaaaggcgtcccgcttatcaaatactttgccgaggccctcggcccactgcaaagtttccaagcgaggccagacgacctgttgatctcaacatacccaaagagcggcacaacttgggtgagtcagattcttgacatgatttatcagggcggtgacttggagaagtgccaccgcgctcccatctttatgagagtcccatttctagagtttaaggttcctggtatcccctctgggatggagacccttaagaatacacctgctccacggctgctgaagacacacctgccacttgccctcctgccacagacgctgctggaccagaaggtgaaagtggtttatgtggcaagaaacgcgaaggatgttgccgtgagttactatcatttttatcacatggctaaggtgtacccccaccccgggacctgggagtcatttctggagaaattcatggccggcgaagtgtcttatggaagctggtatcagcacgtgcaggaatggtgggagctctcccggacccaccctgtgctgtatctgttttag

SEQ ID NO: 252666 - DNA, 579 bp, Artificial Sequence
  derived and/or modified sequence
atggagctgatccaggacatcagccggccccccctggagtatgtgaagggcgtgcccctcatcaagtactttgctgaggccctgggccccctgcagagcttccaggcccggccagatgacctgctgatcagcacctaccccaagagcggcaccacctgggtgtcccagatcctggacatgatctaccagggcggggacctggagaagtgccaccgggcccccatcttcatgagggtgcccttcctggagttcaaggtgcccggcatccccagcggcatggagaccctgaagaacaccccagccccccggctgctgaagacccacctgcccctggccctgctgccccagaccctgctggaccagaaggtgaaggtggtgtatgtggccagaaatgccaaggatgtggccgtgtcctactaccacttctaccacatggccaaggtgtacccccaccctggcacctgggagagcttcctggagaagttcatggccggggaggtgtcctatggctcctggtaccagcacgtgcaggagtggtgggagctgagcaggacccaccctgtgctgtacctgttctag

SEQ ID NO: 252667 - DNA, 579 bp, Artificial Sequence
  derived and/or modified sequence
atggagctgatccaggacatcagccggccccccctggagtacgtgaaaggagtaccactcatcaagtattttgcagaggcgctcgggccgctgcagagctttcaggctcgacccgacgatcttctgatctccacatatccaaagagtggaaccacctgggtgtctcagatcctggatatgatttatcagggcggggacctagagaaatgtcaccgcgcccccatttttatgagagtacccttcctcgagtttaaagtgccaggcattccaagtggcatggagaccttgaaaaatactccagctccacggcttctaaagacgcatcttcccttagccctgctcccacaaacgctcttggaccagaaggtgaaggtcgtttatgtggcacgcaacgcgaaagatgtcgccgtatcatactaccacttttaccacatggctaaagtctatccacatcccgggacatgggaatcctttctggagaaatttatggcaggcgaagtgtcgtacggatcctggtatcagcacgtgcaggagtggtgggaattgagtagaactcatccagtcttgtatctgttctag

SEQ ID NO: 252668 - DNA, 579 bp, Artificial Sequence
  derived and/or modified sequence
atggaactgattcaagatatcagccggccaccgttggagtacgtaaagggtgtgcctctgatcaagtactttgccgaagcgctggggccattacagagttttcaggcgagacctgacgatctattaatttccacgtaccctaagtcgggaacaacctgggtatcccagatactggatatgatctatcaaggaggagacctagaaaagtgtcatcgggcaccaatttttatgcgggtgcctttcctcgagttcaaggtgcccggaattcctagcggaatggagaccctaaagaatactcccgctcccaggctcctgaaaacccatttacctctggctttacttccccagactctgctggaccagaaggtgaaggtcgtctacgtcgcacgcaatgccaaggacgtcgccgtgtcttattatcacttttaccacatggctaaagtataccctcatccaggaacttgggagagcttccttgagaagttcatggctggggaggtgtcctacggctcttggtatcagcatgtgcaagaatggtgggaattgagtaggacccatcccgttttatatctgttctag

SEQ ID NO: 252669 - DNA, 773 bp, Artificial Sequence
  derived and/or modified sequence
agacagcacaggaaggtcctagaggttcctcagtgcagctggactctcctggagaccttcacacaccctgacatctgggccccgcgccacgagggtgctttcactggtctgcaccatggcccaggccctgggattttgaacagctccgcaggtgaatgaaagggaacgggcctggctctggcccctgacgcaggaacatggagctgatccaggacatctctcgcccgccactggagtacgtgaagggggtcccgctcatcaagtactttgcagaggcactggggcccctgcagagcttccaggcccggcctgatgacctgctcatcagcacctaccccaagtccggcaccacctgggtgagccagattctggacatgatctaccagggcggtgacctggaaaagtgtcaccgagctcccatcttcatgcgggtgcccttccttgagttcaaagtcccagggattccctcagggatggagactctgaaaaacacaccagccccacgactcctgaagacacacctgcccctggctctgctcccccagactctgttggatcagaaggtcaaggtggtctatgttgcccgcaacgcaaaggatgtggcggtttcctactaccacttctaccacatggccaaagtgtaccctcaccctgggacctgggaaagcttcctggagaagttcatggctggagaagtgtcctatgggtcctggtaccagcacgtgcaagagtggtgggagctgagccgcacccaccctgttctctacctcttc

SEQ ID NO: 252670 - protein, 295 aa, Artificial Sequence
  derived and/or modified sequence
MELIQDTSRPPLEYVKGVPLIKYFAEALGPLQSFQARPDDLLISTYPKSGTTWVSQILDMIYQGGDLEKCHRAPIFMRVPFLEFKAPGIPSGMETLKDTPAPRLLKTHLPLALLPQTLLDQKVKVVYVARNAKDVAVSYYHFYHMAKVHPEPGTWDSFLEKFMVGEVSYGSWYQHVQEWWELSRTHPVLYLFYEDMKENPKREIQKILEFVGRSLPEETVDFVVQHTSFKEMKKNPMTNYTTVPQEFMDHSISPFMRKGMAGDWKTTFTVAQNERFDADYAEKMAGCSLSFRSEL

SEQ ID NO: 252671 - DNA, 888 bp, Artificial Sequence
  derived and/or modified sequence
atggagctgatccaggacaccagcagaccccccctggagtacgtgaagggcgtgcccctgatcaagtacttcgccgaggccctgggccccctgcagagcttccaggccagacccgacgacctgctgatcagcacctaccccaagagcggcaccacctgggtgagccagatcctggacatgatctaccagggcggcgacctggagaagtgccacagagcccccatcttcatgagagtgcccttcctggagttcaaggcccccggcatccccagcggcatggagaccctgaaggacacccccgcccccagactgctgaagacccacctgcccctggccctgctgccccagaccctgctggaccagaaggtgaaggtggtgtacgtggccagaaacgccaaggacgtggccgtgagctactaccacttctaccacatggccaaggtgcaccccgagcccggcacctgggacagcttcctggagaagttcatggtgggcgaggtgagctacggcagctggtaccagcacgtgcaggagtggtgggagctgagcagaacccaccccgtgctgtacctgttctacgaggacatgaaggagaaccccaagagagagatccagaagatcctggagttcgtgggcagaagcctgcccgaggagaccgtggacttcgtggtgcagcacaccagcttcaaggagatgaagaagaaccccatgaccaactacaccaccgtgccccaggagttcatggaccacagcatcagccccttcatgagaaagggcatggccggcgactggaagaccaccttcaccgtggcccagaacgagagattcgacgccgactacgccgagaagatggccggctgcagcctgagcttcagaagcgagctgtag

SEQ ID NO: 252672 - DNA, 888 bp, Artificial Sequence
  derived and/or modified sequence
atggaactcattcaggacacatcacggcctcccctggaatatgtcaagggcgtaccacttattaagtatttcgcagaagctctcgggcccttgcagagcttccaggccaggcctgatgatctgctcatttccacctaccctaagagcgggacgacttgggtgagtcagatcttggatatgatctaccagggcggagatttggaaaaatgccatcgagccccaatcttcatgcgcgtgcccttcctggagttcaaggcaccgggaattcccagcgggatggaaacactgaaggatacaccagcccctaggctccttaagacccacctaccactggcactgctgcctcaaacactgctggatcagaaggtgaaggtggtgtatgtcgctcggaatgctaaagatgttgccgtgagctattatcatttttaccatatggcaaaggtacaccccgagccgggaacatgggatagctttttggaaaagttcatggttggagaggtgagctatgggtcatggtatcagcatgttcaggaatggtgggaattatctcgaactcaccccgtgctgtacttgttttacgaggatatgaaggaaaatcccaaaagagagattcagaaaatactggagtttgttggaagatctttgcccgaggagaccgtcgattttgtcgtccagcatacatctttcaaagaaatgaaaaaaaacccaatgacaaattataccacagtgccacaagaattcatggaccactcaatttcccccttcatgagaaagggcatggccggcgattggaagaccactttcaccgtcgcgcaaaacgagcgatttgatgccgattacgctgaaaaaatggcgggctgttcactttcgtttcggtccgagttgtag

SEQ ID NO: 252673 - DNA, 888 bp, Artificial Sequence
  derived and/or modified sequence
atggagctcattcaggacacatcacgccccccactagagtacgtgaaaggtgttcccctaatcaaatacttcgccgaggccttagggcccctccagtcgttccaggcacgtccagatgatctgttgataagtacctacccaaagtctggtaccacctgggttagccagattcttgacatgatctatcagggtggagacctagaaaagtgtcaccgtgctcccatcttcatgagagtcccttttctggaattcaaagccccgggcattcccagtggcatggagaccctgaaggacaccccggcccccaggttgctgaaaacacacctgcctctagcactactcccgcagaccctcctcgaccagaaggtgaaggtggtctatgtggcacggaacgccaaggacgtggccgtgtcttactaccacttctatcatatggctaaggtgcacccagaacctgggacctgggactcttttttggaaaagtttatggtgggtgaagtatcttacggaagctggtatcaacatgtgcaggagtggtgggaactttctcgtactcacccagtcctctacctgttctacgaggatatgaaagagaatcccaagagggaaattcagaagatcctcgagtttgttggtagatccctgcctgaggagacggtggatttcgtagtgcaacacacttcgttcaaagaaatgaagaagaacccaatgaccaactatacaaccgtccctcaagaatttatggaccacagcatctcacccttcatgcgcaagggaatggccggcgattggaaaacaaccttcacagtggcacagaacgaacgctttgatgcagactacgctgagaagatggccggctgttcgttatcatttcgctccgagttatag

SEQ ID NO: 252674 - DNA, 888 bp, Artificial Sequence
  derived and/or modified sequence
atggaattgatccaggacacctcccggcctcctttagagtatgtaaaaggcgttccactgatcaagtactttgcagaagccctgggcccccttcagtctttccaggcccggccagacgacttgctgatcagcacttaccccaaatccggaacgacatgggtgtcccaaatcctggacatgatttaccagggaggtgacctggagaaatgccacagggcacccatattcatgagggtgccctttctggagtttaaagcccctggaatcccatctggcatggaaacccttaaagacactccagccccccgcctgctcaaaacacaccttcccctcgccctgcttccacagacgctgctggaccagaaggtgaaggtcgtctacgttgcccgtaacgccaaggatgtagctgtaagctactatcatttctatcatatggctaaagtccatcccgaaccgggcacatgggattcctttttggagaaatttatggtgggcgaggtgtcttacggatcctggtatcagcatgtgcaggagtggtgggagctatctcgcactcaccccgtgctctacctattctatgaagacatgaaagagaatccaaagagggaaatccagaaaattctagagttcgttgggaggtctctccctgaagaaaccgtggactttgtggtgcagcacacaagcttcaaggaaatgaagaaaaatccaatgactaattacactaccgtgccacaggagtttatggaccactctattagcccatttatgagaaaaggtatggctggggattggaagacgactttcaccgtcgcccagaacgagcgttttgacgctgactatgctgagaagatggcagggtgttctctttcattccggagcgagctctag

SEQ ID NO: 252675 - DNA, 888 bp, Artificial Sequence
  derived and/or modified sequence
atggaattgatccaagatacaagcagacctcctttagagtatgtgaagggggttcctctgattaaatacttcgctgaagcactggggccgctgcagtcctttcaggcacgcccagacgaccttctgatttccacctatcctaaatcgggaaccacatgggtatcacagattcttgatatgatctaccagggcggggatctcgagaagtgccatcgcgcgcctatcttcatgcgcgtgcccttcctggagttcaaggcccccggcattcccagcggcatggagacactcaaagatacgcctgcacctaggctactcaagactcatctcccccttgctctgcttccacagaccctcttagaccaaaaagttaaggttgtctacgtggcgcgcaatgctaaagatgtagccgtcagctactatcacttttaccacatggccaaagtccatcccgagcctggaacatgggatagctttctcgaaaaattcatggtgggagaagtctcatatggcagttggtaccagcacgttcaagaatggtgggagttgtcccgaactcatccagttctttatctattctacgaggacatgaaggagaaccctaagagggagatccagaagattctcgaatttgttggaagatccctgccggaggagaccgttgattttgtcgtccagcatacaagctttaaggagatgaagaaaaatcctatgacaaactacaccaccgtgccgcaagaatttatggatcacagcatctcgcctttcatgagaaaagggatggccggagactggaagacgacctttaccgtggctcaaaacgagagatttgatgctgactatgcagagaagatggcaggctgcagtctgtctttccgttccgaactatag

SEQ ID NO: 252676 - DNA, 888 bp, Artificial Sequence
  derived and/or modified sequence
atggagctgatccaggacaccagccggccccccctggagtatgtgaagggcgtgcccctcatcaagtactttgctgaggccctgggccccctgcagagcttccaggcccggccagatgacctgctgatcagcacctaccccaagagcggcaccacctgggtgtcccagatcctggacatgatctaccagggcggggacctggagaagtgccaccgggcccccatcttcatgagggtgcccttcctggagttcaaggcccctggcatccccagcggcatggagaccctgaaggacaccccagccccccggctgctgaagacccacctgcccctggccctgctgccccagaccctgctggaccagaaggtgaaggtggtgtatgtggccagaaatgccaaggatgtggccgtgtcctactaccacttctaccacatggccaaggtgcaccctgagcccggcacctgggacagcttcctggagaagttcatggtgggggaggtgtcctatggctcctggtaccagcacgtgcaggagtggtgggagctgagcaggacccaccctgtgctgtacctgttctatgaggacatgaaggagaaccccaagcgggagatccagaagatcctggagtttgtgggccgcagcctgcctgaggagaccgtggactttgtggtgcagcacaccagcttcaaggagatgaagaagaaccccatgaccaactacaccaccgtgccccaggagttcatggaccacagcatcagccccttcatgaggaagggcatggccggggactggaagaccaccttcaccgtggcccagaatgaaagatttgatgctgactatgcagagaagatggccggctgcagcctgtccttccgctctgagctgtag

SEQ ID NO: 252677 - DNA, 888 bp, Artificial Sequence
  derived and/or modified sequence
atggagctgatccaggacaccagccggccccccctggagtacgtgaagggagtcccactgataaaatacttcgctgaggccctgggtccactccagtctttccaggctcggcctgatgatctcttgattagcacatatccaaagtcaggaaccacttgggtatcacaaatcctcgatatgatttaccaggggggggatctcgagaagtgccatagagctccaatctttatgagagtgccattccttgagtttaaggctcccggtatccccagtggaatggaaacactgaaagacactcccgcaccaagattgctcaagacccacctacccctcgctttgttaccgcagactctgcttgaccagaaagtgaaagtggtgtacgtggccagaaacgctaaggatgttgccgtgtcttattatcacttctatcacatggcaaaagtccatcctgagcctggcacttgggacagttttctggaaaagttcatggtgggagaggtgtcctatggtagttggtatcaacacgtgcaagagtggtgggagttgtcacgtactcacccagtgttgtacctgttctacgaagacatgaaagaaaatccaaagcgagagatccagaagatcctcgaatttgtgggaaggtcactgcccgaggagactgtggatttcgtggtccagcacacatctttcaaggagatgaaaaaaaatcccatgaccaactacaccaccgtgccacaagaattcatggaccatagtatcagcccatttatgagaaaaggcatggccggagactggaaaacaaccttcacagtcgctcaaaacgaaaggttcgacgcagattacgctgagaagatggccggctgcagcctgagcttccggtccgagctgtag

SEQ ID NO: 252678 - DNA, 888 bp, Artificial Sequence
  derived and/or modified sequence
atggagctgatccaggacaccagccggccccccctggagtacgtgaaaggggtgcccttaatcaaatatttcgcggaagccctaggccccctacagagctttcaggcgagacctgatgacctgctcattagtacatacccaaagtcaggaaccacttgggtctcccagatcctggatatgatctaccagggtggggatctcgagaaatgtcatcgggcccctatcttcatgagggtgccttttctcgaattcaaagccccagggattccatccggaatggagaccctgaaggataccccagcacctcgcttattgaagacccatttacctttggcccttttgcctcagaccctgcttgatcaaaaggttaaagtagtgtatgtggcccggaatgcaaaggatgtggctgttagttattatcacttctaccacatggctaaggtgcacccggaacctggcacgtgggactctttcctcgaaaaattcatggtgggtgaagttagctatggatcttggtatcagcatgtgcaagaatggtgggagctgtctaggactcatccagtgttatacctgttctatgaggacatgaaagagaaccctaaaagagagatccagaagatcttggagttcgtaggacgtagtctacctgaggaaaccgtggatttcgtcgtgcaacatacttccttcaaagaaatgaaaaaaaaccctatgactaattatacgacagtgccccaggagtttatggatcactctattagtccgtttatgaggaaggggatggctggcgactggaaaactactttcacagtcgcccagaatgaaagattcgacgccgactatgcggagaagatggcaggctgcagcttgtccttcagatctgagctctag

SEQ ID NO: 252679 - DNA, 888 bp, Artificial Sequence
  derived and/or modified sequence
atggagctgatccaggacaccagccggccccccctggagtacgtgaagggcgttccactaatcaagtatttcgccgaggctctgggcccccttcagtcttttcaggcacgccctgacgatctgctaatctctacctacccgaagtcaggcacgacatgggtgtctcagatcctggacatgatctaccagggaggagatctggagaaatgccatcgtgctccaattttcatgagagtaccctttctggagttcaaagctcccggcattccctctgggatggagaccctgaaggatacccctgcccctcggctgctaaagacacaccttcccctcgccctcttgccccagactctgctcgaccagaaagtaaaggtggtttacgttgctagaaacgcgaaggacgtcgcggtgtcttactaccacttctaccacatggccaaagtgcacccggagccgggcacttgggacagtttcctggagaagtttatggtcggtgaagtatcatacgggagttggtatcagcatgtgcaagaatggtgggaattgagccgcacccacccagtgctctatttattttatgaggacatgaaggaaaatccaaaacgtgaaatccagaagatacttgagtttgtgggtagatccctccccgaggaaactgtagattttgttgtccagcatacctccttcaaggagatgaagaaaaacccaatgacaaattatacgacagtcccacaagagttcatggaccacagcatttctccttttatgagaaagggcatggcaggcgattggaagacgaccttcacggtcgcgcagaatgaacggtttgatgccgattatgcggagaagatggcagggtgttcactgagctttagatctgagctgtag

SEQ ID NO: 252680 - DNA, 888 bp, Artificial Sequence
  derived and/or modified sequence
atggagctgatccaggacaccagccggccccccctggagtacgtgaagggagttcccctgatcaagtacttcgcagaagctctgggccctctccagtcatttcaggcccgccccgatgacttgctaatttctacttaccctaagtctggcactacatgggtttcccaaatccttgatatgatctaccaagggggcgatctcgagaaatgccaccgggcccctatatttatgagagttcctttcttggagttcaaagcaccagggatcccctctgggatggaaacacttaaggatacccccgctccccgtctacttaaaacccaccttccgttggcccttctccctcaaaccctgcttgaccaaaaggtcaaagtggtttacgtggctcgcaatgccaaggatgtggcagtgtcttactatcatttttatcatatggccaaagtgcaccctgaacccggcacctgggatagctttctggagaagtttatggtaggcgaagtgagctacggaagttggtatcagcatgttcaggagtggtgggagctgtcaaggacccacccggtattatacttattctatgaagatatgaaagagaacccgaagcgagagatacaaaagatccttgaattcgtgggcagatccctgcctgaggagaccgttgactttgtcgtacagcacacttcctttaaagagatgaagaagaacccgatgaccaactacaccactgttccgcaggaattcatggaccattccatcagtcccttcatgaggaagggtatggctggcgattggaagacgacgttcacagtggcccagaatgaacgattcgacgctgattatgcagagaaaatggccggttgctcattaagtttcaggtctgaactatag

SEQ ID NO: 252681 - DNA, 888 bp, Artificial Sequence
  derived and/or modified sequence
atggagcttatccaggatacctcccggcctccccttgagtacgtgaaaggcgtgcccctaataaaatacttcgccgaagccctcgggccacttcagtcctttcaggctagacctgatgatttacttatcagcacctaccctaagtctggcacaacttgggtgagccagattttggacatgatttatcaggggggagatctggagaaatgccatcgagcgcctatttttatgcgggtcccctttctcgaattcaaggctcctggcatccccagcggcatggaaaccttgaaggatacgccggctcccaggctcctgaagactcacttgcctctcgccctgctcccacaaaccttactcgaccagaaagtcaaagtagtgtatgttgctagaaatgccaaagacgtggccgttagttattatcacttttatcacatggcgaaggtgcatccagaacctggaacctgggacagcttcttggagaagtttatggtgggggaagtctcctacgggtcttggtatcaacacgttcaagaatggtgggagttgagccggactcaccctgtattgtatttattctacgaggacatgaaggagaatcccaagagagaaatccagaaaattctcgaattcgtaggtcggtcccttccagaggaaacggttgactttgtggtgcagcacactagttttaaagaaatgaagaagaacccgatgacaaattacaccaccgtcccgcaggaattcatggatcacagcattagcccctttatgcggaagggcatggcaggcgactggaagaccaccttcaccgtcgcacagaatgaacgcttcgatgccgattacgcagaaaaaatggctggatgcagcctgtctttcagatccgagctctag

SEQ ID NO: 252682 - DNA, 888 bp, Artificial Sequence
  derived and/or modified sequence
atggagttgatacaagacacctctaggccacctctggagtacgtaaaaggagtgccactgatcaaatacttcgcagaggcgctgggcccactgcagagcttccaggccaggcctgatgatcttttaatttcaacatacccaaaatccggtaccacctgggtgtcccaaattctggacatgatatatcaggggggtgatctagaaaaatgtcaccgggctccaatcttcatgcgggtccccttcctcgaattcaaggcacccggaatccccagcggaatggagaccctgaaggatacacccgctcccaggctacttaagactcatcttccattggcactgttgccacagacactgctcgaccaaaaggtaaaagtggtgtatgtcgccaggaacgcgaaggacgttgccgtcagttattatcatttctaccacatggccaaagtgcatccagagcccggaacgtgggatagcttcctcgagaagttcatggtgggggaagtgtcctacgggagctggtatcaacacgtacaggagtggtgggaactctctaggacgcaccccgtgctgtacctattctatgaagatatgaaagaaaatccaaaacgtgaaatccagaaaattttggagtttgtagggagatctctgcccgaagaaactgtcgatttcgtggtgcagcacaccagttttaaagagatgaagaagaatcctatgacaaattataccacggtcccccaagagtttatggatcactctatttctccgttcatgcgaaaggggatggcgggtgactggaaaaccacttttaccgtggcacagaacgagcgatttgatgcagattatgccgaaaaaatggccggatgctctctgagcttcagatccgagctgtag

SEQ ID NO: 252683 - DNA, 888 bp, Artificial Sequence
  derived and/or modified sequence
atggagttaattcaggatacctctagacctccgttggagtatgtgaagggggttccgttgattaagtacttcgcagaagcactcggccctctgcagagttttcaagccagacccgatgatcttttgatcagtacttatcccaagtctgggaccacttgggtgtctcagattctggacatgatctaccagggcggtgaccttgaaaagtgtcatcgggcacccatctttatgagggttcccttcttagagtttaaagctcctggaattccgagtggcatggagaccttgaaagacactccagctccaaggctgcttaagacccatctgcccttagctctattaccacagactctgctggatcagaaagttaaggtcgtgtacgtcgccagaaacgcaaaggatgtagccgtttcctactaccatttctatcacatggcaaaagtgcacccagagccaggaacttgggattcgttcctggaaaagttcatggtgggcgaggtatcttatggctcctggtatcagcacgtgcaagagtggtgggaactgtcaagaacccatcctgtgctttacctgttctacgaggacatgaaggagaatccaaagcgggagattcagaagattcttgaatttgtggggaggtcactcccagaagagaccgtggacttcgtcgttcagcacacttcctttaaggaaatgaaaaaaaacccgatgacaaattacactaccgttccgcaggagtttatggaccacagtatctcacctttcatgcggaagggcatggccggagactggaagacgacattcacggtggcacagaacgagaggtttgatgcagattatgccgaaaagatggccggttgctccttgtcattccggagcgaactgtag

SEQ ID NO: 252684 - DNA, 888 bp, Artificial Sequence
  derived and/or modified sequence
atggaactgatccaggataccagcagacctcccttggagtatgtgaagggcgtgccgttaattaagtattttgctgaggccttaggccctcttcaatccttccaggcaaggcctgatgatctcttaatttctacctatccaaaaagtggtacaacctgggtaagtcagatcctggatatgatctaccagggtggcgatctggaaaagtgtcacagagcacccatcttcatgagagttccttttctagagtttaaggcacctggaatccccagcggcatggagactctcaaagatacgccagccccacgcctgcttaagacacacctgcctcttgccctgctgcctcaaaccttgctggaccagaaggtcaaggtcgtgtatgtggcacggaacgcaaaggatgttgctgtgtcctactaccacttctaccacatggccaaagttcatccagagccgggtacctgggactcctttctggagaaattcatggtgggcgaggtgtcttatggatcttggtatcagcacgtgcaggagtggtgggagctttccagaacgcaccctgtactgtatctcttttacgaggacatgaaggaaaatccaaaacgggagattcagaagatccttgaattcgtgggcaggtctttgccggaggagacagttgactttgtagtccagcatacgtcctttaaggaaatgaagaaaaaccccatgaccaactacacaaccgtgcctcaggaatttatggaccacagcatttcaccttttatgcgcaagggaatggctggagattggaaaactacgtttactgtcgctcagaacgagagattcgatgccgactacgcagagaagatggccggatgctctctctctttccgatctgaactttag

SEQ ID NO: 252685 - DNA, 1876 bp, Artificial Sequence
  derived and/or modified sequence
cgaggcccggaggcggtgcaggaagcctccgaccacgcgggctcctgatcgcgggcgcccacagcgcggacatggcgggctggtggccggcgttgtcgcgcacggcccggcgccacccgtggcccaccaacgtgctgctctacgttgctcgagcaacgtagctctacgctctacgagcgtgccgtagctcgctcgtctccgccggggacgtgctgcagcaacggctgcagggccgctaggccgactggcgccagacgcggcgcgtggccacgttggtggtgaccttccacgccaacttcaactacgtgtggctgggcctgctggagcgcgcgctcccgggccgagcgccgcgcgccatgctggccaagttgctgtgcgaccaggtggtcggtgcgcccatcgcggtctcggccttctacgccggtatgagcattctccagggaaaggatgacatatttttggacctgaaacagaaattctggaacacctatatgcaaactcagtcgtggctttggagatcactttaagcttgtctccagctggcacactaaggagggtaatggagaagctcccccacccccaaccccaccccttccttccggaagcaaatctaagtccagccccggctccagatccctcccacagtggacctaggaaaccctcagctcagagaacaaccctgcattccccacacaacacccacaatcagccactgcgggcgaggagggcacgaggccaggttcccaagagctcaggaacatggagctgatccaggacacctcccgcccgccactggagtacgtgaagggggtcccgctcatcaagtactttgcagaggcactggggcccctgcagagcttccaggcccggcctgatgacctgctcatcagcacctaccccaagtccggcactacctgggtaagccagattctggacatgatctaccagggtggtgacctggagaagtgtcaccgagctcccatcttcatgcgggtgcccttccttgagttcaaagccccagggattccctcagggatggagactctgaaagacacaccggccccacgactcctgaagacacacctgcccctggctctgctcccccagactctgttggatcagaaggtcaaggtggtctatgttgcccgcaacgcaaaggatgtggcagtttcctactaccacttctaccacatggccaaggtgcaccctgagcctgggacctgggacagcttcctggagaagttcatggtcggagaagtgtcctacggatcctggtaccagcacgtgcaggagtggtgggagctgagccgcacccaccctgttctctacctcttctatgaagacatgaaggagaacccgaaaagggagattcaaaagatcctggagtttgtggggcgctccctgccagaggagaccgtggacttcgtggttcagcacacgtcgttcaaggagatgaagaagaaccctatgaccaactacaccaccgtcccccaggagttcatggaccacagcatctcccccttcatgaggaaaggcatggctggggactggaagaccaccttcaccgtggcgcagaatgagcgcttcgatgcggactatgcggagaagatggcaggctgcagcctcagcttccgctctgagctgtgagaggggctcctggagtcactgcagagggagtgtgcgaatcaaacctgaccaagcggctcaagaataaaatatgaattgagggcccgggacggtaggtcatgtctgtaatcccagcaatttggaggctgaggtgggaggatcatttgagcccaggagttcgagaccaacctgggcaacatagtgagattctgttaaaaaaataaaataaaataaaaccaatttttaaaaa

SEQ ID NO: 252686 - DNA, 1155 bp, Artificial Sequence
  derived and/or modified sequence
ccactttcttgctgttgtgatggtggtaagggaacgggcctggctctggcccctgacgcaggaacatggagctgatccaggacacctcccgcccgccactggagtacgtgaagggggtcccgctcatcaagtactttgcagaggcactggggcccctgcagagcttccaggcccggcctgatgacctgctcatcagcacctaccccaagtccggcactacctgggtaagccagattctggacatgatctaccagggtggtgacctggagaagtgtcaccgagctcccatcttcatgcgggtgcccttccttgagttcaaagccccagggattccctcagggatggagactctgaaagacacaccggccccacgactcctgaagacacacctgcccctggctctgctcccccagactctgttggatcagaaggtcaaggtggtctatgttgcccgcaacgcaaaggatgtggcagtttcctactaccacttctaccacatggccaaggtgcaccctgagcctgggacctgggacagcttcctggagaagttcatggtcggagaagtgtcctacggatcctggtaccagcacgtgcaggagtggtgggagctgagccgcacccaccctgttctctacctcttctatgaagacatgaaggagaacccgaaaagggagattcaaaagatcctggagtttgtggggcgctccctgccagaggagaccgtggacttcgtggttcagcacacgtcgttcaaggagatgaagaagaaccctatgaccaactacaccaccgtcccccaggagttcatggaccacagcatctcccccttcatgaggaaaggcatggctggggactggaagaccaccttcaccgtggcgcagaatgagcgcttcgatgcggactatgcggagaagatggcaggctgcagcctcagcttccgctctgagctgtgagaggggctcctggagtcactgcagagggagtgtgcgaatcaaacctgaccaagcggctcaagaataaaatatgaattgagggcccgggacggtaggtcatgtctgtaatcccagcaatttggaggctgaggtgggaggatcatttgagcccaggagttcgagaccaacctgggcaacatagtgagattctgttaaaaaaata

SEQ ID NO: 252687 - DNA, 1245 bp, Artificial Sequence
  derived and/or modified sequence
acagtggacctaggaaaccctcagctcagagaacaaccctgcattccccacacaacacccacaatcagccactgcgggcgaggagggcacgaggccaggttcccaagagctcaggaacatggagctgatccaggacacctcccgcccgccactggagtacgtgaagggggtcccgctcatcaagtactttgcagaggcactggggcccctgcagagcttccaggcccggcctgatgacctgctcatcagcacctaccccaagtccggcactacctgggtaagccagattctggacatgatctaccagggtggtgacctggagaagtgtcaccgagctcccatcttcatgcgggtgcccttccttgagttcaaagccccagggattccctcagggatggagactctgaaagacacaccggccccacgactcctgaagacacacctgcccctggctctgctcccccagactctgttggatcagaaggtcaaggtggtctatgttgcccgcaacgcaaaggatgtggcagtttcctactaccacttctaccacatggccaaggtgcaccctgagcctgggacctgggacagcttcctggagaagttcatggtcggagaagtgtcctacggatcctggtaccagcacgtgcaggagtggtgggagctgagccgcacccaccctgttctctacctcttctatgaagacatgaaggagaacccgaaaagggagattcaaaagatcctggagtttgtggggcgctccctgccagaggagaccgtggacttcgtggttcagcacacgtcgttcaaggagatgaagaagaaccctatgaccaactacaccaccgtcccccaggagttcatggaccacagcatctcccccttcatgaggaaaggcatggctggggactggaagaccaccttcaccgtggcgcagaatgagcgcttcgatgcggactatgcggagaagatggcaggctgcagcctcagcttccgctctgagctgtgagaggggctcctggagtcactgcagagggagtgtgcgaatcaaacctgaccaagcggctcaagaataaaatatgaattgagggcccgggacggtaggtcatgtctgtaatcccagcaatttggaggctgaggtgggaggatcatttgagcccaggagttcgagaccaacctgggcaacatagtgagattctgttaaaaaaataaaataaaataaaaccaatttttaaaaagagaataaaa

SEQ ID NO: 252688 - DNA, 1386 bp, Artificial Sequence
  derived and/or modified sequence
tttccacatgtgaggggctgaggggctcaaggaggggagcatctccactgggtggaggctgggggtcccagcaggaagtggtgagacaaagggcgctggctggcagggagacagcacaggaaggtcctagagcttcctcagtgcagctggactctcctggagaccttcacacaccctgacatctgggccttgcccgacgagggtgctttcactggtctgcaccatggcccaggccctgggattttgaacagctccgcaggtgaatgaaaggaacatggagctgatccaggacacctcccgcccgccactggagtacgtgaagggggtcccgctcatcaagtactttgcagaggcactggggcccctgcagagcttccaggcccggcctgatgacctgctcatcagcacctaccccaagtccggcactacctgggtaagccagattctggacatgatctaccagggtggtgacctggagaagtgtcaccgagctcccatcttcatgcgggtgcccttccttgagttcaaagccccagggattccctcagggatggagactctgaaagacacaccggccccacgactcctgaagacacacctgcccctggctctgctcccccagactctgttggatcagaaggtcaaggtggtctatgttgcccgcaacgcaaaggatgtggcagtttcctactaccacttctaccacatggccaaggtgcaccctgagcctgggacctgggacagcttcctggagaagttcatggtcggagaagtgtcctacggatcctggtaccagcacgtgcaggagtggtgggagctgagccgcacccaccctgttctctacctcttctatgaagacatgaaggagaacccgaaaagggagattcaaaagatcctggagtttgtggggcgctccctgccagaggagaccgtggacttcgtggttcagcacacgtcgttcaaggagatgaagaagaaccctatgaccaactacaccaccgtcccccaggagttcatggaccacagcatctcccccttcatgaggaaaggcatggctggggactggaagaccaccttcaccgtggcgcagaatgagcgcttcgatgcggactatgcggagaagatggcaggctgcagcctcagcttccgctctgagctgtgagaggggctcctggagtcactgcagagggagtgtgcgaatcaaacctgaccaagcggctcaagaataaaatatgaattgagggcccgggacggtaggtcatgtctgtaatcccagcaatttggaggctgaggtgggaggatcatttgagcccaggagttcgagaccaacctgggcaacatagtgagattctgttaaaaaaataaaataaaataaaaccaattttt

SEQ ID NO: 252689 - DNA, 1871 bp, Artificial Sequence
  derived and/or modified sequence
cgaggcccggaggcggtgcaggaagcctccgaccacgcgggctcctgatcgcgggcgcccacagcgcggacatggcgggctggtggccggcgttgtcgcgcacggcccggcgccacccgtggcccaccaacgtgctgctctacgttgctcgagcaacgtagctctacgctctacgagcgtgccgtagctcgctcgtctccgccggggacgtgctgcagcaacggctgcagggccgctaggccgactggcgccagacgcggcgcgtggccacgttggtggtgaccttccacgccaacttcaactacgtgtggctgggcctgctggagcgcgcgctcccgggccgagcgccgcgcgccatgctggccaagttgctgtgcgaccaggtggtcggtgcgcccatcgcggtctcggccttctacgccggtatgagcattctccagggaaaggatgacatatttttggacctgaaacagaaattctggaacacctatatgcaaactcagtcgtggctttggagatcactttaagcttgtctccagctggcacactaaggagggtaatggagaagctcccccacccccaaccccaccccttccttccggaagcaaatctaagtccagccccggctccagatccctcccacagtggacctaggaaaccctcagctcagagaacaaccctgcattccccacacaacacccacaatcagccactgcgggcgaggagggcacgaggccaggttcccaagagctcaggaacatggagctgatccaggacacctcccgcccgccactggagtacgtgaagggggtcccgctcatcaagtactttgcagaggcactggggcccctgcagagcttccaggcccggcctgatgacctgctcatcagcacctaccccaagtccggcactacctgggtaagccagattctggacatgatctaccagggtggtgacctggagaagtgtcaccgagctcccatcttcatgcgggtgcccttccttgagttcaaagccccagggattccctcagggatggagactctgaaagacacaccggccccacgactcctgaagacacacctgcccctggctctgctcccccagactctgttggatcagaaggtcaaggtggtctatgttgcccgcaacgcaaaggatgtggcagtttcctactaccacttctaccacatggccaaggtgcaccctgagcctgggacctgggacagcttcctggagaagttcatggtcggagaagtgtcctacggatcctggtaccagcacgtgcaggagtggtgggagctgagccgcacccaccctgttctctacctcttctatgaagacatgaaggagaacccgaaaagggagattcaaaagatcctggagtttgtggggcgctccctgccagaggagaccgtggacttcgtggttcagcacacgtcgttcaaggagatgaagaagaaccctatgaccaactacaccaccgtcccccaggagttcatggaccacagcatctcccccttcatgaggaaaggcatggctggggactggaagaccaccttcaccgtggcgcagaatgagcgcttcgatgcggactatgcggagaagatggcaggctgcagcctcagcttccgctctgagctgtgagaggggctcctggagtcactgcagagggagtgtgcgaatcaaacctgaccaagcggctcaagaataaaatatgaattgagggcccgggacggtaggtcatgtctgtaatcccagcaatttggaggctgaggtgggaggatcatttgagcccaggagttcgagaccaacctgggcaacatagtgagattctgttaaaaaaataaaataaaataaaaccaattttt

SEQ ID NO: 252690 - protein, 56 aa, Artificial Sequence
  derived and/or modified sequence
MLAKLLCDQVVGAPIAVSAFYAGMSILQGKDDIFLDLKQKFWNTYMQTQSWLWRSL

SEQ ID NO: 252691 - protein, 217 aa, Artificial Sequence
  derived and/or modified sequence
MLAKLLCDQVVGAPIAVSAFYAGMSILQGKDDIFLDLKQKFWNTYMVVYVARNAKDVAVSYYHFYHMAKVHPEPGTWDSFLEKFMVGEVSYGSWYQHVQEWWELSRTHPVLYLFYEDMKENPKREIQKILEFVGRSLPEETVDFVVQHTSFKEMKKNPMTNYTTVPQEFMDHSISPFMRKGMAGDWKTTFTVAQNERFDADYAEKMAGCSLSFRSEL

SEQ ID NO: 252692 - DNA, 171 bp, Artificial Sequence
  derived and/or modified sequence
atgctggccaagctgctgtgcgaccaggtggtgggcgcccccatcgccgtgagcgccttctacgccggcatgagcatcctgcagggcaaggacgacatcttcctggacctgaagcagaagttctggaacacctacatgcagacccagagctggctgtggagaagcctgtag

SEQ ID NO: 252693 - DNA, 654 bp, Artificial Sequence
  derived and/or modified sequence
atgctggccaagctgctgtgcgaccaggtggtgggcgcccccatcgccgtgagcgccttctacgccggcatgagcatcctgcagggcaaggacgacatcttcctggacctgaagcagaagttctggaacacctacatggtggtgtacgtggccagaaacgccaaggacgtggccgtgagctactaccacttctaccacatggccaaggtgcaccccgagcccggcacctgggacagcttcctggagaagttcatggtgggcgaggtgagctacggcagctggtaccagcacgtgcaggagtggtgggagctgagcagaacccaccccgtgctgtacctgttctacgaggacatgaaggagaaccccaagagagagatccagaagatcctggagttcgtgggcagaagcctgcccgaggagaccgtggacttcgtggtgcagcacaccagcttcaaggagatgaagaagaaccccatgaccaactacaccaccgtgccccaggagttcatggaccacagcatcagccccttcatgagaaagggcatggccggcgactggaagaccaccttcaccgtggcccagaacgagagattcgacgccgactacgccgagaagatggccggctgcagcctgagcttcagaagcgagctgtag

SEQ ID NO: 252694 - DNA, 171 bp, Artificial Sequence
  derived and/or modified sequence
atgctggctaagctgctatgcgatcaggtggtaggcgcccctatcgccgtgtccgccttttacgccgggatgtcgatactccaggggaaggacgatatttttctagacctgaaacaaaagttttggaatacctacatgcaaacccaatcctggctttggcgctccctgtag

SEQ ID NO: 252695 - DNA, 654 bp, Artificial Sequence
  derived and/or modified sequence
atgctggccaaactcctctgcgaccaagtcgtgggcgctccaatcgcagtgagtgctttctatgccggcatgtcaatcctgcagggcaaagatgatatcttcctggacttgaaacagaaattctggaacacgtatatggtcgtgtacgttgctaggaatgctaaagatgtagccgtctcttactaccacttctatcacatggccaaggttcaccccgaacccggaacatgggatagctttctggaaaagtttatggttggggaggtcagctatggttcatggtaccagcatgtccaggagtggtgggaattgagccgcacccacccggtcctgtatctgttctatgaggacatgaaggagaaccctaagagggagatacagaaaatcctggagttcgttggtcgctccctcccggaagagactgttgactttgtggtgcagcacactagctttaaggagatgaagaaaaatcccatgacaaattacaccaccgttccccaggaatttatggaccattcaatctctccttttatgcgtaaaggtatggcaggcgactggaagacaactttcacagttgcccaaaatgagcggttcgatgccgactatgcagagaagatggcaggttgctctttatctttcaggtccgaactgtag

SEQ ID NO: 252696 - DNA, 171 bp, Artificial Sequence
  derived and/or modified sequence
atgctggccaagctgctgtgtgaccaggtggtgggcgcccccatcgctgtgtctgccttctacgccggcatgagcatcctgcagggcaaggatgacatcttcctggacctgaagcagaagttctggaacacctacatgcagacccagagctggctgtggaggagcctgtag

SEQ ID NO: 252697 - DNA, 654 bp, Artificial Sequence
  derived and/or modified sequence
atgctggccaagctgctgtgtgaccaggtggtgggcgcccccatcgctgtgtctgccttctacgccggcatgagcatcctgcagggcaaggatgacatcttcctggacctgaagcagaagttctggaacacctacatggtggtgtatgtggccagaaatgccaaggatgtggccgtgtcctactaccacttctaccacatggccaaggtgcaccctgagcccggcacctgggacagcttcctggagaagttcatggtgggggaggtgtcctatggctcctggtaccagcacgtgcaggagtggtgggagctgagcaggacccaccctgtgctgtacctgttctatgaggacatgaaggagaaccccaagcgggagatccagaagatcctggagtttgtgggccgcagcctgcctgaggagaccgtggactttgtggtgcagcacaccagcttcaaggagatgaagaagaaccccatgaccaactacaccaccgtgccccaggagttcatggaccacagcatcagccccttcatgaggaagggcatggccggggactggaagaccaccttcaccgtggcccagaatgaaagatttgatgctgactatgcagagaagatggccggctgcagcctgtccttccgctctgagctgtag

SEQ ID NO: 252698 - DNA, 171 bp, Artificial Sequence
  derived and/or modified sequence
atgctggccaagctgctgtgcgaccaggtggtgggcgcccccatcgctgtgtctgcattctacgctgggatgtctattctgcagggaaaggatgatatcttcctggacctgaaacagaaattctggaatacttatatgcaaacccagtcctggctctggcggagcctatag

SEQ ID NO: 252699 - DNA, 654 bp, Artificial Sequence
  derived and/or modified sequence
atgctggccaagctgctgtgcgaccaggtggtgggcgcccccatcgccgtctccgcattttacgccggcatgtcaatcttacaagggaaagacgacatcttcttagacctcaaacagaaattctggaacacctatatggtagtctacgtagcccggaatgccaaggatgtcgctgtgagctattaccatttctatcatatggcgaaggtgcatcccgaaccgggcacttgggatagtttccttgagaaattcatggtgggcgaggtatcatatggtagctggtaccagcacgtccaggaatggtgggagctctctagaacgcacccagtgctgtatttgttctatgaggacatgaaggagaacccaaaacgcgaaatacagaaaatcttagagttcgtgggccgctccctcccagaggagacagtggacttcgtcgtgcagcacacctcatttaaggaaatgaagaagaatcccatgactaattacaccacagtaccacaggagttcatggaccattctatcagcccattcatgcggaagggcatggctggcgactggaagacaaccttcacagtggctcagaatgaacggttcgatgctgactatgctgaaaagatggccgggtgctcactttcgttccggtcggagttgtag

SEQ ID NO: 252700 - DNA, 171 bp, Artificial Sequence
  derived and/or modified sequence
atgctcgcaaagcttctgtgtgaccaagtggttggtgcgcctattgcagtaagtgctttctacgccggaatgtcaattctccagggtaaggatgacatcttccttgatctgaaacagaaattctggaatacttatatgcagacgcaatcttggctgtggaggtctctgtag

SEQ ID NO: 252701 - DNA, 654 bp, Artificial Sequence
  derived and/or modified sequence
atgcttgctaaactgctgtgtgatcaggtagtgggcgctcccatagctgtgtctgccttctacgccggaatgagcattcttcagggtaaggacgacatcttcctcgatcttaaacagaagttctggaacacatacatggtagtttacgttgctagaaacgccaaagacgtggcagtgagttactaccacttttatcacatggccaaagtccacccagaaccaggaacatgggattcattcctggagaaattcatggtcggtgaggtgtcatacggctcttggtaccagcatgtgcaggaatggtgggaactaagccgcacgcatccagtcctctacctcttctatgaggacatgaaagagaaccctaaaagagaaatacaaaagatattggagtttgtgggtagatcacttccagaagagactgttgacttcgtggtgcagcatacttcatttaaagagatgaaaaagaaccccatgaccaactacaccacagtgcctcaggagttcatggatcacagcatcagccccttcatgcggaaaggaatggccggagactggaagactactttcacggtcgcccagaacgagcgcttcgatgcagactatgccgagaaaatggctggttgctctctgtcattccggtccgagctgtag

SEQ ID NO: 252702 - DNA, 1282 bp, Artificial Sequence
  derived and/or modified sequence
ggctgctgcagcgcagtagctgctggaggctggcgaggcccggaggcggtgcaggaagcctccgaccacgcgggctcctgatcgcgggcgcccacagcgcggacatggcgggctggtggccggcgttgtcgcgcacggcccggcgccacccgtggcccaccaacgtgctgctctacgttgctcgagcaacgtagctctacgctctacgagcgtgccgtagctcgctcgtctccgccggggacgtgctgcagcaacggctgcagggccgctaggccgactggcgccagacgcggcgcgtggccacgttggtggtgaccttccacgccaacttcaactacgtgtggctgggcctgctggagcgcgcgctcccgggccgagcgccgcgcgccatgctggccaagttgctgtgcgaccaggtggtcggtgcgcccatcgcggtctcggccttctacgccggtatgagcattctccagggaaaggatgacatatttttggacctgaaacagaaattctggaacacctatatggtggtctatgttgcccgcaacgcaaaggatgtggcagtttcctactaccacttctaccacatggccaaggtgcaccctgagcctgggacctgggacagcttcctggagaagttcatggtcggagaagtgtcctacggatcctggtaccagcacgtgcaggagtggtgggagctgagccgcacccaccctgttctctacctcttctatgaagacatgaaggagaacccgaaaagggagattcaaaagatcctggagtttgtggggcgctccctgccagaggagaccgtggacttcgtggttcagcacacgtcgttcaaggagatgaagaagaaccctatgaccaactacaccaccgtcccccaggagttcatggaccacagcatctcccccttcatgaggaaaggcatggctggggactggaagaccaccttcaccgtggcgcagaatgagcgcttcgatgcggactatgcggagaagatggcaggctgcagcctcagcttccgctctgagctgtgagaggggctcctggagtcactgcagagggagtgtgcgaatcaaacctgaccaagcggctcaagaataaaatatgaattgagggcccgggacggtaggtcatgtctgtaatcccagcaatttggaggctgaggtgggaggatcatttgagcccaggagttcgagaccaacctgggcaacatagtgagattctgttaaaaaaataaaataaaataaaaccaatttttaaaaagagaataaaa

SEQ ID NO: 252703 - protein, 309 aa, Artificial Sequence
  derived and/or modified sequence
MGVARGPGSRGQHPPPRQQEVCAEGPRARLHPAPPGLGASLPFAILTLVNAPYKRGFYCGDDSIRYPYRPDTITHGLMAGVTITATVILVSAGEAYLVYTDRLYSRSDFNNYVAAVYKVLGTFLFGAAVSQSLTDLAKYMIGRLRPNFLAVCDPDWSRVNCSVYVQLEKVCRGNPADVTEARLSFYSGHSSFGMYCMVFLALYVQARLCWKWARLLRPTVQFFLVAFALYVGYTRVSDYKHHWSDVLVGLLQGALVAALTVCYISDFFKARPPQHCLKEEELERKPSLSLTLTLGEADHNHYGYPHSSS

SEQ ID NO: 252704 - DNA, 930 bp, Artificial Sequence
  derived and/or modified sequence
atgggcgtggccagaggccccggcagcagaggccagcaccccccccccagacagcaggaggtgtgcgccgagggccccagagccagactgcaccccgccccccccggcctgggcgccagcctgcccttcgccatcctgaccctggtgaacgccccctacaagagaggcttctactgcggcgacgacagcatcagatacccctacagacccgacaccatcacccacggcctgatggccggcgtgaccatcaccgccaccgtgatcctggtgagcgccggcgaggcctacctggtgtacaccgacagactgtacagcagaagcgacttcaacaactacgtggccgccgtgtacaaggtgctgggcaccttcctgttcggcgccgccgtgagccagagcctgaccgacctggccaagtacatgatcggcagactgagacccaacttcctggccgtgtgcgaccccgactggagcagagtgaactgcagcgtgtacgtgcagctggagaaggtgtgcagaggcaaccccgccgacgtgaccgaggccagactgagcttctacagcggccacagcagcttcggcatgtactgcatggtgttcctggccctgtacgtgcaggccagactgtgctggaagtgggccagactgctgagacccaccgtgcagttcttcctggtggccttcgccctgtacgtgggctacaccagagtgagcgactacaagcaccactggagcgacgtgctggtgggcctgctgcagggcgccctggtggccgccctgaccgtgtgctacatcagcgacttcttcaaggccagacccccccagcactgcctgaaggaggaggagctggagagaaagcccagcctgagcctgaccctgaccctgggcgaggccgaccacaaccactacggctacccccacagcagcagctag

SEQ ID NO: 252705 - DNA, 930 bp, Artificial Sequence
  derived and/or modified sequence
atgggagttgcccggggtcccgggtctcgcggacaacacccccctcccaggcagcaggaggtgtgcgccgaggggccccgtgccagactgcaccccgccccacctggcctcggggcctccctgccctttgccattctgaccctggtgaacgccccctacaagcggggcttttattgcggcgatgactccatacgctacccgtatcgacccgacaccattacacatggactgatggcaggagtaacaatcaccgcaaccgttatcctggtgtccgctggtgaagcatatttagtgtatactgaccgactgtatagtcggagcgactttaacaattatgtcgctgccgtttataaggtcctgggcaccttcctgtttggagctgctgtgtcgcagagcttaacagatctcgccaagtatatgatcggaaggcttagacctaacttcctggctgtctgcgatccagactggagtcgcgtcaattgcagtgtgtatgtccaattggaaaaagtgtgccgaggcaaccccgccgatgtaacagaagcccgtttatccttttatagcggccacagttctttcggcatgtattgcatggtctttctggctttgtatgttcaggcccgcctctgttggaagtgggcaaggctcctgcgcccaactgtccaatttttcctggtcgctttcgcattatatgtcggctacactcgtgtaagtgactataaacatcactggagtgatgtcctggtcgggttgctgcaaggcgcccttgtcgcagccctgacggtctgttatatcagtgatttcttcaaagctaggccaccccagcattgccttaaggaagaagaattagagcggaaaccatccctttcactgacgttgaccctgggggaggccgatcataatcactatgggtaccctcacagttcaagctag

SEQ ID NO: 252706 - DNA, 930 bp, Artificial Sequence
  derived and/or modified sequence
atgggcgtggcccggggccctggcagccggggccagcaccccccaccccggcagcaggaggtgtgtgccgagggcccccgggcccggctgcacccagcccctcctggcctgggcgccagcctgccctttgccatcctgaccctggtgaatgccccctacaagaggggcttctactgtggagatgacagcatccgctacccctacagaccagacaccatcacccacggcctgatggccggcgtgaccatcacagccaccgtcatcctggtgtctgctggggaggcctacctggtgtacacagaccggctgtacagcagaagtgacttcaacaactacgtggccgctgtgtacaaggtgctgggcaccttcctgtttggagctgctgtgtcccagagcctgacagacctggccaagtacatgattggccgcctgcggcccaacttcctggccgtgtgtgaccctgactggagccgggtgaactgcagcgtgtatgtgcagctggagaaggtgtgccggggcaacccagcagatgtgacagaggcccggctgtccttctacagcggccacagcagctttggcatgtactgcatggtgttcctggccctgtatgtgcaggcccggctgtgctggaagtgggcccggctgctgcggcccaccgtgcagttcttcctggtggcctttgccctgtatgtgggctacaccagggtgtctgactacaagcaccactggagcgatgtgctggtgggcctgctgcagggcgccctggtggccgccctgactgtgtgctacatcagtgacttcttcaaggcccggcccccccagcactgcctgaaggaggaggagctggagaggaagcccagcctgagcctgaccctgaccctgggggaggccgaccacaaccactacggctacccccacagcagcagctag

SEQ ID NO: 252707 - DNA, 930 bp, Artificial Sequence
  derived and/or modified sequence
atgggcgtggcccggggccccggcagccggggccagcacccccccccacggcagcaggaggtctgtgctgagggccctcgagcacgactgcatcccgcccccccagggctaggcgccagcctccccttcgcgattttgacactagtcaacgcaccatataagcgaggattttattgcggtgacgattctatcaggtacccatataggccagatacaatcactcatgggttaatggccggagtgaccattactgcaacagtgatcttggtctctgccggtgaggcctacctggtgtacaccgaccgtctctactcaagatccgattttaacaattatgtcgctgccgtctacaaagtccttggaactttcctcttcggcgctgctgtgtcccaatctcttacggacttagcaaagtacatgatcgggagactgcgaccgaactttctcgccgtctgtgatccggattggtcacgagtcaactgctctgtttatgtgcagctggaaaaagtgtgtcggggaaaccccgccgacgtaacagaggctagactgagcttttatagcggccactcatcgtttggaatgtattgcatggtgttcctggcactgtatgtgcaagctaggttgtgctggaaatgggcacggctactgcgacctactgtccagtttttcttggtggcattcgcgctttacgtaggatacaccagagtcagcgactacaaacatcactggagtgatgttctggtcgggctgctccagggcgctctcgtagccgccttaactgtgtgttatatttcagacttctttaaggcaaggcctccccaacactgcctcaaagaagaggagcttgagaggaaaccatctctgagcttaaccctgaccttgggcgaagcagatcacaatcattatggatatccacattccagttcttag

SEQ ID NO: 252708 - DNA, 1373 bp, Artificial Sequence
  derived and/or modified sequence
ccctggaggcggggacctcgcgtgaggaccagacctccctccgcgccccgcactgcgcgcgccctcccaggctcgggggtccccgcgtcccaggcccagggggatgggggtcgcgagaggcccggggagccggggccagcatcccccgccccggcagcaggaagtctgtgcggaggggccgcgcgcgcgcctccatcccgccccgcctggcctgggagcctccctgcccttcgctatcctgacgctggtgaacgccccgtacaagcgaggattttactgcggggatgactccatccggtacccctaccgtccagataccatcacccacgggctcatggctggggtcaccatcacggccaccgtcatccttgtctcggccggggaagcctacctggtgtacacagaccggctctattctcgctcggacttcaacaactacgtggctgctgtatacaaggtgctggggaccttcctgtttggggctgccgtgagccagtctctgacagacctggccaagtacatgattgggcgtctgaggcccaacttcctagccgtctgcgaccccgactggagccgggtcaactgctcggtctatgtgcagctggagaaggtgtgcaggggaaaccctgctgatgtcaccgaggccaggttgtctttctactcgggacactcttcctttgggatgtactgcatggtgttcttggcgctgtatgtgcaggcacgactctgttggaagtgggcacggctgctgcgacccacagtccagttcttcctggtggcctttgccctctacgtgggctacacccgcgtgtctgattacaaacaccactggagcgatgtccttgttggcctcctgcagggggcactggtggctgccctcactgtctgctacatctcagacttcttcaaagcccgacccccacagcactgtctgaaggaggaggagctggaacggaagcccagcctgtcactgacgttgaccctgggcgaggctgaccacaaccactatggatacccgcactcctcctcctgaggccggaccccgcccaggcagggagctgctgtgagtccagctgaggcccacccaggtggtccctccagccctggttaggcactgagggctctggacgggctccaggaaccctgggctgatgggagcagtgagcgggctccgctgccccctgccctgcactggaccaggagtctggagatgcctgggtagccctcagcatttggaggggaacctgttcccgtcggtccccaaatatccccttctttttatggggttaaggaagggaccgagagatcagatagttgctgttttgtaaaatgtaatgtatatgtggtttttagtaaaatagggcacctgtttc

SEQ ID NO: 252709 - DNA, 1265 bp, Artificial Sequence
  derived and/or modified sequence
ctcctctccgcgcggggcgggctccgcgccacgtgactccgcggccgggccgggacgcgacgggacgcgctgggaccggcgtcgggggtcgcggggaccatgcagcggagcctccctgcccttcgctatcctgacgctggtgaacgccccgtacaagcgaggattttactgcggggatgactccatccggtacccctaccgtccagataccatcacccacgggctcatggctggggtcaccatcacggccaccgtcatccttgtctcggccggggaagcctacctggtgtacacagaccggctctattctcgctcggacttcaacaactacgtggctgctgtatacaaggtgctggggaccttcctgtttggggctgccgtgagccagtctctgacagacctggccaagtacatgattgggcgtctgaggcccaacttcctagccgtctgcgaccccgactggagccgggtcaactgctcggtctatgtgcagctggagaaggtgtgcaggggaaaccctgctgatgtcaccgaggccaggttgtctttctactcgggacactcttcctttgggatgtactgcatggtgttcttggcgctgtatgtgcaggcacgactctgttggaagtgggcacggctgctgcgacccacagtccagttcttcctggtggcctttgccctctacgtgggctacacccgcgtgtctgattacaaacaccactggagcgatgtccttgttggcctcctgcagggggcactggtggctgccctcactgtctgctacatctcagacttcttcaaagcccgacccccacagcactgtctgaaggaggaggagctggaacggaagcccagcctgtcactgacgttgaccctgggcgaggctgaccacaaccactatggatacccgcactcctcctcctgaggccggaccccgcccaggcagggagctgctgtgagtccagctgaggcccacccaggtggtccctccagccctggttaggcactgagggctctggacgggctccaggaaccctgggctgatgggagcagtgagcgggctccgctgccccctgccctgcactggaccaggagtctggagatgcctgggtagccctcagcatttggaggggaacctgttcccgtcggtccccaaatatccccttctttttatggggttaaggaagggaccgagagatcagatagttgctgttttgtaaaatgtaatgtatatgtggtttttagtaaaatagggcacctgtttc

SEQ ID NO: 252710 - DNA, 930 bp, Artificial Sequence
  derived and/or modified sequence
atgggagtagctagaggacctggcagccgtggtcagcacccacccccaagacagcaggaggtatgtgcagagggaccccgagcgaggctccatcccgcaccacccggactgggggcttctctgccatttgccatcctgacactagtgaatgcaccttataaaaggggattttattgcggtgacgattcaatcaggtatccttatcgaccagatacaattacgcacggcctgatggccggagtgaccataaccgcaactgtgattctggtgagcgccggtgaagcttatttggtctacaccgaccggctgtactcccgcagtgattttaacaactatgttgccgcagtctacaaggttttgggcacattcctgttcggcgcagccgtatcccaatctctcaccgatctcgccaaatatatgatcggtaggttgcgcccaaacttcctcgccgtgtgtgatcctgactggtctagagtcaactgtagcgtctacgtgcagttggaaaaggtgtgtagaggcaaccctgccgatgttaccgaggcaagactgtctttctattcaggacatagctcttttggcatgtattgtatggtcttccttgctctatacgttcaagctcggttgtgttggaaatgggcgcgacttctccgccctacagtgcaattctttctggtggcatttgccctttatgtggggtacactcgagtgagcgactataagcatcactggtcagacgtgcttgtcggcctgctgcagggggcactggtcgcagccctgaccgtgtgttatatctcagactttttcaaggcacggccaccccagcactgtttgaaagaagaagaactggaacgtaagccttcgttgagtctgactcttaccctgggggaagcagatcataatcactatggctacccacacagcagtagctag

SEQ ID NO: 252711 - protein, 568 aa, Artificial Sequence [sequence omitted]

SEQ ID NO: 252712 - DNA, 1707 bp, Artificial Sequence
  derived and/or modified sequence
atggcgtcagccctgagctatgtctccaagtttaagtcctttgtaatattgtttgtgacccccttactgctgctccctctggtgatcttgatgccagccaagttcgttcggtgtgcctacgtgatcatcctcatggcgatctactggtgcactgaagtcatccccctggccgtcacatctctgatgcccgtcctgttattccccctgtttcagatattggatagtcgtcaggtttgtgtgcaatacatgaaagacaccaacatgttatttcttgggggcctgattgtggctgtagcagtggaacgctggaatctgcacaaaaggatagccctcagaactctcctttgggtgggcgcgaaacctgcacgtcttatgctggggtttatgggagtgacagccttgctgtccatgtggatctccaacaccgccactaccgccatgatggtgcccattgtcgaggcaatcttgcagcagatggaggcgacctctgcagctaccgaggcaggcttggagctggtggacaagggaaaagctaaagagttgcctggctcgcaagttattttcgagggccctactctgggccagcaggaagatcaggagaggaaaaggctgtgtaaagccatgaccctatgcatttgttacgcagcctccatcggtgggaccgcgacgctaaccgggacggggcctaatgtggtgcttttagggcagatgaacgagctgttcccagactctaaggatttggtaaacttcgcatcctggttcgccttcgcctttcccaacatgctggtgatgctcctctttgcctggctgtggctgcaatttgtgtatatgagatttaactttaagaaatcctggggctgtggtttggaatcgaagaagaatgagaaggcggcactgaaggtgttacaggaagaatacaggaagctcggtcccctgtcctttgccgagataaacgtgctaatttgcttcttcttgttggtgatcctctggtttagtagggatcccggattcatgccaggctggctgactgtcgcgtgggttgagggcgagaccaagtacgtatccgacgctactgtggcaattttcgtagccacattactttttattgtgccgtcgcagaagcccaaattcaactttcgttcgcagacggaagaggaacggaaaactcctttctatccccccccgctgcttgattggaaggtcacccaggaaaaagtgccttgggggatcgtccttcttttaggcggcgggtttgccttggccaagggatccgaggcctctggcttaagtgtttggatgggcaagcagatggagccgctgcacgcagtgcccccagccgctatcacactgatattatcgctgcttgtggcagtctttaccgaatgcactagtaatgtcgcaactaccacgcttttcttaccaattttcgcctcaatgagcaggtcaatcggtctgaatcccctttacatcatgcttccctgcacactttctgcttcgttcgcttttatgttgccggtagctacaccacccaatgcgattgtgttcacatatgggcacctcaaagtggccgatatggtcaagacgggcgtgatcatgaatatcataggtgtgttctgtgtgttcttggctgttaatacctggggccgtgctattttcgacttggatcacttccctgattgggccaacgtcacacatattgaaacctag

SEQ ID NO: 252713 - DNA, 1707 bp, Artificial Sequence
  derived and/or modified sequence
atggccagcgccctgtcctatgtgtccaagttcaagagctttgtgatcctgtttgtgacccccctgctgctgctgcccctggtgatcctgatgcctgccaagtttgtgcgctgtgcctacgtgatcatcctgatggccatctactggtgcacagaggtgatccccctggccgtgaccagcctgatgcctgtgctgctcttccccctcttccagatcctggacagccggcaggtgtgtgtgcagtacatgaaggacaccaacatgctgttcctgggcggcctgattgtggccgtggccgtggagcgctggaacctgcacaagagaattgccctgcggaccctgctgtgggtgggcgccaagccagcccggctgatgctgggcttcatgggcgtgacagccctgctgtccatgtggatcagcaacacagccaccacagccatgatggtgcccatcgtggaggccatcctgcagcagatggaggccaccagcgctgccacagaggccggcctggagctggtggacaagggcaaggccaaggagctgcccggcagccaggtgatctttgagggccccaccctgggccagcaggaggaccaggagaggaagaggctgtgcaaggccatgaccctgtgcatctgctatgctgccagcatcggcggcacagccaccctgactggaacaggccccaacgtggtgctgctgggccagatgaatgagctgttcccagacagcaaggacctggtgaactttgcctcctggtttgcctttgccttccccaacatgctggtgatgctgctgtttgcctggctgtggctgcagtttgtgtacatgaggttcaacttcaagaagtcctggggctgcggcctggagagcaagaagaatgagaaggccgccctgaaggtgctgcaggaggagtacaggaagctgggccccctgagctttgctgagatcaacgtgctgatctgcttcttcctgctggtgatcctgtggttcagccgggaccccggcttcatgcctggctggctgactgtggcctgggtggagggggagaccaagtatgtgtctgatgccaccgtggccatctttgtggccaccctgctcttcatcgtgcccagccagaagcccaagttcaacttccgcagccagacagaggaggagaggaagacccccttctaccccccacccctgctggactggaaggtgacccaggagaaggtgccctggggcatcgtgctgctgctgggcggcggctttgccctggccaagggcagcgaggccagcggcctgtctgtgtggatgggcaagcagatggagcccctgcatgctgtgcccccagctgccatcaccctcatcctgagcctgctggtggccgtgttcacagaatgtaccagcaatgtggccaccaccaccctcttcctgcccatctttgcctccatgagccgcagcatcggcctgaaccccctgtacatcatgctgccctgcaccctgagcgccagctttgccttcatgctgcctgtggccaccccaccaaatgccatcgtgttcacctacggccacctgaaggtggccgacatggtgaagacaggagtcatcatgaacatcattggagtcttctgtgtgttcctggccgtgaacacctggggccgggccatctttgacctggaccacttcccagactgggccaacgtgacccacatcgagacctag

SEQ ID NO: 252714 - DNA, 1707 bp, Artificial Sequence
  derived and/or modified sequence
atggccagcgccctgagctacgtgagcaagttcaagagcttcgtgatattgtttgtgactcctctcctccttcttccacttgtgatcttaatgcccgccaagtttgtcagatgtgcctatgtcattatattgatggcaatatattggtgcacagaggtcatccctctcgccgtaacttctttgatgcctgttctgctcttcccattatttcagatactagacagtcggcaagtgtgcgtgcaatatatgaaagatactaacatgctgtttttgggaggactgattgtggctgtagcagttgagcggtggaatcttcacaagagaatcgctctgcgcacactgctatgggttggtgcgaagccagccagactaatgctgggctttatgggcgtgactgcgcttttaagcatgtggatctcaaacacagctacaaccgcgatgatggtgccaattgtggaggcaatccttcagcaaatggaagccaccagcgcagccaccgaggcagggctggaactcgtcgataagggcaaggctaaagagctgcctggtagccaggtcattttcgaaggccccactctgggtcagcaagaggaccaggaaagaaagaggttatgcaaggctatgactctgtgcatctgttacgctgccagcattggcgggaccgcaacactgaccggaaccgggccaaacgtggtgcttctgggtcagatgaatgagttgttcccggattcaaaagatctggtaaactttgcatcgtggttcgcatttgcgtttccgaatatgctggtgatgctgctattcgcgtggttgtggctgcaatttgtttatatgagatttaatttcaagaagtcatggggttgcggcctcgaatcaaaaaaaaacgaaaaagctgcccttaaggtgctgcaggaggagtatagaaagctgggacctctttccttcgcggaaatcaatgtgctcatttgtttttttctgctggtaattttatggttctcccgggaccctggttttatgcccggatggttgaccgtggcgtgggttgagggggaaacgaaatacgtgagcgacgccacggtcgccatcttcgttgcaactctcctttttatagttccatcacaaaagcccaaatttaatttccggtcccagaccgaagaggaacggaagacgccattttatccccctccactcctggattggaaggtgacacaagaaaaagtgccttggggtattgtattgctgcttggcgggggattcgcccttgccaagggcagcgaagcatcaggtctgtctgtgtggatgggaaagcagatggaacccctccatgccgtcccccccgccgccataactctgatcctgagcctgctcgtggccgttttcacagagtgtactagcaacgtggccactaccacactctttcttccaattttcgctagcatgtcgcgctctattgggctgaatccactctacataatgcttccatgcaccctctccgcatcctttgcattcatgctgcccgtggcaactccccctaacgctattgtatttacctacgggcatcttaaagttgcggacatggtgaaaactggggtgatcatgaatattatcggggtcttctgtgtattcttagctgttaatacctgggggagggccatttttgatctggaccatttccccgattgggcaaacgtgactcacatagagacgtag

SEQ ID NO: 252715 - DNA, 1707 bp, Artificial Sequence
  derived and/or modified sequence
atggcaagtgccctttcttacgtgtctaagttcaaaagttttgtgatcctgtttgtcacgccactccttctactcccgctggttatccttatgcccgcaaaattcgtgcgatgtgcatacgtcatcattttgatggcaatctattggtgcacggaagtcattccgctggccgtgaccagtttgatgcctgttctgctgtttcccttattccaaattctggatagccgccaggtgtgtgtgcagtacatgaaagatacgaacatgctcttcctcgggggactaatcgtggcagttgccgttgagaggtggaacctccataagcgcatcgccctcaggacgctactgtgggtgggggctaagccagccaggttaatgttgggattcatgggggtgaccgccctcctatctatgtggatttcgaatactgctacaaccgcaatgatggtgccgatagtggaagctatccttcagcagatggaggctacctctgctgccacggaggctggattggagttagtggataagggtaaagccaaggaacttcctggaagtcaagtgatctttgagggcccaacactgggccagcaagaagatcaagaacgcaagcgtttatgtaaggctatgaccttatgcatatgttatgctgcaagcatcggcggtacagctaccctgacaggtacaggtccaaacgtggtgctgctgggccaaatgaatgagctattcccagactctaaagatttggtgaacttcgcttcttggttcgccttcgcttttcctaatatgctcgtgatgctccttttcgcttggctgtggctccagttcgtgtacatgagattcaacttcaagaaaagctggggttgtggtttagagagcaaaaagaatgaaaaggctgcattgaaggtgttgcaggaagaatataggaaattaggccctctgtcttttgccgaaatcaacgtgctcatttgtttcttcttattggtcatcctttggttcagcagagacccgggtttcatgccaggctggctcacagttgcctgggtagaaggcgagaccaaatatgtttctgacgctaccgtcgctatcttcgtagctacactgctgttcatcgttcccagtcagaagccaaaattcaacttcaggagccagacagaagaagagaggaagacccccttttatccgccaccattgctggactggaaggtgacacaagaaaaggtcccctggggaattgtgctgctgttgggcggaggtttcgccctggcaaaaggatctgaagcctctggtctgtccgtttggatggggaagcagatggagcccctgcatgccgtgccacccgcagctatcacactgatcttgtccctactcgtcgctgtcttcacagaatgtacctctaacgtggctactactactcttttcctccctatcttcgcttccatgtcacgtagtattggtctcaatcctttgtacataatgttgccgtgcaccctcagcgctagtttcgcctttatgctcccagtggccactccaccaaatgcaattgtcttcacgtacgggcacctaaaagtggcggacatggttaagacaggggtgattatgaacatcataggtgttttctgtgtgttcttggctgtgaatacatggggacgcgctatatttgacctggaccactttccagattgggcgaacgtgacccacattgaaacgtag

SEQ ID NO: 252716 - DNA, 3236 bp, Artificial Sequence
  derived and/or modified sequence
tcactcgtctcgcccgccagtctccctcccgcgcgatggcctcggcgctgagctatgtctccaagttcaagtccttcgtgatcttgttcgtcaccccgctcctgctgctgccactcgtcattctgatgcccgccaagtttgtcaggtgtgcctacgtcatcatcctcatggccatttactggtgcacagaagtcatccctctggctgtcacctctctcatgcctgtcttgcttttcccactcttccagattctggactccaggcaggtgtgtgtccagtacatgaaggacaccaacatgctgttcctgggcggcctcatcgtggccgtggctgtggagcgctggaacctgcacaagaggatcgccctgcgcacgctcctctgggtgggggccaagcctgcacggctgatgctgggcttcatgggcgtcacagccctcctgtccatgtggatcagtaacacggcaaccacggccatgatggtgcccatcgtggaggccatattgcagcagatggaagccacaagcgcagccaccgaggccggcctggagctggtggacaagggcaaggccaaggagctgccagggagtcaagtgatttttgaaggccccactctggggcagcaggaagaccaagagcggaagaggttgtgtaaggccatgaccctgtgcatctgctacgcggccagcatcgggggcaccgccaccctgaccgggacgggacccaacgtggtgctcctgggccagatgaacgagttgtttcctgacagcaaggacctcgtgaactttgcttcctggtttgcatttgcctttcccaacatgctggtgatgctgctgttcgcctggctgtggctccagtttgtttacatgagattcaattttaaaaagtcctggggctgcgggctagagagcaagaaaaacgagaaggctgccctcaaggtgctgcaggaggagtaccggaagctggggcccttgtccttcgcggagatcaacgtgctgatctgcttcttcctgctggtcatcctgtggttctcccgagaccccggcttcatgcccggctggctgactgttgcctgggtggagggtgagacaaagtatgtctccgatgccactgtggccatctttgtggccaccctgctattcattgtgccttcacagaagcccaagtttaacttccgcagccagactgaggaagaaaggaaaactccattttatccccctcccctgctggattggaaggtaacccaggagaaagtgccctggggcatcgtgctgctactagggggcggatttgctctggctaaaggatccgaggcctcggggctgtccgtgtggatggggaagcagatggagcccttgcacgcagtgcccccggcagccatcaccttgatcttgtccttgctcgttgccgtgttcactgagtgcacaagcaacgtggccaccaccaccttgttcctgcccatctttgcctccatgtctcgctccatcggcctcaatccgctgtacatcatgctgccctgtaccctgagtgcctcctttgccttcatgttgcctgtggccacccctccaaatgccatcgtgttcacctatgggcacctcaaggttgctgacatggtgaaaacaggagtcataatgaacataattggagtcttctgtgtgtttttggctgtcaacacctggggacgggccatatttgacttggatcatttccctgactgggctaatgtgacacatattgagacttaggaagagccacaagaccacacacacagcccttaccctcctcaggactaccgaaccttctggcacaccttgtacagagttttggggttcacaccccaaaatgacccaacgatgtccacacaccaccaaaacccagccaatgggccacctcttcctccaagcccagatgcagagatggtcatgggcagctggagggtaggctcagaaatgaagggaacccctcagtgggctgctggacccatctttcccaagccttgccattatctctgtgagggaggccaggtagccgagggatcaggatgcaggctgctgtacccgctctgcctcaagcatcccccacacagggctctggttttcactcgcttcgtcctagatagtttaaatgggaatcggatcccctggttgagagctaagacaaccacctaccagtgcccatgtcccttccagctcaccttgagcagcctcagatcatctctgtcactctggaagggacaccccagccagggacggaatgcctggtcttgagcaacctcccactgctggagtgcgagtgggaatcagagcctcctgaagcctctgggaactcctcctgtggccaccaccaaaggatgaggaatctgagttgccaacttcaggacgacacctggcttgccacccacagtgcaccacaggccaacctacgcccttcatcacttggttctgttttaatcgactggccccctgtcccacctctccagtgagcctccttcaactccttggtcccctgttgtctgggtcaacatttgccgagacgccttggctggcaccctctggggtcccccttttctcccaggcaggtcatcttttctgggagatgcttcccctgccatccccaaatagctaggatcacactccaagtatgggcagtgatggcgctctgggggccacagtgggctatctaggccctccctcacctgaggcccagagtggacacagctgttaatttccactggctatgccacttcagagtctttcatgccagcgtttgagctcctctgggtaaaatcttccctttgttgactggccttcacagccatggctggtgacaacagaggatcgttgagattgagcagcgcttggtgatctctcagcaaacaacccctgcccgtgggccaatctacttgaagttactcggacaaagaccccaaagtggggcaacaactccagagaggctgtgggaatcttcagaacccccctgtaagagacagacatgagagacaagcatcttctttcccccgcaagtccattttatttccttcttgtgctgctctggaagagaggcagtagcaaagagatgagctcctggatggcattttccagggcaggagaaagtatgagagcctcaggaaaccccatcaaggaccgagtatgtgtctggttccttgggtgggacgattcctgaccacactgtccagctcttgctctcattaaatgctctgtctcccgcggaaagctcca

SEQ ID NO: 252717 - DNA, 1707 bp, Artificial Sequence
  derived and/or modified sequence
atggccagcgccctgagctacgtgagcaagttcaagagcttcgtgatcctgttcgtgacccccctgctgctgctgcccctggtgatcctgatgcccgccaagttcgtgagatgcgcctacgtgatcatcctgatggccatctactggtgcaccgaggtgatccccctggccgtgaccagcctgatgcccgtgctgctgttccccctgttccagatcctggacagcagacaggtgtgcgtgcagtacatgaaggacaccaacatgctgttcctgggcggcctgatcgtggccgtggccgtggagagatggaacctgcacaagagaatcgccctgagaaccctgctgtgggtgggcgccaagcccgccagactgatgctgggcttcatgggcgtgaccgccctgctgagcatgtggatcagcaacaccgccaccaccgccatgatggtgcccatcgtggaggccatcctgcagcagatggaggccaccagcgccgccaccgaggccggcctggagctggtggacaagggcaaggccaaggagctgcccggcagccaggtgatcttcgagggccccaccctgggccagcaggaggaccaggagagaaagagactgtgcaaggccatgaccctgtgcatctgctacgccgccagcatcggcggcaccgccaccctgaccggcaccggccccaacgtggtgctgctgggccagatgaacgagctgttccccgacagcaaggacctggtgaacttcgccagctggttcgccttcgccttccccaacatgctggtgatgctgctgttcgcctggctgtggctgcagttcgtgtacatgagattcaacttcaagaagagctggggctgcggcctggagagcaagaagaacgagaaggccgccctgaaggtgctgcaggaggagtacagaaagctgggccccctgagcttcgccgagatcaacgtgctgatctgcttcttcctgctggtgatcctgtggttcagcagagaccccggcttcatgcccggctggctgaccgtggcctgggtggagggcgagaccaagtacgtgagcgacgccaccgtggccatcttcgtggccaccctgctgttcatcgtgcccagccagaagcccaagttcaacttcagaagccagaccgaggaggagagaaagacccccttctaccccccccccctgctggactggaaggtgacccaggagaaggtgccctggggcatcgtgctgctgctgggcggcggcttcgccctggccaagggcagcgaggccagcggcctgagcgtgtggatgggcaagcagatggagcccctgcacgccgtgccccccgccgccatcaccctgatcctgagcctgctggtggccgtgttcaccgagtgcaccagcaacgtggccaccaccaccctgttcctgcccatcttcgccagcatgagcagaagcatcggcctgaaccccctgtacatcatgctgccctgcaccctgagcgccagcttcgccttcatgctgcccgtggccaccccccccaacgccatcgtgttcacctacggccacctgaaggtggccgacatggtgaagaccggcgtgatcatgaacatcatcggcgtgttctgcgtgttcctggccgtgaacacctggggcagagccatcttcgacctggaccacttccccgactgggccaacgtgacccacatcgagacctag

SEQ ID NO: 252718 - protein, 363 aa, Artificial Sequence [sequence omitted]

SEQ ID NO: 252719 - DNA, 1092 bp, Artificial Sequence
  derived and/or modified sequence
atgaacagacaccacctgcaggaccacttcctggagatcgacaagaagaactgctgcgtgttcagagacgacttcatcgtgaaggtgctgccccccgtgctgggcctggagttcatcttcggcctgctgggcaacggcctggccctgtggatcttctgcttccacctgaagagctggaagagcagcagaatcttcctgttcaacctggccgtggccgacttcctgctgatcatctgcctgcccttcctgatggacaactacgtgagaagatgggactggaagttcggcgacatcccctgcagactgatgctgttcatgctggccatgaacagacagggcagcatcatcttcctgaccgtggtggccgtggacagatacttcagagtggtgcacccccaccacgccctgaacaagatcagcaacagaaccgccgccatcatcagctgcctgctgtggggcatcaccatcggcctgaccgtgcacctgctgaagaagaagatgcccatccagaacggcggcgccaacctgtgcagcagcttcagcatctgccacaccttccagtggcacgaggccatgttcctgctggagttcttcctgcccctgggcatcatcctgttctgcagcgccagaatcatctggagcctgagacagagacagatggacagacacgccaagatcaagagagccatcaccttcatcatggtggtggccatcgtgttcgtgatctgcttcctgcccagcgtggtggtgagaatcagaatcttctggctgctgcacaccagcggcacccagaactgcgaggtgtacagaagcgtggacctggccttcttcatcaccctgagcttcacctacatgaacagcatgctggaccccgtggtgtactacttcagcagccccagcttccccaacttcttcagcaccctgatcaacagatgcctgcagagaaagatgaccggcgagcccgacaacaacagaagcaccagcgtggagctgaccggcgaccccaacaagaccagaggcgcccccgaggccctgatggccaacagcggcgagccctggagccccagctacctgggccccaccagcccctag

SEQ ID NO: 252720 - DNA, 1092 bp, Artificial Sequence
  derived and/or modified sequence
atgaacaggcatcatctgcaggaccactttttagagatcgacaaaaagaactgttgtgtgttccgggatgacttcattgtaaaagtcctgcccccggtgctcggactggaatttatcttcggcctccttggcaacggtctggctttatggatcttctgtttccatttaaagtcctggaagtcctccaggatctttttatttaacttagccgtggccgattttctgcttataatctgccttccattcttaatggataattacgtgaggagatgggactggaaattcggggatatcccttgccgactgatgctctttatgttagccatgaaccgccaaggtagcattatattccttacggtggttgcagtagatcgatactttcgcgtagtgcacccacaccatgctctgaataaaatttctaacaggacagcggcaataatttcatgtctgctttggggtattacaatcgggctcaccgtgcacctgctcaagaaaaaaatgcccattcaaaacgggggtgccaacctatgctcctcctttagtatttgtcatactttccagtggcatgaagccatgttcctgctggaatttttcctgcctttgggcatcatcctcttttgtagtgctaggattatttggagcttgcgacaaagacaaatggatcgtcatgccaagatcaaaagagccatcactttcatcatggtggtggccatcgtgtttgtcatctgctttctaccttctgtagttgtaaggattaggatattctggctgcttcataccagtgggacacagaattgcgaagtgtatcggtcagtcgacctcgcgttttttattactctttccttcacctacatgaactctatgctggatcccgtcgtgtactacttctcgtcccctagtttccccaacttcttcagtacactcatcaaccggtgtctgcagcgcaagatgacgggcgagcccgacaacaataggtccacatctgtcgaactaacaggggaccccaataagacaaggggggcaccagaggccctaatggccaacagcggagaaccctggagccccagttatctcgggccaacctcaccctag

SEQ ID NO: 252721 - DNA, 2051 bp, Artificial Sequence
  derived and/or modified sequence
cacctccttgctggagcattcactaggcgaggcgctccatcggactcactagccgcactcatgaatcggcaccatctgcaggatcactttctggaaatagacaagaagaactgctgtgtgttccgagatgacttcattgtcaaggtgttgccgccggtgttggggctggagtttatcttcgggcttctgggcaatggccttgccctgtggattttctgtttccacctcaagtcctggaaatccagccggattttcctgttcaacctggcagtggctgactttctactgatcatctgcctgcccttcctgatggacaactatgtgaggcgttgggactggaagtttggggacatcccttgccggctgatgctcttcatgttggctatgaaccgccagggcagcatcatcttcctcacggtggtggcggtagacaggtatttccgggtggtccatccccaccacgccctgaacaagatctccaatcggacagcagccatcatctcttgccttctgtggggcatcactattggcctgacagtccacctcctgaagaagaagatgccgatccagaatggcggtgcaaatttgtgcagcagcttcagcatctgccataccttccagtggcacgaagccatgttcctcctggagttcttcctgcccctgggcatcatcctgttctgctcagccagaattatctggagcctgcggcagagacaaatggaccggcatgccaagatcaagagagccatcaccttcatcatggtggtggccatcgtctttgtcatctgcttccttcccagcgtggttgtgcggatccgcatcttctggctcctgcacacttcgggcacgcagaattgtgaagtgtaccgctcggtggacctggcgttctttatcactctcagcttcacctacatgaacagcatgctggaccccgtggtgtactacttctccagcccatcctttcccaacttcttctccactttgatcaaccgctgcctccagaggaagatgacaggtgagccagataataaccgcagcacgagcgtcgagctcacaggggaccccaacaaaaccagaggcgctccagaggcgttaatggccaactccggtgagccatggagcccctcttatctgggcccaacctctccttaaataaccatgccaagaagggacattgtcaccaagaaccaggatctctggagaaacagttgggctgttgcatcgagtaatgtcactggactcggcctaaggtttcctggaacttccagattcagagaatgcgatttagggaaacggtggcagatgagtgggagactggttgcaaggtgtgaccgcaggaatcctggaggaatagagagtaaagcttctaggcatctgaaacttttgcttcatctctgacgctcgcaggactgaagatgggcaaattgtaggcatttctgctgagcagagttggagccagagatctacttgtgacttgttggccttcttcccacatctgcctcagactggagggggctcagctcctggggtgatatctagcctgcttgtgagctctagcagggataaggagagctgagattggagggaattgtgttgctcctggagggagcccaggcatcattaaacaagccagtaggtcacctggcttccgtggaccaattcatctttcagacaagctttagcagaaatggactcagggaagagactcacacgctttggttaatatctgtgtttccggtgggtgtaataggggattagccccagaagggactgagctaaacagtgttattatgggaaaggaaatggcattgctgctttcaaccagcgactaatgcaatccattcctctcttgtttatagtaatctaagggttgggcagttaaaacggcttcaggatagaaagctgtttcccacctctgtttgcttttaacattaaaagggaaatgtgcctctgccccacagttagaggggtgcacgttcctcctggttccttcgcttgtgtttctgtacttaccaaaaatctaccatttcaataaattttgataggagaca

SEQ ID NO: 252722 - DNA, 1092 bp, Artificial Sequence
  derived and/or modified sequence
atgaacagacaccacctgcaggaccacttcctggagattgacaagaagaactgctgcgtgttcagagatgacttcatcgtgaaggtgctgccccctgtgctgggcctggagttcatcttcggcctgctgggcaatggcctggccctgtggatcttctgcttccacctgaagtcctggaagagcagccgcatcttcctgttcaacctggccgtggccgacttcctgctgatcatctgcctgcccttcctgatggacaactacgtgcggcgctgggactggaagtttggagacatcccctgccgcctgatgctgttcatgctggccatgaaccggcagggcagcatcatcttcctgactgtggtggccgtggaccgctacttccgggtggtgcacccccaccacgccctgaacaagatcagcaacagaacagctgccatcatcagctgcctgctgtggggcatcaccatcggcctgactgtgcacctgctgaagaagaagatgcccatccagaatggaggagccaacctgtgcagcagcttcagcatctgccacaccttccagtggcatgaggccatgttcctgctggagttcttcctgcccctgggcatcatcctcttctgcagcgcccgcatcatctggagcctgcggcagaggcagatggacagacatgccaagatcaagagggccatcaccttcatcatggtggtggccatcgtgtttgtgatctgcttcctgcccagcgtggtggtgcgcatccgcatcttctggctgctgcacaccagcggcacccagaactgtgaggtgtacagatctgtggacctggccttcttcatcaccctgtccttcacctacatgaacagcatgctggaccctgtggtgtactacttcagcagccccagcttccccaacttcttcagcaccctcatcaaccgctgcctgcagaggaagatgaccggggagccagacaacaacagaagcacctctgtggagctgaccggggaccccaacaagaccaggggggcccctgaggccctgatggccaacagcggggagccctggagccccagctacctgggccccaccagcccctag

SEQ ID NO: 252723 - DNA, 1092 bp, Artificial Sequence
  derived and/or modified sequence
atgaaccggcaccacctgcaggaccacttcctggagatcgacaagaagaattgctgcgtgtttagagatgactttatcgtgaaggtcctgccacctgtgttgggcctcgaatttatcttcggccttctgggtaatggtctcgccctgtggatcttttgtttccatctgaaaagttggaagagctccagaatttttctatttaatctggctgtggccgacttcctattgattatctgcctgccttttctcatggacaactacgttcggagatgggattggaaatttggcgatattccatgtcggctgatgctgtttatgctcgctatgaatcgccaaggtagcataatctttttaaccgtggtggcagtcgacagatatttccgagtggtgcatccccatcacgcactgaataagataagtaataggaccgccgccattatttcatgcttgctgtggggcataacaatcggtttgacagtccacctcctgaagaagaagatgcctattcagaacggaggggctaatttatgcagttcgttcagcatctgccacactttccagtggcatgaggccatgtttctgctagagttctttctgcccttgggcattatcttgttctgctctgcccgcatcatctggtcactgaggcaacggcagatggatagacatgcaaaaattaagcgggctattacctttattatggtggtagcaatcgttttcgttatctgttttttaccttcggtggttgttaggatacggatcttttggctgcttcacacgagcggtacccagaattgcgaggtgtataggagcgtggatttagcatttttcataaccctcagtttcacatatatgaatagtatgctcgacccagttgtctattatttctcaagcccaagctttcccaactttttttcgactctgatcaatcgatgcctgcagcggaagatgactggggagcccgataacaatcgcagtacctctgtggagctaacgggggatcctaacaagaccaggggggcaccggaagcccttatggcgaacagtggtgaaccctggtcaccatcctatctaggacctaccagcccctag

SEQ ID NO: 252724 - DNA, 1092 bp, Artificial Sequence
  derived and/or modified sequence
atgaacagacaccacctgcaagaccactttctggagatcgataagaaaaattgctgtgtatttcgtgacgatttcatcgtcaaagtgctcccccctgttctcggactggaatttatttttggtctgcttgggaatggcctggccctctggattttctgctttcacttaaagagctggaaatcatctagaatatttttattcaaccttgcggtggcagactttttgcttatcatttgcctgcccttcctgatggacaactatgtgcgcaggtgggactggaaattcggcgacatcccctgcaggttaatgctttttatgttagctatgaacaggcagggaagcatcatttttttaacagtggttgcagtagacaggtactttagagtagtacacccccatcacgcattgaataagatctctaacagaacggccgctataatctcctgcctgctgtggggtataaccattggccttacagttcatcttcttaagaagaagatgccaattcagaacggtggtgcaaacctatgctccagcttttctatttgtcatacatttcagtggcatgaagcaatgtttctgcttgagtttttcctacccctggggataatattgttttgcagcgcccgtatcatttggtcattacgccagaggcagatggaccgccatgctaagatcaagagggcaattaccttcattatggtggtagctattgtgttcgtgatatgctttctgcctagcgtggtggtcaggatacggatattctggctgctccacacatccggaactcagaactgtgaggtctacaggtcagtagacctggctttcttcataactctatcctttacgtatatgaactcaatgctggaccccgtggtgtattacttctcttctccctcatttcctaacttttttagtaccctcatcaatcggtgtttacagcgcaagatgacaggtgaacctgacaacaatcgaagcacaagtgtcgaactgacgggagatccaaataaaacccgaggcgctccggaggccttgatggcaaacagtggcgagccatggtccccctcctacctaggccctacctccccgtag

SEQ ID NO: 252725 - protein, 309 aa, Artificial Sequence
  derived and/or modified sequence
MDRRNDYGYRVPLFQSKHLNGDERSGSNYRRIPWGRRPAPPRDVAILQERANKLVKYLLVKDQTKIPIKRSDMLRDVIQEYDEYFPEIIERASYTLEKMFRVNLKEIDKQSSLYILISTQESSAGILGTTKDTPKLGLLMVILSVIFMNGNKASEAVIWEVLRKLGLRPGVRHSLFGEVRKLITDEFVKQKYLEYKRVPNSRPPEYEFFWGLRSYHETSKMKVLKFACRVQKKDPKDWAVQYREAVEMEVQAAAVAVAEAEARAEIYSPCLQIPLINCSSPSHGAKVHPWNLCPHSSQGSYGQSAEGVM

SEQ ID NO: 252726 - DNA, 1074 bp, Artificial Sequence
  derived and/or modified sequence
atggacagaagaaacgactacggctacagagtgcccctgttccagagcaagcacctgaacggcgacgagagaagcggcagcaactacagaagaatcccctggggcagaagacccgccccccccagagacgtggccatcctgcaggagagagccaacaagctggtgaagtacctgctggtgaaggaccagaccaagatccccatcaagagaagcgacatgctgagagacgtgatccaggagtacgacgagtacttccccgagatcatcgagagagccagctacaccctggagaagatgttcagagtgaacctgaaggagatcgacaagcagagcagcctgtacatcctgatcagcacccaggagagcagcgccggcatcctgggcaccaccaaggacacccccaagctgggcctgctgatggtgatcctgagcgtgatcttcatgaacggcaacaaggccagcgaggccgtgatctgggaggtgctgagaaagctgggcctgagacccggcgtgagacacagcctgttcggcgaggtgagaaagctgatcaccgacgagttcgtgaagcagaagtacctggagtacaagagagtgcccaacagcagaccccccgagtacgagttcttctggggcctgagaagctaccacgagaccagcaagatgaaggtgctgaagttcgcctgcagagtgcagaagaaggaccccaaggactgggccgtgcagtacagagaggccgtggagatggaggtgcagctgcagctgtggctgtggctgagactgaagcccggcctgagcggcagcaacaccagcaccggcttcaccggcgagcccagcaccagcaccggcttcagcagcggccccagcagcatcgtgggcttcagcggcggccccagcaccggcgtgggcttctgcagcggccccagcaccagcggcttcagcggcggccccagcaccggcgccggcttcggcggcggccccaacaccggcgccggcttcggcggcggccccagcaccagcgccggcttcggcagcggcgccgccagcctgggcgcctgcggcttcagctacggctag

SEQ ID NO: 252727 - DNA, 930 bp, Artificial Sequence
  derived and/or modified sequence
atggacagaagaaacgactacggctacagagtgcccctgttccagagcaagcacctgaacggcgacgagagaagcggcagcaactacagaagaatcccctggggcagaagacccgccccccccagagacgtggccatcctgcaggagagagccaacaagctggtgaagtacctgctggtgaaggaccagaccaagatccccatcaagagaagcgacatgctgagagacgtgatccaggagtacgacgagtacttccccgagatcatcgagagagccagctacaccctggagaagatgttcagagtgaacctgaaggagatcgacaagcagagcagcctgtacatcctgatcagcacccaggagagcagcgccggcatcctgggcaccaccaaggacacccccaagctgggcctgctgatggtgatcctgagcgtgatcttcatgaacggcaacaaggccagcgaggccgtgatctgggaggtgctgagaaagctgggcctgagacccggcgtgagacacagcctgttcggcgaggtgagaaagctgatcaccgacgagttcgtgaagcagaagtacctggagtacaagagagtgcccaacagcagaccccccgagtacgagttcttctggggcctgagaagctaccacgagaccagcaagatgaaggtgctgaagttcgcctgcagagtgcagaagaaggaccccaaggactgggccgtgcagtacagagaggccgtggagatggaggtgcaggccgccgccgtggccgtggccgaggccgaggccagagccgagatctacagcccctgcctgcagatccccctgatcaactgcagcagccccagccacggcgccaaggtgcacccctggaacctgtgcccccacagcagccagggcagctacggccagagcgccgagggcgtgatgtag

SEQ ID NO: 252728 - DNA, 1074 bp, Artificial Sequence
  derived and/or modified sequence
atggatagacgcaatgattatggctatcgagtgccactcttccagagcaaacatctcaacggggacgaacggtccggctccaattaccgtcgaattccatggggccggagaccggcacccccccgtgacgttgcaatcctgcaggagagggcgaacaagctggtgaagtacctgctcgtgaaggatcagaccaaaattccgatcaaacgctccgatatgttacgcgacgtaatccaggagtatgatgagtacttcccagaaatcattgaacgcgcttcttacactctggagaagatgttcagggtcaaccttaaagaaatagataaacaatcttctctgtacatccttatatctacccaggagagtagtgccggcattctggggaccactaaggatacccctaaattagggctgttgatggtcatcctgtctgtaatctttatgaatgggaataaggcaagcgaggccgttatctgggaggtgctcagaaagctagggctcaggccaggagtccgccactctctgtttggagaggtgaggaaactgataaccgatgagtttgtcaagcaaaaatacctagagtataagagagtgcccaactctcgtccaccagaatacgagttcttctggggtctcaggtcctatcacgagacctccaagatgaaggtgctgaagtttgcctgccgggtgcaaaaaaaggacccaaaggattgggcagtccagtacagggaggccgttgaaatggaagttcagctgcagctgtggctgtggttgcggttaaaacccggtctgtcaggcagcaataccagcacaggatttactggcgaaccctctactagcactgggttttcctcaggtccctcttccatcgtcggcttcagcgggggtcccagcacaggggtcgggttctgttctggtccaagtacctccggatttagcggcgggccatccaccggagcaggctttggaggcggaccaaacaccggagcaggctttggcggtggtccgtccactagcgccggcttcgggtccggagcagccagcttgggcgcttgtggattctcttatggctag

SEQ ID NO: 252729 - DNA, 930 bp, Artificial Sequence
  derived and/or modified sequence
atggatcgccggaacgattacgggtatagagtgcccctgttccagtctaaacacttgaatggagacgagcgatcaggaagcaactaccgaagaattccttggggtaggaggcctgcccccccacgtgatgtagccatccttcaggaacgcgccaacaagctagtgaagtatcttctggttaaagaccagacgaagatccccattaagcggtccgacatgttgcgcgatgtgatccaggagtacgacgaatacttccccgaaattattgaaagggcttcctacacattggagaagatgtttagggtcaatctgaaggagatcgataaacagagctcactgtatatcctaatctccacgcaggagtctagcgccggaattctgggcacaactaaggacaccccgaaattaggcctgctgatggtaattctaagcgtgatattcatgaacggaaataaagcctcggaggccgttatctgggaggtgctgaggaagctgggtctgcggccaggagtccggcatagtctgttcggggaagtcagaaagctaattacagacgagttcgttaagcagaaatacctggaatacaagagggtccctaattcacggccccctgaatacgaattcttttggggcctgaggtcctaccacgagacatcaaagatgaaggtactcaagtttgcttgtcgtgtccaaaagaaagatccgaaagattgggcagtgcaatacagggaggccgtcgaaatggaagtacaggccgcagctgtggcagttgctgaggcggaagctcgcgctgagatctacagtccctgtctgcagataccgctcatcaactgctccagcccatcccacggcgccaaggttcatccgtggaacctgtgtccacacagctcccaggggagttacggccagtccgctgagggggtaatgtag

SEQ ID NO: 252730 - DNA, 1074 bp, Artificial Sequence
  derived and/or modified sequence
atggacagaagaaatgactatggctacagagtgcccctcttccagagcaagcacctgaatggagatgagaggagcggcagcaactaccgccgcatcccctggggccggcggcctgcccccccaagagatgtggccatcctgcaggagcgggccaacaagctggtgaagtacctgctggtgaaggaccagaccaagatccccatcaagagaagtgacatgctgagagatgtgatccaggagtatgatgagtacttccctgagatcatcgagcgggccagctacaccctggagaagatgttccgggtgaacctgaaggagattgacaagcagagcagcctgtacatcctgatcagcacccaggagagcagcgctggcatcctgggcaccaccaaggacacccccaagctgggcctgctgatggtgatcctgagcgtcatcttcatgaatggaaacaaggccagcgaggccgtcatctgggaggtgctgaggaagctgggcctgcggcctggggtgcgccacagcctgtttggagaggtgaggaagctgatcacagatgaatttgtgaagcagaagtacctggagtacaagagggtgcccaacagccggcccccagaatatgagttcttctggggcctgcggagctaccacgagaccagcaagatgaaggtgctgaagtttgcctgccgggtgcagaagaaggaccccaaggactgggccgtgcagtaccgggaggccgtggagatggaggtgcagctgcagctgtggctgtggctgcggctgaagccaggcctgagcggcagcaacaccagcacaggcttcaccggggagcccagcaccagcacaggcttcagcagcggccccagcagcatcgtgggcttcagcggcggccccagcactggagtgggcttctgcagcggccccagcaccagcggcttcagcggcggccccagcactggagctggctttggaggcggccccaacacaggagctggctttggaggcggccccagcaccagcgctggcttcggcagcggggccgccagcctgggcgcctgtggcttctcctatggatag

SEQ ID NO: 252731 - DNA, 930 bp, Artificial Sequence
  derived and/or modified sequence
atggacagaagaaatgactatggctacagagtgcccctcttccagagcaagcacctgaatggagatgagaggagcggcagcaactaccgccgcatcccctggggccggcggcctgcccccccaagagatgtggccatcctgcaggagcgggccaacaagctggtgaagtacctgctggtgaaggaccagaccaagatccccatcaagagaagtgacatgctgagagatgtgatccaggagtatgatgagtacttccctgagatcatcgagcgggccagctacaccctggagaagatgttccgggtgaacctgaaggagattgacaagcagagcagcctgtacatcctgatcagcacccaggagagcagcgctggcatcctgggcaccaccaaggacacccccaagctgggcctgctgatggtgatcctgagcgtcatcttcatgaatggaaacaaggccagcgaggccgtcatctgggaggtgctgaggaagctgggcctgcggcctggggtgcgccacagcctgtttggagaggtgaggaagctgatcacagatgaatttgtgaagcagaagtacctggagtacaagagggtgcccaacagccggcccccagaatatgagttcttctggggcctgcggagctaccacgagaccagcaagatgaaggtgctgaagtttgcctgccgggtgcagaagaaggaccccaaggactgggccgtgcagtaccgggaggccgtggagatggaggtgcaggccgctgctgtggccgtggccgaggccgaggcccgggcagagatctacagcccctgcctgcagatccccctcatcaactgcagcagccccagccatggagccaaggtgcacccctggaacctgtgcccccacagcagccagggcagctatggccagagcgctgagggcgtgatgtag

SEQ ID NO: 252732 - DNA, 1074 bp, Artificial Sequence
  derived and/or modified sequence
atggaccggcggaacgactacggctaccgggtgcccctgttccagtcaaagcatctgaatggtgatgagaggagcggctcaaactaccggcgcataccttggggacgaagacccgctcctccacgcgacgtggccatactgcaggaacgggctaataagttggtgaaatacctgctcgtcaaggatcagaccaagattcctattaaaagaagcgatatgcttcgggatgtgattcaggagtatgacgagtacttccctgagatcattgaacgggcatcctacaccctggagaagatgtttagagttaatctaaaagagattgataaacaatccagcttatatattctgatctccacccaggagagctctgccggcatcctcgggacaactaaggatacccccaaactgggtctgcttatggtgatcctgagcgtgatatttatgaacgggaacaaggcctccgaggccgttatttgggaggtcctgaggaagctcggcttacgccctggcgttagacacagcctctttggtgaggttagaaagctcatcacggacgaattcgttaagcaaaagtacctggagtacaagagagtcccgaactctcgacctcctgaatacgaatttttctggggactccgctcctaccatgagacctctaagatgaaagtgttaaaattcgcctgtcgtgtccagaaaaaagatccaaaagattgggccgtgcaataccgagaggccgttgagatggaggtgcagctgcagctgtggctgtggttacggctgaaaccaggactgagtgggagtaatacctccacagggtttaccggcgagccttctacctcaaccggttttagctcaggaccaagcagcatcgtgggcttttccggcggccctagcaccggcgtcggattttgcagcggcccttccacatctggtttttccggggggccgtctactggggcgggattcggcgggggacccaacaccggggctggcttcggaggcggcccttccacctcagctggctttggcagcggagcagctagtctcggggcgtgcgggttttcctacgggtag

SEQ ID NO: 252733 - DNA, 930 bp, Artificial Sequence
  derived and/or modified sequence
atggaccggcggaacgactacggctaccgggtgcccctgttccagtcaaaacacctaaatggggacgagcgctccggaagtaattaccgtcgcatcccgtggggacgccggcccgcccccccaagagacgtagccatcctgcaggaaagggccaacaagctggtgaaatacctactggtaaaggaccagactaagataccaattaaacgaagcgacatgctgcgggacgtgatccaagaatacgacgagtacttccctgaaatcatcgagcgcgcaagttacactctagagaaaatgttccgggtcaaccttaaggaaattgataagcagagcagcctctacatactgatcagtacccaggaaagtagcgcaggcatattaggcaccacaaaagacactccaaagcttggcctgctgatggtgattctcagtgtgatcttcatgaacggcaacaaggcttcagaagctgttatttgggaggtgttgcggaagttaggtctacggccaggtgtgcggcacagtctgttcggggaggtgagaaaactcatcaccgacgagtttgttaaacaaaaatacctcgaatacaaaagagtaccgaactcccgtccaccagaatacgaattcttctggggacttaggtcataccacgagacaagcaagatgaaagtgttgaagtttgcatgtcgcgttcagaagaaagaccctaaagactgggcagttcagtatcgggaagctgtcgaaatggaggtccaggcggcagccgtcgctgttgctgaggccgaagcccgagcagagatctacagcccctgcctccaaatccctctgattaattgttcctcaccttcacatggagctaaagtccatccctggaacctttgtccccactcatcacagggctcatacggacaaagcgccgagggagtaatgtag

SEQ ID NO: 252734 - DNA, 1074 bp, Artificial Sequence
  derived and/or modified sequence
atggacaggagaaacgactatggctatagagtccctctcttccagagcaaacacctgaatggcgacgagaggtccgggagtaattatcgacgaatcccatggggaaggcggcctgcccctccgagggacgttgcaatcctgcaagagagggccaacaagctcgtcaagtacctgctggtcaaggaccaaaccaagatacccatcaaaagatccgatatgctgagagatgtgatccaggaatatgacgagtatttccctgaaatcatcgagcgcgcttcgtacacattggagaaaatgttccgcgtcaatctgaaggagatcgacaagcagtcatcactctacattctcatctccacgcaagagagtagtgccggaatcctgggcacaacaaaggacacccccaagctaggcctcctaatggtgattttaagcgtgatcttcatgaatggtaataaagcctctgaagcagtgatctgggaggtcttgagaaagctgggcttgaggcctggagtgaggcactcgctgttcggcgaggttagaaaactcataacggacgagtttgtgaagcagaaatatctcgagtacaaaagggtaccaaacagcaggcctcccgaatacgaattcttttggggcctgcggagttaccatgagacctctaagatgaaggtgcttaaatttgcctgtagggttcaaaaaaaggatcctaaagactgggccgtccagtatagggaagctgtagagatggaggtccagttgcagctgtggctatggcttcggctcaagcccggattatccggctcaaatacctccactgggtttacaggggagccttcaacctcaactggcttcagttctggcccatcatccatcgtggggttttcaggtggcccaagtacaggcgtcgggttctgttccggtccgtccacgtcgggattttctggtggcccatcaacaggcgcagggtttggaggcggacccaataccggtgctggttttggcggtgggccttcaacatccgctgggtttggctcaggtgctgcatctcttggagcttgcggattttcttacggctag

SEQ ID NO: 252735 - DNA, 930 bp, Artificial Sequence
  derived and/or modified sequence
atggaccgtaggaatgactatggataccgcgtacctttgttccaaagcaaacaccttaacggagacgagaggagcggatcaaactatcggcgaattccttggggtagaaggcctgctcccccacgagatgtcgctatcctgcaggaaagggctaataaattggtgaagtacctactggtcaaagatcaaaccaaaatcccgataaagagatcggatatgttaagggacgtcatacaggaatacgatgagtattttcccgagataatcgagagagcaagttacaccctggaaaagatgtttagagtgaatttgaaggagatagacaagcaatcctcactgtacatcttgatatccacacaagagtccagtgccggaatcctggggacgactaaggacacacccaagttggggctgttgatggtaattctcagcgtcatttttatgaacggcaataaggcatcagaggctgtgatttgggaggtgttacgaaagttaggcctgagacctggagttagacattcactgttcggggaggtgaggaagctgatcactgatgaatttgttaagcagaaatatctggaatataagcgcgtgcctaattctagacctccagagtatgaattcttctggggtttgaggtcttatcacgaaacatcaaaaatgaaggtgctgaaattcgcctgccgcgtgcagaagaaggaccccaaggattgggctgttcagtaccgcgaagccgtggagatggaggtccaggcggcagccgttgctgtggcagaagcggaagctcgggcagaaatttacagcccttgcttgcagatccctcttatcaattgcagtagcccttcccatggggctaaggtacacccctggaatttgtgccctcactcatcacaaggatcatatggacagtccgccgagggtgtgatgtag

SEQ ID NO: 252736 - DNA, 1403 bp, Artificial Sequence
  derived and/or modified sequence
ataggctcagacacaaggagaggcttggagagagcagacgccttctggattcaagaagacgaggctcacctgttactcggcctcccagaaagatggataggagaaatgactacggatatagggtgcctctatttcagtccaagcatctgaatggggatgagagaagtggcagtaattacaggcggatcccatggggccggaggcctgcaccaccgcgagatgtggccattttacaagaaagggctaataagttggtgaaatacctgttggttaaggaccagacaaagatccccatcaaacgctcagacatgctgagggatgtcatccaagaatatgatgaatatttcccagaaatcattgaacgagcaagctacactctggagaagatgtttcgagtcaatctgaaagaaattgataagcaaagtagcttgtatattctcatcagcactcaggaatcctctgcaggcatactgggaacgaccaaggacacacccaagctgggtctcctcatggtgattctgagtgtcatttttatgaatggcaacaaggccagtgaggctgtcatctgggaggtgctgcgcaagttggggctgcgccctggggtgaggcattcactctttggggaagtgaggaagctcatcacagacgagtttgtgaagcagaagtacctggagtacaagagggtccctaacagcagaccacctgaatatgagttcttctggggcttgcgctcctaccacgagactagcaagatgaaagtcctcaagtttgcatgcagggtgcagaagaaagaccccaaggactgggctgtgcagtaccgcgaggcagtggagatggaagtccaactgcagctgtggctgtggctgaggctgaagccagggctgagtggttccaacaccagcactggctttactggcgaacccagcaccagcacgggcttcagtagtggacccagttctattgttggcttcagcggtggaccaagcactggtgttggcttctgcagtggaccaagcaccagtggcttcagcggtggaccgagcacaggagctggcttcggcggtggaccaaacactggtgctggctttggtggtggaccgagcaccagtgctggctttggcagtggagccgccagtcttggtgcctgtggcttctcgtatggctagtgaggtttcagatttattccccatgtttacagataccgctaataaattgcagtagtccttcccatggagccaaagtacatccttggaatctttgtccacacagcagtcaaggcagttatggccaatcagctgagggtgtcatgtgatggaaaaatctgtttgctgttcctgctttattgtttgctttctgtgtgctgtcatattttggtatcagagttacattaaatttgcaaaatg

SEQ ID NO: 252737 - DNA, 1115 bp, Artificial Sequence
  derived and/or modified sequence
ataggctcagacacaaggagaggcttggagagagcagacgccttctggattcaagaagacgaggctcacctgttactcggcctcccagaaagatggataggagaaatgactacggatatagggtgcctctatttcagtccaagcatctgaatggggatgagagaagtggcagtaattacaggcggatcccatggggccggaggcctgcaccaccgcgagatgtggccattttacaagaaagggctaataagttggtgaaatacctgttggttaaggaccagacaaagatccccatcaaacgctcagacatgctgagggatgtcatccaagaatatgatgaatatttcccagaaatcattgaacgagcaagctacactctggagaagatgtttcgagtcaatctgaaagaaattgataagcaaagtagcttgtatattctcatcagcactcaggaatcctctgcaggcatactgggaacgaccaaggacacacccaagctgggtctcctcatggtgattctgagtgtcatttttatgaatggcaacaaggccagtgaggctgtcatctgggaggtgctgcgcaagttggggctgcgccctggggtgaggcattcactctttggggaagtgaggaagctcatcacagacgagtttgtgaagcagaagtacctggagtacaagagggtccctaacagcagaccacctgaatatgagttcttctggggcttgcgctcctaccacgagactagcaagatgaaagtcctcaagtttgcatgcagggtgcagaagaaagaccccaaggactgggctgtgcagtaccgcgaggcagtggagatggaagtccaagctgcagctgtggctgtggctgaggctgaagccagggctgagatttattccccatgtttacagataccgctaataaattgcagtagtccttcccatggagccaaagtacatccttggaatctttgtccacacagcagtcaaggcagttatggccaatcagctgagggtgtcatgtgatggaaaaatctgtttgctgttcctgctttattgtttgctttctgtgtgctgtcatattttggtatcagagttacattaaatttgcaaaatgaa

SEQ ID NO: 252738 - protein, 395 aa, Artificial Sequence
  derived and/or modified sequence
MPGRSCVALVLLAAAVSCAVAQHAPPWTEDCRKSTYPPSGPTYRGAVPWYTINLDLPPYKRWHELMLDKAPVLKVIVNSLKNMINTFVPSGKIMQVVDEKLPGLLGNFPGPFEEEMKGIAAVTDIPLGEIISFNIFYELFTICTSIVAEDKKGHLIHGRNMDFGVFLGWNINNDTWVITEQLKPLTVNLDFQRNNKTVFKASSFAGYVGMLTGFKPGLFSLTLNERFSINGGYLGILEWILGKKDVMWIGFLTRTVLENSTSYEEAKNLLTKTKILAPAYFILGGNQSGEGCVITRDRKESLDVYELDAKQGRWYVVQTNYDRWKHPFFLDDRRTPAKMCLNRTSQENISFETMYDVLSTKPVLNKLTVYTTLIDVTKGQFETYLRDCPDPCIGW

SEQ ID NO: 252739 - protein, 370 aa, Artificial Sequence
  derived and/or modified sequence
MPGRSCVALVLLAAAVSCAVAQHAPPWTEDCRKSTYPPSGPTYRGAVPWYTINLDLPPYKRWHELMLDKAPVLKVIVNSLKNMINTFVPSGKIMQVVDEKLPGLLGNFPGPFEEEMKGIAAVTDIPLGHLIHGRNMDFGVFLGWNINNDTWVITEQLKPLTVNLDFQRNNKTVFKASSFAGYVGMLTGFKPGLFSLTLNERFSINGGYLGILEWILGKKDVMWIGFLTRTVLENSTSYEEAKNLLTKTKILAPAYFILGGNQSGEGCVITRDRKESLDVYELDAKQGRWYVVQTNYDRWKHPFFLDDRRTPAKMCLNRTSQENISFETMYDVLSTKPVLNKLTVYTTLIDVTKGQFETYLRDCPDPCIGW

SEQ ID NO: 252740 - DNA, 1185 bp, Artificial Sequence
  derived and/or modified sequence
atgcccggccgcagctgcgtggccctggtgctgctggccgccgccgtgagctgcgccgtggcccagcacgcccccccctggaccgaggactgccgcaagagcacctacccccccagcggccccacctaccgcggcgccgtgccctggtacaccatcaacctggacctgcccccctacaagcgctggcacgagctgatgctggacaaggcccccgtgctgaaggtgatcgtgaacagcctgaagaacatgatcaacaccttcgtgcccagcggcaagatcatgcaggtggtggacgagaagctgcccggcctgctgggcaacttccccggccccttcgaggaggagatgaagggcatcgccgccgtgaccgacatccccctgggcgagatcatcagcttcaacatcttctacgagctgttcaccatctgcaccagcatcgtggccgaggacaagaagggccacctgatccacggccgcaacatggacttcggcgtgttcctgggctggaacatcaacaacgacacctgggtgatcaccgagcagctgaagcccctgaccgtgaacctggacttccagcgcaacaacaagaccgtgttcaaggccagcagcttcgccggctacgtgggcatgctgaccggcttcaagcccggcctgttcagcctgaccctgaacgagcgcttcagcatcaacggcggctacctgggcatcctggagtggatcctgggcaagaaggacgtgatgtggatcggcttcctgacccgcaccgtgctggagaacagcaccagctacgaggaggccaagaacctgctgaccaagaccaagatcctggcccccgcctacttcatcctgggcggcaaccagagcggcgagggctgcgtgatcacccgcgaccgcaaggagagcctggacgtgtacgagctggacgccaagcagggccgctggtacgtggtgcagaccaactacgaccgctggaagcaccccttcttcctggacgaccgccgcacccccgccaagatgtgcctgaaccgcaccagccaggagaacatcagcttcgagaccatgtacgacgtgctgagcaccaagcccgtgctgaacaagctgaccgtgtacaccaccctgatcgacgtgaccaagggccagttcgagacctacctgcgcgactgccccgacccctgcatcggctgg

SEQ ID NO: 252741 - DNA, 1110 bp, Artificial Sequence
  derived and/or modified sequence
atgcccggccgcagctgcgtggccctggtgctgctggccgccgccgtgagctgcgccgtggcccagcacgcccccccctggaccgaggactgccgcaagagcacctacccccccagcggccccacctaccgcggcgccgtgccctggtacaccatcaacctggacctgcccccctacaagcgctggcacgagctgatgctggacaaggcccccgtgctgaaggtgatcgtgaacagcctgaagaacatgatcaacaccttcgtgcccagcggcaagatcatgcaggtggtggacgagaagctgcccggcctgctgggcaacttccccggccccttcgaggaggagatgaagggcatcgccgccgtgaccgacatccccctgggccacctgatccacggccgcaacatggacttcggcgtgttcctgggctggaacatcaacaacgacacctgggtgatcaccgagcagctgaagcccctgaccgtgaacctggacttccagcgcaacaacaagaccgtgttcaaggccagcagcttcgccggctacgtgggcatgctgaccggcttcaagcccggcctgttcagcctgaccctgaacgagcgcttcagcatcaacggcggctacctgggcatcctggagtggatcctgggcaagaaggacgtgatgtggatcggcttcctgacccgcaccgtgctggagaacagcaccagctacgaggaggccaagaacctgctgaccaagaccaagatcctggcccccgcctacttcatcctgggcggcaaccagagcggcgagggctgcgtgatcacccgcgaccgcaaggagagcctggacgtgtacgagctggacgccaagcagggccgctggtacgtggtgcagaccaactacgaccgctggaagcaccccttcttcctggacgaccgccgcacccccgccaagatgtgcctgaaccgcaccagccaggagaacatcagcttcgagaccatgtacgacgtgctgagcaccaagcccgtgctgaacaagctgaccgtgtacaccaccctgatcgacgtgaccaagggccagttcgagacctacctgcgcgactgccccgacccctgcatcggctgg

SEQ ID NO: 252742 - DNA, 1185 bp, Artificial Sequence
  derived and/or modified sequence
atgccgggaagatcatgcgtggcgctcgtgctcttggcagccgccgtgtcctgcgccgtcgcacaacacgctccaccttggacggaggactgccggaaatcaacctacccgccgagcggacctacgtacagaggcgccgtcccgtggtacaccattaacttggatctgccaccgtacaagagatggcatgagctgatgctggacaaagccccggtgcttaaagtgatagtgaactcactgaagaatatgatcaataccttcgtgccgtccggaaaaatcatgcaggtggtcgatgagaagctgcctgggttgctgggaaactttccgggtccgttcgaagaagaaatgaagggcatcgctgccgtgactgatatccctctgggtgaaatcatctcctttaacatcttttacgagctcttcacgatctgtacctcgatcgtcgccgaggacaagaagggccatctcatccacggacgcaacatggacttcggagtgttcctgggatggaacattaacaacgatacgtgggtgatcaccgagcagctgaagccgctcaccgtcaatcttgactttcagaggaacaataagactgtgttcaaagctagttccttcgccggctacgtgggaatgctcaccggttttaagccgggattgttttccctgaccctgaatgaacggttctcgatcaatgggggatacctcggcatcttggaatggatcctggggaaaaaagacgtgatgtggatcggatttctgacgcggactgtgttggaaaattccacctcgtacgaagaggccaagaacttgctgactaaaacgaagatcctggctccagcgtatttcatcctggggggaaaccaaagcggcgaagggtgtgtcatcacccgggaccgcaaggagtccctcgacgtgtacgaactggatgccaagcagggacggtggtacgtggtgcaaactaactacgaccggtggaaacacccattctttttggatgatcggcgcactccggccaaaatgtgcctcaaccggacctcgcaagagaacatatctttcgagactatgtacgacgttctgtcaaccaagcccgtgctgaacaagctgactgtctacaccacgctgatcgacgtgactaagggtcagttcgaaacctatctgcgggattgccctgacccatgcatcggatgg

SEQ ID NO: 252743 - DNA, 1185 bp, Artificial Sequence
  derived and/or modified sequence
atgccggggcgcagctgcgtggcactggtcctcctggcagcagccgtctcgtgcgccgtggcccaacatgccccaccttggactgaggactgtcggaaaagcacctacccgccatcgggccccacctacagaggcgcagtcccctggtataccatcaatcttgacctgcctccttacaagaggtggcacgaactgatgctggacaaggcccctgtcctgaaggtcattgtgaactccctcaagaatatgatcaacacctttgtcccctcggggaagatcatgcaggtggtggacgaaaaacttccaggcctgctggggaactttccgggcccgttcgaagaagaaatgaagggaatcgccgcagtcaccgacattcctttgggcgaaatcatttcatttaacatcttttacgaactgttcaccatctgcacctcaatcgtggcagaggacaaaaaaggccatctgattcacggacgcaacatggacttcggagtgttcctgggatggaacattaacaacgacacttgggtgatcaccgagcagctgaaaccgctgactgtgaacctggatttccagagaaacaacaagaccgtgttcaaggcgagcagcttcgcaggctatgtcggaatgctcaccggctttaagccgggactcttttcacttacgctgaatgaacgcttctccatcaatggtggttacctgggaattctcgagtggatcctgggtaagaaggatgtgatgtggatcggattcttgacgcgaaccgtgcttgagaacagcaccagctacgaggaagcgaagaacctgctgaccaagaccaagatccttgcacctgcctactttatcctgggaggaaatcaatcgggtgaagggtgcgtgatcactcgcgacagaaaagaatccttggacgtttatgaactcgatgcaaaacagggacggtggtacgtggtgcaaaccaactatgatcgctggaagcacccattcttccttgacgataggcggactccagcaaaaatgtgcttgaacagaacttcgcaggaaaacatctccttcgagactatgtacgacgtgctgtccactaaaccagtgctcaataagctgactgtgtacaccaccctgatcgacgtcactaagggtcagtttgaaacctacctccgcgattgcccggatccgtgcatcggatgg

SEQ ID NO: 252744 - DNA, 1185 bp, Artificial Sequence
  derived and/or modified sequence
atgcccggacgcagttgcgtagcccttgtcttgctggccgccgcggtttcctgcgctgtagcgcaacatgccccaccgtggaccgaagactgccgaaagtcaacgtatcccccgagcggcccaacctaccggggcgcggtcccctggtacacaataaatcttgatctgccgccttacaaaagatggcatgagttaatgttggacaaagcgccagtgctcaaggtgatcgtaaattccctgaagaacatgatcaacactttcgttccttcgggcaagattatgcaagtggtagatgagaagctgcccggcctgctgggaaacttccccggacctttcgaagaggagatgaaaggaatcgccgctgtaactgatattccacttggtgagattattagcttcaatatattctacgagctgttcaccatttgcacatcgattgtcgctgaggataagaagggtcatctaatccacggtcgtaacatggattttggtgtctttctgggctggaacataaataatgatacttgggtcatcaccgagcagctcaaacccctgactgttaacttagacttccaacgcaacaataaaactgtgtttaaagccagttccttcgccggatatgtgggaatgctgacgggcttcaagccaggacttttctcccttacactaaacgaacgtttctcgataaacggaggctatctcggtattctcgaatggattctaggcaagaaggatgtgatgtggatcggtttcttgacacgaactgtgctggaaaattccactagctacgaggaagccaagaaccttctgacaaaaacgaagatcctcgcccccgcctacttcatactaggaggaaaccagagcggagagggctgcgtgatcacacgagatcgcaaggaatccctggatgtatatgaactggatgccaagcagggcagatggtacgtggtgcagacaaactacgaccgatggaagcacccattttttctggatgaccgcaggacaccggccaagatgtgccttaataggaccagccaggagaacatctcgttcgagacaatgtacgacgtgctgtccaccaagccagtcttaaacaagctcaccgtttacacgacgctgatcgatgtgaccaagggccagttcgagacctatctgagagactgccccgacccgtgtatcggctgg

SEQ ID NO: 252745 - DNA, 1185 bp, Artificial Sequence
  derived and/or modified sequence
atgccgggccgctcatgcgttgctttggtgttgcttgccgcggccgtgtcgtgtgcggtggcacaacatgctccgccgtggaccgaggactgtcggaagagcacctacccgccttccggaccgacctaccggggcgcggtgccgtggtacaccatcaacttggacctgccgccctacaaaaggtggcatgaactgatgctcgataaggccccagttctcaaggtgattgtgaactcactgaaaaacatgatcaatacttttgtgccgtctggaaaaatcatgcaagttgtggatgaaaagctcccgggtctgcttggtaatttccctggacctttcgaagaggagatgaagggaattgccgctgtgactgatatcccgctgggtgagatcatctcctttaacatcttctacgaactgttcaccatctgcacctcaattgtggcggaagataagaagggccacttgatccacggaagaaatatggacttcggagtctttctggggtggaatatcaacaatgacacctgggtgatcaccgagcaattgaaaccactgaccgtgaacctcgactttcaaaggaacaataagacggtgtttaaggcctcgtccttcgccggatacgtgggaatgcttaccggattcaagccgggactgttctcgctgaccctcaacgaacgatttagcataaatgggggataccttgggatcctggaatggatcctgggtaagaaagacgtcatgtggattggcttcctcacccggaccgtgctcgagaacagcacctcttacgaggaagccaaaaatctgcttactaagactaagattctggcaccggcatacttcatcctgggcggaaaccagtcaggcgaaggatgcgtcatcacgcgggaccggaaggaaagcctggacgtctatgaactggatgcaaagcagggaagatggtatgtggttcaaaccaactacgatcggtggaaacacccgtttttcctggacgatcgccgcactccagccaagatgtgccttaatcgcacgtcccaggagaacatctcgttcgaaactatgtacgacgtgctgtccaccaagcctgtgttgaacaagctcactgtgtacacgaccctgatcgacgtgaccaagggacagttcgagacttatctgagggattgcccagacccgtgtatcggatgg

SEQ ID NO: 252746 - DNA, 1185 bp, Artificial Sequence
  derived and/or modified sequence
atgccgggaaggtcttgtgtagctctggttctcctggcagcagctgtctcttgtgccgtcgctcagcatgcacccccttggaccgaagactgcagaaagtctacctatccaccgagtggccctacctacagaggcgcagttccatggtacaccatcaacctcgatttgcctccctacaagagatggcacgaactgatgctggataaggcaccagtcctgaaagttatcgtaaacagtctgaagaacatgataaacacattcgtgccctcaggcaagattatgcaggtggtagatgagaagctccccggtctgctcggaaatttccccggccccttcgaagaggaaatgaagggcattgcagccgtgactgacatcccattgggagagattatttcatttaatattttctatgaactgttcactatctgcacctccatagtagctgaggacaagaagggacacctgattcacggcaggaatatggacttcggcgtgtttcttggatggaatatcaacaacgatacttgggtaatcacagagcaattgaagccgctcacggtaaacctcgactttcagcgcaacaacaaaactgtcttcaaagcctcttccttcgccggttacgtaggtatgctgaccggctttaagcctggacttttctctctgactctcaatgaacgcttctccatcaacggaggatatttgggaatcctggagtggatcctgggtaagaaagatgttatgtggatcggattcttgacaagaactgtcttggaaaattctacgagttacgaggaagccaagaatctgctgaccaaaacaaagattttggcgcccgcatacttcatcctgggtggtaatcagagtggtgagggttgtgtcatcactcgcgatcgcaaggagtctcttgacgtctacgagctggacgcaaagcaaggacgctggtatgtcgtgcaaaccaattacgacaggtggaaacaccctttcttcctggatgacaggcgcacccccgccaagatgtgcttgaacaggacctcacaggaaaatattagtttcgaaacgatgtacgacgtgttgtcaaccaagcccgtgctcaataagcttaccgtctacactacgctcatagatgtgactaagggccagtttgaaacgtatctgcgcgattgcccagacccttgcattggatgg

SEQ ID NO: 252747 - DNA, 1185 bp, Artificial Sequence
  derived and/or modified sequence
atgccaggcaggagctgtgtggctttggtccttctggcggcggcagtgtcctgtgcagtcgcgcagcatgctcccccctggacagaggattgccgtaaatccacatatcctccgagtggccctacgtatcgcggagctgtaccatggtacactattaatctggatcttccaccatacaagcggtggcatgagctgatgctcgacaaagcgcctgtgctgaaggttatagtcaactctctgaagaatatgataaacacattcgtccccagcggcaagattatgcaggtcgtggacgagaagctgccaggattgttaggtaacttcccgggaccatttgaggaggagatgaaaggcatcgctgccgtcaccgacattcctctgggcgagataatatctttcaatattttctacgagctttttaccatttgtacaagcattgtggctgaggataaaaagggtcatctgatccacgggcgaaacatggatttcggcgtgttcttgggttggaacattaataacgacacgtgggttataacggaacagttaaaacccttgacagtcaatctggactttcagaggaacaacaaaaccgttttcaaagccagttcctttgcaggctacgttggtatgctcacaggcttcaaaccaggcttattcagtttgactctaaatgagagattcagtataaacggcgggtatttgggaatcctggaatggatccttggaaaaaaagacgtgatgtggatcggattcctaacccgcaccgtgctggagaattcaaccagctatgaagaagccaagaatctgctaacaaagactaagattctcgcccctgcgtacttcatcctgggaggaaaccagagtggtgaaggctgcgtgattacgcgggacaggaaagagagcctggacgtgtacgaactcgatgcgaaacagggcagatggtacgtggtgcaaacgaattacgatagatggaagcatcctttcttcctcgatgatcgacgcaccccggctaaaatgtgtttgaatcgaaccagccaggaaaacatcagctttgaaaccatgtatgatgttctgtcgactaaaccggtgctcaacaaactaacagtatatacaacactgatcgatgtgacaaagggacaatttgagacttacttaagggattgtcctgatccgtgtatcggctgg

SEQ ID NO: 252748 - DNA, 1185 bp, Artificial Sequence
  derived and/or modified sequence
atgccgggaagatcatgtgtagcactcgttctgctcgctgccgcagtctcatgtgccgtcgcacagcatgcgcccccgtggaccgaagattgcaggaaatccacttaccccccatctggccctacttacaggggagccgtcccgtggtacaccatcaacctggacctgcccccatacaagcgctggcatgagctgatgcttgataaggcacctgtgctgaaagtgatcgtcaatagcctgaaaaacatgattaacaccttcgtgccatccggaaagattatgcaagtggtggacgaaaagctgcctgggcttcttggtaactttccgggtccttttgaagaggagatgaagggaatcgcagcagtgactgatatcccactcggtgaaatcatctcctttaacattttctacgaactttttacgatttgtactagcattgtcgccgaggacaagaagggacatctcattcatggcagaaacatggattttggtgtgtttttgggctggaacattaacaatgatacttgggtgatcactgagcaacttaaaccactcactgtgaaccttgatttccaacggaataacaaaaccgtctttaaagcgtcctcgtttgcaggatacgtcggtatgctgaccggttttaagccaggacttttctcgcttactctgaacgagcgcttttcaattaacggaggatacctcggcatactcgagtggattctgggaaagaaggatgtgatgtggatcggtttcctgacccgaactgtgcttgaaaattctaccagctacgaggaggctaagaacctgctgaccaagaccaaaatcttggcgccagcatactttatactcggtggcaatcaaagcggggagggttgcgtcattaccagggacaggaaggaatctttggatgtgtacgaactcgatgcaaagcaaggtagatggtacgtggtgcaaaccaactacgatcggtggaaacatccttttttcctggatgatcgaagaaccccagctaagatgtgtcttaaccgtacttcgcaggaaaacatttcctttgaaacgatgtacgatgtgttgagcaccaaacctgtgcttaacaagctcactgtctacaccaccctgatcgatgtgactaagggacaattcgaaacctatcttagggactgccccgacccttgtatagggtgg

SEQ ID NO: 252749 - DNA, 1185 bp, Artificial Sequence
  derived and/or modified sequence
atgcccgggagatcctgcgtggccctcgtgctgctcgcagcagcagtgtcctgcgctgtagcgcagcacgctccaccctggactgaggattgtcggaagtcaacctaccccccaagtggtccaacatatcgaggagctgtgccctggtataccatcaatctggatttgcctccgtacaagaggtggcatgaacttatgctggacaaggccccagtgctcaaggtgatcgttaacagtctcaaaaacatgattaatacattcgtgccttccggcaagattatgcaggtggtggatgagaagttacctgggttgttggggaactttccaggtcccttcgaggaagaaatgaaaggaatcgcagccgttacagacattcccctgggagagatcatatcctttaatatattctatgaactcttcacaatatgtaccagcatcgtggccgaggataagaagggtcatctgatccacgggaggaatatggacttcggggtctttcttggatggaacatcaacaatgatacttgggtaattacagagcagctgaagcctctgactgttaacttagattttcaaagaaacaataagaccgtgttcaaggccagctcttttgcaggctacgttggaatgcttactggatttaagcccggtctgtttagccttactctcaatgaaagattttccataaacggcggttacttaggaatcctggaatggattttgggtaagaaagatgttatgtggatcggattcctgacccgcactgtgctggagaactccacttcgtatgaggaggccaaaaaccttctgacgaaaactaagatccttgctcctgcctattttatcctggggggaaatcagagtggagagggatgtgtaataaccagggaccgcaaagaaagtctcgacgtctacgagctggacgccaaacaaggcaggtggtatgttgtccagacgaattacgatagatggaagcaccctttcttcttagatgataggcggacccctgcaaagatgtgtctcaatcgaacctctcaggaaaacatctcctttgagaccatgtatgatgtgctgagcactaagcccgtgcttaataaactgaccgtttacactaccctcatcgatgtgacaaagggacaatttgaaacatatctcagggattgccctgatccttgcattggctgg

SEQ ID NO: 252750 - DNA, 1185 bp, Artificial Sequence
  derived and/or modified sequence
atgccaggtcggtcctgtgtggcactcgtgttgttggcggcagcagtcagctgcgccgtggctcagcatgcacctccttggactgaggattgtaggaagagcacctacccaccatcggggccgacctaccggggcgccgtgccatggtacacgatcaatcttgaccttcccccttacaagcggtggcacgagctgatgctggacaaggcacccgtgctgaaggtgatcgtgaacagcttgaagaacatgataaacactttcgtcccttcaggtaagataatgcaggtggtggacgaaaagttgcctggcctgcttggaaacttcccaggtccatttgaagaagaaatgaaggggatagcagccgtgaccgatataccccttggagagataatctcctttaacatcttctacgaactttttaccatttgtacttccattgtggcagaagataagaagggtcacctgatccatggacgaaatatggattttggagtctttcttgggtggaacataaacaacgacacctgggtgataaccgagcagctgaaacccctcacggtgaatcttgacttccagagaaataacaagactgtgtttaaagcatcgtcgtttgctggctacgtgggaatgctgactgggtttaaacctgggcttttcagccttacccttaatgaacgcttttcgattaacgggggttacctgggaatacttgagtggatccttggtaagaaggatgtcatgtggatcggatttctgacccggaccgtccttgaaaacagcacctcgtacgaagaggcgaagaatcttctcactaagaccaaaatcctggcccctgcgtactttatactcggagggaaccagtcgggagaaggctgcgttatcacccgtgatcgcaaggaatcactcgatgtgtacgaacttgatgccaaacaaggaagatggtacgtggtccaaaccaactacgatcgctggaagcatccattctttctggacgataggcgcaccccggcaaagatgtgtctcaatcgcactagccaagaaaacatttccttcgaaactatgtacgatgtcctgagcactaagccagtgctcaacaagctgactgtgtacactaccctgattgacgtgaccaagggccaatttgaaacgtacctcagggattgtcccgatccgtgtatcggttgg

SEQ ID NO: 252751 - DNA, 1185 bp, Artificial Sequence
  derived and/or modified sequence
atgcccggcagatcatgcgtggcacttgtgcttctggcggcagcagtcagctgcgcggtggcacaacatgcaccaccctggactgaagattgtcggaaatccacctaccccccatccgggcctacctaccggggtgctgtgccctggtacacgatcaatcttgacctgcctccttacaagagatggcatgaattgatgcttgacaaggcccccgtactgaaggtcattgtgaactcactgaagaatatgatcaacacttttgtgcccagcggaaagatcatgcaagtcgtggatgaaaagctgccaggactgcttggaaacttccccggaccatttgaagaggagatgaagggaatcgcagcagtgaccgatattcctcttggagagattatcagctttaacattttctacgagctgtttactatttgtacgtcaatcgttgctgaagataagaaggggcatcttatccacggaaggaatatggactttggtgtgttcctcggttggaacataaacaacgatacctgggtgattacggagcagctcaagccacttaccgtgaacctggatttccaacggaataacaagactgtgtttaaggcaagttctttcgcgggttatgtcggtatgttgactggctttaagcctgggctgttctcgcttactcttaacgaaagattctcgattaacggtggatacctggggattctcgaatggattctggggaagaaagatgtcatgtggattggtttcctgacgcggaccgtccttgaaaacagcactagctacgaagaggcgaagaacctgctgaccaagacgaagattcttgcacctgcctatttcattttgggcggaaatcaatccggggagggttgtgtcatcaccagggatagaaaggaatcactggacgtctacgagttggacgccaaacaaggcaggtggtacgtggtccagactaactacgatcgttggaaacatcccttttttctggacgatcgaaggactccagccaaaatgtgtctgaaccgtacctcacaggaaaacatctccttcgaaaccatgtacgacgtcctttcgactaagccggtgcttaacaagctgactgtgtacaccactcttattgacgtgactaagggacagttcgaaacttatcttagagactgtccagatccttgtataggatgg

SEQ ID NO: 252752 - DNA, 1185 bp, Artificial Sequence
  derived and/or modified sequence
atgccaggccggtcttgtgtggctctggttctactggccgcggcggtgtcctgcgccgttgctcagcatgcccccccctggacggaggattgccggaaaagcacataccccccctcggggcccacttatcggggtgcggtaccttggtacaccataaacctagatcttcccccttacaaaagatggcacgaactcatgctagataaagcacctgtactgaaagtcatcgtaaattccctgaagaatatgattaataccttcgtaccgagcggtaagattatgcaggtcgtggatgaaaagctgccgggactcttaggcaattttccaggcccatttgaggaggagatgaaggggatagcagccgtgacggacatcccactaggggagataatctcctttaatatcttttatgaactgttcaccatatgtaccagtatcgtggctgaggataagaagggccacctcattcatggtcgcaatatggatttcggagtcttcctggggtggaacattaacaatgacacatgggtgatcactgagcagctgaaaccactcaccgtcaatcttgatttccagcgcaacaataagactgtgtttaaggcgagctccttcgccggttacgtgggaatgctcacaggctttaagcccggactctttagcctcaccctcaatgaacgcttctcaattaacggtgggtatctcggcatcctggaatggattttgggcaaaaaggatgtgatgtggattggcttcttgacacgcacagtgcttgagaatagcaccagttatgaagaggcaaaaaacttgttgaccaagactaagatccttgcacccgcatacttcattcttggcgggaatcaatcaggcgaaggatgcgtgatcacacgggaccgcaaggaatccctggatgtatacgagctggatgcaaaacaggggcggtggtatgtggtacagaccaactacgatcggtggaagcatccattttttctcgacgatcgccgaacaccagccaagatgtgcctcaatcggacctcccaggagaatatttcattcgaaacaatgtatgacgtgctgagcaccaagcccgtgttgaataagctgactgtctacacaacattaattgatgtaacaaagggccaatttgagacgtacctgcgcgattgcccagatccatgtattgggtgg

SEQ ID NO: 252753 - DNA, 1185 bp, Artificial Sequence
  derived and/or modified sequence
atgcccggaagatcgtgtgtggcattagtccttctggccgcggctgtctcctgtgccgtagcgcagcatgcacccccgtggaccgaggattgccgtaaatctacctacccaccctctggcccaacctataggggggcagtcccttggtatacaataaacctggatctacctccatacaagagatggcacgaactcatgctggacaaggctcctgtactcaaagttattgtgaactctctgaagaatatgataaacacgttcgttcctagcggcaaaatcatgcaagtggtggatgaaaagctgccaggcctccttggcaattttccaggcccgtttgaggaggagatgaaaggtatagctgctgtgactgacatacccctcggcgagataatcagttttaacatcttttatgaactcttcacgatctgtactagcattgtggcagaggataagaaggggcaccttattcatggcagaaacatggatttcggcgtcttccttggatggaatatcaataacgatacgtgggtaataaccgaacagctcaagcctctgacagtgaatcttgacttccagaggaacaacaagaccgtgttcaaggccagttctttcgccggctatgtgggcatgcttaccgggttcaagcccggactttttagcctcaccctcaatgaacgttttagtatcaacggtggttatctgggtatactggagtggatactgggtaagaaggacgtgatgtggatcggctttctaacgagaacggttctggagaactctacgagctatgaagaagcaaagaaccttcttactaaaactaaaatcctggcacctgcctattttatcctcggtggcaatcagtcaggcgagggatgtgtcataactagggatcggaaagaatccttggatgtgtatgaattggacgcaaagcagggcaggtggtatgtggttcaaactaactatgacagatggaaacatccgtttttcctagacgaccggagaaccccagcaaagatgtgtctgaataggacctcgcaggagaacatctcgtttgagaccatgtacgatgttttaagcactaagcccgtgctgaacaagctcaccgtttacacgacgctcatcgatgtgacaaagggtcagttcgaaacctacctgcgagactgcccggatccctgcattggttgg

SEQ ID NO: 252754 - DNA, 1185 bp, Artificial Sequence
  derived and/or modified sequence
atgccaggccgatcttgtgtggcgcttgttcttcttgctgcagccgtctcatgcgctgtggctcagcatgcccctccgtggacagaggactgtagaaaatcgacataccccccaagcggccctacttatcgcggcgccgtcccctggtatactatcaatttggatcttcccccctacaagcgttggcacgaactgatgctggataaagcccctgtgctaaaggtgatcgttaactctctcaagaacatgatcaatacattcgtgcctagcgggaaaatcatgcaggtggtggatgagaagctcccaggcttgctcgggaacttccccggcccatttgaggaggaaatgaaagggatagccgctgtgacagatattcctctgggcgagatcatttcattcaatattttctacgagctcttcaccatttgtactagcattgttgctgaagataaaaaagggcaccttatccacggccggaatatggatttcggggttttcctgggttggaacatcaacaacgatacatgggtgattactgagcaactgaaaccactgaccgtgaacctcgactttcagagaaataataaaacggtattcaaggccagtagctttgcggggtacgtgggcatgcttaccggttttaaacctggtctcttttctctgaccctgaatgagcggttctccattaacggaggataccttggaatattggagtggatcctggggaaaaaggatgtgatgtggatcggcttcctaacgagaactgtgttggaaaactcgacttcatatgaagaggcaaagaacctgctcaccaaaactaaaatactcgcgccagcttacttcattctgggcgggaaccaatccggcgaagggtgtgtaatcacaagagatcggaaggagagtctcgacgtgtatgagttagacgcgaaacaaggacgctggtatgtggtgcagaccaactatgaccggtggaagcacccattcttcctcgacgacaggcggacccccgccaaaatgtgcctgaatcgaaccagccaggagaatatcagcttcgaaactatgtatgacgttctatctacgaagccagtgctgaacaaacttacagtctacacaacactgattgacgtaacgaaagggcagttcgagacttatctgcgggactgtcctgacccctgcatcggatgg

SEQ ID NO: 252755 - DNA, 1185 bp, Artificial Sequence
  derived and/or modified sequence
atgcctggccgttcatgtgttgccctagtgcttctggccgcggccgtctcatgcgcggttgcccaacacgcacccccttggacggaagactgtagaaaatccacataccctccatccggaccaacttatagaggcgctgtgccatggtacacaatcaacctggatttaccgccctataagcggtggcacgagctgatgctggacaaggccccggtcttgaaggtaatcgtgaattctcttaaaaatatgattaacacatttgtgccatcgggcaaaatcatgcaggtggtggacgaaaagctgcccggactcttggggaacttccccgggccctttgaagaagaaatgaaggggatcgctgcagtgacagacatccctcttggcgaaattattagtttcaatattttctacgaactgttcactatctgcacctcaattgtcgcagaggacaagaaagggcacctgattcatggccgaaacatggacttcggagttttcctgggctggaacattaataacgatacatgggtcattacagagcaactcaagcctttgactgtgaacctcgattttcaacggaacaacaagaccgtctttaaggcctccagcttcgcaggatatgtaggcatgctgaccgggtttaaaccaggcctattcagtttgacccttaacgaaaggttttccatcaacggggggtaccttggcatcctggagtggattctaggcaagaaagacgttatgtggataggcttcctgacaaggaccgttctcgagaactccacaagctatgaggaagctaaaaacctcttaactaagacaaagatattggcccctgcctatttcatcttgggaggaaaccagtcaggagagggatgtgtgatcactcgcgatagaaaggagtccctggacgtgtatgagctggatgcaaaacagggaaggtggtacgtggtgcagacaaattacgaccggtggaagcacccattttttttagacgatcgccggactccagccaagatgtgcctgaatcgtaccagccaggaaaacatttcgtttgaaactatgtacgatgtgcttagtactaagcctgtgctgaacaaactcacagtttataccaccctgattgacgtgaccaaaggacaattcgaaacatatctgcgagattgccccgacccatgtataggatgg

SEQ ID NO: 252756 - DNA, 1185 bp, Artificial Sequence
  derived and/or modified sequence
atgcctgggagatcctgcgtcgcgttggtgctcttggcagccgctgtgtcatgtgcggtggcacaacacgcaccgccttggactgaggactgtagaaagtcaacttacccaccctcgggaccaacttaccggggagcggtgccttggtacaccattaacctggatctgcccccttacaaacggtggcacgaattgatgctggacaaggcccccgtgcttaaggtgatagtcaatagcctgaagaacatgatcaatacctttgttccatcgggtaagattatgcaggtggtagacgaaaaactgccggggctgctggggaattttccagggccttttgaggaggaaatgaaggggatcgccgccgtaacggatattcctcttggcgaaatcatctcattcaatatcttttacgagctcttcaccatttgcacttctattgtggcagaagataagaaaggtcatcttatccatggaaggaacatggacttcggagtgtttctgggatggaacataaacaatgatacttgggtaattaccgaacaactgaaacctctgacggtgaacctcgattttcagcgaaacaacaagactgttttcaaggcaagctcctttgcaggttacgtgggtatgctgactggattcaaacccggcctgttttcgctgactctgaacgagcggtttagtataaacggagggtatcttggtattctcgaatggatcctgggaaagaaggacgtcatgtggatcggtttccttactagaactgtgcttgaaaatagcacgtcatacgaagaagcaaagaacctcctcacgaaaactaaaatcttggcacccgcgtacttcatccttggtggcaatcaatcgggagagggctgtgtgattactcgcgatcggaaggaatcccttgacgtgtacgaactggatgcaaagcaaggacgttggtacgtggtccagaccaactacgatagatggaaacatccatttttcctggatgatcggcgcacccctgccaaaatgtgcctgaaccgcacgagccaagaaaacatatcttttgaaacgatgtatgatgtcctctccaccaaaccagtgctgaataaacttactgtgtacaccacccttattgacgtgaccaagggacagttcgaaacctacttgagggactgtccagatccctgtataggttgg

SEQ ID NO: 252757 - DNA, 1185 bp, Artificial Sequence
  derived and/or modified sequence
atgcccggcagatcctgtgttgcactcgtgctcctggctgctgccgtgtcctgtgcggtcgcccagcacgccccaccttggaccgaggactgccgcaagagcacatatcccccatccgggcccacatatcgaggagccgtcccctggtacaccattaacctggatttgccaccctataaacgatggcacgagctaatgctggacaaagccccagttttgaaggtgatagtcaactctcttaagaacatgatcaacacctttgtgccaagtgggaaaatcatgcaggtcgtggacgagaaactgccaggcttgctcggtaatttcccaggccccttcgaagaagaaatgaagggaatcgcggccgtaacagacattcctcttggggagattatttccttcaacatattctatgagctctttactatctgcacaagcatagtcgctgaagataaaaaaggccatctgattcacgggaggaatatggacttcggcgtctttcttggctggaacatcaacaatgatacatgggtgattacagaacagctgaaaccactgacggtaaatctggactttcagcggaacaacaagactgttttcaaagcttctagctttgcaggatacgtgggcatgctgactgggtttaagccaggtctctttagtctgaccttgaacgaaaggttttccattaacgggggttacctgggaatcctggagtggattctcggtaagaaggacgttatgtggatcgggttcctgacacggacggttctcgaaaattcaaccagttatgaagaggctaagaacttgctaacaaagaccaaaatactggcgccagcctactttatccttggcggtaatcagtccggagagggatgcgtcatcacacgagataggaaggaatctctggatgtgtacgagctcgacgcaaaacagggtcggtggtatgtggtccagaccaactacgacaggtggaagcacccgttcttcctggatgatcggcggaccccagcaaaaatgtgtctgaatagaacatcccaggaaaacatcagctttgagaccatgtacgacgtgcttagtactaagccggtgctcaacaagctgaccgtttataccacattgatcgatgtgaccaaggggcagttcgagacttatttgcgtgattgccctgacccttgtattggatgg

SEQ ID NO: 252758 - DNA, 1185 bp, Artificial Sequence
  derived and/or modified sequence
atgccagggaggagctgtgtggcactcgtgttactagccgccgcagtaagctgcgccgtggctcaacatgcccccccatggaccgaggattgcaggaagtcaacctatcctcccagcggacctacataccggggcgctgtcccctggtacacaattaatttggatcttcccccatacaaacgctggcacgagctgatgcttgataaggcacctgttctgaaggtgatcgtaaacagcctgaaaaacatgattaacacgtttgtcccctctggcaaaattatgcaggttgtggacgagaaattgccgggcctactggggaatttccctggaccgttcgaggaggaaatgaagggaattgccgccgtcactgatataccccttggcgagattattagttttaatatcttctatgaactgtttacaatatgtacttccatcgtagccgaagataagaaaggccaccttatccatggcaggaatatggactttggagtgtttttgggatggaatatcaacaacgacacctgggtgattaccgagcagttgaagcctctgaccgtcaatctagattttcagcgcaacaataaaactgtcttcaaggcctcttcgtttgcggggtacgtgggaatgctaaccggttttaagcccggactgtttagtctgaccctcaatgagagatttagtatcaacggcggctatcttggaattctcgaatggatactgggcaagaaggacgtgatgtggatcgggttcttgacccgcacagtactagaaaactccactagctatgaagaggcgaagaatctgctgacaaaaacgaaaatcctggcacctgcctatttcatacttggcggcaatcaatccggtgaggggtgcgtgatcacccgggatcgcaaggagtcattagacgtgtatgagctggacgccaagcagggaagatggtatgtggtgcaaacaaactatgacagatggaaacacccgtttttcttagacgacaggcggactcctgctaaaatgtgcctaaatcgcacatcccaggaaaacatatcatttgaaacgatgtatgatgtgttgtctactaaacctgtcctgaataaactcaccgtgtatactaccctgattgacgtcactaaggggcagtttgaaacctacttgcgggattgtccagacccctgcataggatgg

SEQ ID NO: 252759 - DNA, 1185 bp, Artificial Sequence
  derived and/or modified sequence
atgcctgggcgtagctgtgtggcacttgtgctccttgcagccgccgtgtcctgcgcagtggctcaacatgcgccgccctggaccgaagattgtagaaagagcacttaccccccgtccggtccaacgtacagaggcgccgtgccttggtacactatcaacctggaccttcccccttacaagcgttggcatgaactcatgcttgacaaggcaccagtcctgaaggtcatcgtgaactctcttaagaatatgatcaacacctttgtccctagcggaaagattatgcaggtggtggacgaaaaacttcctggactcctgggcaatttccctggaccctttgaagaagagatgaaggggattgcggctgtcacggatataccactgggagaaatcatttcatttaacatcttctacgagctcttcaccatttgtacgagcattgtggcagaggacaaaaaaggccatctcattcacggtcggaatatggatttcggagtgtttttgggatggaacattaacaatgatacctgggtgattaccgaacaactcaaacccctgactgttaacctcgatttccaacgcaataacaaaaccgtgttcaaggcctcctcgtttgcggggtacgtcggtatgctcactggatttaagccaggactgtttagtttgaccctgaatgaacgcttttcgattaacggtggctacttgggaatactggaatggatactcggtaaaaaggacgtaatgtggattggatttcttacccgcaccgtcctggaaaattccacttcgtacgaggaggcaaagaatcttctgacgaaaactaagatactggcccctgcttacttcattctgggaggtaatcaatcgggtgaggggtgcgtgataacgcgagatcggaaggaatcactcgatgtctacgaacttgatgcaaagcaagggagatggtatgtagttcagaccaactacgatagatggaagcacccctttttccttgatgatcgaagaactccagcaaagatgtgccttaaccggacttcccaggagaacataagttttgaaaccatgtacgacgtgctctcgactaagccagtgttgaacaaacttacggtttacaccaccctgatcgacgtgactaagggccagtttgagacttatctgcgggattgtcctgacccgtgtatcggatgg

SEQ ID NO: 252760 - DNA, 1185 bp, Artificial Sequence
  derived and/or modified sequence
atgcctgggaggtcgtgcgtcgcactcgtcctccttgctgcggctgtgtcctgcgcagtggcacagcatgccccgccctggactgaggactgcagaaagtcgacctaccccccgtccggaccgacctacagaggagccgttccgtggtacactatcaatctggacctcccgccttacaaacgttggcacgaactcatgttggacaaggccccagtgctgaaggtgatcgtgaattcgctgaagaatatgattaacaccttcgtgccgtcgggaaagatcatgcaagtggtggatgaaaagttgccgggactcctgggaaacttcccaggcccatttgaggaagagatgaaaggcattgccgccgtgacggatattcctctgggagaaatcatctcattcaacatcttctacgaactcttcaccatctgcacttccatcgtggccgaagataagaaaggccaccttatccacggaagaaacatggacttcggcgtgttcttgggctggaatatcaacaacgatacttgggtgatcaccgagcagctgaagccactcaccgtgaacctggattttcaacggaacaacaagactgtctttaaggcctcttctttcgccgggtacgtgggaatgctgaccggattcaaacctggtttgttcagcctgaccctcaacgagcggttttccattaacggaggctaccttggcatcctcgagtggatcttgggcaagaaagacgtgatgtggatcggattcctgacccgaactgtcctggagaactcaacctcctacgaagaggcgaagaacctgctgaccaaaaccaagatcctcgcaccggcgtactttatcctgggaggtaaccagtccggtgaaggctgcgtgatcactcgcgatcgcaaggaatcattggatgtgtacgaacttgacgcaaagcagggacgctggtacgtggtgcagactaactacgatagatggaagcatccatttttcctggatgaccgccggactccggcaaagatgtgcctgaaccgcaccagccaggagaacatctcgttcgaaaccatgtacgatgtgctgtcaactaagccagtcttgaacaagctgactgtgtatactactctgatcgatgtcactaaaggtcagtttgaaacctacctgcgcgactgcccggatccctgcatcggatgg

SEQ ID NO: 252761 - DNA, 1185 bp, Artificial Sequence
  derived and/or modified sequence
atgcccggcagaagctgtgtggccctggtgctcctggctgccgcagtgtcctgcgctgtagcccaacacgcacctccatggaccgaggattgtaggaagtccacgtacccaccttcaggccccacgtaccggggggcagtgccttggtacactatcaacctggacctgcccccttacaaacggtggcacgagttgatgctagacaaagccccagtactcaaagttatcgtcaattctttgaaaaacatgataaacacgtttgtaccttctgggaagataatgcaagtggtcgacgagaaactgccagggctgttgggcaacttccctggccccttcgaggaagaaatgaaggggatcgctgccgtaaccgatatccctctgggtgagatcatctcattcaacatattctatgaactgttcaccatttgcacctcaatcgtggcagaggacaaaaaggggcacctgatccatggacggaatatggattttggagtgttcctcggctggaatattaacaacgatacctgggtgatcactgagcagctcaagcccttaaccgtgaatctagactttcagaggaacaataaaaccgtgttcaaggccagttccttcgctggttacgtgggtatgttgacaggattcaaaccaggcctgttcagcttaacactcaatgagagattctccataaatggcggatatctgggtattctggaatggatcctgggaaagaaagatgttatgtggatagggtttttgactaggacggtcttggaaaacagtacttcctacgaggaggctaagaatctactgactaaaaccaaaatcctggctccggcatactttattctcgggggaaaccaaagcggagagggctgtgttatcaccagggaccgtaaggagtcgttagacgtctatgagctggatgcaaagcagggtaggtggtatgtggtgcagacgaactacgaccgttggaagcaccccttttttttggacgatcggcgaacaccagcgaaaatgtgtttaaatcgcacctctcaggagaatatttccttcgagacaatgtatgatgtactatcaaccaagcccgtccttaataagttaactgtctacaccaccctgatagatgtgactaaagggcaatttgaaacctacctgagggactgcccagatccttgtataggctgg

SEQ ID NO: 252762 - DNA, 1185 bp, Artificial Sequence
  derived and/or modified sequence
atgcccggaaggagttgcgtcgccttggtgcttctggctgcagccgtgtcgtgcgccgtggcacaacacgctccaccttggacagaggactgcagaaaaagcacataccctccttctggcccaacctaccgcggcgccgtgccctggtataccatcaacctcgatctgccaccctataagaggtggcatgagcttatgctggacaaggcgcctgtgctcaaggtcatcgtgaattccttaaagaacatgatcaatacctttgtcccgtcgggaaaaattatgcaggtcgtcgatgaaaaacttcccggactcctgggcaatttcccaggcccttttgaggaggagatgaaaggtattgcagcagttactgatattcctctcggggagattatctcttttaatattttctatgaattattcactatctgtacatctatcgtggcggaggacaaaaaaggccacctgatccacggtagaaatatggacttcggagtatttctgggatggaacattaacaatgacacctgggtgattaccgaacagctgaagcctctaacagtcaacctcgactttcagcggaataataagacagtttttaaggctagcagttttgctgggtatgtgggtatgctgactggatttaaacccggcctcttttcgctaactctcaatgaaaggttttctattaatggaggatacctcggcatcctggaatggatcttgggcaagaaggacgtgatgtggataggatttctgacccgaactgtcctcgagaattcaacaagctatgaagaggccaaaaacctgctgacaaagaccaagattctagcaccagcctacttcatccttggtgggaaccaatctggagaaggatgcgttataacaagagaccggaaggagtctctggacgtgtacgaactggacgcgaagcaggggcgctggtacgtcgtgcagaccaattacgatagatggaaacatccttttttcctagacgatagacggaccccagccaaaatgtgcctcaatcgtacatcacaggaaaacatcagcttcgaaactatgtatgatgttctttcaacgaaaccagtgctaaacaagctgactgtgtacaccacccttattgatgtgacaaagggtcagtttgagacatacctgcgcgattgtcctgatccgtgtataggttgg

SEQ ID NO: 252763 - DNA, 1185 bp, Artificial Sequence
  derived and/or modified sequence
atgcccgggagaagctgtgtcgcccttgtccttctggcggcagcggtgtcgtgcgccgtggcccaacacgcgccaccatggactgaagactgccggaagtccacctaccctccaagcggaccaacctaccgcggggccgtgccgtggtacaccatcaacctcgacctgccgccgtacaagcgctggcacgaactcatgctcgacaaagcccctgtgctgaaggtcatcgtgaactccctgaagaatatgatcaatacgtttgtccctagcggcaaaatcatgcaggtggtcgacgaaaaactgccgggattgctgggaaactttccgggaccgttcgaggaggaaatgaagggcatcgccgctgtgactgacatcccgctcggcgaaataatctcgttcaatatcttttacgaactgttcaccatctgtacttcgatagtcgccgaagataagaagggtcatttgatccacggacgcaacatggacttcggggtgtttcttgggtggaacattaacaacgacacctgggtgatcaccgaacagctgaaaccacttactgtgaacctggatttccagaggaacaataagaccgtcttcaaggcgtcctcctttgcaggctacgtcggcatgcttaccggcttcaagcccggcctcttttcgttgaccctcaatgagcgattcagcatcaatggaggatatctcggcatcctcgaatggattctgggaaagaaggatgtgatgtggatcgggttccttaccaggaccgtcctggaaaattcgaccagctacgaagaggccaaaaacctgctcaccaagactaagatcttggctccagcttacttcattctgggcggcaatcagtccggagaaggttgcgtgatcaccagagatcgcaaggaatcccttgatgtgtacgaactggacgccaagcagggccgctggtacgtggtgcaaactaactacgacagatggaagcacccgttcttcctggacgataggagaaccccggcaaagatgtgtctcaaccgcacttcgcaggaaaacatttctttcgaaaccatgtacgacgtcctgtcaaccaaaccagttctgaacaagctgaccgtgtacactactctcatcgacgtgaccaagggccaattcgagacttacctcagggactgtcctgatccgtgcatcggatgg

SEQ ID NO: 252764 - DNA, 1185 bp, Artificial Sequence
  derived and/or modified sequence
atgccgggtcgaagctgtgtggccttggtgctgctcgccgcagccgtgtcttgcgccgtggcacagcatgcgcctccatggaccgaggactgtaggaaatcgacttaccccccatccggtccgacctacaggggagcggtcccctggtacacgattaatcttgacctgccgccgtacaagcgctggcacgaactgatgctcgacaaagcccccgtgctcaaggtgatagtgaattccctgaagaacatgatcaacacgttcgtcccctccggcaagataatgcaagttgtggatgaaaagctcccggggctgttgggcaatttcccgggtccattcgaggaagagatgaagggaatcgccgctgtgactgacatcccgctgggagagatcatatcgttcaatatcttttacgagctgttcactatctgcacctcgatcgtggcagaggacaagaagggccacctcatccacggacgcaacatggatttcggagtgttcctgggatggaacatcaacaacgacacctgggtgattactgagcaactcaagccgttgaccgtgaacctggattttcaacgaaacaacaagaccgtgtttaaagcctccagcttcgccggatacgtgggtatgctgaccggcttcaaaccgggactcttttcactcactctgaatgaacggttctcgattaacggaggatacctgggcatcctcgagtggatcctgggaaagaaagatgtgatgtggatcggatttctcacccggactgtgctggaaaatagcacgtcctacgaagaagctaagaatctgcttaccaaaacgaagatccttgcgccagcgtatttcatccttggtggtaaccagtccggcgaggggtgcgtgatcacccgggatcgcaaggagagcctcgacgtctacgaactcgacgccaaacaagggcgttggtacgtggtccagactaactacgacagatggaagcacccattcttcctcgacgacagacgcaccccagctaagatgtgcctcaaccggacttcgcaggagaatatcagctttgaaaccatgtacgatgtcctctccaccaagcctgtgctgaataagttgacggtctataccactctgatcgacgtcaccaagggacagttcgagacttatctgcgagattgcccggacccgtgcatcggatgg

SEQ ID NO: 252765 - DNA, 1185 bp, Artificial Sequence
  derived and/or modified sequence
atgccgggtcgaagctgtgtggcgctggttctgctggctgccgcggtgtcgtgcgcagtggcgcagcacgccccaccgtggacggaagattgtcgcaagtccacgtatccgccaagcggtcctacatacagaggtgcagttccgtggtacaccattaatctggacctgccgccatacaaacgctggcacgagctgatgctggataaggccccggtgctgaaagttatcgttaacagcttgaaaaatatgattaatactttcgtgcctagcggtaagatcatgcaggttgttgatgagaaattaccgggtctgctcggcaatttcccagggccattcgaagaagaaatgaaaggcattgccgctgtgaccgatatccctctgggtgagatcatcagctttaacattttttacgagctgttcacgatatgcacttccattgtggccgaagacaaaaaaggccacctgattcacggacgtaacatggattttggagtcttcctgggttggaacatcaataatgatacatgggttataaccgagcagctgaagccactcaccgttaacctggactttcaacggaacaataaaacggtcttcaaagcctccagctttgctggctatgtgggtatgctgaccggtttcaagccagggctgttcagtttgacccttaatgagcgctttagcatcaacggtggttacctgggtattctggaatggatcctaggtaaaaaggacgttatgtggattggcttcctgacccgcactgttctggaaaacagcaccagctatgaagaagctaagaacctgctgaccaagactaagattctggccccagcttactttattctgggtggcaatcagagcggcgagggctgtgttatcactcgtgatagaaaagaaagcctggatgtgtacgaactggacgcaaagcagggacgctggtacgttgtccaaacgaattacgaccgatggaaacacccattctttttggatgaccgccgcacaccggccaagatgtgtcttaaccgtacttctcaagagaacatctcctttgagaccatgtatgatgttctgtcaacaaagccagttctgaacaaactgaccgtctacacgaccttgattgacgtgaccaaaggacagtttgaaacctacctgcgtgattgcccggatccttgcattggctgg

SEQ ID NO: 252766 - DNA, 1185 bp, Artificial Sequence
  derived and/or modified sequence
atgcctggaagatcctgtgtcgccctagtgctgttagcggccgccgtctcttgcgcggtggcgcagcacgcacctccatggacggaggactgtaggaagtctacctacccacccagtggacccacctaccgcggggccgtgccctggtatactatcaaccttgatctgcccccgtacaagagatggcatgagttgatgttagataaggctcctgtgcttaaggttattgtgaattcactgaaaaacatgattaacacctttgtgccctccgggaagattatgcaagttgtggatgaaaagctgcccggccttctcggaaattttcccgggcctttcgaggaagagatgaaaggcatcgcagcagtgactgatatccccctgggtgaaattattagcttcaatatattttacgagctttttaccatatgtacctcaatcgtggcagaggataagaagggccaccttatacatggccgcaatatggattttggagtgtttctgggatggaacatcaataacgacacctgggtgataactgagcagctaaagcctttgaccgtcaatctggacttccagcgcaacaacaaaactgtcttcaaggcctcctccttcgctggttacgttggaatgcttacgggattcaagcctggactgtttagcctcacactgaacgaaaggttctcaataaatggcgggtatctgggcatcctagagtggattctggggaagaaagacgtgatgtggattggctttttaacaagaaccgtgctcgaaaatagcacatcttacgaagaggccaagaatctcctgacgaaaaccaaaatcctcgctcctgcgtacttcattctaggcggcaaccagagcggggagggatgcgtaattacgcgtgaccgtaaagaatctctggacgtctatgagctggatgcaaaacagggacggtggtatgtggtgcagacaaactacgataggtggaagcacccattcttcctggatgataggagaacgcccgcaaaaatgtgcttgaacagaacctctcaggaaaacatctcctttgagacaatgtacgatgtactgtccactaagcccgtgctcaataagttgaccgtgtataccaccctcatcgatgtaacaaaaggacaatttgagacgtacctgcgagactgcccggacccctgcataggctgg

SEQ ID NO: 252767 - DNA, 1185 bp, Artificial Sequence
  derived and/or modified sequence
atgcctggccgcagctgcgtcgccttagtgctgttggccgcagccgtgtcctgcgcagtcgctcagcacgcacccccctggactgaagattgtcggaaaagcacttaccctccatcaggccctacctaccgcggcgccgtcccatggtatacaatcaatcttgacttacctccatacaagagatggcacgagctgatgcttgacaaggcacctgtcttgaaggtgatcgtcaacagcctgaaaaacatgattaacacctttgtgccatcagggaagattatgcaagttgttgatgagaaactgcccggtctgttaggcaatttccctggccctttcgaggaggaaatgaaaggcatcgccgctgtcaccgacatccctctgggagaaattataagctttaacatattttacgaactgttcactatatgcacctcaatcgttgcagaagacaaaaagggccacctcatacatggtagaaatatggattttggagtgttcctgggttggaacattaataacgacacatgggtgataaccgaacagctgaagccattaactgtcaacttggactttcagagaaataacaaaactgtgtttaaggcttctagtttcgctggttacgtcggaatgctcaccgggttcaagcctggcttatttagcctgactttgaatgaacgcttcagcatcaacggaggttatctaggcatattggaatggatactgggcaaaaaggacgtcatgtggattggtttccttacaaggactgtccttgaaaatagtaccagctatgaggaggccaagaacttactgaccaagaccaagattctggcccctgcctactttatcctcggcgggaaccagtccggagagggttgtgttatcacccgagaccgtaaagagagcctggacgtgtatgagttagatgctaagcagggacgatggtacgtcgttcagacaaactacgatcgatggaaacacccctttttcctagacgatcggagaacacccgccaaaatgtgtctgaataggactagtcaagagaacataagcttcgagacaatgtacgacgtattatccaccaaaccagtattgaacaagctgactgtatacacaaccctgatcgacgtgacaaaagggcagttcgaaacctacctgcgggattgtcccgacccatgcattggctgg

SEQ ID NO: 252768 - DNA, 1185 bp, Artificial Sequence
  derived and/or modified sequence
atgccgggtcgatcgtgtgtagcgttagtattattagcggcggcggtatcgtgtgcggttgcgcaacatgcgccgccgtggacggaagattgtcgtaaatcgacgtatccgccgtcgggtccgacgtatcgaggtgcggttccgtggtatacgataaatttagatttaccgccgtataaacgttggcatgaattaatgttagataaagcgccggttctaaaagtaatagttaattcgttaaaaaatatgataaatacgtttgtaccgtcgggtaaaataatgcaagtagtagatgaaaaactaccgggtctattaggtaattttccgggtccgtttgaagaagaaatgaaaggtatagcggcggtaacggatataccgctaggtgaaataatatcgtttaatatattttatgaattatttacgatatgtacgtcgatagtagcggaagataaaaaaggtcatttaatacatggtcgtaatatggattttggtgtttttctaggttggaatataaataatgatacgtgggttataacggaacaattaaaaccgttaacggtaaatttagattttcaacgtaataataaaacggtatttaaagcgtcgtcgtttgcgggttatgtaggtatgttaacgggttttaaaccgggtttattttcgttaacgttaaatgaacgattttcgataaatggtggttatttaggtatactagaatggatattaggtaaaaaagatgttatgtggataggttttctaacgcgtacggtattagaaaattcgacgtcgtatgaagaagcgaaaaatttactaacgaaaacgaaaatattagcgccggcgtattttatattaggtggtaatcaatcgggtgaaggttgtgtaataacgcgtgatcgaaaagaatcgttagatgtatatgaattagatgcgaaacaaggtcgatggtatgtagtacaaacgaattatgatcgatggaaacatccgttttttttagatgatcgtcgaacgccggcgaaaatgtgtttaaatcgaacgtcgcaagaaaatatatcgtttgaaacgatgtatgatgtattatcgacgaaaccggttttaaataaattaacggtatatacgacgctaatagatgtaacgaaaggtcaatttgaaacgtatttacgtgattgtccggatccgtgtataggttgg

SEQ ID NO: 252769 - DNA, 1185 bp, Artificial Sequence
  derived and/or modified sequence
atgcctggccgatcatgtgtggcccttgttcttcttgcagcagcagtgtcatgtgccgtggcccaacatgcaccaccgtggaccgaagattgtcggaagtccacttatcccccttccggacccacttatcggggagcagtgccttggtacacgattaatctcgatcttccaccatacaagcgttggcatgagcttatgctggataaggcacctgttctgaaagtgattgtgaactcactcaaaaacatgataaacacgtttgtgccatcgggtaagatcatgcaggtggtggatgagaagctccctggactgctgggtaactttcctggaccatttgaagaagagatgaaaggtatcgcagctgtgacggacattcctttgggcgagattatctccttcaacatattctacgaactttttaccatttgcacttctattgtggctgaagataagaaggggcatttgattcatggtaggaacatggactttggcgtctttctgggttggaatatcaataacgacacttgggtcattaccgaacagctcaagccccttaccgtcaatctcgattttcagcgaaataacaaaaccgtctttaaggcctcgagcttcgcgggctacgtgggaatgctgaccggcttcaagcctggactcttctcactgaccctgaacgaaaggtttagcattaacggtggctacttggggatcctggagtggattctcggtaagaaggacgtgatgtggattgggttccttacgagaactgtgctcgaaaactcgacttcctacgaggaggcaaagaaccttttgacgaaaaccaagatcctggctcccgcatactttatactggggggcaatcaatcaggcgaagggtgtgtgattaccagagatcgtaaggaatccctggatgtgtacgagctggatgccaaacagggccgttggtatgtcgtgcaaaccaactacgacagatggaagcacccttttttcttggacgatcgccgcactcccgcaaaaatgtgcctcaacagaaccagccaggagaatatctcgttcgaaactatgtacgatgtcctgtcaactaagcccgtcctgaacaagttgactgtctacaccacgcttattgacgttactaagggtcaattcgaaacttatctccgagattgtccagacccatgcatcggatgg

SEQ ID NO: 252770 - DNA, 1185 bp, Artificial Sequence
  derived and/or modified sequence
atgcccggtaggagctgcgtggcactggtgcttttggctgctgccgtcagctgtgccgtggcacagcacgcacctccttggacagaagactgtaggaagagtacctatccgccatcgggcccgacatacaggggtgctgtgccatggtacactattaacctcgatctgcctccctataagcgttggcatgagctgatgctcgacaaagcaccagtcctgaaagttattgtcaactcccttaagaacatgatcaacactttcgtgccgtctggaaaaatcatgcaggtggtggatgaaaagctccctggcctgctaggcaatttccctggcccattcgaggaagaaatgaaaggcatcgccgctgtgacagatattcccctcggagagattatcagctttaacatattttacgaactcttcactatatgcaccagcattgtggcagaggataaaaagggccacttgattcatggccgcaacatggacttcggagtcttcctgggttggaacatcaacaacgacacctgggtcatcaccgagcaactgaagccactcaccgtgaacctcgattttcagcggaacaataagaccgttttcaaagcgtcttcctttgccggttacgttggcatgctgacgggcttcaagccgggtctgttttctctgactttaaatgagaggttttcaattaacggaggctaccttggaattcttgagtggatactgggcaaaaaggacgtgatgtggatcgggtttctgacccgcacagtactggaaaattcgacatcatacgaggaggcaaagaacttacttacaaagacaaagatccttgctccggcttacttcatcctgggaggaaatcaaagtggagagggttgtgtgatcactagagaccggaaagaaagcctggacgtttatgaacttgacgctaaacagggtcgttggtacgtggtgcaaacaaactatgacagatggaagcatcccttcttcctcgacgaccgccgcactccagctaaaatgtgcctgaacaggacgtcccaggaaaatatttcctttgaaaccatgtacgatgtgctctcaaccaagcccgtgctcaataagctcactgtctatactacattgatagacgtgaccaaaggccaatttgagacttatctccgggattgccctgatccatgtatcggatgg

SEQ ID NO: 252771 - DNA, 1185 bp, Artificial Sequence
  derived and/or modified sequence
atgcccggtagatcttgtgtggctttggtgcttcttgccgcagccgtctcttgtgccgtcgcccagcacgcacccccttggaccgaggattgcaggaagtccacttaccccccatcagggcctacataccgaggggcggtcccatggtatacaattaatctggacctgccaccttacaagcggtggcacgagctgatgctcgataaggccccagtcttgaaggtcatcgtcaattccctgaagaacatgataaatacattcgttccgtctggcaaaatcatgcaggtggtagatgagaagctgcctggcctgctgggtaactttccgggacccttcgaagaggagatgaaaggaatcgctgcggtgacagatataccgcttggagagatcatctctttcaacattttctatgaattgtttactatatgcactagcattgtcgccgaggacaaaaagggacatctcattcacggacggaacatggatttcggagtttttctcggctggaacattaacaacgacacttgggtgatcactgagcagctgaagccgcttaccgtaaacctggacttccaaaggaacaataaaactgtttttaaggctagttcttttgctggctatgtcggcatgctgacaggtttcaagcccggactcttttcattgacacttaacgagcgattctctatcaacggaggttatttgggaatcctcgaatggatactggggaagaaagatgtgatgtggatcggtttcctgacacgcactgttctcgaaaactccaccagttatgaggaggccaagaatctcctgaccaaaaccaagatcctggcccccgcatacttcatcctgggcggcaaccagtctggggaaggatgcgtaatcacaagagacagaaaagaaagcttggatgtgtacgagttggacgcaaagcaaggcaggtggtacgtggtccagacgaattatgataggtggaaacacccattttttcttgacgaccgaaggacgcctgccaagatgtgcctgaatcgcacctctcaggagaatatctcctttgagacgatgtacgacgtcctgagtaccaaacccgtgctgaacaaattgacagtctacaccaccctgatcgacgtgacaaaaggtcagttcgagacatatcttcgggactgtcctgacccctgcatcggatgg

SEQ ID NO: 252772 - DNA, 1185 bp, Artificial Sequence
  derived and/or modified sequence
atgcccggaagatcatgtgtggccctggtgctgctcgcggcagccgtcagctgcgctgtggcacagcacgctccgccatggaccgaagattgcagaaaatccacttacccgccttctggccccacttaccgcggagctgtgccgtggtacaccatcaacctcgacctgcctccttacaagcggtggcacgaactcatgttggacaaagcaccagtgctgaaggtgatcgtgaactcactgaagaacatgatcaatacgttcgtgccaagcgggaagattatgcaagtcgtcgatgagaaattgccagggctgctgggaaacttcccgggaccgttcgaggaagagatgaaggggattgccgcagtgacggatatcccactcggagaaatcatctccttcaacatcttctacgaacttttcaccatctgcacttcgatcgtcgccgaggacaaaaagggccatctgatccacggcaggaacatggacttcggcgtgttcctgggatggaacattaacaatgatacttgggtcattactgaacagctgaagccccttaccgtgaacttggattttcagcgcaacaataagactgttttcaaggcgtcgtcgtttgctggttacgtgggaatgctcacgggattcaaacctgggctgttttctctcacccttaatgaacggttttcgatcaatggaggatatctgggcatcctggaatggatcctgggaaagaaggatgtcatgtggatcggatttctgactaggaccgtgctggaaaattccaccagctacgaggaggctaagaatctcttgaccaagacgaagatcctggcgccagcctactttatcctgggaggaaaccaatcaggagaaggctgtgtgatcacccgcgatcgaaaagagtcactggacgtgtacgaactggacgcgaagcagggcaggtggtacgtcgtgcagactaattacgaccgctggaagcacccgttcttcctggacgaccgcagaacgccggccaagatgtgcctgaaccggaccagccaggaaaacatctccttcgagactatgtacgacgtcctgtcaactaaaccggtgttgaataagctgactgtctacactactctcattgacgtgactaagggacagttcgaaacttacctccgcgattgccctgatccttgcatcgggtgg

SEQ ID NO: 252773 - DNA, 1185 bp, Artificial Sequence
  derived and/or modified sequence
atgccaggaaggtcgtgcgtggcgctcgtgcttctggccgccgccgtctcctgcgcagtggcgcagcatgctcctccgtggaccgaggactgccggaagagcacctaccccccatccggtcctacctaccggggtgccgtcccgtggtacactatcaaccttgacctccccccgtacaagaggtggcacgagctgatgctcgataaggcacctgtgctcaaagtgatcgtgaactcgttgaagaacatgatcaatactttcgtgccgtcgggtaagatcatgcaggtcgtggatgaaaaactccctggactgctcggtaacttcccgggaccgttcgaagaagagatgaaaggtatcgccgccgtgacggacatccctctgggggaaatcatctcgttcaatatcttctacgaacttttcactatctgtacctccatcgtcgctgaggacaaaaaggggcatctgatccacggacgcaacatggacttcggagtgttcctgggctggaatatcaacaatgatacttgggtgatcaccgaacagctgaagccgctcactgtcaatctcgatttccagagaaacaacaaaactgtctttaaggcttcgagctttgccggatacgtcggcatgctgacggggttcaagccgggcctgttctccctgacgctcaatgaacggttctcaattaacggaggttatctcggaatcctggagtggatcctcgggaagaaggacgtgatgtggatcgggttcctgacccggactgtgttggagaactcgacttcctacgaggaggcgaagaaccttctgactaaaaccaagattttggcccctgcctactttatcctcggaggaaaccagagcggcgaggggtgcgtgatcacccgcgaccgaaaagagagcctggacgtgtacgaactcgacgccaagcagggacgctggtacgtggtccagaccaattacgaccgctggaagcacccattcttcctggacgatagacgtactccagccaaaatgtgtctcaaccggacctcacaagaaaacatcagcttcgaaactatgtacgatgtgctctccaccaaaccggtgctcaacaagctgactgtctacaccaccctgatcgatgtgaccaagggacaattcgaaacgtacctgcgggattgcccggacccctgcattggttgg

SEQ ID NO: 252774 - DNA, 1185 bp, Artificial Sequence
  derived and/or modified sequence
atgcccggaaggtcttgtgtggcacttgtcctgcttgccgccgcagtttcctgtgcagtggcacagcatgccccaccctggactgaggactgtagaaagagcacctacccgcccagcggcccaacttacagaggagccgtgccttggtacacaattaacctggaccttccaccttacaaaaggtggcacgaattaatgctcgataaagcccccgttcttaaggtcatcgtgaattctcttaagaacatgataaatacattcgttccctcaggcaaaattatgcaggtcgtggatgaaaagcttcccggtttactggggaacttcccaggtccctttgaagaagagatgaaaggaatcgctgcagtgacagatatcccattgggtgaaattatctcattcaatatattctatgagttattcaccatctgtacaagtatcgtggcggaagacaagaaaggccatttgatacacggtcgtaatatggactttggcgtttttttaggctggaacattaataatgatacctgggtgatcaccgagcaactgaaacctctgacagtcaacctggacttccaaagaaacaataaaacggtttttaaggcgtccagcttcgctggctacgtggggatgctgaccggctttaagcccggtttgttcagcctgactctcaacgaacgcttcagcatcaatggagggtacctgggcattcttgaatggattctcggcaaaaaagatgtgatgtggatcgggttcttaacacgcacggtgctggagaatagcacctcatacgaggaggcaaagaatctgctaacgaaaactaagatcttagcacctgcgtacttcattcttggcggcaaccaaagtggggagggctgtgtgatcacccgcgacagaaaggaatctttggatgtgtatgaactggacgccaagcaaggacggtggtacgtggtgcaaaccaactatgacagatggaagcacccctttttcctcgacgaccgcaggacacctgctaaaatgtgtttgaacaggacgtcccaggaaaacatttcattcgaaactatgtacgacgtgctgtccaccaaacctgtgttaaacaaactgacagtgtatacaaccctcattgatgttactaaggggcagtttgagacttatttgagagactgtccagacccctgcatcgggtgg

SEQ ID NO: 252775 - DNA, 1185 bp, Artificial Sequence
  derived and/or modified sequence
atgccgggccgaagctgcgtggcgcttgtgctgttagctgccgcagtctcctgtgcggtggcccagcacgctcccccgtggaccgaggactgtcgtaaatccacgtaccccccttctggccccacgtaccgcggcgctgtgccatggtatactattaatctggaccttcccccctacaaacggtggcacgagttgatgcttgataaagctccggtgcttaaggtcattgtgaacagtttgaagaatatgattaatacattcgtcccgtccgggaagattatgcaggttgtagatgagaagctaccaggtttgctgggcaatttcccgggaccattcgaagaggaaatgaaggggatcgcggcggtaacggatattccactcggagaaatcatttcttttaatattttctacgagctctttactatctgcacctccatcgtagcagaggacaagaagggtcaccttatccacggacgcaacatggatttcggcgtcttcttgggatggaatatcaataacgatacgtgggtgatcactgagcaactcaagcctcttaccgtgaacttggacttccagcgtaataataaaacagtctttaaggcttcaagcttcgcaggatatgtcggcatgcttacaggtttcaagcccggcttgttctccctaacactgaatgagcgcttcagtattaacggcgggtacctcggcatccttgagtggatcttgggcaagaaggacgtcatgtggataggtttcctgacgcgaactgtactagagaactcgacatcgtacgaagaggctaagaatcttctaaccaagacaaaaattcttgcacctgcttatttcatcctcgggggaaaccagagcggtgaaggttgtgtgatcaccagagaccgtaaggagagtctcgatgtctacgagcttgacgctaaacagggtcggtggtatgtagtgcaaactaattatgaccgttggaaacatccatttttcctagacgaccgtaggacgcctgcgaagatgtgcctaaatcggacttctcaagagaatatcagcttcgagactatgtacgacgtcctctctaccaaacccgtcctgaataaactgacagtgtacaccacactcattgacgtcaccaaaggtcagtttgaaacatacctgcgtgattgtccagacccctgcatcggttgg

SEQ ID NO: 252776 - DNA, 1185 bp, Artificial Sequence
  derived and/or modified sequence
atgcctgggcggtcttgcgtggccctcgtcttactggccgctgccgtgagttgcgcagtagcacaacacgcaccgccctggaccgaagactgtagaaaaagtacctaccccccatctgggccaacatatcgaggtgccgtgccctggtacaccatcaacttggatctcccgccatacaaaagatggcatgaactcatgctggacaaggctcctgtgctgaaggtaatcgtgaatagcctaaaaaatatgattaatacttttgtgccaagcgggaagataatgcaggtagtggatgaaaaattacccggtctgttgggaaacttccccggcccctttgaagaagaaatgaagggaatcgcagccgtaactgatataccgctcggtgagatcatttcctttaatatcttctatgagctttttacgatctgcacatctatcgttgcagaggataaaaagggacacttgattcatggtagaaatatggacttcggggtgtttctcggatggaatatcaataatgatacttgggtcataaccgagcagcttaagcctttaacagtgaaccttgatttccagcgaaacaataagacggtgtttaaagctagtagtttcgcgggttatgtcgggatgcttaccggattcaaacccggcctcttttctctcactttaaatgaaaggttcagcataaatggagggtatctgggcatactggagtggatactgggcaagaaagacgttatgtggataggcttccttactcggaccgtgctggagaattccacaagctatgaggaagccaagaacctcctgacaaagaccaagatccttgctcctgcttactttatcctagggggtaaccagtccggcgagggctgcgtcattactagagatcgaaaggaatctctagatgtgtacgagcttgatgcaaagcagggaaggtggtatgtcgtccagacaaactatgatcggtggaaacaccctttttttttagatgatcggcggacgcccgccaagatgtgtctcaatcggacttcacaagagaatatctcgttcgaaaccatgtacgacgtactctccacaaagcccgtgctgaataaactcactgtgtatacgactctcattgacgtcaccaaaggtcagttcgagacttacctgagggactgtcccgacccttgcatcggctgg

SEQ ID NO: 252777 - DNA, 1185 bp, Artificial Sequence
  derived and/or modified sequence
atgcccggacggtcatgcgtggcattggtgttgctggcggctgccgttagttgcgcagttgcgcagcacgctcccccgtggacggaggactgccggaagagcacctatcccccttctggcccaacgtacagaggtgcagtcccttggtacaccataaacctggatctccccccctacaagaggtggcacgaactgatgctggacaaggctcctgtgttgaaagtgattgtgaatagcctcaaaaacatgatcaacacttttgtgcccagtggcaagataatgcaggtcgtggacgaaaagctgcctggactgcttgggaacttccccggccctttcgaagaggaaatgaaaggcatcgcagcagtcaccgacatcccgctgggcgaaattatatcctttaacatcttttacgagctcttcaccatttgcacctctattgtggccgaagacaaaaaaggacacctcattcatggacgcaatatggattttggcgtgtttctcggctggaacatcaacaatgatacctgggtgattaccgagcagctgaaacccttgacagtcaacctcgatttccagagaaacaacaagaccgtttttaaggcaagttcttttgccgggtatgtgggaatgctgaccgggttcaagccaggattgttttcactgaccctgaacgagagattttctattaacgggggatacctgggaatccttgagtggatcctgggtaaaaaagatgtcatgtggatcggcttcctcacccggaccgtcttggagaactctacttcctatgaagaagcaaagaacttgctgacaaagaccaagatcctggcccctgcatattttatccttggaggcaaccaaagcggcgaaggatgtgtgatcacacgggatagaaaagaatccctggatgtttatgaactcgacgccaagcaagggcgttggtacgttgttcagacaaactatgaccgctggaagcaccctttcttcctggatgatcgtagaacccctgctaagatgtgcctgaacaggaccagccaagagaatatcagtttcgaaacaatgtacgacgtccttagcaccaaacccgtcctgaataagctgaccgtttacactaccctcattgacgtcacgaaaggacagtttgaaacatacttaagggactgcccagacccatgtatcgggtgg

SEQ ID NO: 252778 - DNA, 1185 bp, Artificial Sequence
  derived and/or modified sequence
atgcccggaaggtcctgtgtcgcactggttcttctcgccgcagccgtgagctgtgccgtcgcgcaacatgccccgccctggacggaggattgtcggaagtcaacctaccccccttccgggcctacctacaggggtgccgtcccgtggtacactattaaccttgatctgcccccctacaagcgatggcatgaattgatgttggataaggcccctgtgctgaaggtgattgtgaattcgctcaagaatatgattaacaccttcgtgcccagcgggaagataatgcaagtcgtcgatgaaaaactccccggtctgctgggtaactttccaggtccatttgaggaagaaatgaagggaattgctgcggtgactgatattccactgggcgagatcatttcgttcaacatcttttacgagctcttcaccatctgcacgagcattgtggcagaagataagaagggacaccttatccatgggagaaatatggattttggagtgtttcttgggtggaacattaacaacgatacctgggtgatcaccgaacaactcaaacctctgactgtcaacctggactttcagcgcaataacaaaactgtgttcaaggcctcatcctttgcaggttacgtgggcatgcttacgggcttcaagcccggtctgttctcgcttactcttaacgaacggttttcaatcaacggtggctacctgggtatccttgagtggatcctgggtaagaaagatgtgatgtggatcggcttcttgacccgaactgtgctcgagaattcgacctcctacgaggaagccaagaacctgcttactaagaccaagatccttgcacctgcatacttcatccttggaggaaatcaatcaggagagggatgtgtgattacgagggaccggaaagaatccctggatgtgtatgaacttgatgccaagcaagggcgctggtacgtggtgcaaaccaactacgatcggtggaagcacccctttttcctcgacgatagacggacgccagcgaagatgtgtttgaaccgcacctcacaggaaaacatctcgtttgaaactatgtatgacgtgctctcgaccaagcctgtgcttaacaaacttactgtctacaccaccctgattgacgtcaccaagggccaatttgagacgtacctgagggactgtccagacccatgtattggatgg

SEQ ID NO: 252779 - DNA, 1185 bp, Artificial Sequence
  derived and/or modified sequence
atgcccggccgttcctgtgttgcactagttctgctggccgctgccgtgtcatgtgctgtggcccagcatgccccaccatggaccgaggactgccggaagagcacgtacccaccgagcgggccaacctaccggggtgcggttccttggtataccatcaacctggaccttcctccatataaacggtggcacgagctcatgcttgacaaggcccccgtgctcaaggtgatcgtgaacagtttaaagaacatgatcaatacatttgtccctagcggaaagatcatgcaggtcgtcgacgagaaactaccggggctgcttggaaacttccccgggccttttgaggaggagatgaaggggattgccgctgtgacggatattccgctgggggagattatcagctttaatatcttctatgagctcttcactatttgtacaagcattgttgccgaggacaagaagggtcacttgattcatggaagaaacatggacttcggagtcttcctcggttggaacatcaataacgacacttgggttataactgagcagttgaaacccctgaccgtgaatctggactttcagcgaaataataagaccgtgtttaaggcaagtagttttgccggctatgtgggaatgctgacgggttttaagccaggccttttttctcttaccctgaacgaaaggtttagcataaacggagggtacctgggaatcctggagtggattttaggcaagaaggatgtcatgtggattgggtttctcactcgtacagtcctggagaactcaacatcctatgaagaggctaaaaacctgttaaccaagaccaaaattctagctcctgcgtacttcatcctggggggaaaccagagcggcgaggggtgcgtgattacacgggatcgcaaagagtccctcgacgtctacgagctggacgctaagcaaggaaggtggtacgtggtgcagacaaactatgatagatggaaacaccctttctttctagacgaccgacgcacgcccgccaaaatgtgtctaaacaggacttcgcaggagaatatcagtttcgaaaccatgtacgatgtgctgtccacgaagcccgtcctaaacaaactcaccgtatataccacactgatcgatgtgacgaagggtcaattcgagacctacctacgagattgtcccgatccctgtatagggtgg

SEQ ID NO: 252780 - DNA, 1185 bp, Artificial Sequence
  derived and/or modified sequence
atgcctggacggtcatgcgtggcgcttgtgctcctggccgccgcagtgtcctgcgctgtcgcacagcatgccccgccctggactgaggattgccgaaaatcgacctacccgccgagcggaccgacctacagaggtgcggttccgtggtacactatcaacctcgacttgccgccgtataagagatggcacgagctgatgctcgataaggctccagtgctgaaggtgatcgtgaactcgctgaagaacatgattaacactttcgtccctagcggaaagatcatgcaggtggtggacgagaagctgcctggactgctgggaaactttcctggacccttcgaagaagagatgaaggggatcgccgccgtgaccgacatccctctgggcgagatcatcagcttcaacattttctacgagctcttcactatttgcactagcatcgtcgcggaggacaaaaaaggccacctgatccatgggcggaatatggacttcggggttttcctcggctggaatatcaataacgatacctgggtcatcactgagcagctgaagccactgacggtgaacctcgatttccagcggaataacaagaccgtctttaaggcctcatccttcgcaggatacgtgggcatgctgactggattcaagccgggactcttttcactgaccctcaacgaaagattttcaattaacggtggatacctgggcatcctggaatggatccttggtaagaaagacgtgatgtggattggctttctgactcggactgtgctcgaaaactcgacttcgtatgaagaggccaaaaacctgctgaccaagactaagatcctggccccggcctacttcatcttgggcggtaaccagtccggagagggctgtgtcatcactcgggataggaaggaatcactggatgtgtacgagctcgacgcaaagcagggaagatggtatgtggtccaaactaattacgatcgctggaagcatcctttctttctggatgaccgccgtaccccggcgaaaatgtgcttgaaccggacctcgcaggagaacatttccttcgagactatgtacgacgttctcagcaccaaaccagttctcaacaagctgaccgtctacactaccctgattgatgttactaagggccaattcgaaacttacttgcgcgattgccccgatccgtgtattggatgg

SEQ ID NO: 252781 - DNA, 1185 bp, Artificial Sequence
  derived and/or modified sequence
atgcctggcaggtcctgtgtggccttggtgcttcttgccgccgcagtgtcgtgtgcggtcgcccagcacgcccctccttggaccgaggactgtcggaagagcacctaccctccctccggcccaacctacagaggtgccgtgccctggtacaccattaacttggacctgcccccgtacaagagatggcatgaattgatgcttgataaggcccctgtgctgaaggtgattgtcaactcacttaagaacatgattaacacgtttgtccctagcgggaagattatgcaggtggtggatgagaagctgcctggactgctgggaaacttcccaggtccatttgaagaggaaatgaagggaattgcagcagtgaccgacatccccctcggtgagattatcagctttaacatattctacgaacttttcactatttgcaccagcatagtcgccgaggataagaaaggtcatcttatccatggtcgtaacatggattttggtgtttttctgggatggaatatcaataacgatacctgggtaattacggagcaacttaaacctcttactgtcaatctggatttccaaagaaataacaagaccgtgttcaaagcctcgagctttgcgggatacgtgggcatgctgactggctttaagccaggactgtttagcctcaccctcaacgaacggttcagcatcaacggtgggtatctcggaatacttgaatggatacttgggaagaaggatgtgatgtggattggatttctcactagaactgttcttgaaaattcgacctcctacgaagaggcgaagaaccttctgactaagaccaagattcttgcacctgcatactttattctgggaggaaatcagtcaggtgagggatgcgtcatcactcgcgacagaaaggaatccttggatgtctacgaactggacgccaaacagggtcgatggtatgtggtccagaccaactacgataggtggaagcacccttttttcttggacgatcgcaggacgcctgctaagatgtgcctcaaccgcacttcacaagagaatatctcgtttgaaaccatgtacgatgtgcttagcacgaagcccgtcttgaataagctcaccgtttacactacgcttattgatgtgactaagggtcagtttgaaacgtacctgcgggattgcccggacccatgtataggctgg

SEQ ID NO: 252782 - DNA, 1185 bp, Artificial Sequence
  derived and/or modified sequence
atgcccggaagaagttgcgtggccctagtcctcctggcagcagcagtgtcatgcgctgtggcccaacatgcacccccctggacagaagattgccggaagtcgacatacccaccctccgggcctacatataggggagccgttccttggtacaccataaatctggacttgcccccctataagcgatggcacgaattaatgcttgataaggccccagtgctgaaagtgatagtcaactccctcaaaaatatgattaatacatttgtgccgagtggaaagatcatgcaggtggtggatgagaagctaccagggctccttggcaacttcccggggcccttcgaggaggagatgaaggggattgccgcagttaccgacattcctctcggagaaattatttcctttaatattttttatgaactttttaccatttgtacatctattgtggccgaggataaaaagggtcatctgattcatggtcgcaatatggactttggcgtctttctcggatggaatattaataacgacacatgggttatcaccgagcagctgaaacctctaaccgtgaatcttgattttcagaggaacaacaagacagtcttcaaagctagctcctttgcagggtacgtgggtatgcttaccggctttaagcctggactattctcactgacccttaacgaacgtttttcaatcaacggcggatacttaggcatcttggaatggatactcggcaagaaagacgtgatgtggattggattcctgacgaggactgttcttgagaattctaccagctatgaagaagcaaagaatctgttgacgaagaccaagattctggcaccggcctactttatacttgggggcaatcagtctggcgaaggttgtgttatcactagagatcgaaaggagagcctggatgtgtacgaactggatgccaagcaaggcaggtggtatgtggtgcagactaattacgatcgctggaagcacccattcttcctcgacgaccgtcgcacaccagccaagatgtgtctaaacagaacctcccaggagaatatttctttcgagacaatgtatgacgttttaagcaccaaacctgtgctcaacaaactcaccgtgtataccacattgatcgatgttaccaaggggcagtttgaaacctacctgcgtgactgcccagatccctgtatcggctgg

SEQ ID NO: 252783 - DNA, 1185 bp, Artificial Sequence
  derived and/or modified sequence
atgccagggcgctcctgcgtggcgctcgtgttgctggctgcagcagtgtcgtgtgcagtggcccaacatgccccaccctggaccgaggactgtaggaagtcgacctatccaccatcaggtccgacttacaggggtgcggttccatggtacaccatcaatctggatctccctccatataagaggtggcatgaacttatgctggataaagcacctgtccttaaggtgattgtcaactcactcaagaacatgattaacacctttgtcccttcgggtaaaatcatgcaggttgtggatgaaaagctgcctgggcttctgggcaactttccaggtccatttgaggaggagatgaagggaattgcagcagtgaccgacattcccctcggagagattatctcatttaacatcttctatgagctgtttaccatctgtacgtccattgtggcagaagataagaaaggccacctgatacatggaagaaacatggattttggagtattcctcggatggaacatcaacaatgatacttgggtgattaccgaacagctgaaaccgctgaccgtgaacctggactttcaacgtaacaataagaccgtgttcaaggcatcatcatttgccgggtatgtcggaatgctcaccggatttaagcctgggcttttctcactgacgctcaatgagcggttttcaattaacggaggatacctgggtattcttgaatggatactggggaaaaaagacgtcatgtggataggttttttgactagaactgtcttggaaaacagcaccagctacgaagaagcaaagaatctccttactaaaaccaagattctggcgccagcatacttcatcctgggaggaaaccagtccggcgagggatgtgtgatcactagagatagaaaagagtcgctggatgtctacgaacttgatgcaaaacaaggtcggtggtacgtggtgcaaactaattacgatcgctggaaacatccgtttttcctggacgatagacgaaccccagcaaagatgtgtctcaaccgcacttcccaggaaaacatctcgttcgaaactatgtatgatgtgctttcgacgaagccggtgttgaacaagctgactgtgtacaccacgctgattgacgtgaccaaggggcaatttgaaacttacttgcgggactgtccagacccatgcatcgggtgg

SEQ ID NO: 252784 - DNA, 1185 bp, Artificial Sequence
  derived and/or modified sequence
atgcctggaagatcatgtgtcgcactggtcctcctggccgccgccgtgtcttgtgccgtggcccagcacgcaccaccatggacagaggattgtcgcaaatctacgtatcctcctagtgggcccacttaccggggggccgttccctggtacacaatcaatctcgatctcccaccttataaaaggtggcatgaactgatgttggataaagctcctgtgcttaaagtcatagttaattctctgaagaatatgataaacacattcgtcccaagtgggaaaataatgcaggtcgtagatgaaaaattgcctggattactcgggaatttccccggacctttcgaagaagagatgaaagggatcgccgctgtgactgatatcccactaggagaaatcatctcatttaacatattctatgaactgttcactatctgcacttccatagtcgccgaagataaaaaggggcaccttattcacgggaggaacatggactttggggtgtttctgggatggaatatcaacaatgatacttgggtaattactgaacagctcaaacccctgactgtcaacctggatttccagcgcaacaataaaacagtgttcaaggcttcatcttttgcagggtatgtcggaatgttaacagggttcaaacctgggctcttctcgttaacattaaacgaaaggttttctataaatgggggatatctgggaattctggaatggatactggggaaaaaagacgtcatgtggatcggattcctgacaaggactgtgctcgaaaactctacaagttatgaagaagctaaaaaccttcttacaaaaactaaaatactggctccagcatatttcatacttggggggaatcagtctggagaagggtgtgtcattacaagggaccggaaagaatctctcgacgtgtatgaactcgatgcaaaacaggggagatggtatgtggtgcagacaaattatgataggtggaaacatcccttcttccttgacgaccgccggactcccgctaaaatgtgcctgaacaggacttcacaggagaacatttcattcgagacaatgtatgatgttctatctacaaaaccagtgctgaataaactaacagtatatactactctgatcgatgtgacaaaaggacagttcgaaacatatctccgcgactgccctgacccctgcatcggatgg

SEQ ID NO: 252785 - DNA, 1185 bp, Artificial Sequence
  derived and/or modified sequence
atgcccggtcgatcttgcgtggcccttgtactcctagcagccgccgtgtcctgcgctgttgcccagcatgccccaccgtggacagaagactgtcgcaagagtacctacccccccagtggacctacctatcgcggcgccgtgccatggtatacgattaacctggatctgccgccatacaaaaggtggcatgaactgatgctcgacaaagcgcccgtgctaaaggtgatagtgaacagtctcaagaatatgataaataccttcgtgccatcgggaaagattatgcaggttgtggatgagaagctgccaggactgcttggcaacttcccaggtccttttgaggaagaaatgaagggaatcgctgccgtgacagacattcctctcggcgaaatcatatctttcaatattttctacgagctgtttactatctgcacgagcatcgtggcagaggacaagaaagggcacctcatccatgggagaaacatggattttggagttttcctcggttggaacatcaacaatgatacctgggtcataactgagcaacttaagccactgacagtgaatttggactttcagaggaataacaagactgtgttcaaggccagctctttcgctgggtatgtcggaatgttgactgggtttaagcctggtctcttcagtctcacgttaaatgaacgattttccatcaatggcgggtacctggggattctggagtggattctgggcaaaaaagacgtgatgtggattggcttcttgactcgcaccgtattggagaacagtacatcgtacgaggaggctaaaaatttactgaccaaaactaaaattctggctccagcctactttatccttggagggaaccagagcggcgaaggctgcgtcatcactcgggacagaaaggaatcattagacgtgtatgagcttgatgccaagcagggccgctggtacgtggtacaaacaaattacgaccgatggaagcacccattttttctggatgataggcgcacccccgccaagatgtgtttaaacaggaccagccaggagaacatctccttcgagacaatgtacgacgttctatccacaaagccggtgctgaacaagcttacagtgtacacaacactaatcgacgttaccaagggacaatttgaaacatatctccgggactgcccggatccctgtataggatgg

SEQ ID NO: 252786 - DNA, 1185 bp, Artificial Sequence
  derived and/or modified sequence
atgcctggacgctcgtgtgtcgcactggtgcttctggctgcagccgtctcctgtgcggtcgctcaacatgcgcccccttggaccgaggactgtcgcaagtcgacctaccctccctcagggcccacctacagaggcgccgtgccttggtacacgattaacctggatcttcctccatacaagagatggcacgagctgatgcttgacaaggccccagtccttaaggtgattgtgaattccctgaaaaacatgattaacacgttcgtgccatcaggcaagataatgcaagtggtcgatgagaaacttcccggtctgctgggtaactttccgggaccttttgaggaagaaatgaaaggtatcgcagctgtgactgacatccctcttggggagattatctctttcaacattttctacgaactttttaccatttgtacctccattgttgcagaggacaagaagggacaccttatccatggaagaaacatggactttggcgtatttctgggttggaacattaacaacgacacttgggtcataaccgagcaacttaagccattgactgtcaatcttgactttcaacggaacaataagaccgtgtttaaggcgtccagctttgccgggtatgtggggatgctgactggtttcaagcctggcctcttttcccttaccttgaacgagaggtttagcataaacgggggatacctgggaatcctggaatggattctgggaaaaaaggatgtcatgtggatcgggtttctgacccggaccgtcctcgaaaattcgacctcatacgaagaggccaaaaacctcctcaccaagactaagattctcgcacctgcatacttcatacttggtgggaatcagtccggggaaggatgcgtgattacccgcgaccgcaaagaatcgcttgatgtgtacgaactcgacgcaaagcagggcaggtggtacgtggtgcagactaattacgatagatggaagcatccgttttttctcgacgatcggagaaccccggctaaaatgtgtctgaatcggacttcccaagagaacatttccttcgaaactatgtacgacgttctttcgaccaagcccgtgctcaacaaactgacggtgtacactacccttatcgacgtaactaagggacaattcgaaacgtaccttagagactgtccagatccatgcattggttgg

SEQ ID NO: 252787 - DNA, 1185 bp, Artificial Sequence
  derived and/or modified sequence
atgcctggccgttcctgtgtggcattggtgctcctggcagccgccgtttcctgtgctgtggctcaacacgcaccaccatggaccgaagattgtcgaaagtctacgtaccctccaagcgggcccacatatagaggagccgtgccctggtacactatcaatctagacctgcctccgtacaaaagatggcacgagcttatgctggataaagcccccgtcctcaaagttatcgtcaactctctgaagaatatgataaacacctttgtcccttcaggtaaaattatgcaagttgtcgatgagaagctgccaggcctcttgggcaactttccaggcccgttcgaggaagaaatgaagggtatcgcggcagtgaccgatatacccctcggcgaaattatcagctttaacatcttctatgagctcttcaccatatgtacttctattgtggccgaagacaaaaaaggtcatctcatccacgggcgaaatatggatttcggcgtgttcctcggatggaacatcaataatgatacctgggttataacagaacagctgaaacccctgacagttaacctggacttccagcggaataacaagaccgtgtttaaagcctcgagcttcgcgggctacgtgggcatgttgacagggtttaagccagggctcttttctctcacgctgaacgaacgattctccatcaatggcggctatctgggtatcctggagtggattcttggtaaaaaagatgtgatgtggattggtttcctgacccggaccgttctggaaaatagtactagttacgaagaagcgaaaaatctgctgacaaagacaaaaatcctggctccagcatacttcattcttggaggaaaccaatcgggagaggggtgtgtgataacccgcgaccggaaggaaagcttggatgtctacgagcttgacgctaaacagggccgatggtacgtggtgcagaccaattacgacaggtggaagcatccatttttcctcgatgacaggaggactcctgccaagatgtgtttgaaccgcacctcgcaggagaacatcagttttgaaaccatgtatgacgtcctgagcacgaagcctgtactgaacaagctgaccgtttacaccaccttaattgatgttaccaaggggcagttcgaaacctacctccgggactgccccgacccttgcatagggtgg

SEQ ID NO: 252788 - DNA, 1185 bp, Artificial Sequence
  derived and/or modified sequence
atgccaggtcgcagctgcgtggcactagtgcttctggccgcagcagtgtcctgtgccgtggcacagcacgcccctccttggaccgaagactgcaggaagtcaacttatcctcctagcggcccaacatatagaggcgcagttccgtggtataccattaatctggacctgcctccatataaacgatggcacgaacttatgttggataaagcaccagtgctgaaggtcatagtgaatagtctgaaaaatatgatcaacactttcgtcccctctggcaagattatgcaggtggtagatgaaaaactccccggtctgctggggaacttcccggggcctttcgaggaggagatgaagggtatcgccgccgtgaccgacatccctttaggggaaatcatcagttttaatattttctatgagctgttcacaatatgcacctcaattgtcgccgaggataagaaagggcaccttatccatggccgcaatatggacttcggagtctttctaggctggaatattaacaatgacacttgggttatcaccgagcagcttaaacccctgacagttaacctggactttcagaggaacaataaaaccgtgtttaaggcgtcctcctttgccggctacgtggggatgttgacgggttttaagcctggactcttttccctcacacttaatgaaaggttttccattaacggtggctatctgggaatcctggagtggattctaggtaagaaggatgtcatgtggattgggttccttactcgcactgtcctggagaattcaacttcttatgaagaggcgaaaaatctgttgacaaagacgaaaattctcgcaccagcatacttcatcctgggtggaaatcaatccggggaaggatgtgtgattaccagggatcgtaaagagagcctggacgtctacgagctagacgctaaacagggacgatggtatgtggttcagacaaattatgaccgatggaagcacccgttcttccttgatgacaggcgtacccccgcaaagatgtgtctgaaccgaaccagccaggagaatatcagcttcgagaccatgtacgacgttctctccacgaaaccagtactgaataagctcaccgtgtacactaccctgattgacgtgactaaaggacagtttgagacttatctcagagactgtcctgatccctgtattggctgg

SEQ ID NO: 252789 - DNA, 1185 bp, Artificial Sequence
  derived and/or modified sequence
atgccggggagatcctgcgtggccctggtgttgcttgccgccgccgtctcttgcgctgtggcccaacatgccccaccctggaccgaggactgtcgaaagtctacttacccgccgtcgggacctacttaccggggcgcagtcccttggtacaccatcaacctcgatctgccaccctataagaggtggcatgagctgatgcttgacaaagcgccagtactgaaagtcatcgtgaattcgctgaagaatatgataaacacctttgtcccttccggaaagattatgcaagtggtggatgaaaagctgcccgggcttctcggaaactttccgggaccgttcgaggaggagatgaaggggatcgcagccgtgactgacattccgctgggagagatcatcagcttcaatatcttttacgaactgttcacgatctgcacctcgatcgttgccgaagataagaagggtcaccttattcacggccggaacatggattttggtgtgttcctggggtggaacatcaataacgacacttgggtgatcactgagcagttgaagccgctcactgtgaacctcgatttccaacgaaacaataagacggtctttaaagcgtcaagtttcgctggatacgttggcatgttgaccggcttcaaacccggcctcttctcactcactctgaacgagaggttttccatcaacggaggctaccttgggatcttggagtggatcctgggtaagaaagatgtgatgtggatcggatttctgacgcgcaccgtcctcgagaatagcaccagctacgaagaagccaaaaacctgctgaccaagacgaagatccttgctcccgcgtatttcattctgggaggcaaccaatcaggcgagggatgtgtcattactagggacagaaaggaatcattggacgtctacgaattggatgcgaagcagggaagatggtacgtggtgcagactaattacgaccggtggaagcatccgttcttcctcgacgataggcgcaccccggctaagatgtgtctcaacagaacctctcaagagaacatctcgttcgaaacgatgtacgacgtgctctcgacgaaaccagtcctgaataagctgaccgtctacactaccttgatcgacgtgactaaaggacagttcgaaacttacctccgcgattgcccggacccatgcatcgggtgg

SEQ ID NO: 252790 - DNA, 1185 bp, Artificial Sequence
  derived and/or modified sequence
atgccaggccggtcttgcgtggcccttgtgctcctggccgcggccgtcagttgcgcggtggcccaacacgcccccccctggaccgaggattgccgtaagtccacatacccacccagtgggcctacatatcggggtgccgtgccttggtacacgattaacctggacctgcctccatacaagaggtggcacgagttgatgctagacaaagccccagtcctgaaggttatagtcaattctctgaaaaacatgatcaatactttcgtgccaagtggaaaaatcatgcaagtagtcgatgagaagctgccgggactgctagggaactttcccggtccctttgaggaggaaatgaaggggatcgcagcggtaaccgatattccattgggcgagatcattagctttaacatcttctatgagctcttcaccatttgcacttccattgtggcggaggataagaagggtcatttgattcacggacgcaatatggacttcggcgtgtttctcggctggaatatcaacaacgatacatgggttatcacagaacagctcaagcctctcactgtcaacctagatttccaacgtaacaataagacagttttcaaagcctcgtctttcgccggatatgtgggtatgctgactggcttcaagcctggcctgttcagcctaactctgaatgaaaggttctccattaatggaggatatctcggcatactggaatggatattaggaaaaaaggatgtgatgtggattgggttcctgacgcggaccgttttggaaaattcaacatcttatgaggaggcaaagaacttgttgactaagacaaagatcctcgcaccagcttatttcatcctgggcggcaatcaaagcggagagggttgtgttattacccgggaccgcaaagagtccctcgacgtgtacgaactggatgccaagcagggtagatggtatgtagttcagactaattatgaccgctggaagcatccattcttcctagacgatcgtcggacgccagcaaaaatgtgtctgaaccggaccagccaggagaatatttcctttgagactatgtatgacgttttgagcacaaaacctgtcttaaacaaacttaccgtctatactacactcatagatgtcactaaaggacagttcgagacatatttgcgcgactgccccgacccctgcatcggttgg

SEQ ID NO: 252791 - DNA, 1185 bp, Artificial Sequence
  derived and/or modified sequence
atgccagggcgaagttgtgtggcactggtactgctcgccgccgccgtcagttgtgctgtggcacagcatgcaccaccgtggactgaagactgtcgaaaatccacatatcctccttcagggcctacttaccggggggccgtaccttggtacacaatcaacttagatctgccaccctacaaacggtggcatgaactcatgctcgataaagctcctgtgctgaaagtgatcgtcaattccctcaaaaatatgattaatacatttgtgcccagtgggaaaatcatgcaggtcgtggacgaaaaacttccagggctcctgggaaactttccagggcccttcgaagaagaaatgaaaggaattgcggctgtaactgatatccctcttggagaaataatttcttttaacattttctatgaactcttcactatctgtacttctatagttgctgaagacaaaaaaggacacttgattcatgggaggaacatggattttggagtatttctcgggtggaatattaacaacgatacatgggtgattactgaacagctcaaacctctaacagtaaatcttgacttccagaggaataacaaaacagtattcaaagcgtcctctttcgccggatatgttgggatgcttactggatttaaacctgggttgttttcgcttactcttaatgagaggttcagtatcaacggaggatatttggggatcctcgagtggatcctcggaaaaaaggatgtgatgtggatcgggtttctcacacggactgttctcgaaaattcaactagttatgaggaagcaaaaaatctccttacaaaaacaaagatacttgcacccgcttatttcatcctgggaggaaatcagtcaggagaggggtgcgtaatcactagagatcggaaagaaagtctggacgtgtatgagctggatgccaaacagggaagatggtatgtagtccagactaactatgatagatggaaacaccccttttttcttgacgataggcggacacccgctaaaatgtgtcttaaccggacatcacaggaaaacatatcgtttgaaacaatgtatgatgtcctgtcaactaaacccgtgctgaataaacttactgtctacactacactgatcgacgtgacaaaagggcagttcgaaacttatctccgggattgtcccgacccatgcattggatgg

SEQ ID NO: 252792 - DNA, 1185 bp, Artificial Sequence
  derived and/or modified sequence
atgcctgggcgctcgtgcgtcgcccttgtgctgctggccgcggctgtctcctgcgcggtggcgcagcacgcgccgccatggactgaggactgtagaaaaagcacctacccaccgtccggcccgacttaccgaggagcagtgccttggtacaccatcaacctcgacttgcccccctacaaacgctggcatgagctgatgctcgataaggccccggtgctgaaggtgatcgtgaactccctcaagaacatgatcaacacttttgtcccgtccggaaagattatgcaagtcgtcgatgaaaagctccctgggctgctggggaactttccgggaccgtttgaggaagagatgaaaggaatcgccgccgtgaccgacatcccactgggcgaaatcatctcgttcaatatcttttacgaactgtttaccatttgcacctcgatcgtggctgaggataagaagggccacctgatccatgggaggaatatggactttggagtctttctcggatggaacattaacaacgatacgtgggtgatcaccgaacagctcaaaccgctgactgtgaacctcgacttccaacgcaataacaaaactgtgttcaaagcctcgagcttcgccgggtacgtcggtatgttgacggggttcaagccaggactcttctccctgaccctgaatgagagattctcgatcaatggaggctacctgggcatcctggagtggatcctggggaagaaggacgtcatgtggatcggattcctgactcggacggtgctcgagaactccacctcctacgaggaagcaaaaaacctgcttaccaagaccaagatccttgcaccggcctacttcatcctcggcgggaatcagtcaggtgaagggtgcgttattactcgcgaccggaaagaaagcctggatgtctacgaactggacgccaagcaaggacgctggtacgtggttcagaccaattacgataggtggaaacacccgttcttcctggacgaccgccggactccggccaagatgtgtctgaaccgcacctcccaggaaaacatcagctttgaaaccatgtacgacgtcctgtcgacgaaaccggtcctgaacaaactcactgtgtacactactctgatcgacgtgactaagggacaattcgaaacctacctgcgtgactgcccggatccttgcatcggctgg

SEQ ID NO: 252793 - DNA, 1185 bp, Artificial Sequence
  derived and/or modified sequence
atgccagggcgttcctgcgtggctctggtattgcttgctgcagcagtgagttgtgctgtggcacagcacgctcccccctggactgaggattgcaggaagtccacatatcctcccagcgggcccacctaccggggcgccgtaccctggtacaccatcaacttggatctacctccttacaaacggtggcacgaactcatgctggataaagctcctgtgctgaaagttatagtgaactctcttaaaaatatgatcaatacctttgttccatccggaaagatcatgcaggtggtagacgagaagctgcccggactgttgggaaactttcccggacctttcgaagaggagatgaaggggatagccgcagtgacggatattcccctgggcgaaattatatccttcaacattttttatgaactgtttaccatatgcactagcatagtggcggaggataaaaaaggccatttgatccacggtaggaatatggattttggagtctttctaggctggaatatcaataacgacacctgggtgatcacagaacaattgaaacccctgacggtgaacctcgatttccagagaaacaataaaaccgtgtttaaggcttcatcgttcgcaggatacgtaggaatgctgaccggatttaagcctggactttttagcctgaccttaaatgaacgcttctctatcaacgggggctaccttggaattctggaatggatcttaggcaaaaaagatgtaatgtggataggatttcttactagaacggtgctggagaattcaacatcctacgaagaggcaaagaacctgttgacaaagactaagattttggctccagcttacttcatcctaggcgggaatcagtccggcgaagggtgcgtgatcacccgcgaccggaaagaaagccttgacgtctatgagctggacgctaaacaggggcgatggtatgtggtacagaccaactatgatcgctggaagcatccatttttcctggacgaccggaggacgcccgccaagatgtgtctgaataggacatcccaggaaaacatctcattcgagaccatgtacgatgtgctctcaacaaagccagtcctgaataaactgaccgtttacaccactctcatcgacgtcaccaaagggcagttcgagacctacctgcgcgactgtcctgacccctgcataggctgg

SEQ ID NO: 252794 - DNA, 1185 bp, Artificial Sequence
  derived and/or modified sequence
atgcccggaaggtcttgcgtcgctctggtgcttctcgcagccgccgtatcctgcgccgtggcacagcacgcccccccatggactgaagattgtcgcaaatcaacctacccccccagcgggcccacatacaggggagccgtgccttggtatacaatcaacttggacctgcccccctacaaacgctggcatgagttgatgctggacaaggcacctgtgctcaaggtgattgtgaactccttgaagaatatgatcaatacttttgtgccttccggaaagattatgcaggtcgtggatgagaagctccccggcttgctgggcaacttcccgggtccattcgaggaggagatgaaaggcattgcagccgtgacagacatcccactgggagagatcatctccttcaacatcttctacgaactcttcaccatatgtacaagcatagtagccgaagacaagaaggggcacctgatccatgggaggaatatggactttggagtcttcttaggctggaacattaataacgacacatgggtgattactgagcagttaaagccactgacagtgaatctcgatttccaaaggaataacaagactgtgttcaaagcaagttcattcgctggatacgtcggaatgctgaccgggttcaagcctgggcttttctcccttacactaaacgagaggttttctataaacggtgggtatctcggtatcttggaatggatcctcggaaagaaggacgttatgtggataggcttcctgactcggacggtgctggagaattctacctcttatgaggaggccaagaacctcttaaccaaaacaaaaattctggcgcccgcttattttatcctcggggggaatcagtcgggagagggatgcgtcatcactcgggataggaaggagtcacttgacgtttacgagctggatgccaagcagggcaggtggtatgtagtgcagactaattacgacaggtggaagcatcctttttttctcgatgacagaagaactccggctaagatgtgccttaaccgcacctctcaggaaaatatttcatttgaaaccatgtacgatgtcctttccaccaaacctgtcctgaataagctgaccgtttacactaccctgattgatgtgactaagggtcagtttgaaacataccttcgcgattgtcccgacccttgcatcggatgg

SEQ ID NO: 252795 - DNA, 1185 bp, Artificial Sequence
  derived and/or modified sequence
atgcccggccgctcttgtgtagccctagtactgctggcagcggccgtcagctgcgcagtggctcagcacgctccaccgtggacagaagactgcaggaagagcacctaccctccctcggggccaacgtatagaggagccgtgccatggtacactatcaacctggacttacccccttataagaggtggcatgagctgatgctggataaggccccggtacttaaggtcatagtgaactcactcaaaaacatgattaatacgttcgtgccaagcgggaaaattatgcaagttgttgacgagaagttgccaggactgctggggaattttccagggcccttcgaagaggagatgaagggcattgcagctgtcacagacattcctcttggcgagataataagctttaacatattctatgaactgttcacaatctgtacctccatcgtggcagaggacaaaaagggacacctcatacatgggcgcaatatggattttggagtcttcctgggctggaatatcaataatgatacttgggtcatcaccgagcagctaaagcctctgacagtgaacttggactttcaacgaaataataagaccgtgttcaaggcctcttccttcgctggatatgttgggatgcttactggctttaaacccggcttatttagtcttactcttaatgagcgcttctccattaatgggggatatctgggaattctggagtggatcctcggaaaaaaagatgtgatgtggattggattcctcaccaggacggtgttagagaacagtacctcttatgaggaggctaaaaatctccttaccaagacgaagattttagccccggcctactttatcctgggaggaaaccagtctggagaaggctgtgtaataacccgagataggaaagagagcctcgacgtctatgagctcgatgccaagcagggcaggtggtatgtggttcagaccaattacgatcgctggaagcaccccttctttctggatgacagacgcactcctgcaaaaatgtgtctgaacaggacctcccaagaaaatatctcatttgagaccatgtatgatgtactgagtacaaaaccggttttgaataaactcactgtctacacaacactgattgacgtaacaaaaggccagtttgaaacatacctgcgggactgcccagatccctgcatcggatgg

SEQ ID NO: 252796 - DNA, 1185 bp, Artificial Sequence
  derived and/or modified sequence
atgccaggccgctcatgcgtcgccctagtgctgttggcggccgctgtgagctgcgcagttgcccagcacgctcctccatggaccgaagattgtcgcaaatccacttatcctccatcaggccctacttatcggggcgcagtcccgtggtataccatcaacctcgacctgcctccctacaagcgttggcatgagcttatgctggataaggccccagttctcaaagtcatcgtgaacagcctgaagaacatgattaacaccttcgtgcccagcggcaaaattatgcaagtcgtggacgagaaactgcctggtttactgggcaacttcccaggccctttcgaagaagagatgaagggcattgccgccgttaccgatataccactgggcgagatcattagctttaacattttctacgaattgttcactatctgcacctctatcgtcgcagaagacaagaaagggcatctgattcacggacgaaatatggatttcggcgtcttcttgggctggaacattaataacgatacatgggtcattaccgagcaattgaagccacttactgtgaatctggacttccagaggaataataaaacggtctttaaggcctcctccttcgcaggctacgtaggaatgctgaccggattcaagcccgggctattctctctcaccttgaacgagcggtttagcatcaacggcgggtatctgggcatcctggagtggatactgggcaaaaaggatgtaatgtggataggattccttactcggaccgtgctagagaattcaacatcttatgaagaagcgaagaatcttctgacgaagacaaaaatattggctccagcttacttcattttgggcggcaatcagtccggggaagggtgtgtcatcaccagggacagaaaagagtctctggatgtgtatgagctggatgcgaaacaaggacggtggtacgtggtgcaaactaactatgaccgatggaaacaccctttctttctcgacgacaggcgcacccctgccaagatgtgcctgaatagaacctcgcaagaaaacatcagctttgagaccatgtacgatgtattgtcaaccaagcctgtgctgaataagctgaccgtctacacaacactgatcgacgtcaccaaaggccagttcgagacatacctccgcgactgccctgatccatgcatcgggtgg

SEQ ID NO: 252797 - DNA, 1185 bp, Artificial Sequence
  derived and/or modified sequence
atgccgggccgatcgtgtgttgcactggtgttactggccgctgcagtgagctgcgcggtagcgcaacacgccccaccatggacagaagactgcagaaagtcgacttatccacctagtggaccgacctatcggggagccgtcccctggtacacaattaatctggacctcccaccgtataagagatggcacgaactgatgcttgataaagcaccagtcctgaaagtgatcgtgaactccctcaaaaacatgatcaatacctttgtgcctagtggcaaaataatgcaggttgtcgacgaaaagttaccggggctcctggggaatttccccggccccttcgaggaagagatgaaaggtatcgctgccgtgaccgacattcccctcggtgagataatttctttcaatatcttctacgaactattcacgatctgcacctctattgtggccgaggataagaaaggccacttaatccatgggaggaacatggactttggcgtcttcctggggtggaatatcaacaacgatacctgggtaattactgagcagctgaagccattaactgtaaatctggactttcaacgaaacaataaaactgtgtttaaggcctctagctttgctggctatgtgggcatgttgaccggctttaaacccggtctcttttccttgacgctgaacgagagattttccattaatggggggtatcttggtattctggagtggatcttgggtaagaaggacgtaatgtggattggtttcttgactcgcactgttctggagaattctacgtcttacgaggaggctaaaaaccttctaaccaaaacaaagatccttgctccagcatactttatcctggggggaaaccagagcggagaagggtgtgtgattacccgcgataggaaagaaagtctggatgtatacgaattggacgcaaagcagggcaggtggtacgtggttcagacaaattacgacagatggaaacatcctttcttcttggacgatcgccgtacgcccgccaagatgtgcctgaataggacttcacaggagaacatcagctttgagacgatgtatgacgtgcttagtacaaaacctgtcctgaacaaactcaccgtatacacaaccctaatcgatgtgactaaggggcagtttgagacctatctcagagattgtcctgatccgtgcattgggtgg

SEQ ID NO: 252798 - DNA, 1185 bp, Artificial Sequence
  derived and/or modified sequence
atgccgggtcggtcctgcgtcgcccttgtgctgctcgccgccgcagtgtcgtgcgcggtggctcaacatgcgccaccgtggactgaggactgccgcaagtcaacttacccgccgtcgggaccaacgtaccgcggagccgttccgtggtacaccatcaaccttgatttgcccccctacaagcgatggcatgaacttatgctggacaaggcaccagtcctgaaggtgattgtgaactcgctgaagaatatgatcaataccttcgtccccagcggcaagatcatgcaagtggtggacgagaaactcccgggcttgctgggcaattttccaggtcctttcgaagaagaaatgaaaggaatcgccgcggtcactgatatcccactgggagagatcatctcctttaacatcttctacgaactgttcacgatctgtaccagcatcgtggctgaggataaaaagggccacctcattcacggaaggaacatggactttggggtgttcctggggtggaacatcaacaatgacacttgggtgatcactgaacagcttaagcctctcactgtcaatctggatttccaacgcaacaacaagaccgtgtttaaggccagctccttcgcaggatacgtggggatgctgacgggattcaaaccgggactgttttccctgactctgaatgaacgcttttcaatcaacggcggctacctcggaattctggagtggatcctgggaaagaaggatgtcatgtggattgggttcctcaccagaaccgtgttggagaattctacttcgtatgaggaggcgaaaaacctcttgactaagaccaagattctcgctccagcatacttcatcctcggaggtaaccagtcaggagaaggttgcgttatcacccgcgacaggaaggaaagcctcgatgtgtacgaactggacgccaagcagggacggtggtacgtggtgcagaccaactacgacagatggaagcacccgttcttcctcgacgatcggcggaccccggccaaaatgtgcctgaatagaacttcccaggagaacatcagtttcgagactatgtacgatgtgctgtcgaccaaaccggtcctgaacaaactgaccgtctacaccactctcatcgacgtcacgaagggccagttcgaaacctatctgcgggactgtcctgacccttgcatcggatgg

SEQ ID NO: 252799 - DNA, 1185 bp, Artificial Sequence
  derived and/or modified sequence
atgcctggccggtcatgcgtggctctggtgctgctggccgcggcagtcagctgcgctgtagcccagcatgcgcccccatggaccgaggactgtagaaagtccacttacccgccttcgggcccaacgtacagaggtgccgtgccgtggtataccataaacctcgatctcccaccgtacaaacgctggcacgaactgatgctggacaaagcaccggtcctgaaggtgatcgtcaattcgctcaagaatatgattaacaccttcgtcccttcgggaaaaatcatgcaggtggtggatgaaaagctcccgggactgcttggcaacttccctggcccatttgaggaggaaatgaagggaatcgccgccgtgactgatatcccattgggagagatcatcagcttcaacatcttctacgaactcttcacgatctgtacttctatcgtggcggaggacaagaaaggacacctgatccacggaagaaacatggacttcggagtgttcctcggatggaacatcaacaacgacacttgggttatcacggagcagctgaagccgctgaccgtgaatctcgatttccaacggaataacaaaaccgtgtttaaggcttcatcatttgccggttacgtgggaatgctgaccggtttcaagcctggccttttttcgctcactctcaatgagcgattcagcatcaatggcgggtacctgggcatccttgagtggatccttgggaagaaggacgtgatgtggatcgggttccttactcgaacggtgttggaaaattcgacctcgtacgaagaagccaagaacttgctgaccaagactaagatcttggctccggcctactttattctggggggaaaccaatccggtgaggggtgtgtcattaccagagatcgcaaggaatccttggatgtctacgaactggacgcgaagcagggacggtggtacgtggtgcagaccaactacgaccggtggaaacatccgttcttcctggacgacaggcgcactccagccaagatgtgtttgaaccgcacctctcaagaaaacatctcatttgaaacgatgtatgacgtcctctccaccaagccggtgctgaataagctgaccgtatacactactctcatcgatgtgactaaaggtcagttcgaaacctacctgagagactgccccgatccgtgcataggctgg

SEQ ID NO: 252800 - DNA, 1185 bp, Artificial Sequence
  derived and/or modified sequence
atgccaggccgcagctgcgttgccttggtcctcctcgcggctgcagtttcttgtgccgtggctcagcacgccccgccttggactgaggattgccgtaagtctacctaccctccatcagggcctacataccgcggagccgtgccctggtatactatcaacttggacttgcccccgtacaagaggtggcacgaactgatgctggacaaggccccagtgttgaaagtcatcgtgaatagcctcaaaaatatgataaacacattcgttcctagtggcaagatcatgcaagttgtggacgaaaagctcccggggctgctcggaaacttccccggaccatttgaggaggagatgaagggcattgcggccgttactgacattcctttaggcgaaattatctcattcaacatcttttacgagctgtttacaatctgtacatcaattgttgccgaagataagaaggggcatctcattcacggtaggaacatggactttggggttttcttggggtggaatattaacaacgatacgtgggttatcacggagcagctcaagccccttactgtgaatcttgactttcaacgaaacaataagactgtgttcaaagcctctagcttcgcaggatatgtggggatgctgacgggctttaagcccggccttttcagcctgactctgaacgagaggttttcgattaatgggggctatctaggcatacttgagtggatactgggaaaaaaagatgttatgtggatcggctttctaacacggaccgttctggagaattctacctcttacgaagaggccaagaatctcttgactaagacaaagattctggcgcctgcttatttcattctgggaggtaaccagagcggcgaggggtgtgtaataactcgtgacagaaaagagagcctggatgtgtacgagctggatgccaaacaggggcggtggtatgtcgtccagacgaactacgaccgctggaagcaccctttcttcttggatgatagacgaaccccagcaaagatgtgtctgaatagaacaagccaggaaaacatttcttttgaaactatgtatgacgttctcagtaccaagccagttctgaataagctcaccgtttacaccacccttatcgatgtgactaaagggcagtttgagacatacctgagggactgccctgacccttgtattggttgg

SEQ ID NO: 252801 - DNA, 1185 bp, Artificial Sequence
  derived and/or modified sequence
atgcccggcaggtcctgtgtggcactcgtccttcttgccgcagccgtttcctgcgcggtggcccagcacgcgcctccgtggacagaggactgtcggaagagtacatatccaccttcaggcccaacctacaggggcgctgttccgtggtacacgatcaaccttgacctgcctccttataagaggtggcacgagctcatgctcgacaaggcgccagtgttgaaggttattgttaacagcctcaaaaatatgatcaacaccttcgtgccctcagggaagatcatgcaagttgttgacgagaaactccctgggctgctgggcaatttccctggcccattcgaggaggaaatgaaaggaatagcagctgtgaccgatatccctctcggggagattatcagcttcaatatcttttatgaactgtttactatctgcacttcaatagtcgcggaagacaagaaggggcacctcatacacgggagaaacatggatttcggggtattcctgggttggaatattaacaatgatacctgggtcattactgagcaacttaagccactgacagtcaacctggatttccagcggaacaataagacggtgttcaaggcttctagtttcgccgggtacgttggaatgttgaccggttttaaacccggtctgttcagcctcacgctgaacgaaagattttccatcaacggtggatatctcgggattttggaatggattttgggaaagaaagatgtcatgtggattggattcctgactcggactgttctggaaaactccacatcatatgaggaagcaaagaacttgctgaccaagaccaagattctcgcccccgcttacttcatactgggcggtaatcagtcaggcgaggggtgtgttatcaccagggaccggaaagaatcactcgacgtctacgaactggacgccaagcagggaaggtggtacgtggtacagactaactacgatcggtggaagcaccctttttttcttgacgacagacggactcccgctaaaatgtgtcttaacaggacttcccaggaaaatatttcttttgaaactatgtacgacgtgttgtctacaaaacccgttctgaataagcttacagtgtatacaaccctcattgatgttacaaaaggccagttcgagacgtacctgagagactgtccagatccctgtatcggatgg

SEQ ID NO: 252802 - DNA, 1185 bp, Artificial Sequence
  derived and/or modified sequence
atgccaggaagaagttgtgttgcacttgttcttttagctgctgccgtttcctgtgctgttgcacaacatgctcctccatggacagaagattgtagaaagtcaacttatccaccatctggtccaacctatagaggagctgttccttggtatacaattaatttagatttaccaccttataaaagatggcatgaactaatgttagataaggctccagtcttaaaggttatagttaattctcttaaaaatatgattaatacttttgttccatcaggaaaaattatgcaagttgttgatgaaaaattaccaggtttattaggaaatttccctggtccatttgaagaagaaatgaaaggtattgcagcagtaactgatataccattaggagaaataatctcatttaatattttttacgaactttttactatttgtacttccattgtagctgaagataagaaggggcatttaattcatgggcgtaatatggattttggtgtctttttaggatggaatattaataatgatacatgggtaattactgaacaattaaaaccacttaccgttaatcttgatttccaacgaaataataaaacagtatttaaagctagttctttcgcaggatatgttggtatgcttactggatttaaaccaggattattttcattaacacttaacgaaagattttcaattaatggaggatatcttggtattcttgaatggattttaggaaaaaaagatgtaatgtggattggatttttaacaagaacagtacttgaaaattcaacttcatatgaggaggctaagaatttattgactaaaacgaagatattagctccagcatattttattttaggaggaaatcaaagtggagaaggttgtgttataactagagatagaaaggagagtcttgatgtttacgaactcgatgcaaagcaaggaagatggtatgtagttcaaactaattatgatagatggaaacatccattttttctcgatgatagaagaactccagcaaaaatgtgtcttaatagaacttcacaggaaaatatatcctttgagactatgtatgacgttttatccactaaaccagtactaaataaattaacagtttatactaccttaattgacgttactaagggacaattcgaaacgtatcttagagattgtccagatccttgtattggatgg

SEQ ID NO: 252803 - DNA, 1185 bp, Artificial Sequence
  derived and/or modified sequence
atgccaggcaggtcgtgcgttgctttggtccttttggcggctgctgtcagctgtgcagttgcccagcacgctcctccttggactgaagattgccgtaaatctacatatcctccatctggtcctacatatcgaggcgcagttccgtggtatacaatcaacttggatcttccaccttataaacgatggcacgaacttatgctcgacaaggcaccagttctcaaagttattgtcaacagtcttaaaaacatgattaacacttttgttcctagtgggaaaattatgcaggtcgtcgatgaaaaactgccaggtcttttaggcaactttcctggaccattcgaggaagagatgaaaggtatcgcagcagttaccgatatccctctaggtgaaattattagtttcaacattttttacgagctgttcactatctgcacgagtatagttgctgaagataagaaaggacaccttatccatggacgtaatatggactttggggttttccttggttggaatatcaacaatgatacatgggtcatcaccgaacaattgaaacctcttacagtgaaccttgattttcaacgaaataataaaactgtttttaaggctagcagttttgcgggttacgtaggtatgctgactggattcaagcctgggcttttttcacttacacttaacgaaagattctcaatcaacggaggatatcttgggatccttgaatggattctgggcaaaaaagatgtcatgtggattggctttctcactaggacggttctggagaattctacaagctacgaggaagctaagaatctcctcacaaaaactaaaatcttggctcctgcttattttattttaggggggaaccaatccggggagggttgcgtgatcactagggataggaaggagtctttggatgtttatgagttggatgcaaagcaaggtaggtggtatgtggtgcaaacgaattatgataggtggaaacatccattttttttggatgatagacgtactcccgcaaaaatgtgtctcaatagaacaagtcaagaaaatatctcatttgaaaccatgtacgatgtattatccacaaaaccagtacttaataaactcacggtttatactacattgattgatgttactaaagggcaatttgaaacctacctaagagactgcccggatccgtgcatcgggtgg

SEQ ID NO: 252804 - DNA, 1185 bp, Artificial Sequence
  derived and/or modified sequence
atgccgggacgaagctgcgtcgccctagtgctgctggccgcagccgtgtcttgtgctgttgcacaacacgcaccaccttggactgaagattgcaggaagagcacatacccaccctctggccccacgtatcgtggagcagtcccatggtacaccatcaacttggaccttccgccctacaagaggtggcacgagttgatgctcgataaagcccctgtcctcaaggtgatcgtcaactccctgaagaacatgatcaatacgtttgttcccagcggaaaaattatgcaagtcgtggacgaaaagctgccaggcctgttgggaaattttcccggtccttttgaggaggagatgaagggaatcgcagcggtgacagacatcccactaggcgagataataagctttaatatcttctatgagctctttacaatatgcacatccatcgtggcagaagacaagaaaggccacctcattcatggccgcaacatggatttcggtgtctttctgggctggaacatcaataacgacacttgggttatcacggaacagcttaagccactcactgtaaacctagactttcagcggaacaataaaaccgtcttcaaggcctcaagttttgccgggtatgtaggcatgctaacaggctttaaaccgggtctctttagcctcacactaaacgagcggttcagtattaacggaggctacctgggtatcttggagtggatactagggaagaaagacgtgatgtggataggattcctcactagaaccgtgttggagaactccacaagctatgaagaggccaagaaccttcttactaaaactaagatcttggccccagcctacttcatccttggaggaaatcagtctggggaaggctgcgtgattacacgtgacagaaaggagtctctcgacgtctacgagctcgatgcgaagcaggggagatggtatgttgtccagaccaattatgaccgctggaaacacccattttttctggatgacaggagaactccagcaaaaatgtgcctaaaccgtacgtctcaggagaacatcagctttgaaactatgtacgatgtgctgagcacaaagcccgtcctgaacaaactaactgtctacactaccctgatagatgtgacaaaaggacagtttgagacgtatctgcgagactgtccagacccatgcatcggctgg

SEQ ID NO: 252805 - DNA, 1185 bp, Artificial Sequence
  derived and/or modified sequence
atgcccgggagatcatgcgtcgccctggtcctcctggccgccgcggtttcatgcgcagtggcacagcacgctccaccctggactgaagattgtcgcaagtccacgtatccaccttcgggtcctacctaccgcggggcggtcccttggtacaccatcaatctggatcttcccccgtacaaaagatggcatgagttgatgctggataaggcgccggtgctcaaggtgatcgtcaacagccttaagaatatgattaacacttttgtgccttcgggcaagatcatgcaagtcgtggacgaaaagctgcctggcctgcttggaaatttccctggtccgttcgaagaggagatgaaagggatcgccgccgtgaccgacatcccgctcggagaaatcatctcgttcaatatcttctacgaactcttcactatttgcacctcgattgtggctgaggacaagaaaggacacctgattcatgggcgtaacatggacttcggcgtgttccttggatggaatatcaacaacgacacttgggtgatcaccgaacagctgaaacctctcaccgtcaacctggatttccaaaggaacaacaaaactgtgttcaaggcctcctcatttgcgggctacgttggtatgcttaccggattcaagcccggactgttttcactgaccctgaacgaacggttctcgatcaatggaggttacttgggaattctggaatggatcctgggcaagaaagacgtgatgtggatcggtttcctgactcggaccgtgttggagaactccacgtcttacgaggaggcgaaaaacctgctgactaagaccaagatcctcgccccggcttacttcatactcgggggaaaccagtcaggagagggatgcgtgatcactcgcgatcgcaaggaatccctggacgtgtacgaactggacgcgaagcagggacggtggtatgtcgtccagactaattacgataggtggaagcacccgtttttcctcgacgaccggaggactccggcgaaaatgtgcctgaacaggacttcccaagagaacatttccttcgaaaccatgtacgacgtgctgtccacgaaaccggtgttgaacaagctgacggtgtacactacccttatcgatgtcacgaagggtcaatttgaaacttatctgcgggattgtccggacccatgcatcgggtgg

SEQ ID NO: 252806 - DNA, 1185 bp, Artificial Sequence
  derived and/or modified sequence
atgccggggaggtcatgcgtggccctggtgttgctggccgcagcggtttcatgtgcagtggcacaacatgccccaccgtggaccgaagattgcagaaagtccacctacccaccctcgggacctacgtatcgcggagcggtgccgtggtacaccattaatctggacttgcctccctacaagcggtggcacgaactgatgctcgacaaggcaccagtccttaaagtcatcgtgaattcactcaagaatatgatcaacaccttcgtcccgtcaggtaagatcatgcaagtggtcgacgaaaaacttccagggctcctcggaaacttcccgggaccgtttgaagaggaaatgaaggggatcgcagcggtgacggatatcccattgggggagattatctcattcaatatcttctacgaactgttcaccatctgtacttcgatcgtggccgaggacaagaagggacaccttatccacggtcgcaacatggacttcggcgtctttctgggatggaatatcaacaacgatacctgggtgattaccgagcagctgaaacccctgactgtgaacctggacttccagcgaaacaataagaccgtattcaaagcgtccagcttcgcggggtacgtcggaatgctgaccggtttcaaaccaggcctgttctcgctgactctgaacgagcggttctcaatcaacggcgggtacctggggattctcgagtggatcctcggaaagaaagacgtgatgtggattggtttcttgaccagaactgtgttggaaaactcaacttcctacgaagaggccaaaaatctgcttaccaaaactaagatcctggcaccggcttactttatcctgggtggcaaccagtcgggggaaggatgtgtgatcactagagatcgcaaggagtcgctggacgtgtacgaactcgacgcgaaacaaggcagatggtatgtcgtgcagaccaactacgatcggtggaagcatccattctttctggacgatcgcagaacccctgctaaaatgtgcctcaaccggacctcccaagagaatatctcctttgaaacgatgtacgatgtgctgtccactaaaccggtcttgaacaagttgaccgtgtacacgactcttatcgacgtaaccaagggacagttcgaaacctacttgcgggattgcccggacccttgcatcggctgg

SEQ ID NO: 252807 - DNA, 1185 bp, Artificial Sequence
  derived and/or modified sequence
atgcccggtaggagctgtgtcgccctcgtgctgcttgcagccgccgtgtcgtgtgcggtcgcccagcatgcacctccgtggaccgaggactgcaggaagtcgacctaccccccgtcgggaccaacttacagaggcgcagttccctggtacacgatcaatctggacctccccccgtacaagagatggcacgaactgatgcttgataaggcaccggtgctgaaagtgattgtgaacagccttaagaacatgatcaacacttttgttccctcgggcaagataatgcaggttgtggatgaaaaactgcctggacttttggggaactttcctggacctttcgaggaggagatgaaaggcatcgctgcggtgacggatattcctctcggagagatcatttcctttaacatcttttacgaactgttcaccatctgcacctccattgtggcagaggacaaaaagggacacctgattcatggtcgcaatatggactttggagtgtttctggggtggaacattaacaatgacacttgggtcattactgaacagttgaagcctctgactgtgaaccttgactttcaacgcaataacaagacggtgttcaaagcatcgtctttcgctggctatgtcggtatgctgactggcttcaagcctgggcttttcagccttactctgaacgaacgcttcagcattaatggcggttatctgggaatactggagtggatacttgggaaaaaagacgtgatgtggatcggatttctcactagaactgtgctcgaaaactccacctcgtacgaagaagctaaaaaccttctcaccaagacgaaaatcctggcacccgcgtacttcatactgggaggaaatcaatccggtgagggttgcgtcatcactcgggatagaaaggaatccttggatgtgtacgaactcgatgccaagcagggcagatggtatgtcgttcaaaccaattacgacaggtggaagcatccttttttcctggacgatagacgcactccagcaaaaatgtgtctgaatagaaccagccaagagaacatttcgtttgaaaccatgtacgatgtcctttccacgaagcctgtgcttaacaagctcaccgtgtacacgacccttattgatgtgaccaaaggtcaattcgaaacctaccttagggattgtccagatccatgtattggatgg

SEQ ID NO: 252808 - DNA, 1185 bp, Artificial Sequence
  derived and/or modified sequence
atgccagggcgctcatgcgtcgcactggttctgttggccgctgctgtgtcatgtgccgtcgctcaacacgcgcctccctggacggaagattgtcgcaaaagcacttacccaccgtctggccctacttacaggggtgccgtgccatggtatactatcaacctggatcttcccccctacaaacgctggcacgagcttatgctggacaaggctccagtgttgaaggtcattgtgaactctctgaagaatatgattaacacattcgtgcctagtggaaaaataatgcaggtggtggacgagaagctccccgggctgctgggcaacttcccaggtccatttgaggaggaaatgaagggcattgcagcagtcactgacatcccactgggtgagatcatcagtttcaacatattttatgaactttttactatctgcacatcaattgtcgccgaagacaaaaaaggacacctgatccacgggcgaaacatggacttcggcgtctttctggggtggaacataaataacgatacctgggtgattacagaacaactgaaaccgctcaccgtgaaccttgactttcagcggaataataagaccgtgttcaaagcttcatcttttgcaggatatgtggggatgctcaccggatttaaacccggcctcttttccctcaccctcaatgagcggttttcaatcaacggggggtatctcgggatcctggagtggatccttgggaagaaagacgttatgtggattggttttctcacccgcacggttttggagaactccactagttacgaggaggctaagaaccttttgaccaagactaagatactcgcaccagcatattttatcctgggcggtaaccagtccggagaaggatgtgtcatcaccagagaccgaaaagaaagtctggatgtatatgagctggatgcgaaacaaggccgatggtatgtggtgcagacaaactacgacaggtggaagcatcccttttttttggatgaccggagaacacccgccaagatgtgcctcaataggacctcccaagaaaatattagtttcgaaacgatgtacgacgttctgagcaccaagcctgtgctgaacaaacttaccgtctacaccaccctgatcgatgtcaccaaaggacagtttgaaacatatctcagggactgtccagatccctgtattggctgg

SEQ ID NO: 252809 - DNA, 1185 bp, Artificial Sequence
  derived and/or modified sequence
atgccgggtaggtcttgtgtcgcccttgttctgctggcagcagcggtcagctgtgcagtcgctcagcatgccccaccctggacagaagactgtagaaagtcgacctacccaccctcaggccccacatatcgaggcgcggtaccctggtacaccataaacctcgaccttcctccctacaaacgatggcatgaactaatgcttgacaaggcacctgtgctgaaagtgattgtaaattcactgaagaacatgatcaacacatttgtcccgagcggcaagattatgcaggtggttgatgaaaaactgcccggccttttgggcaacttccccggcccgtttgaggaagaaatgaaggggatagcagccgtcacagatatccccctcggagaaataatctctttcaatatcttctacgagctgtttaccatttgcacaagcatcgtcgcagaagacaaaaaggggcacctgatccatgggcggaatatggactttggcgtttttctaggttggaatattaacaacgacacatgggtcattacagaacaattgaaacctttgaccgtgaatctggactttcaaaggaataacaaaacagtgttcaaggcaagttcattcgctggatatgtgggaatgctaactggattcaagccagggctgttctcattgaccctgaacgagagattttcaattaacggcggttacctggggatactcgagtggatcctggggaagaaggacgtcatgtggataggctttctcacgcgcacagtcctcgagaattcaacaagctacgaagaagccaagaacttactgacaaagaccaagatactggcacccgcctactttatcttgggagggaaccaatctggggaaggatgcgtgatcacccgcgatcgcaaagaaagtctagacgtttacgagctagacgcaaaacaaggcaggtggtacgtggtgcagacaaactacgacaggtggaagcatcccttctttctggatgacagacggacgcccgctaagatgtgtctaaatagaacttcacaagagaacatttcttttgagacaatgtacgacgtgctttccaccaaaccggtgcttaataaactgacagtgtacacaacactcatcgacgtgaccaaaggacaattcgaaacatacctccgggactgtccagacccgtgcatcggctgg

SEQ ID NO: 252810 - DNA, 1185 bp, Artificial Sequence
  derived and/or modified sequence
atgccagggcgctcctgtgtcgcgctcgtgttgctggctgccgccgtgtcatgcgccgttgctcaacacgcgccaccctggaccgaagattgccgcaaatcgacttatccaccatcaggaccaacttaccgcggggccgtcccgtggtacacgatcaatctggacttgccaccatacaagcgctggcatgaacttatgctggacaaggcgcctgtcctcaaggtgatagtgaactcgttgaagaatatgatcaacacttttgtgccttcgggtaaaatcatgcaggtggtggacgaaaagctccctggcctcctgggcaacttccccggacctttcgaggaggaaatgaagggaatcgccgcagtcactgatattccgctgggtgagatcatctcgttcaacatcttttacgagctcttcaccatttgcacctccatcgtcgccgaggacaagaaggggcacttgatccacggacgcaatatggacttcggcgtgttcctggggtggaacattaacaacgacacttgggtgatcaccgaacagctcaaacctctgaccgtcaatctcgactttcaacggaacaataagaccgtgttcaaggcctcatccttcgctggatacgtcgggatgctgaccggattcaaaccgggacttttttcactgaccctcaacgagcgtttctcgatcaatggtggctacctgggtattcttgaatggatcctgggtaaaaaggatgtcatgtggatcggatttcttactcgcaccgtgcttgagaactccacttcatacgaggaggcgaagaacctgctcaccaagaccaagatcctcgcgccagcctactttatcctgggaggaaaccaaagcggcgagggctgtgtgatcaccagagatcggaaagagtcccttgacgtgtacgaacttgatgctaaacaagggagatggtacgtcgtgcagaccaactacgaccgctggaagcatccattcttccttgacgatcggagaacccctgccaaaatgtgtttgaaccggaccagccaagaaaacatctcgttcgaaaccatgtacgacgtgctttcgaccaaaccggtgctgaataagctgaccgtgtacactaccctgattgacgtgactaaagggcagttcgagacttacttgcgggattgcccggatccgtgcattggctgg

SEQ ID NO: 252811 - DNA, 1185 bp, Artificial Sequence
  derived and/or modified sequence
atgcctgggagatcgtgtgtggcacttgtgctgctggcagcagcagtgtcttgtgcagtggcacagcatgcaccgccttggacggaagattgccgaaagtcaacgtatccgccgtcagggccaacttaccgcggtgccgtgccctggtacaccatcaatcttgatctgcctccatacaagcggtggcatgaactcatgttggataaagcaccagtgcttaaggtgatcgtgaactccttgaagaacatgattaacacgtttgtcccttcaggcaagatcatgcaagtggtggatgaaaagctgccaggtctgttggggaattttcccggacccttcgaggaggaaatgaaaggtattgccgcggtcaccgacattccgctgggtgaaatcatctcgtttaacattttctacgaactctttaccatctgtacttcaattgtggcggaagataagaaagggcaccttattcacggccgcaatatggattttggcgtgtttctgggatggaacattaacaacgacacttgggtgattaccgaacagcttaagcccctgaccgtgaatctggactttcagaggaacaacaagaccgtctttaaagccagctcctttgcaggctacgtgggaatgctgacgggtttcaagccaggactgttcagccttactctgaatgagcgcttctcgatcaacggaggataccttggcattcttgagtggattcttggaaagaaggatgtcatgtggattggttttcttactagaaccgtgctggaaaactctacttcgtacgaggaagctaagaatctccttactaagaccaagattctggcgcctgcatacttcatccttggtggtaaccaatcaggtgaagggtgtgtcattactcgggaccgtaaagagtcgcttgatgtgtacgagctcgatgctaaacaaggacgatggtacgtggtgcaaaccaattacgatcggtggaagcaccctttctttttggatgatagacggacgcccgcaaaaatgtgtttgaacaggacttcccaagagaatatcagctttgagacgatgtacgacgtgctgtcaaccaagccagtgctgaacaaactgactgtgtacactaccctgattgacgtgactaagggccagttcgaaacctatctgagggattgtcctgatccgtgcatcggatgg

SEQ ID NO: 252812 - DNA, 1185 bp, Artificial Sequence
  derived and/or modified sequence
atgccggggcgttcatgtgtggctcttgtattgctggccgcagcagtatcatgtgccgtcgcccaacatgcaccaccatggacggaagattgtcgcaagagtacttatccaccgtccggtcctacttatagaggagctgtaccttggtacacaattaatctggatctcccaccatacaagagatggcatgaattgatgctagataaagctcccgttttgaaagtgattgttaactccctgaaaaatatgattaatacatttgtcccttccggcaaaatcatgcaagtcgttgatgaaaagcttccaggattgttgggaaattttccgggaccatttgaagaggagatgaaaggaatcgcagcagttaccgacatcccattgggagaaattatctcgtttaatattttctacgagttgtttaccatttgtacatctattgtggctgaagataaaaagggacacctgattcatggacgaaatatggattttggtgtgtttctagggtggaatataaataatgacacttgggtcattactgaacaacttaagcctctaacagtaaatttagattttcaaagaaataacaaaactgtttttaaggcttcttcgttcgcaggatatgttggtatgttgaccggatttaaaccaggactcttctcgcttactttgaatgaaagattttcaataaatggaggatatcttggaattttggaatggattttggggaagaaggatgtcatgtggattggttttctgacgaggacagtgctggagaacagtacttcttatgaggaagccaaaaacctgctcacaaagaccaagatcctcgcaccagcctactttattctcggtggaaatcaatctggtgaaggctgcgttattaccagagatagaaaggaatcgcttgatgtctacgaactcgatgcaaagcagggacgatggtatgtggtccaaactaactatgatcgttggaaacacccgtttttccttgatgatcgtcgaaccccagccaaaatgtgtctcaacagaacatcccaagagaatatcagtttcgaaacaatgtatgatgtactctcaacaaaacctgtgctcaataagttgactgtgtacactactttgattgacgtaacgaaaggacaatttgaaacatatttacgcgactgcccagacccgtgtatcggatgg

SEQ ID NO: 252813 - DNA, 1185 bp, Artificial Sequence
  derived and/or modified sequence
atgccagggcgctcgtgtgtggcactggtccttctggcagcagcagtgtcctgtgccgtcgcacaacatgctccgccatggaccgaggactgcaggaagtcgacctacccaccatccggccctacctacaggggagcagttccttggtacacgattaacctggacctgcctccatataagagatggcacgagctgatgcttgacaaggcgccagtcctcaaggtgattgtgaacagcctgaagaacatgataaacacctttgtcccctccggtaagataatgcaggtggtcgatgaaaaacttcccgggcttcttggcaactttcctggtccctttgaagaagagatgaagggaatcgcagcagtcacggacattcccctgggcgaaatcatttcatttaacatcttctacgaattgtttaccatctgtacctctatagtggccgaggacaaaaagggtcatctcattcatggaaggaatatggactttggtgtctttcttggttggaacattaacaatgatacctgggtcatcaccgaacaactgaagcccctgactgtgaacctggactttcagcgcaacaacaagactgtgttcaaggcgagcagcttcgctggttacgtgggtatgcttaccggatttaagcctggactgttttcactgactctgaacgaaagattttcgattaacgggggttacctgggaatcctggaatggatcctgggtaagaaagatgtcatgtggattggctttcttacgagaactgtcctggaaaactcaacttcgtatgaagaggcaaagaatctcctgaccaaaactaagatccttgcacctgcgtactttattctgggagggaaccaatcgggtgaggggtgtgtgataacccgcgaccggaaagagtcgctggatgtgtatgagctcgatgcaaaacaagggagatggtacgtggttcaaactaactacgatcgctggaagcacccgttttttcttgacgatcgcagaaccccggccaaaatgtgcttgaatcgcacgtcacaggaaaacatttcctttgagactatgtacgatgtcctttctaccaagcctgtgcttaacaagctcaccgtctacaccactcttatcgatgtcaccaagggacaattcgaaacctaccttcgggactgcccagatccgtgtatcggctgg

SEQ ID NO: 252814 - DNA, 1185 bp, Artificial Sequence
  derived and/or modified sequence
atgccgggacggtcgtgtgtggcgctggtgctcctcgcagctgcagtgtcctgcgcagtcgcacagcatgcacccccgtggacggaagattgccgcaagtccacttaccctccttcagggccaacttacagaggtgctgtcccatggtacaccattaatctggatctccctccatacaaaaggtggcacgagctgatgctggacaaggcacctgtccttaaggtcatagtcaactctctgaagaacatgattaacacttttgtcccatccgggaagattatgcaggtggtggacgagaagctgccaggattgctgggaaactttcctggtcctttcgaggaagaaatgaagggtattgccgccgtcaccgacatcccactgggagagatcatctcattcaatatcttctacgaattgttcacgatctgtacgtctattgtcgcagaagataagaagggacatctgatacacggccggaacatggactttggagtattcctgggctggaacattaacaatgatacttgggtgatcactgagcaactgaaacctctcacggtcaatctcgactttcaacgtaacaacaagaccgtgtttaaggcttcgtccttcgccggatacgtggggatgctcactggattcaaacctggattgttctcccttactctcaatgagcgtttttccatcaacggcggttaccttggaatccttgaatggatcctgggaaagaaggatgtgatgtggattggttttctgaccagaacggtgctcgaaaactcgacctcatatgaagaggcgaagaatcttctgaccaagaccaagattcttgcacctgcctacttcattctgggtgggaaccaatctggagaaggttgcgtgattacccgagatcggaaggaatcactggatgtgtatgagttggatgcgaagcagggaagatggtacgtggtgcaaacgaattacgaccgctggaaacatccattctttctcgacgacaggcggacgccggcaaagatgtgcctgaaccggacttcgcaagaaaacatttcctttgaaaccatgtacgatgtgctcagcacgaagcccgtgctgaataaacttactgtctacactacccttatagatgttactaagggacagtttgaaacctaccttcgggattgtcctgacccctgtattggttgg

SEQ ID NO: 252815 - DNA, 1185 bp, Artificial Sequence
  derived and/or modified sequence
atgccaggacggtcatgcgtggctttggtgctgctggccgctgctgtgagctgcgctgtcgcgcaacacgctccgccttggaccgaggactgcaggaaatcgacctacccgccgtcaggacctacctacaggggagcagtgccatggtacactatcaatttggatctgcctccgtacaagcgctggcatgagctgatgctggataaggctccggtgctcaaggtgatcgtcaactcgctgaagaacatgatcaacacctttgtgccgtcgggtaagatcatgcaggtggtcgacgaaaagctgccgggcctcctgggcaacttcccgggaccattcgaagaagaaatgaaggggatcgccgccgtgaccgacatcccgctgggagagatcatctcattcaacatcttttacgagttgttcacgatctgcacttccattgtggccgaagataagaagggtcacttgatccacggcagaaatatggacttcggtgtgttcctgggatggaacattaacaatgatacctgggtgatcaccgaacagcttaagccactgactgtgaatctggatttccaacgtaacaacaaaactgtgttcaaggcgtcctcctttgcaggatacgtcggaatgctgacgggatttaagccaggactctttagtctcacccttaatgaaagattctccatcaacggaggctacctgggaatcttggaatggatcctgggtaaaaaggatgtgatgtggatcgggtttctgaccagaaccgtccttgagaattcgacttcgtacgaggaagccaaaaatcttttgactaagactaaaatcctggcccctgcttacttcattctcggaggaaatcaaagcggagagggatgcgtcatcacccgagataggaaggagtccttggatgtgtacgagcttgacgccaagcagggacgctggtacgtggtccaaaccaactacgaccggtggaagcatccgttcttcctcgacgatcgccgcaccccagcaaagatgtgtctcaaccggacctcacaggaaaacatctcgttcgagactatgtacgacgtgctctccactaagccggtgttgaataagttgaccgtgtacaccaccttgatcgacgtgacgaaaggtcagttcgaaacttatctgagagactgcccggacccgtgcatcggatgg

SEQ ID NO: 252816 - DNA, 1185 bp, Artificial Sequence
  derived and/or modified sequence
atgccagggcgttcctgcgtggcactggtgctgctcgcagctgccgtgtcctgcgccgtagcacagcatgcacccccatggactgaagattgtcgcaaaagcacctacccgccttcgggccccacttacaggggggccgtaccgtggtacactataaacttggacctcccgccgtataagcggtggcatgagctgatgctcgacaaagcgccggtcctgaaggtcatcgttaacagcctgaagaacatgatcaacaccttcgtgcccagcggaaaaatcatgcaagtggtggacgaaaaactcccgggcttgctggggaacttcccaggtccgtttgaagaggaaatgaaaggaatcgccgcggttacggacattcctcttggagaaatcatatcattcaatatcttctatgaactgtttactatctgcacctctatcgtggccgaagataagaagggacacctcatccacggaagaaatatggacttcggagtgttcctcggctggaacatcaacaacgatacttgggtgatcactgagcagctcaagccattgaccgtgaacctggactttcagcgcaataacaagaccgtgttcaaggcatcctcctttgccgggtacgtgggaatgctgacgggattcaagcctggactgttctcgctgactcttaatgaacgcttctccatcaacggagggtacctcggcatcctggagtggattcttggtaagaaagacgtcatgtggattggcttcctgaccaggacggtgctggaaaactctacttcgtacgaggaggcgaaaaatctgctcactaagactaaaatcctggctcctgcgtactttatcctcggaggaaatcagtcgggcgagggctgcgtgattaccagggaccggaaggaatcgctggatgtctatgagctggacgcaaaacaaggacgatggtacgtggtccagaccaattacgatcgatggaagcacccgttcttcttggatgacaggcgcacccccgccaaaatgtgtctgaatagaacgtcacaagagaacattagctttgagactatgtacgatgtcctgagcaccaagcctgtgctcaataagctgactgtctacaccacgctgatcgacgtcactaagggacagttcgaaacttacctccgcgattgcccggacccatgcatcggatgg

SEQ ID NO: 252817 - DNA, 1185 bp, Artificial Sequence
  derived and/or modified sequence
atgcctggccgatcctgcgtggcactggtgctactggccgcagccgtgagctgcgcagtggcgcagcatgctccaccatggactgaagattgcaggaaaagcacgtatccgccctccggaccaacctaccgaggcgcggtaccttggtatacaataaatcttgaccttcccccttacaaacgatggcacgaattgatgttggataaggcccctgtattaaaggtgatagtgaactccctgaaaaatatgatcaatacattcgtcccctccgggaagatcatgcaagtcgttgacgagaaactcccaggcctgctggggaattttcctggtccgtttgaggaagaaatgaaagggatcgctgcagtcaccgatatccctctgggcgaaattattagctttaatatcttttatgaacttttcacgatctgcacaagcatagtcgccgaggacaaaaagggtcacttaatccacggacgtaacatggatttcggggtgttcttggggtggaacatcaataacgatacctgggtaattaccgagcagcttaaacctctcaccgttaatctcgacttccagcgaaataataaaaccgtctttaaggcttcctccttcgcaggctacgtcggaatgcttactggattcaagccagggttattctctttgactcttaatgagagattttccattaacggtggatacctcgggattttggaatggattctcggcaagaaggatgttatgtggatcggctttcttacgcgaacagtactggagaactcaacatcatatgaagaggccaaaaatctacttacaaagactaagatcctggccccagcttatttcattctgggtggaaatcagtctggtgagggatgtgtgattacccgagaccgaaaggaaagtctcgacgtgtacgagctggatgccaaacagggccgatggtacgtggtgcagaccaactatgatagatggaaacatccctttttcctggacgaccgtaggaccccggcaaaaatgtgtctgaatagaacgagccaggagaatatctcattcgaaaccatgtacgacgtgctgtctacgaaaccggttctcaacaagctaacagtttatacgactctgatcgacgtaaccaaaggccagtttgagacttatctgagggattgtcccgacccttgcatcggctgg

SEQ ID NO: 252818 - DNA, 1185 bp, Artificial Sequence
  derived and/or modified sequence
atgcctggccgctcttgtgtggccctggtgctgctggctgctgctgtaagctgcgctgttgcacagcacgcacctccatggaccgaggactgtcggaagtcaacgtaccctccctctggtcccacttacaggggggccgtgccttggtacaccattaaccttgacttgcctccatacaagagatggcacgagttgatgctcgacaaggcacccgtgctgaaagtgatagttaatagtctcaaaaatatgataaatacattcgtgccatcagggaagattatgcaggtcgttgacgaaaagctgccagggcttctcggcaacttcccagggcctttcgaggaggaaatgaaaggtatagcggccgtcacagatatccccttgggcgaaattatttctttcaatattttttacgagctgtttaccatttgtaccagcatagtggccgaggacaagaaaggtcatttgattcacggtaggaatatggactttggggttttcctgggatggaatatcaacaatgatacttgggttataaccgaacaactgaaaccccttaccgtgaacctggattttcagagaaataataaaaccgtgttcaaagcgagttcttttgccgggtacgtcggcatgcttacaggttttaagccaggactgtttagcctaacactgaacgaacgctttagcatcaacggtggctacctgggcatcctggaatggattctgggaaaaaaggatgtgatgtggattggttttctgaccagaacagtccttgagaactccaccagttacgaggaagccaaaaacctactgacgaagaccaagatccttgcgccagcgtactttatcctgggaggcaatcagtcaggggagggctgcgtcataacaagagatcgcaaggagtccctcgatgtgtatgagctcgatgctaaacaaggtaggtggtacgtggtccagacgaattatgaccggtggaaacatccattctttctggatgaccggcgcacgcctgcgaagatgtgcctcaaccggacatctcaggagaatatctctttcgaaaccatgtacgacgtgttgagcacaaaaccagttttgaataaactaaccgtgtacacgaccctaatcgatgttactaagggccagttcgagacatacctccgggactgcccggacccatgtatcggctgg

SEQ ID NO: 252819 - DNA, 1185 bp, Artificial Sequence
  derived and/or modified sequence
atgcctgggcgaagctgtgtggcattggtacttctcgccgctgcagtgtcctgtgccgtggctcagcacgctcctccatggacagaagattgccgcaagtccacctacccgcctagcggaccaacttatagaggggcagtaccctggtacacaattaatctggatctcccaccatacaagcgctggcatgaactaatgcttgacaaggcccccgtgcttaaggtgatcgtgaattcactgaaaaacatgattaatacctttgtgccatctggtaaaatcatgcaggtggtcgatgaaaaactccctggacttttaggtaacttccccggtccgtttgaggaggaaatgaagggaattgctgcagttaccgatatccctctcggtgagatcattagctttaatattttctacgaattattcactatttgcacaagtatcgtggctgaggacaaaaaaggccaccttattcacggccggaacatggattttggcgtgttccttggctggaatatcaataacgatacctgggtcatcaccgaacagttgaagccactcactgtgaaccttgactttcagaggaacaacaaaacagtgttcaaagcttccagttttgctgggtacgtaggcatgctcactgggtttaaacctgggctcttctcccttacactcaacgagagattctccataaacggcggctacctcgggatactcgaatggattcttggcaaaaaggacgttatgtggatcggattcctgacccggaccgtattggagaattcgactagctacgaagaggccaagaatctgcttactaaaaccaagatcctcgctccagcttactttatcctagggggaaaccagagcggcgaaggctgcgtgatcacccgggacaggaaagagtccctcgatgtgtatgagcttgatgcgaaacaaggacgatggtacgtggtccagactaattacgaccggtggaaacacccatttttcctggacgatcgccggacgccagcaaaaatgtgcttgaatcgcacatcacaagaaaacatcagcttcgagacaatgtatgatgtgttgagtaccaagccagtgctgaacaagctgacagtttacactactttgatagatgtgacgaagggacagttcgagacttacttaagggattgtcccgatccctgtatcgggtgg

SEQ ID NO: 252820 - DNA, 1185 bp, Artificial Sequence
  derived and/or modified sequence
atgcccggtcgctcctgcgtcgcattggtgctgctcgcggccgctgtctcttgcgccgttgcgcagcacgcgccaccctggacggaggattgcagaaaatcgacttaccctccctcggggcctacatatcgcggcgcggttccctggtacaccatcaacttggatttgccgccctacaagcgctggcatgaactcatgctggataaggcccccgtcctcaaggtcattgttaacagcctgaagaatatgatcaataccttcgtcccttcgggtaagattatgcaggttgtcgacgagaaactccccggtctgctgggcaacttcccgggtccctttgaagaagaaatgaagggtatcgctgccgtcacagacattccactgggcgagatcatttcgtttaacatcttctacgaactgtttaccatctgtacctcgattgtcgctgaagataaaaagggccacttgatccatggccggaacatggatttcggggtgttcctgggctggaacattaacaacgacacctgggtcataaccgagcagcttaagccgctcactgtcaatcttgacttccagcgcaacaacaagaccgtgttcaaggctagttcttttgctggttacgtcggcatgctaaccggtttcaagcctgggcttttttctctaaccctcaacgagcgtttctccattaatggcggttacctcggcatcttggagtggatcctgggtaagaaagacgttatgtggatcggcttcctgacacgtaccgttttggagaactcgacttcatacgaagaggccaagaacctcttaaccaagacaaagatcctggcaccggcatatttcatcctgggcggtaaccagagtggagaagggtgcgttatcacacgggaccgaaaggagtcgttggacgtttacgaactagacgccaagcagggacgctggtacgtagtgcaaaccaactacgaccgctggaagcacccgttcttccttgacgaccgccgtactcctgctaagatgtgtctgaaccgcacctcccaggagaacatcagtttcgagacgatgtacgacgtcttgagcactaaaccggttcttaacaaactgactgtttacaccaccctgattgatgtcactaagggacagttcgagacttacctgcgtgactgtccggacccctgcattggctgg

SEQ ID NO: 252821 - DNA, 1185 bp, Artificial Sequence
  derived and/or modified sequence
atgccaggccgttcctgtgtggccctggtgctccttgcagcagccgtgagctgtgcggtcgcacaacacgcgcctccatggactgaggactgccgaaagtcaacctacccaccaagtggacctacttaccggggcgcagtaccctggtacaccattaacttggaccttccgccctacaaacgatggcatgaactgatgttggataaggcccctgttcttaaggtgatcgtgaattcccttaagaacatgatcaatacctttgtcccatccgggaagattatgcaggtggttgatgaaaagctgcccggcctgctcggcaatttcccgggtcctttcgaagaagaaatgaaagggattgcagcggttaccgacattcccttgggagagattatctcgttcaacatcttttacgaactgtttaccatttgtacctcaatcgtggccgaggacaaaaaaggacatctgattcatggaagaaacatggattttggggtctttcttggatggaacatcaacaacgatacttgggtcataactgaacagctcaaacctcttactgtgaaccttgactttcaaaggaataacaagaccgtgtttaaggcatcatcgtttgccgggtacgtgggaatgcttactgggtttaagcctggtctgttctccctgaccctcaacgagagattttcgattaatggaggataccttggaatccttgagtggatattggggaaaaaagatgtcatgtggatcgggttccttacccggactgttctggagaactccacttcatatgaggaagccaagaacctcctgactaagactaagattcttgctcccgcatatttcattctcggagggaatcagagcggcgaaggatgtgttataacccgcgatagaaaggaatcgctggatgtgtacgaactcgatgccaagcaaggtcgatggtacgtggtccaaactaattacgaccggtggaagcacccttttttcttggatgatcgtcgcaccccagctaagatgtgcctgaacagaacgagtcaggaaaacatctctttcgagacgatgtacgacgtgctgtctacgaaacccgtgcttaacaagctgactgtgtacaccacccttattgatgtgaccaaaggacaatttgaaacttacttgcgcgactgtcctgatccatgcatcggttgg

SEQ ID NO: 252822 - DNA, 1185 bp, Artificial Sequence
  derived and/or modified sequence
atgcctggacggtcatgtgtggcgttggttctactggcagcagcggttagttgtgcggtggctcagcatgcacctccctggacagaggattgtcgtaaatccacatatccgcctagcgggcctacgtacagaggcgctgtaccgtggtataccataaatttggatttgcccccctataagagatggcacgagcttatgttggacaaagctccggtactcaaagtcattgttaattccttgaaaaacatgatcaacacgtttgtccctagtggcaagataatgcaagtagtggatgaaaaacttcctggactgcttggcaattttcctggcccatttgaagaggaaatgaagggaattgctgcagtgacggatataccgttaggagaaattatctcgttcaatattttctacgaattatttactatatgcacatctatcgtggcggaagacaaaaaaggtcacttaatccatggacggaacatggattttggcgtgttcctcggctggaatatcaacaatgatacgtgggttattacggaacaactgaaaccgcttactgtgaatctggatttccagcgcaataataagactgtctttaaagcaagttcatttgcaggatatgtcggtatgctaactggcttcaaacctggcctgttttctctgacgctcaacgaaaggttctcaatcaacggcgggtatcttggcattttagaatggattctgggaaagaaagatgtaatgtggattggattcctgacaaggacagttttggaaaattcaacgtcttatgaagaggccaagaatctcctgacaaaaaccaaaatccttgccccagcttattttatcttggggggaaatcaatccggggaggggtgtgtgatcacgcgggaccgcaaagaaagcctcgatgtttatgagcttgatgctaagcagggaagatggtacgtagtacagacgaactatgatagatggaagcacccattttttttggatgacagacgcaccccagcgaagatgtgcctgaacaggacgtcacaggaaaacatttcgttcgaaactatgtacgatgtactttcgacaaaacctgtgttaaacaaattaacagtctatacgacgctgattgatgttaccaaagggcaatttgaaacataccttcgtgattgtccagatccgtgcatcggatgg

SEQ ID NO: 252823 - DNA, 1185 bp, Artificial Sequence
  derived and/or modified sequence
atgcccggcagatcctgcgtggctcttgtgctgctcgcagcagcagtgagttgcgccgtggctcagcacgccccaccctggactgaggattgtaggaagagcacgtacccaccttccgggccaacctatcgtggtgcggtgccatggtacaccattaacttggatctgccaccatacaagcgatggcacgagctgatgcttgataaggcccccgtgttgaaggttattgtgaattcacttaagaatatgatcaatacttttgtgccctctggtaaaatcatgcaggtggtcgacgagaaactgccaggccttctgggtaacttccctggccccttcgaggaggagatgaaaggtatcgccgctgtgactgatatccccttgggcgagataatcagttttaacatcttctatgaacttttcaccatatgtacttctattgtggccgaagacaaaaagggccacctcattcatgggcggaatatggatttcggggtgttcctgggttggaacataaacaatgacacctgggttattacagagcagctgaaaccattaaccgtgaacctagacttccagagaaataacaagactgtgtttaaggcgtcctccttcgcgggatatgtcggcatgttgactggcttcaagcctggcctgtttagtctcactttgaatgaacgcttcagcattaatggggggtatctcgggattttggagtggatactcggaaaaaaagatgtgatgtggattggattcctaacgcgaaccgtgttggaaaatagcactagctatgaagaggccaaaaacctgctcacaaagactaagattctggccccagcctattttattctcggagggaatcaatcaggagagggctgcgttatcactagagataggaaggagtctctcgacgtgtacgagctggacgctaagcagggtcgttggtatgtggttcaaaccaattacgatcgatggaaacaccctttctttctagacgaccggcgcacaccagcaaaaatgtgcctgaaccgcacctcacaggaaaatatcagcttcgagaccatgtacgacgtgctctctactaagcccgtgctgaataagttgaccgtgtacacgaccctgatagatgtgactaaaggccagttcgagacctacctccgcgattgtcctgatccctgcattggttgg

SEQ ID NO: 252824 - DNA, 1185 bp, Artificial Sequence
  derived and/or modified sequence
atgccgggcaggtcgtgcgtggctctggttttgctggctgccgccgtgtcatgcgcagtcgcccagcacgccccgccatggaccgaggattgtcggaaatccacctaccccccgtctggtccgacgtaccggggcgctgtgccgtggtacactatcaatctggacttgccgccctacaagaggtggcacgaactcatgctcgacaaagcccctgtgttgaaggtgatcgtcaattcccttaagaacatgatcaacacgttcgttccttccgggaagatcatgcaggtcgtggacgagaagctgccgggactgctggggaacttcccgggaccgttcgaagaagaaatgaagggaatcgcagcggtcactgacatcccgttgggggaaatcatcagcttcaacatcttctacgagctgtttaccatctgcacctcaatcgtggcagaggacaagaagggacatctgatccacggacggaatatggatttcggagtgttcctgggatggaatatcaacaacgacacctgggtgatcactgagcaactgaaaccgctgaccgtgaaccttgacttccagagaaacaacaagaccgtgttcaaggcgtcatcgttcgctggatacgtgggcatgttgaccggattcaagcctggattgttctcactgactctcaacgaacggttttctatcaacggtggctatctcgggatcttggaatggattctgggcaagaaagacgtgatgtggatcggtttcctgacccgaaccgtgctggagaacagcactagctacgaggaggcgaagaatctgctcaccaagactaagattctggcgccagcctacttcatccttggaggaaaccaatccggcgagggctgcgtgatcactcgcgatcgcaaggaatccctggatgtgtatgaactcgacgctaagcagggccggtggtacgtggttcagaccaactacgaccgctggaagcatccatttttcctcgatgacaggagaaccccggcaaagatgtgtctgaacagaacttcacaagagaacatctctttcgagactatgtacgatgtgctgtcgaccaagccggtgcttaacaagctgaccgtttacaccaccctgatcgatgtgactaaaggacaattcgaaacctacctgcgcgactgtccggatccttgcatcggttgg

SEQ ID NO: 252825 - DNA, 1185 bp, Artificial Sequence
  derived and/or modified sequence
atgcccggccgaagctgtgtggcactggtgctgcttgccgcagcagtgtcgtgtgcggtggcacaacatgcccctccctggaccgaggattgtcgtaagagcacttacccaccttctggccctacttacagaggagcagtgccctggtataccatcaacttggatctgccaccctacaagcgctggcatgaactgatgcttgacaaggccccagtgctgaaggtcatagtgaacagcttgaagaacatgattaacacctttgtgccttccggaaagattatgcaggtcgtggacgaaaagctccctggactccttggtaactttccaggcccctttgaagaagaaatgaagggcattgccgctgtcacggacatacctctgggtgaaatcatttccttcaacattttctacgagcttttcactatctgtaccagcatcgtcgcagaggacaagaaagggcaccttatacacggacgtaacatggacttcggggtctttctgggatggaacattaacaatgatacttgggtgatcactgaacagcttaagccacttactgtgaacctggacttccagagaaacaataagaccgtgttcaaggctagctcgtttgcaggttacgtgggaatgcttactgggtttaagccaggtctgtttagcctgaccctgaacgagcggttctccattaacggcggctacctcggtatcctcgaatggattcttggcaaaaaggacgtcatgtggatcggatttcttacgagaaccgtgcttgaaaactccacctcctacgaagaagcgaaaaacttgcttactaagactaagatcctggctccagcatactttatccttggaggtaatcaatcaggagaaggttgtgttattactcgggatagaaaggagagccttgatgtttacgagctggatgcgaagcaagggcgttggtatgtggttcagaccaattacgaccggtggaaacacccatttttcctcgacgaccgcagaacccctgcaaagatgtgtttgaacagaacttcacaggagaacatatccttcgagactatgtacgatgtgttgtcgaccaagcccgttctcaataaacttaccgtttacactaccctgatcgatgtcacgaaggggcagtttgaaacctacttgcgagattgtccagacccttgcatcggttgg

SEQ ID NO: 252826 - DNA, 1185 bp, Artificial Sequence
  derived and/or modified sequence
atgccaggcagatcttgcgtggccctggtactgctggcagccgccgtatcctgtgccgtggctcagcatgcccccccttggaccgaggactgtaggaagagcacttacccaccttctggtccaacttacaggggcgctgttccttggtacaccatcaacctggacttgcctccctataaaaggtggcatgagctgatgttggataaggcccctgttctgaaagtgatcgttaacagcttgaaaaacatgatcaacacctttgtgcctagtggcaaaataatgcaagtggttgatgagaaacttcctggacttcttggcaatttcccaggtccatttgaggaggagatgaagggaattgctgcagtaacagacatcccactcggcgaaataattagtttcaacatcttctacgaactctttacaatctgtactagcatagttgctgaagacaagaaaggtcacctcatacatggcagaaatatggactttggagttttccttggatggaatatcaacaacgacacttgggtcatcaccgagcagctcaaaccactcactgttaacctggatttccagaggaacaataagactgtcttcaaggctagcagcttcgcaggctacgtgggtatgttgacaggattcaagcccggattgttcagccttacccttaatgagcgtttttctattaacggcggctacttgggcatccttgagtggattttgggcaagaaagacgtgatgtggattggatttctgaccagaaccgttttggagaactccacctcttatgaggaggctaagaacctgctcacaaaaactaaaatccttgctccagcttatttcatccttggcggtaaccagtctggcgagggttgtgtgattacccgtgatcgtaaggagtcactggatgtttatgaactggacgctaaacaaggaagatggtacgtggtgcagaccaattacgaccgctggaaacatcccttctttctcgacgaccgtcgcacccctgctaagatgtgtctgaataggacttcccaagaaaatatctcattcgaaactatgtacgatgtgctcagtaccaagcctgtgttgaataagttgacagtgtatactaccctgatcgacgtcactaagggccaatttgaaacctacctcagggactgccccgacccctgtattggctgg

SEQ ID NO: 252827 - DNA, 1185 bp, Artificial Sequence
  derived and/or modified sequence
atgcccggaaggtcgtgtgttgcgcttgtgctgcttgcagccgcagtctcctgtgcagtggcacagcatgcgcctccttggaccgaagattgccgtaagtcaacttacccaccctcaggccccacttacagaggtgcggtcccttggtacactataaaccttgatctccctccttacaaacggtggcatgaactgatgcttgataaggcacccgtcctgaaagtgattgtgaactccctcaagaacatgatcaataccttcgtcccatccggaaagatcatgcaagttgtcgatgagaaattgcccggccttctgggtaatttcccaggacctttcgaagaggaaatgaaaggaattgcagctgtgaccgacattcccctgggagaaatcatatcgttcaatatcttttacgagctttttacgatatgtacctcgatcgtcgcggaggataagaaaggacatctgattcatggcagaaacatggattttggagtctttctgggctggaacattaacaacgatacctgggtcatcactgaacaactgaaaccgttgactgtcaaccttgacttccaacgcaataacaagaccgttttcaaggcaagctcgtttgctggatacgtcggtatgctgactggttttaagcccggtcttttttccttgacccttaatgaaaggtttagcatcaacggaggttacctggggatcctggagtggattcttggcaagaaggacgtcatgtggatcggatttctcacccgaaccgtgctggaaaactcaacctcgtacgaagaggcgaaaaatctcctgactaaaactaagatacttgcccctgcatactttatcttgggcggaaaccagtcgggagaaggatgcgtgatcaccagggaccggaaggagtcattggatgtgtacgagcttgatgcaaagcagggtcggtggtacgttgtccaaactaattacgatagatggaagcatcctttctttctggatgacagaagaactcccgcgaagatgtgtctgaatcgcacctcacaggagaacatttcattcgaaactatgtacgacgtgctcagcactaaaccagtgctgaataagttgaccgtgtacaccactctgattgacgtgaccaagggccaatttgagacgtacctcagggattgtcctgatccatgcatcgggtgg

SEQ ID NO: 252828 - DNA, 1185 bp, Artificial Sequence
  derived and/or modified sequence
atgcctggtagatcctgcgtagctctggtgctgctcgcagctgccgtgagttgtgccgttgcacagcatgccccaccatggactgaggattgtcggaaatctacataccctccgtctggtcctacctatagaggtgccgtcccatggtatacaatcaacctagatctcccgccttacaaacggtggcatgaacttatgctggacaaggcccccgtgctgaaggtgattgtcaacagtctcaaaaatatgatcaacacctttgtgccctctggcaaaattatgcaggtcgtagatgaaaagttgcccggactcctgggcaactttccaggaccatttgaagaggagatgaagggcatcgccgcagtcactgacattccccttggggagataattagtttcaacatcttttacgagctttttaccatttgtacaagcattgtggctgaagataagaagggccacctgatccacggaagaaacatggattttggtgtctttctcggctggaacattaacaacgatacatgggtaatcacggagcagctgaagcccctcaccgtgaacctggattttcagagaaacaacaagactgtatttaaagcctcttctttcgcaggctacgtaggcatgcttacaggatttaaacccggattgttctctcttaccctgaatgaacgtttctcaattaatggcgggtatctgggaattctcgaatggatcttggggaagaaggatgtcatgtggataggattcctgactcggactgtgctggagaatagtacaagctatgaggaggccaagaaccttttgaccaagacaaagatattagccccggcctatttcatcttgggcggcaatcagagcggtgaaggctgtgttataaccagggaccgcaaggagtcccttgatgtatatgagttggatgcaaaacaggggcgctggtatgtggtccagacaaattatgatcgctggaagcatcccttctttcttgatgatcgccgcacaccagccaagatgtgtctgaataggacttcccaggagaatattagcttcgaaactatgtatgacgtactgtcaactaaacctgttctcaacaagctgaccgtctacaccacacttatcgatgttacaaaaggccagtttgaaacctatctgcgtgattgtccagatccctgtatcggttgg

SEQ ID NO: 252829 - DNA, 1185 bp, Artificial Sequence
  derived and/or modified sequence
atgccaggccgaagttgcgtggcgctggtattactggcggcagccgtgtcatgcgctgtggcacagcacgcgcccccatggacggaagattgtagaaaaagcacctatcctccttctggacctacatacagaggggccgtgccgtggtacacgataaatttggacttgccaccttataaaaggtggcatgaactgatgctggacaaagccccagttctgaaagtgatagtcaacagcctgaagaatatgattaacacatttgttcccagtgggaagattatgcaagttgtggatgaaaagcttcccggattgttgggtaattttccgggcccattcgaagaggagatgaagggaatcgcagctgttaccgatatcccactgggcgaaattatctccttcaacattttctacgagctgttcaccatttgcaccagcatcgttgccgaagataagaagggccatctcatccatggcaggaatatggactttggggtgttcttggggtggaacataaacaatgatacatgggttatcaccgagcagttgaaaccacttaccgtcaacctcgatttccagaggaacaacaagaccgtgtttaaggcctcttcctttgccgggtatgtagggatgctaacaggttttaagccaggtctgttctctctcacgctgaacgaacgatttagcattaatggaggctatctaggtatcctggaatggattctaggtaagaaggacgtgatgtggattggcttcctcacgagaacagtgttggaaaattccaccagctatgaagaggcgaaaaacctgctcactaaaactaaaattttggcacctgcatatttcatcctcggcggcaaccagagcggcgagggctgcgtcattacaagagaccgaaaagaatcattagacgtgtacgagctcgacgccaaacagggaaggtggtatgtcgtccagacaaattacgatcggtggaagcaccctttctttttggatgataggagaacaccagccaaaatgtgcttgaacagaacatctcaggagaatattagctttgaaactatgtatgacgttctgagcaccaaacctgtgctgaacaagcttacagtgtatactactttaattgatgtcacaaaagggcaatttgaaacttacctgagagactgtcccgatccctgcattgggtgg

SEQ ID NO: 252830 - DNA, 1185 bp, Artificial Sequence
  derived and/or modified sequence
atgcccgggcggagctgcgtggcactggtgttgctcgcagcggccgtctcgtgtgctgtcgcccagcacgcacctccttggactgaagattgccgtaagtctacttatccccccagtggtcctacctacagaggagccgtcccctggtacactatcaaccttgacctgccgccatacaagagatggcacgagctcatgctggataaagcgccagtgttgaaagtgatagtgaattcactgaagaatatgatcaacacattcgttcctagtggaaaaataatgcaggtggtcgatgagaagctacctggccttctgggtaattttccaggacccttcgaggaagagatgaagggtatcgcagccgtaacggacatccccttgggcgagatcataagcttcaatattttctacgagctctttaccatttgcacgtccatcgtggctgaggataaaaaaggccatctgatccacggaagaaatatggatttcggggtctttttggggtggaatattaataatgatacctgggtcattactgaacaattaaaacctttgacagttaatcttgatttccagcgtaataataaaacggttttcaaggccagcagctttgccgggtatgtaggtatgctgaccgggttcaaaccgggactgttctcattgaccctaaacgagcgattctcaatcaatggcggctacctcgggatcctcgagtggattctgggtaagaaggatgttatgtggataggatttctgacacggaccgtattggaaaatagcacctcctatgaggaggctaagaatctgttgaccaaaacaaaaatcctagcccctgcctactttattctcggaggtaatcagtccggggaagggtgcgtaattacccgagaccgcaaggagtccttggacgtctatgagctggacgcaaagcagggtaggtggtacgtggtccagaccaactacgacaggtggaaacatccctttttcctggacgacaggcggacacccgcaaaaatgtgcctaaacaggaccagccaggaaaatatctcattcgagactatgtatgatgtgctcagtaccaagcccgtgctaaacaagctaacagtgtataccacattgatagacgttaccaaaggtcagttcgagacttacctgcgggactgccctgacccctgcattggatgg

SEQ ID NO: 252831 - DNA, 1185 bp, Artificial Sequence
  derived and/or modified sequence
atgcccggcaggtcctgcgtcgccttggtgctgcttgcggctgctgtgtcctgcgcggtggctcaacacgcaccaccctggaccgaggattgcaggaaatctacctatccaccatccggacccacatataggggagcagtaccctggtatacaatcaacctggatctgcctccctataagagatggcacgagcttatgctggacaaggccccagtgttgaaagtgattgtgaatagtctcaaaaatatgatcaacacatttgttccttcagggaagatcatgcaggttgtggacgagaaacttcctggtctgttggggaatttccccggacccttcgaggaggaaatgaagggcattgcagccgtgactgatatccctctgggcgagattatctcttttaatatcttttacgagctgttcacgatttgcacctccatcgtggctgaggacaagaaggggcatctcatccacggccggaacatggacttcggagtgttcctgggctggaacatcaataacgatacgtgggtgatcactgagcagctcaaaccgctgaccgttaacctggatttccagcggaacaacaagaccgtcttcaaggccagctcttttgccggctacgttggcatgctgactgggttcaaaccaggtctgttttcactcaccttgaatgaaagattctctattaatggaggataccttgggatcctggaatggattttgggcaaaaaggacgtaatgtggattggctttttgaccaggactgtgctggaaaactcaacttcatacgaagaggcgaagaatctgctcaccaagaccaagatattggctccagcatattttatactcggaggcaatcagtctggagagggctgtgtcattacaagggatagaaaggaaagcttggatgtttacgagcttgacgctaagcaggggcggtggtacgtggtccagaccaactatgatcgctggaagcaccctttctttttggacgacaggagaactccagcaaagatgtgccttaaccgcaccagtcaggagaatattagtttcgaaacaatgtacgacgtgctctccacaaagcccgtactgaacaagctgacagtctataccaccctgatagacgtgactaaaggccagttcgaaacgtacctgcgagactgccccgatccttgtatcggctgg

SEQ ID NO: 252832 - DNA, 1185 bp, Artificial Sequence
  derived and/or modified sequence
atgccgggccggagttgcgtcgccctggtgctgttggcagccgcagtgtcgtgtgccgtggcacagcacgccccgccgtggactgaggattgccggaagagcacttatccgccttccggaccaacttatcgcggggctgttccctggtacactatcaacctcgatctgcctccgtacaagcgctggcatgaactgatgttggacaaagcgccggtgcttaaggtcatcgtcaattcactgaagaacatgatcaacaccttcgtgccgtcgggaaagatcatgcaagtggtggatgaaaaactgcctggattgctggggaactttcctgggccgttcgaggaggaaatgaagggaattgcggcggtgactgacattccacttggagaaattatctcattcaatatcttctacgagctgttcaccatctgcacctcgattgtggcggaagataaaaaaggacacctgatccacggcagaaatatggactttggagtattcctcggatggaacatcaacaatgatacctgggtgatcactgagcagctgaagccattgaccgtgaatctggattttcaacgcaataataagaccgtctttaaagcctcgtcctttgctggatacgtgggtatgctgaccggattcaagccaggcctcttctctctgactcttaacgaacgattcagcatcaacggcggctacctgggcatcctcgaatggatactcggaaaaaaggatgtcatgtggatcggcttcctgactcgcaccgtgctggaaaacagcacttcatacgaagaggcaaaaaacctcctcaccaagacgaagattctcgctccagcctacttcatcctgggagggaatcaatccggtgaaggatgcgtcatcaccagagacagaaaggaatcgctggatgtgtacgaactggacgccaagcagggacggtggtacgtggtccagaccaactacgacaggtggaagcatccgttctttcttgacgaccgcaggactcccgccaagatgtgcctcaaccggacgtcccaggagaacatcagcttcgagacgatgtacgacgtgctctccaccaagccagttctgaacaagctgaccgtctacaccactctcatcgacgtgacgaaaggtcagttcgagacttacctccgggactgccccgacccgtgtatcggttgg

SEQ ID NO: 252833 - DNA, 1185 bp, Artificial Sequence
  derived and/or modified sequence
atgccaggccgatcttgtgtggccctggtcctcttagcagcagccgtgagctgcgctgtggcccaacacgctcctccctggactgaggactgcaggaaaagcacctacccccctagtggaccgacatatcggggggcagtgccatggtatacaataaaccttgatctgcctccctacaagagatggcacgaattaatgctggacaaagcaccagtcctgaaagttatagtcaatagtctgaagaacatgatcaacactttcgtgccgtctggcaaaatcatgcaggtcgtggatgaaaagctgccaggactgcttggcaactttccagggccgttcgaagaggagatgaaagggatcgccgcagtgaccgacataccattaggggagataatctcatttaatatcttctacgagctgttcactatctgcacctcgatagtggccgaggacaagaaaggacatctgatacacggtcggaatatggatttcggggtcttcctgggatggaatattaacaacgacacatgggtcatcacagagcagctgaagcccctgaccgtcaacctcgacttccagaggaacaataagacggtattcaaggcctcttccttcgctggctacgttggtatgctcaccgggttcaaaccaggcctgttctcgctcacactgaacgagcggttctcaattaacggtggctacctgggtatactggagtggattctgggcaaaaaggatgtgatgtggatcggctttcttacgcggaccgtgctggagaactctacctcgtatgaggaagctaagaatctattaaccaaaaccaaaattctagcacccgcctacttcatcctcgggggaaatcagtctggcgaaggatgtgtcatcactcgcgatagaaaggagagcctagatgtatatgagttagatgccaagcagggccgatggtacgtcgtgcagaccaactacgataggtggaaacatcccttcttccttgacgacaggaggactcccgccaaaatgtgtctgaatcggacctctcaggagaacatctcctttgagactatgtacgacgttctgtctaccaaacctgtccttaacaagcttaccgtctataccacactcattgatgtaactaagggacagttcgaaacctacctgagagactgtccggatccgtgcatcgggtgg

SEQ ID NO: 252834 - DNA, 1185 bp, Artificial Sequence
  derived and/or modified sequence
atgcctggaagaagctgtgttgctctcgtgttactggccgctgcagtgagctgcgccgtggcgcagcatgccccaccctggaccgaggactgtcggaagagcacgtatccccccagcggacccacatacaggggagccgtaccttggtatacaatcaatctggatttgcccccatacaaacgttggcatgagcttatgctggacaaggccccagtgttaaaggttattgtgaactctctgaagaatatgatcaatacattcgtcccctctgggaaaattatgcaggtagttgatgagaagttaccagggctacttggtaactttccagggccatttgaagaagaaatgaaaggtatagccgccgttactgacatacccctgggggagatcatctctttcaatattttctacgaactctttacaatctgtacttcaatcgttgcagaggataaaaagggtcatttaattcacgggaggaatatggatttcggagtattcttggggtggaatatcaacaatgatacttgggtgatcacagagcagttgaagcccctgacggtaaatttggattttcagcgaaataacaaaacggtgttcaaggcttcttctttcgcgggttacgtgggcatgctgaccgggtttaagcctggcctgttctcactgaccctgaacgagcggttcagtattaatggaggctatctcggcatattggagtggatactgggaaagaaagacgtgatgtggatcggcttcctgacaaggactgtcctggagaattctacctcttacgaggaggccaagaacttactgacaaagaccaaaatcctggctccggcatatttcatcctcggaggtaaccagtccggcgaaggttgcgttatcacaagagaccggaaagagagccttgatgtgtacgagctggatgctaaacagggcaggtggtacgtagtgcagaccaattatgatcggtggaaacacccattcttccttgatgatagacggaccccagctaaaatgtgtctcaacaggacctctcaggaaaacatcagctttgagacaatgtacgatgtgctgtccaccaagcctgtgttgaacaagctaaccgtctataccacgctcatcgacgtaacaaaaggtcagtttgagacgtacctgagagattgccccgatccttgtatcggatgg

SEQ ID NO: 252835 - DNA, 1185 bp, Artificial Sequence
  derived and/or modified sequence
atgccaggacggtcctgcgttgcactggtgctgctagcagctgccgtcagttgcgcagtagcacagcacgcccccccttggacagaagactgcaggaaatcgacctatccacccagcggaccgacataccggggggctgtaccctggtacactatcaacttagatctgcccccatacaaacggtggcacgaactgatgctggataaggctcccgttttaaaagtgatcgtcaacagcctgaaaaatatgataaacacctttgtacccagcgggaaaatcatgcaggtggtggacgaaaagctgcctggactgcttggaaattttcccggccccttcgaggaggagatgaagggaattgccgctgtgaccgacataccacttggagagatcatttcattcaacatcttctacgagctgtttacaatctgcacctccattgtcgctgaggacaaaaaaggccatctgatacacggcagaaacatggactttggagtctttttgggctggaacatcaataacgatacttgggtgatcacagaacagttgaaacctcttacagtcaaccttgactttcaaagaaacaacaaaaccgtgtttaaggccagctcctttgccgggtacgtggggatgctgaccggattcaagcccggactgtttagcctgaccctgaatgaaagattcagcatcaacggcggctatcttggaatacttgagtggattcttggaaaaaaggatgtcatgtggattggattcctcaccagaaccgtcctggagaactctacttcatatgaagaggcaaagaacctgctcaccaaaacaaaaatcctcgcgcccgcttactttatcttgggaggcaaccagtcaggcgaagggtgcgtcataaccagggacagaaaggaatcactagacgtttacgagcttgacgcaaaacaagggagatggtatgtggtccagactaactatgatagatggaaacatcccttcttcctggatgatcgccgtacaccagccaagatgtgtctcaacaggacctcccaggaaaacattagttttgaaactatgtacgatgtgctgtccaccaagccggttctaaacaaactgaccgtgtacacaactctcatcgatgtgactaaagggcagttcgaaacatacctgcgagactgtccagatccgtgtatcggttgg

SEQ ID NO: 252836 - DNA, 1185 bp, Artificial Sequence
  derived and/or modified sequence
atgccagggaggagctgcgttgccctcgtcctcctcgccgcggcagtgtcttgtgccgtagctcagcatgcacctccttggacagaagactgccgaaaaagtacatatcccccaagcggaccgacgtatcgcggggccgttccgtggtacaccataaaccttgatttacccccttacaagagatggcacgaactcatgcttgacaaggctccggtcctcaaggttattgtcaacagccttaagaatatgattaacacatttgtgccatcgggcaagatcatgcaggtagtcgatgaaaagctcccaggactgctgggtaacttccccggcccgtttgaggaagaaatgaaagggatcgccgccgtaacggacatccccctgggcgagatcataagctttaacatcttttacgaactgttcaccatctgcacttcaattgtcgccgaggacaagaaaggtcacctcatccacggacgcaatatggactttggggtgttcctgggctggaatataaataacgacacttgggtcatcacagagcagcttaagccactgaccgtgaatctggattttcagcgcaacaataaaacggtgttcaaggcgagcagctttgccggttatgttggcatgttgaccggatttaagcctggtctttttagcttgacccttaatgagcgattcagcattaacggaggctatttgggcatactcgagtggatactagggaagaaagacgtgatgtggattggatttcttacacgaaccgtcctagagaattctacaagctacgaggaggcgaaaaacctcctcacaaagacaaagatcttggctcctgcttatttcatcctggggggtaaccagtctggagagggctgcgtcattacccgtgatagaaaggaatccctggacgtctacgagctggatgccaaacagggaagatggtacgtcgtacaaacgaattacgacaggtggaagcaccccttctttctcgatgacaggcgcacccccgccaagatgtgtcttaatagaacctcacaagaaaatatttcttttgaaaccatgtatgatgtgttaagcaccaagcctgtgctcaataagctcacagtgtacacaaccttaatcgacgtgacgaaagggcagtttgaaacttatctgagagactgcccggacccatgtattggctgg

SEQ ID NO: 252837 - DNA, 1185 bp, Artificial Sequence
  derived and/or modified sequence
atgccgggtcgttcatgcgtggcccttgtgctgctggcagctgctgtgtcctgtgccgtggcccagcacgccccaccctggactgaagattgtaggaagtcaacctatccaccttctggtccgacttataggggtgccgtgccctggtatacaatcaatctggatctgccgccatacaaacgctggcacgagctgatgctggacaaggcccccgtattgaaggtaatagtgaactctctgaagaacatgatcaacaccttcgtcccgagtggaaagataatgcaagtcgttgatgaaaaactgccagggctgctgggaaactttccggggcctttcgaagaggagatgaaaggcattgccgccgttaccgatattcctctgggcgagattatctctttcaatatcttctatgaattgtttactatctgcactagcatcgttgccgaggataagaagggccacctcatccatgggcggaatatggatttcggagtgttccttggctggaacatcaacaacgatacttgggtgatcactgagcagctgaaaccactcacggtgaacctcgactttcaacgtaacaacaagaccgtgtttaaggcctccagttttgccgggtacgttggcatgctcacaggatttaaaccgggacttttttcattgactctcaatgaacgctttagtatcaacggtgggtacctgggcatcctggagtggatactaggcaagaaggatgtgatgtggatcggattcctaactagaactgtcctggaaaattcaaccagctacgaagaagcgaagaacttactgactaaaacaaaaatattagcaccggcttacttcatcctcggtggaaatcaatcaggcgaaggatgcgtcatcacaagggaccggaaagaaagccttgatgtgtacgaactggatgctaagcaaggaagatggtatgtggtgcaaacaaattatgatcgctggaagcacccattttttcttgatgacagaagaacccccgccaaaatgtgtctcaataggacaagccaggagaacatctcttttgaaaccatgtatgatgtcttgagtactaagcctgtgctgaataaactgaccgtgtatacgactctgatcgacgtaaccaaagggcaatttgagacatatttacgggactgcccggatccctgcattggttgg

SEQ ID NO: 252838 - DNA, 1185 bp, Artificial Sequence
  derived and/or modified sequence
atgcctggacgctcctgtgttgctctggtgctcttagccgcagctgtctcatgtgctgtggctcagcatgctccaccttggactgaggattgtcgaaaatcaacctaccctcctagtgggcctacatatagaggtgctgttccctggtacactattaatcttgatttgcccccttataaaaggtggcatgaactgatgcttgataaggctcccgtgttaaaggttatcgtcaattctttaaagaatatgataaacactttcgttccttctgggaaaattatgcaagttgttgatgaaaagcttcccggattgttaggtaacttccctggccccttcgaggaggagatgaaagggatcgcagctgttactgatattccgctgggcgagatcatttcttttaacattttttacgagctattcacaatttgcacaagtatcgttgctgaagataaaaagggacatcttatccacggccgaaatatggactttggtgtttttctcggttggaacattaataacgatacttgggttatcacggagcagctcaagcctttgactgttaatctcgactttcaaagaaataacaaaacagtgtttaaagcctcttcattcgctggttatgttggaatgcttactggttttaaacccggcctctttagtctcacacttaacgagaggttcagtataaatggtggatatctgggaatccttgaatggatcctgggaaagaaggatgttatgtggataggtttcttgactagaactgttcttgagaattcaacaagctatgaggaggccaaaaacttattgactaagaccaagattcttgcacccgcatactttattctgggtggaaatcagtccggagagggttgcgttattactagagaccgaaaggaatccctggatgtttacgaacttgatgcgaagcaagggcgttggtatgtcgttcagacaaactacgataggtggaagcacccattctttctagatgaccgtcgaacccccgcaaagatgtgtttaaaccggacaagtcaggagaatatctcatttgagacaatgtacgatgtcctctccaccaaaccagtattgaacaaattgaccgtttatacaactcttatcgatgtcactaagggacaatttgagacgtatctgcgtgattgccccgacccctgtattggctgg

SEQ ID NO: 252839 - DNA, 1185 bp, Artificial Sequence
  derived and/or modified sequence
atgcctgggcgctcgtgtgtggctctggtgctcctggccgctgcagtctcgtgcgcagtggcacagcatgcccccccttggaccgaggactgtcgcaaaagcacttatcccccttcgggtccaacataccgcggcgccgtaccttggtacacaattaaccttgatttgcctccatacaaacgctggcacgagctgatgttggataaagccccagtactcaaggtgatcgtgaacagccttaaaaacatgatcaatacatttgtaccatcggggaaaattatgcaggtggtggatgaaaaactccctgggctgctaggtaactttcctggaccctttgaagaggagatgaaaggtattgccgccgtgactgatatccccctgggcgaaatcatttccttcaacatcttctatgaactgtttaccatttgtacgtccattgtcgccgaggataagaagggccacctgattcacggaaggaacatggatttcggagtgtttcttggttggaatatcaataacgatacatgggtaatcactgagcagttgaagccgctcaccgtgaatctggactttcagcggaataacaagactgtgtttaaagcttcctccttcgccggctatgtgggcatgctaacaggcttcaaacctggacttttcagcctgacgttgaatgagcggttcagtataaacggcggatatctcggcatattggaatggatcctcggaaagaaggatgtgatgtggattggtttcctgactcggacggtcctagaaaattcaaccagctacgaggaagcgaagaacctcttaacaaaaaccaagatactcgctcctgcctacttcatccttggcggtaaccaaagcggcgagggatgcgtcattactcgggatcgaaaggaaagtctcgacgtctatgagctggatgcaaagcagggccgctggtacgtggttcagaccaattatgacagatggaagcatccatttttcctcgacgaccgccgcacccctgccaagatgtgccttaatcgcactagccaggagaatatctcgtttgagacaatgtacgacgtgctctccactaaaccggttctgaataaactcacggtttacactacactgatcgatgtgacgaagggacagtttgagacatacctcagggattgcccagacccatgtattggctgg

SEQ ID NO: 252840 - DNA, 1185 bp, Artificial Sequence
  derived and/or modified sequence
atgcctggcagaagctgtgttgcactggtgctgctggctgccgccgtctcctgcgcggtcgcccagcacgcgcccccatggacagaggactgccgaaagtctacttaccccccatcagggcccacatacagaggcgctgtaccgtggtacactattaacctagatttaccaccctataaacggtggcatgagctgatgcttgataaggcacccgtgctgaaagtgatcgtgaactcactgaaaaacatgattaacacgtttgttcccagcgggaagataatgcaggtggtggacgaaaagctgcccggattgttggggaattttcccggcccttttgaagaagaaatgaaaggtatcgccgcagttacagacataccccttggtgaaattatctcctttaatatcttctacgaattgtttacaatttgtacatcgatcgttgccgaggataaaaaggggcatcttattcacggtcgtaatatggatttcggggtttttctcgggtggaacattaataatgatacctgggtgatcacagagcagctgaagcctcttacggtgaatctagacttccaaaggaataacaagaccgtgttcaaggcctcatccttcgcggggtacgtgggtatgcttaccggattcaaacccggattatttagcttaacattgaacgaacggtttagtatcaacggggggtacctggggattctggagtggatcctgggcaagaaggacgtgatgtggattggctttctcactcgtaccgtactggagaattccaccagctacgaagaggccaagaatctgctcactaagactaagattctggcccccgcttatttcatattaggtggtaaccagtcaggcgaaggatgcgtgataacccgtgatcggaaggaaagtctggacgtttacgagcttgacgccaaacaaggtaggtggtatgtcgtccagacgaactacgacagatggaaacatccttttttcctcgatgataggcggacacccgccaagatgtgtctcaatagaacgagccaagaaaacatctcgtttgaaacgatgtatgacgtgttgtctactaagcctgtattaaacaaactgacagtgtacactactctgatcgatgtgacgaaggggcagttcgaaacctacctacgcgattgtcctgatccttgcattggctgg

SEQ ID NO: 252841 - DNA, 1185 bp, Artificial Sequence
  derived and/or modified sequence
atgcctggcagaagttgcgttgccctggtgctcctggcagcagccgtcagctgcgcagttgctcaacacgccccaccatggaccgaggattgcaggaagagtacatacccgccttctgggcccacataccgaggtgctgtgccttggtacactatcaatttggacttgcctccgtataaacggtggcacgaactgatgttggacaaggcccccgttcttaaggtgatcgtgaactcactgaagaacatgatcaacacctttgtgccttccgggaagattatgcaggtcgtggacgagaagctgcccgggctcctgggcaattttccaggcccctttgaggaggagatgaagggcatcgccgcagtgacagacattccgctcggtgagattatctcgtttaacattttttacgaactcttcacaatatgtacatccatcgtggccgaagacaaaaagggtcacctaatccatggtaggaacatggatttcggcgtgtttctggggtggaacataaacaacgacacctgggtaatcacagagcagctgaagccactgacagttaatctagattttcaacgaaacaacaaaacggtcttcaaggcgagtagctttgcaggatatgtggggatgctgacaggatttaaacctggcctctttagccttacacttaacgagaggttcagcataaatggcgggtacctggggattctggagtggattttaggcaagaaagacgtaatgtggattggcttccttacccggaccgtgttagaaaactctacctcatacgaggaagccaaaaatctcctaacaaagaccaagatcctggcccccgcgtactttatcttgggcggaaatcagtccggagagggctgcgtgattacaagagacaggaaggagagcctggacgtctatgaattggacgcgaagcaggggcggtggtatgtggtacagaccaattatgaccggtggaagcatccgttcttccttgacgacagacgtaccccagctaagatgtgtttgaaccgaacgagccaagagaatatctccttcgagacaatgtacgatgtgctgtctactaaacctgttctgaacaaactcacggtgtataccactttaatcgacgtcaccaagggccagtttgagacctatctaagagattgtcctgatccatgcataggttgg

SEQ ID NO: 252842 - DNA, 1185 bp, Artificial Sequence
  derived and/or modified sequence
atgcctggaagatcatgtgttgcattagttttacttgcagctgctgtatcatgtgcagtagctcaacatgcaccaccatggacagaagattgtagaaaatcaacgtatcctccaagtggtccaacatatagaggtgctgttccatggtataccattaatcttgatttgccaccatacaagcgatggcatgaattaatgttagataaggctccagttttaaaagttattgtcaactctcttaaaaatatgattaatacgttcgtgccaagtggtaaaataatgcaagttgttgatgaaaaattaccaggacttcttggaaattttccaggaccatttgaagaagaaatgaaaggtattgcagcagtaacagatattccattaggagaaattatttcttttaatattttctatgaactttttacaatctgtacttcaattgttgctgaagataaaaaaggacatctaattcatggaagaaatatggactttggagtttttttaggatggaatattaacaatgatacttgggttattacagaacaattaaaacctcttacggttaacttagattttcaacgaaataataaaacggtttttaaagcatcatcatttgcaggttatgtaggtatgcttacaggatttaaaccaggacttttctcacttacattaaatgaacgattttctattaatggaggatatctaggaatattagaatggattctcggaaagaaagatgtaatgtggattggatttcttacaagaacagtattagaaaattctactagttacgaagaagctaaaaacttattaacaaaaactaaaattctagctccagcttattttattttaggtggaaatcaaagtggggaaggatgtgttattaccagagatagaaaagaaagtttagatgtttatgaattagatgctaaacaaggtagatggtatgtagtacaaacaaattatgatcgatggaaacacccatttttcttggacgaccgaagaactcctgcaaaaatgtgtcttaatcgtacatctcaagagaatatttctttcgaaactatgtatgatgttctttcaactaaaccagttttgaataaattgacagtctatacaacacttattgacgttacaaaaggacagtttgaaacatatcttagagattgtccagatccatgtattggatgg

SEQ ID NO: 252843 - DNA, 1185 bp, Artificial Sequence
  derived and/or modified sequence
atgcccggtcggagctgtgtggccctggttttgttggctgctgccgttagctgtgcagtggcacagcatgctcccccatggacagaagattgccgaaagtccacttatcctccatccgggcctacctatcgaggtgcagttccctggtatacaatcaacctcgaccttcccccctacaagagatggcacgaattgatgctggataaagcacctgtcctgaaagtgatcgtcaatagcctgaagaatatgataaatacatttgttcctagtggcaagatcatgcaggttgtggatgaaaaactccccgggctgttgggcaatttcccaggcccatttgaggaagaaatgaagggcatcgccgccgttaccgatatcccgctgggggaaataatctccttcaacatcttctacgagctatttactatatgtacctccattgtggctgaggacaagaaagggcatttgattcatggtcgcaacatggatttcggggtgtttctgggatggaacatcaacaatgatacctgggtgattacggagcagctgaaacccctcacagtgaacctcgactttcagagaaacaacaaaacagtgtttaaggcgagctccttcgcgggctacgtgggcatgctgactggtttcaagcctggcctgttttccctcacgctcaatgagcggttcagtataaacgggggatacctgggcatactggagtggattctgggcaaaaaggatgtcatgtggatcggtttcttgactcgaaccgttctggagaactctacgtcctacgaagaagctaaaaacctcctaaccaagactaaaatactggctccagcctattttatcctgggcggaaatcagtctggcgagggctgcgtgatcacaagggaccgcaaagaatctcttgatgtgtatgagctggacgctaagcagggccggtggtacgtcgtgcagaccaattacgaccgttggaagcacccattcttcctggatgaccggaggacccccgcaaagatgtgcctgaaccgtacctctcaggagaacatttcctttgagaccatgtacgacgtactgagtactaaaccagtgctgaacaagttgacagtctacacaaccttgatcgatgtgaccaaggggcagttcgagacatacctgagggattgccccgatccatgtatagggtgg

SEQ ID NO: 252844 - DNA, 1185 bp, Artificial Sequence
  derived and/or modified sequence
atgcccggacgcagttgcgtggccctggtgctcctagctgccgcggtctcgtgtgctgtggcgcagcacgctcctccttggactgaggattgccgcaaatctacctaccccccctcgggtccgacttaccgcggagccgttccatggtatacaatcaatcttgatttacccccgtacaaaagatggcacgaactcatgcttgataaagcacctgtgctcaaagttatcgtgaactcccttaaaaacatgatcaatacttttgtccccagtggcaagatcatgcaggtagtcgatgagaaactgcccggtttgctcgggaatttccctgggccctttgaggaagagatgaaaggcatcgccgccgtgaccgatatccccctgggggagatcatatctttcaacatcttttacgaattgttcactatctgcaccagcatcgttgctgaggacaaaaagggtcatctgatccacggtcgtaacatggactttggcgtgttcttaggctggaatatcaacaacgatacatgggtcatcaccgaacagctcaagcccctgacagtgaaccttgacttccagcgcaataataaaacggtgttcaaagcttcttccttcgcaggatatgtgggtatgctcacaggattcaagcccggcctgtttagtctcactttgaacgagaggttcagcatcaacggcggatatctgggtatcctggagtggattctcgggaaaaaggatgtaatgtggatcggattcctgacccggacagttctggagaactcaacctcttatgaggaggccaagaacctgttgaccaagacaaagatcctggctcctgcttactttattctgggaggcaaccagtcaggggagggatgtgtgatcaccagagatcgaaaagagtccctcgacgtgtacgaacttgatgccaaacagggcaggtggtatgtcgttcagaccaactatgaccggtggaaacacccatttttcctggacgaccggagaacaccagcgaagatgtgcctgaaccggacatctcaggagaatatatcttttgagaccatgtacgatgtactgtcaacgaagcctgtcctcaacaaacttactgtatacactaccctcatagatgtgacaaaagggcagtttgaaacctatctaagggattgcccagatccctgcatcggatgg

SEQ ID NO: 252845 - DNA, 1185 bp, Artificial Sequence
  derived and/or modified sequence
atgccggggcgatcgtgtgtcgctcttgtcctgcttgcagcggcggtttcgtgcgcggtggcccaacacgcgccaccgtggactgaagattgcagaaagagcacctaccccccgtccggaccaacctaccgtggtgccgtgccgtggtacaccatcaacctggacctgcccccctataagcgctggcatgagttgatgttagacaaggccccggttttgaaggtcatcgttaacagcctgaagaatatgattaacaccttcgtcccttcgggcaagatcatgcaggtcgtagacgagaagctgcctggtcttctgggcaacttccccggaccgttcgaggaggagatgaaaggcatcgccgcagtcactgatatcccgctcggtgagatcatttccttcaatatcttctacgagctcttcaccatctgcacctcgatcgtcgccgaggacaagaagggtcacctcattcacggtcggaatatggattttggcgtcttcctcggatggaacatcaataacgatacttgggtgatcacggaacagctcaagcctctgacagtgaacctcgatttccaacggaacaataagactgttttcaaagccagcagttttgctgggtacgtaggaatgcttacgggcttcaagcctggtttgttttccctgaccctgaacgaacggtttagcatcaacggaggctacctgggcatcctggagtggatcctcggaaagaaggatgtgatgtggatcggctttttgacgcgcaccgtgctcgagaacagtacgtcgtatgaagaggccaagaacctgctaactaagaccaagattctcgccccagcttactttattctcggaggcaaccaaagcggcgagggctgcgttattactcgcgatcgcaaggagagtcttgacgtttatgagctcgacgccaagcagggcagatggtacgtggtccaaactaactacgacaggtggaagcatccgttcttcctcgacgatcgccgcaccccagccaagatgtgcttgaaccgtacctcacaggagaacatctctttcgagaccatgtacgatgtgctgtccaccaaaccggtgctgaacaagctaacagtctacacgaccctcatcgacgtcaccaagggccaattcgaaacatatcttagagactgccccgatccctgcatcggctgg

SEQ ID NO: 252846 - DNA, 1185 bp, Artificial Sequence
  derived and/or modified sequence
atgccaggacgaagctgtgttgccctggtcttgctagcggccgcagtgtcatgtgcagtggcccagcatgctcctccttggacagaagattgccgaaagtcaacttatcctccctcaggacccacataccggggggctgtgccttggtacaccattaacctcgatttgccaccgtataaaaggtggcacgagcttatgctggataaagcccccgtccttaaagttatcgttaacagcctgaagaatatgataaacacatttgtgccttcaggcaagatcatgcaggtggtggacgagaaattgccaggactgctcgggaactttcccggccccttcgaggaagaaatgaaaggaattgcagctgtgacggacatccctctcggggagatcatcagcttcaacatattttacgagttgtttacaatctgcacatcaatcgtggccgaagataagaaggggcacctcatccacggccggaacatggacttcggggtgttcctgggttggaatatcaacaatgacacctgggtgatcaccgagcagctgaaacctctgactgtgaacctagatttccagagaaacaataaaacagtcttcaaggcctcctcatttgcaggctatgtcgggatgctaacaggattcaagcctggtttgttttctttgacacttaatgaacgcttttcaatcaacggaggctacttgggaatccttgagtggatacttgggaaaaaggacgtgatgtggattggattcttgacccggacggtactggaaaacagcaccagctacgaagaggccaagaacttgctcaccaagactaaaatattggcccccgcctatttcattctggggggtaaccagtcgggagaaggatgtgtgattacccgagatagaaaggagtccctggatgtctacgaactggatgctaaacagggtcggtggtatgttgtgcaaacaaactatgaccggtggaagcaccccttttttctggatgacaggcggacgcctgccaagatgtgtttaaatcggacctcccaagagaacatctcttttgagacaatgtatgacgtgctgtctacaaaacctgtgttgaacaagttgacggtatataccactttgatcgacgtcactaagggccagttcgaaacttacctgcgggactgccccgacccatgtatcggctgg

SEQ ID NO: 252847 - DNA, 1185 bp, Artificial Sequence
  derived and/or modified sequence
atgccgggaagaagctgcgttgcactggtgttgctggctgctgccgtctcgtgcgctgtcgctcagcatgcccctccttggaccgaagactgtaggaagtctacgtatcctccttccggtcccacataccgaggcgccgtgccatggtacaccatcaacttggacttgccaccctacaaacgctggcacgaattaatgctggataaggctccagtactgaaggttattgtaaactctttgaagaatatgataaatacctttgttcccagcgggaaaataatgcaggtggtggatgagaaattgccaggactgctcgggaactttcctggtccctttgaagaagaaatgaagggaattgccgccgtgactgatatcccactgggggaaattattagcttcaacatcttctacgagctattcactatctgtacatctattgttgcagaggacaagaaaggacatcttatccacgggcggaacatggattttggcgtattcctggggtggaacattaataatgatacctgggtcattacagaacagctgaaacccctgacagtcaatcttgacttccagaggaacaataagaccgttttcaaggcatctagcttcgcaggctatgtcggcatgctgacagggtttaagccagggctgttcagccttacacttaacgagaggttctccatcaacggaggctacctgggcattctagaatggatcctcggcaaaaaggacgtgatgtggatcggttttttgacacggacagtgttggagaatagcacttcctacgaagaagccaagaacctgttgacaaagacgaaaatactggcacctgcctatttcatcctgggggggaatcagtcaggcgaaggttgcgtgattacaagagatcggaaggaaagtttggatgtatacgaactagatgccaagcaggggagatggtacgtcgtgcagacaaattacgaccgttggaagcatccattcttcttggacgatagacggacacccgctaaaatgtgcctcaatcgcacaagccaggagaatataagctttgagacaatgtacgacgttctgtcaaccaaacccgtcctgaacaagctgacagtgtataccaccttaattgatgtgactaaaggccaatttgagacttacctccgggactgtccagatccctgcatcggatgg

SEQ ID NO: 252848 - DNA, 1185 bp, Artificial Sequence
  derived and/or modified sequence
atgcccggtcggtcttgtgtggccctcgtacttctggctgctgccgtaagctgtgcggtcgcacagcacgctcctccctggacggaagactgtcggaagtccacctaccccccctccgggcccacatatcgaggcgcggtgccctggtacaccatcaacctggatctgccaccgtataagcggtggcacgaacttatgttggataaggcccccgtcctgaaagtaatcgttaattccctcaagaatatgatcaatacattcgttccgagcggcaaaatcatgcaggtggttgacgagaagctgccgggcctcctgggaaacttccctggcccattcgaggaagaaatgaaaggcatagcagccgtaacagacataccccttggcgaaattatctcttttaacatattttatgaactgttcactatctgtaccagcattgtagccgaggacaagaaagggcacctcatacatgggaggaatatggacttcggagttttccttgggtggaatatcaataatgacacgtgggtgataactgagcagttgaagccgctcacagtgaacttggactttcagagaaacaataagactgtgtttaaggcttctagcttcgctgggtacgtgggcatgctcaccggcttcaaacccggcctgttcagtctgacactgaacgagaggttcagtattaatggagggtatctgggtatcctggagtggatccttggtaagaaggacgttatgtggattggatttctgacccggactgttctcgagaattccacgagctatgaggaggcgaagaatctgcttaccaagaccaaaatactggcaccggcatacttcattctcggcggaaatcaatctggtgaggggtgcgtgattactcgcgaccggaaggagtcccttgacgtgtatgaactggacgcaaagcaagggcggtggtatgttgtgcagacaaactacgatagatggaagcatccctttttcctggatgatcgacgcacacctgctaagatgtgtttgaatcggacctctcaggaaaacataagcttcgagaccatgtatgacgtcctgtctacaaagcctgttcttaacaagcttactgtctacacaactctgatcgatgttactaaggggcagtttgaaacctatctgagggactgcccggacccatgcataggctgg

SEQ ID NO: 252849 - DNA, 1185 bp, Artificial Sequence
  derived and/or modified sequence
atgccaggccgcagctgtgttgctctggtgctgctagctgcggccgtttcttgtgctgtggcacaacacgcaccgccatggaccgaggattgccgcaagagcacctatccgccaagcggccctacgtaccgcggcgcagttccgtggtatacaattaacttggatctgcctccatacaaacgttggcatgagctcatgctcgacaaggcacctgttctgaaagtgatcgtgaacagcttaaagaacatgatcaacacctttgtcccttccggtaaaatcatgcaagtcgtggatgaaaagctgccggggctgctgggaaacttcccagggccatttgaagaggagatgaaaggcattgcagctgtgacggacattccgctgggggagatcattagcttcaatatcttctacgagctgtttaccatttgcaccagtattgtagcagaagataaaaagggacacctgatccacggtcgtaatatggattttggtgtgttcctgggttggaacattaacaacgacacttgggtaatcacggagcagctgaaacctttgactgttaatctagattttcagaggaacaataagacggtgtttaaagcctcttcttttgcgggctatgtcggaatgctaaccggctttaaaccaggcctgttttctctgacgctgaatgagaggttcagcatcaatggtggctatctgggcatcctggaatggatcctggggaaaaaggatgttatgtggattggcttccttacccgaaccgtgctggaaaattccacttcttatgaagaagcaaagaacctgctgactaaaactaaaattctggccccagcctattttatcctgggtggtaaccagagcggtgagggctgcgtgatcacgcgtgaccgtaaagaaagtctggatgtttacgagctggatgcgaagcaaggtagatggtatgtggtgcagactaactacgaccgttggaaacacccattcttcctggacgaccgccggaccccagccaagatgtgtctgaatcgcaccagccaagagaacatctctttcgagaccatgtacgacgtcctgagcaccaagcctgtcctgaacaagctcactgtgtacaccaccctgattgacgtgactaaaggtcaatttgagacttacctgcgcgattgcccggatccttgcatcggctgg

SEQ ID NO: 252850 - DNA, 1185 bp, Artificial Sequence
  derived and/or modified sequence
atgccgggtagatcttgtgttgcactagttcttctggcggccgcagtatcgtgcgcagtagcgcaacatgctcctccatggactgaagattgcagaaagtcgacatatcccccgagtggacctacttacagaggagccgtcccttggtatacaataaacttagacctcccaccgtacaaacggtggcatgaattaatgctcgataaagctccagtcctaaaagtcatcgttaattcattgaaaaatatgattaatacttttgtaccatcgggaaagattatgcaagttgtggatgaaaagctccctggattacttggaaatttcccaggtccctttgaggaagagatgaagggcatagccgcagtaacagatattccactgggagagattattagtttcaatatcttctatgaactgtttacaatttgcactagtattgtagctgaagataaaaaaggacacctgatccatggacgtaacatggattttggagtgtttctaggatggaatattaataatgatacatgggttataacagagcaattgaagccactgacagttaatctggacttccagagaaacaataaaactgtttttaaagcatcttcgtttgctggatatgtgggaatgctcacaggttttaaacctggtttgttttcgctcactctcaatgagcgattttcgatcaatggtggatatttgggaatcttggagtggattctaggtaaaaaggatgttatgtggattggatttcttactcgtaccgtattagaaaactcaacaagttatgaagaggccaagaatctactcacgaaaactaagatacttgccccagcatatttcatcttgggaggaaatcaatcaggagagggatgtgttatcacaagagatcgtaaagaatccttggatgtctatgagcttgatgcgaaacagggacgttggtatgtggttcagactaattatgatcggtggaaacatccattttttctggatgatagacgaacccctgcaaagatgtgcttgaatagaacatctcaagaaaacatctcatttgaaactatgtatgatgtcttgtcgacgaaacctgttttaaataaactcacagtctacacaacgttgattgatgttacaaagggacagttcgaaacatatcttcgagattgcccagatccatgcattggttgg

SEQ ID NO: 252851 - DNA, 1185 bp, Artificial Sequence
  derived and/or modified sequence
atgccagggcgctcatgcgtggcgttggtgctgctcgctgcagcggtatcttgcgcagtcgcacagcatgctcccccttggaccgaggactgcaggaagtccacatatccaccgtccggccccacctaccgtggagccgtaccttggtacactataaatctggacctgcccccttacaagagatggcacgaactaatgttggataaggcccctgttttgaaagtgattgtcaacagcctcaaaaatatgattaatactttcgtgccaagcggtaaaattatgcaagtagtagatgaaaagctgcctggcctcctcggcaactttcctgggccgttcgaggaggagatgaagggcatcgctgctgtgactgatattccacttggggagattatctcgttcaatatattttacgaattgttcacgatctgcacgtccattgtagccgaagataaaaaaggacatctaatccacggacggaatatggacttcggagtgttccttggatggaatattaacaatgatacatgggttataactgagcagttgaagcccttgacagtgaacttggattttcagagaaataacaagacagtgtttaaagccagtagcttcgccgggtatgttggaatgctgaccgggttcaagccaggtctgttttcactgaccttgaatgaacgcttctcaatcaacggtggctaccttggaattttagagtggatcctggggaaaaaagatgtcatgtggataggatttttgacaagaactgttctggaaaactctacctcctacgaagaggcaaaaaatcttctcacgaaaaccaagatactcgcaccagcctattttatccttgggggtaaccagtctggggaaggatgtgtcattacccgtgatcgcaaagagtctctggatgtgtacgaactggatgcgaagcagggccggtggtacgtggttcaaactaattacgaccgctggaagcatccgttcttcctggatgacaggagaacccctgctaagatgtgtctgaatcggacctcccaagagaacatcagtttcgagactatgtatgacgttttgagtactaagccggtcctgaataaacttactgtttatacaactttgatagacgtcactaagggccaattcgagacctacctacgcgattgtcctgacccatgtattggctgg

SEQ ID NO: 252852 - DNA, 1185 bp, Artificial Sequence
  derived and/or modified sequence
atgcccggccggtcctgcgtcgccctagttctcctcgccgccgctgtgtcttgcgccgtggcgcagcacgctccaccttggacagaggactgcaggaagagcacttaccctccaagtggtcctacatatcggggggcggttccatggtacactatcaatctggatcttccaccatataagagatggcatgaactaatgctagacaaggcacccgtgttgaaagtcatagtaaattcattgaagaacatgataaacaccttcgtcccgtccggcaagatcatgcaagtggtcgacgagaagctgccaggacttcttggaaattttcctggcccattcgaagaagagatgaagggaatagcagccgtgactgatatccccctgggggagatcatctcttttaacattttctacgagctgtttactatctgtacgtccatcgtggcagaggataaaaaagggcatttgatccacggtcgaaatatggacttcggtgtattcctcggatggaatattaacaatgacacctgggtgattacagagcagttgaagcctctgaccgtcaatctcgattttcagcgtaacaataaaactgtattcaaggcttctagttttgcagggtacgttggcatgctcacgggtttcaaacccggcctgttcagcttgacccttaatgagcgtttctccatcaacggcgggtacttaggcatcctagagtggatcctgggtaagaaagacgttatgtggatagggtttctcacccgaactgtcttagaaaatagtacatcttacgaagaagcaaaaaatctgctaactaagaccaagatcctggcaccggcctatttcatcctggggggcaaccagtctggcgagggatgtgtcattaccagagaccggaaagaatcattggatgtctatgaacttgacgccaagcaagggaggtggtacgttgtccagacaaactacgaccggtggaagcaccctttcttcctggacgaccgaaggacaccggccaaaatgtgtctgaatcggacgtctcaagagaacatcagcttcgaaacaatgtatgatgtcctctccacaaagcctgtgctcaataagctgaccgtatacaccacactgatcgacgtgaccaaaggccagttcgagacctacctgcgtgattgtcctgatccctgtataggatgg

SEQ ID NO: 252853 - DNA, 1185 bp, Artificial Sequence
  derived and/or modified sequence
atgccgggccgcagttgcgtggccctcgttctgttagccgcggcagtatcctgcgcggtggcccagcatgctccaccctggactgaagattgtaggaagtcgacatatcctcccagcgggccaacttatcggggggctgtgccttggtatactatcaacctggatctcccgccctataaacgatggcatgagctgatgctggacaaagcaccagttttgaaagtcatcgtgaattccctgaagaatatgatcaatacgttcgtccccagcggcaagattatgcaagtggttgatgaaaaactgcccggcttgctgggcaattttcctgggccgtttgaggaggaaatgaaagggatagctgccgtgacagacatccctctcggagagatcatttcttttaacatcttttacgaattgttcactatctgtacgagcattgttgctgaggacaaaaagggccacctgattcatgggaggaatatggatttcggcgtattccttggttggaatataaataacgacacctgggtcattaccgaacagctgaaacccctaacagtgaatctggatttccagcgaaacaacaagactgtctttaaagcgtctagctttgcaggctatgtggggatgcttacgggcttcaaacccggattgttctcactgaccctcaacgaacggtttagtattaatggtggatacctcggcatactggaatggatattaggtaaaaaagacgtgatgtggattggatttctcacacgtacagtccttgagaacagtacctcctatgaagaagcaaagaacctcctgacgaagacgaaaatcttggcgcctgcatattttatcctggggggcaatcagagcggtgagggatgtgtgatcaccagggatagaaaagagagcctggatgtgtacgagcttgacgcgaagcagggcagatggtacgttgtgcagacaaactacgaccggtggaagcaccccttctttttagatgacaggaggaccccggctaagatgtgtctgaatcgcaccagccaggaaaatattagtttcgagacaatgtacgatgtcctgagcaccaaacccgtcctaaataagttgaccgtttatactacgcttattgacgtaactaaaggtcagttcgagacttatctgcgagactgtccagacccatgcattggctgg

SEQ ID NO: 252854 - DNA, 1185 bp, Artificial Sequence
  derived and/or modified sequence
atgccgggtagaagctgcgtggctctggtgctgctcgcagccgctgtgtcctgtgcggttgctcagcatgcgccgccttggactgaggactgtcgaaagtcgacttatcccccctccggtcccacctatcgtggggctgtgccctggtacaccatcaatctcgacctccctccgtacaagcgctggcacgagctcatgctggataaagcacctgtactgaaggtcattgtgaatagcctgaaaaacatgatcaatacattcgtaccgagtggaaagataatgcaggtggtcgatgagaagctgccaggtctcctggggaatttcccaggccccttcgaggaggagatgaaagggatcgcggccgtgacggacataccactcggcgaaatcatcagcttcaatattttctatgaattattcaccatctgtacctctattgtcgctgaggacaagaagggccacctgatccacggtcgcaatatggacttcggcgtctttctcggctggaacattaataatgacacgtgggtgatcaccgagcaacttaagccgctgaccgtcaacctggacttccagcgcaataacaaaacggtatttaaggcttcgtccttcgctggctacgtaggcatgttgaccgggttcaagccaggattattttcactgacactaaacgagcggttctccatcaatggtggctacttgggtattctggagtggattctgggaaaaaaagacgtcatgtggattgggtttctcaccaggacggtgctggaaaactcgactagctacgaggaggcaaagaatctcttgaccaagaccaagatcctggcccctgcttacttcatcctgggaggcaatcagagcggcgagggttgcgtcatcacacgcgatcgtaaggagagcctggatgtgtatgaactggacgcgaaacaaggccggtggtacgtggttcagacaaactacgatcgttggaagcatcccttctttctcgatgatcgccgaactccggccaagatgtgcctgaatcgaacctcgcaggagaacatctcatttgaaacgatgtatgacgtcctctcaacgaaacccgtgctgaacaagttgaccgtgtacacaacgcttattgatgtcacaaagggccagttcgagacataccttagggattgtccagatccctgcatcggatgg

SEQ ID NO: 252855 - DNA, 1185 bp, Artificial Sequence
  derived and/or modified sequence
atgcccggccggtcctgtgtcgccctggtgctcctggctgccgccgtctcttgcgccgtggcacagcacgcaccgccatggactgaggactgtcgaaaaagtacctacccgccatccggtccaacatatcgaggagccgttccctggtatacaatcaacttagacctacctccttataagaggtggcatgagctaatgctcgataaggcaccagtgttgaaggtgatcgtgaatagcttgaaaaacatgattaacactttcgtaccctccggaaagatcatgcaggtcgtcgatgagaaactccctggattactgggaaattttcctggtccattcgaggaagagatgaagggcatcgccgccgtcactgatattcccttgggtgagatcatcagtttcaatattttttacgaactcttcactatctgcacaagcatcgtggccgaggacaaaaaagggcacttgattcacggtagaaacatggactttggagtgttcctgggatggaatattaataacgatacgtgggtaattaccgaacagctgaagcccctaaccgtaaatctggacttccagcgcaataacaaaacggtcttcaaggctagctcgttcgccggatatgtcggaatgctgacggggtttaagccaggcttgttttctttaaccctaaatgaaaggttcagtatcaacgggggttacctcggcattctggagtggatcctaggcaagaaagacgtgatgtggataggattcctcaccagaaccgtcctggaaaattcaaccagttatgaggaggccaaaaatctcctcaccaaaactaagatactggctcccgcttatttcattctgggaggcaaccagagtggggaaggatgtgtgatcactagggaccgcaaggaatcactagacgtgtatgaacttgatgctaaacagggtagatggtacgttgttcagaccaattatgatcgctggaaacatcctttctttctggacgataggcgaacgcccgcaaaaatgtgtctgaatcgcacatctcaagagaacatatcttttgagaccatgtacgatgtcctgagtaccaaaccggttcttaataagctcacagtgtacacaacattaattgacgtcacaaaagggcagtttgaaacttatctacgggattgcccagacccctgtatcggctgg

SEQ ID NO: 252856 - DNA, 1185 bp, Artificial Sequence
  derived and/or modified sequence
atgcccggcagatcctgcgtcgccttggtcctgttggcagccgccgtgagttgtgcagtggctcagcacgcccctccctggacagaggactgccggaagtcaacttatcctccttctggacccacctaccggggggctgtgccatggtatactatcaatctggatctgcccccatataagagatggcacgaacttatgttggacaaggcacccgttttgaaggttatagtcaactctctgaagaacatgatcaatacatttgttccgtcagggaagatcatgcaagttgtggacgagaaactccccggactgctcggaaactttccagggcctttcgaggaagaaatgaagggcatagcagcggtgaccgatattcctcttggagaaattatcagtttcaatattttttatgaattattcaccatctgtactagcatcgtggctgaagataagaagggacatttgatacacggccgtaacatggattttggcgtgtttctgggctggaatattaacaacgacacatgggtgatcactgaacagctaaaacctctaaccgtaaacctggacttccagcgtaataacaaaacagtctttaaagcttcatcttttgcaggctatgtgggtatgctgacgggattcaagccagggctattctctctgaccctgaatgaaagatttagcattaatgggggctacctggggatactggagtggattctggggaagaaggacgtgatgtggatcggctttttgactcgcactgtgctggagaattccacatcatacgaagaagccaaaaatctattgactaaaacgaaaatcctggcccccgcctactttatactgggaggcaatcagagcggggagggctgcgtaataacaagggatagaaaggaatcactggacgtgtacgagttggatgctaagcagggtcgctggtacgtggttcagacgaattacgaccgctggaagcacccattttttctggatgataggcggacccccgctaagatgtgccttaacagaacctcacaggaaaacatctcttttgagaccatgtacgatgtactgagcaccaagccagtgctgaataagttgacggtgtataccacactgatagatgtaacgaagggtcagtttgagacatacctgcgtgactgtccggatccctgcattggctgg

SEQ ID NO: 252857 - DNA, 1185 bp, Artificial Sequence
  derived and/or modified sequence
atgcctggacgcagctgcgttgcacttgtgctgctcgctgccgcagtgagttgcgcggtggctcagcacgcgccaccgtggactgaagattgtcggaaaagtacctatcccccaagcgggccaacttataggggcgccgtgccctggtatacgattaatctggacctccccccatataagcgatggcatgagcttatgctggacaaggcccccgttctgaaggtgatcgtcaacagcctcaaaaatatgatcaacactttcgtacctagcggaaagattatgcaagtagtcgatgaaaagctacctggcctgctgggtaactttcctgggccttttgaagaggagatgaagggaatcgcagcagttactgacatccctctgggggaaatcatttccttcaacatcttttatgagctctttacaatctgcacgtcaatagtggctgaggataaaaagggccaccttattcacggtcgaaacatggatttcggagtctttttaggctggaacattaacaatgacacctgggtgattactgagcagctaaagcccttgactgtgaacttggattttcagcgaaacaacaagaccgttttcaaagcaagttcattcgctggctatgtaggcatgctaacaggctttaagcctggcctatttagtctaactttgaacgagcgcttttccatcaatgggggctatctgggcattttggagtggattctgggtaaaaaagatgtgatgtggataggctttttaactaggacggtgctggagaatagcaccagttacgaagaagcaaaaaacctcctaacaaagactaagattttggctccagcctacttcatactcggcggtaaccagtccggtgaaggatgcgtgataacacgggacaggaaggaatcactggatgtgtatgagctcgacgccaaacagggacgctggtatgtggttcagactaattatgatagatggaaacatcccttctttcttgacgatcggagaacccccgcgaagatgtgtcttaacaggaccagtcaagagaatatctctttcgaaacaatgtacgatgtgttgagcaccaaaccagtccttaacaagttaacagtttacacgacgctgatagacgtcacgaagggacagtttgaaacatacttgagggattgccctgacccttgtatcgggtgg

SEQ ID NO: 252858 - DNA, 1185 bp, Artificial Sequence
  derived and/or modified sequence
atgcctggaagaagttgtgtggccctggttttgctggccgctgcagtctcttgtgccgttgcccagcacgccccaccttggaccgaggactgcaggaagtctacatatcctccaagcggcccaacctacagaggtgctgttccttggtacactatcaacttggatctgcccccctacaagcgttggcacgagcttatgctggacaaggcaccagtgttgaaagtcatcgtcaatagcttgaagaacatgattaacacattcgtcccttctggaaaaattatgcaagttgtggatgaaaagctgccaggactgttgggcaatttccccggacctttcgaggaagagatgaagggtatcgcagccgtgacagacatcccccttggtgagatcatctccttcaacatcttctacgaactcttcacaatatgtacctctatcgtggctgaggacaagaagggtcacctgattcacggacgtaacatggacttcggtgtcttccttggctggaatattaacaacgatacttgggtaatcacagaacagctgaagcctctgactgtaaatcttgacttccagcgcaacaacaaaactgtattcaaagctagctcctttgctggttatgtgggcatgctgactggattcaaacccggcctgtttagtctgaccctgaacgaacgcttttccatcaacggaggttacctgggcatcctggagtggatcctgggtaagaaggacgtaatgtggatcggatttctgacccgtacagtgctggaaaattcaacaagctacgaagaggctaagaacttgctgaccaagacaaaaatcttggcacccgcctacttcattctgggcggaaaccagtctggtgaaggttgtgtgattactcgcgatcgtaaagaaagcctcgacgtatacgaactcgatgctaagcaaggccgctggtacgtggtgcagaccaattacgaccgctggaagcaccccttttttctggacgaccgtaggactccagctaagatgtgcttgaacagaaccagtcaggaaaacatcagttttgagacaatgtacgacgtcctgagtaccaagcctgtgctgaacaaacttactgtgtacaccactctgatagacgtgaccaagggtcaattcgaaacatacctgagagactgtcctgatccatgcattggatgg

SEQ ID NO: 252859 - DNA, 1185 bp, Artificial Sequence
  derived and/or modified sequence
atgccgggtcgttcgtgtgtagcgttagttctactagcggcggcggtttcgtgtgcggtagcgcaacatgcgccgccgtggacggaagattgtcgtaaatcgacgtatccgccgtcgggtccgacgtatcgaggtgcggtaccgtggtatacgataaatttagatctaccgccgtataaacgttggcatgaactaatgttagataaagcgccggtactaaaagttatagttaattcgctaaaaaatatgataaatacgtttgttccgtcgggtaaaataatgcaagtagtagatgaaaaattaccgggtttattaggtaattttccgggtccgtttgaagaagaaatgaaaggtatagcggcggtaacggatataccgttaggtgaaataatatcgtttaatatattttatgaattatttacgatatgtacgtcgatagtagcggaagataaaaaaggtcatctaatacatggtcgtaatatggattttggtgtttttttaggttggaatataaataatgatacgtgggtaataacggaacaattaaaaccgttaacggttaatttagattttcaacgtaataataaaacggtatttaaagcgtcgtcgtttgcgggttatgtaggtatgttaacgggttttaaaccgggtttattttcgctaacgttaaatgaacgtttttcgataaatggtggttatctaggtatattagaatggatattaggtaaaaaagatgtaatgtggataggttttttaacgcgtacggtactagaaaattcgacgtcgtatgaagaagcgaaaaatttattaacgaaaacgaaaatactagcgccggcgtattttatactaggtggtaatcaatcgggtgaaggttgtgtaataacgcgagatcgtaaagaatcgttagatgtatatgaactagatgcgaaacaaggtcgttggtatgtagtacaaacgaattatgatcgttggaaacatccgttttttttagatgatcgacgaacgccggcgaaaatgtgtttaaatcgtacgtcgcaagaaaatatatcgtttgaaacgatgtatgatgttctatcgacgaaaccggttctaaataaattaacggtatatacgacgttaatagatgtaacgaaaggtcaatttgaaacgtatctacgtgattgtccggatccgtgtataggttgg

SEQ ID NO: 252860 - DNA, 1185 bp, Artificial Sequence
  derived and/or modified sequence
atgccgggcaggtcttgcgtagcgttagttctgcttgcagcagcagtcagttgcgctgtagcgcagcatgcacccccgtggacggaagattgccggaaatctacataccctccttccggacctacataccgcggagctgttccgtggtatacaattaatttagatctgccgccttacaaacgttggcatgagctaatgcttgataaagctccagtacttaaagtcatcgtgaattcacttaaaaacatgatcaatacatttgtcccttctgggaaaataatgcaggttgtggatgaaaaactgccgggcttgctaggtaacttcccaggaccgtttgaagaggaaatgaaaggaatagcggctgttacagacattccattaggagaaattattagctttaatatattttacgagctgtttacaatctgtactagtatcgttgccgaagataagaaaggtcatctcattcacgggcgcaatatggactttggagtctttctggggtggaatattaataatgatacatgggttatcacggaacagcttaagcccttaaccgtaaacttagatttccagcgcaataataaaactgttttcaaagcgagctcatttgcaggttatgtaggaatgctgacaggctttaaaccgggacttttttctcttacgcttaacgaaagattttccattaatggaggttatcttggtattctggaatggatccttggcaaaaaagacgtcatgtggataggatttcttacccgtacggtgctcgaaaactcaacttcctatgaagaggccaaaaatcttttgacaaaaacaaaaatactagccccggcctattttattttgggtggaaatcaaagcggtgaagggtgcgtaatcacccgtgataggaaagaatctcttgatgtctatgaactggacgcgaaacaaggtcgatggtatgtagttcagaccaattatgatcgttggaaacatcctttttttttggatgatagacgtacgcctgcgaaaatgtgcctcaaccgcacgtctcaggaaaacatttcatttgaaacaatgtatgatgtactgagcacaaagccggtgcttaataaattgacggtctacaccacgttaattgacgttacgaagggacagtttgagacatatcttagagactgtcctgacccttgtattggatgg

SEQ ID NO: 252861 - DNA, 1185 bp, Artificial Sequence
  derived and/or modified sequence
atgcccggacgcagttgcgtggccctcgtattgctagctgcggccgtgtcttgtgctgtggcgcaacatgcaccaccttggacggaggactgccgcaagtctacatacccaccatccggcccaacctatcgaggagccgtgccatggtatacaatcaacctggacttgcccccgtacaaacgctggcatgaactgatgttagataaagccccggttctgaaggtcatcgtgaactctttgaagaatatgataaacactttcgtgcctagcggtaagattatgcaagttgtggatgaaaaactgccaggtctgctcgggaactttcctggccctttcgaggaggagatgaaggggatcgctgccgtaacagatattcccctgggtgaaatcatcagtttcaacatcttttacgaactgtttaccatctgtacatccatcgtagccgaagacaaaaagggccacctcatccacggacggaacatggattttggggtgttcctaggctggaacatcaataacgacacctgggttatcacagaacagctcaagccactgaccgttaatctggatttccagcgcaacaacaagacagtgtttaaggcatcatccttcgccggctatgtggggatgcttacgggctttaagcccggtctgttcagcttgacgttgaacgaaagattctctatcaacggtggttatcttggtattctggagtggattctgggaaagaaggatgtcatgtggattgggtttctgacacgcactgtgcttgagaacagtacatcttatgaggaggccaagaatctgcttactaaaacaaaaatattggcacctgcctatttcatcctaggagggaaccagagcggagagggctgtgtgattacccgggaccgtaaagaatctctcgacgtttacgagcttgacgctaagcagggtcgctggtacgtggttcaaacaaactatgaccgatggaaacacccgttcttcctggatgaccgacgcaccccagcgaaaatgtgcctgaatcgcacatcgcaggaaaatatatccttcgagaccatgtacgatgtcttgtctacgaaacctgtgcttaataaactgacggtttatacgacactgattgacgtcactaaaggccaatttgagacgtatctgagggactgtcccgatccatgcattgggtgg

SEQ ID NO: 252862 - DNA, 1185 bp, Artificial Sequence
  derived and/or modified sequence
atgcccggccgcagctgtgtagccctggtcctcctggctgcagccgtgtcctgcgcagttgctcagcacgcccccccatggacggaggactgtagaaagagcacatatccaccttcaggtccaacatatcgcggggccgtgccatggtatacaataaacctcgacctgcctccttacaaaagatggcatgaacttatgcttgacaaagctcctgtgctgaaagtgattgtgaacagcttgaagaacatgatcaacactttcgtcccttcaggcaaaattatgcaggtagtggacgaaaagttgccgggactgctggggaactttcccggcccattcgaagaggaaatgaagggaatcgccgccgttaccgatataccgttaggagaaatcatttcattcaacatattctatgagctttttacgatctgcacttctatcgtagcggaagacaagaagggacatctgattcacggtcgtaatatggacttcggcgtttttctggggtggaacataaataatgacacttgggtaatcaccgagcagttaaagccactgacagtgaatctggactttcagagaaacaataagaccgtctttaaagcatcttcgttcgccgggtatgtgggtatgctgactggattcaaacctggcctgttttcactgacactgaacgaaagattttcaatcaacggtggatacttgggcattttagagtggattctgggcaagaaggatgtgatgtggatcggatttctcacacgtactgttctcgaaaatagcacctcttatgaagaagccaaaaacctgctgaccaagacaaagattttggctcctgcctacttcattctcggggggaaccaatccggagagggctgcgtcatcaccagagaccgcaaggaaagcctggacgtctatgaactcgacgctaagcagggacggtggtatgtcgtgcagaccaactacgaccgctggaagcacccattttttctagacgacaggcggactcccgctaagatgtgtcttaataggacctcacaggagaatattagttttgagactatgtatgacgtgctatccaccaaacccgtccttaataagctgactgtgtacacaacgcttatcgacgtcacaaagggccaattcgaaacatatctgagagactgtccggacccttgcataggatgg

SEQ ID NO: 252863 - DNA, 1185 bp, Artificial Sequence
  derived and/or modified sequence
atgcccggacgcagttgcgttgccctggtgcttctggcggctgctgtaagctgtgccgtggcacagcacgcccccccgtggacagaggactgccggaagagtacttatccccccagtggtccaacctatcgcggggccgtcccttggtacaccattaacctggaccttcctccctataagagatggcacgagttgatgctagataaggctccagttttaaaggtgatcgtaaacagtctgaaaaacatgatcaatactttcgtcccatctggtaagatcatgcaggtggtggatgaaaagttgccaggcctccttgggaacttccccgggcccttcgaagaggagatgaaggggatagccgctgtcactgatatcccactgggggaaatcatttcctttaatattttttacgaactctttaccatatgcacaagcattgtggctgaagacaagaagggacacctcattcacggcaggaatatggactttggagttttcttggggtggaatatcaataatgacacatgggtgatcactgaacagttgaagcctttgacagtaaatctcgatttccagagaaacaataaaacggtgttcaaggcctctagctttgcaggatacgtagggatgctgaccggcttcaagcccggtttgttctcactaactctgaacgagaggttttctataaacggggggtaccttggtatcttggaatggatcctggggaagaaggacgtaatgtggattgggtttctgacacggaccgttctggagaatagtaccagctacgaggaggcgaaaaacttactgactaaaaccaagattctcgcccccgcctatttcatactcggcggcaaccagagcggcgagggttgcgtgatcacccgggacaggaaggagagtctggatgtgtacgaattagatgccaagcagggcaggtggtacgtggttcagactaactacgatcgatggaaacatcctttctttctggacgatcggcggacccccgcgaagatgtgccttaaccgaactagtcaggagaacatctcttttgagaccatgtatgacgtgctcagcaccaagcccgtcctgaacaaactgaccgtgtatacaaccttgatcgatgtgaccaagggccagtttgaaacttatctacgggattgcccagatccgtgtattggctgg

SEQ ID NO: 252864 - DNA, 1185 bp, Artificial Sequence
  derived and/or modified sequence
atgcccgggcgtagttgcgtcgctctggtattattggccgccgccgtttcttgtgctgtcgctcaacacgcgcctccttggacagaagactgccggaagtctacttatcccccatccggtcctacctatcggggagccgtgccctggtacaccattaaccttgatctgccaccatataagcgatggcacgaacttatgctggataaagcacccgtccttaaggtgattgtcaacagtctgaagaacatgatcaatacattcgttccatcagggaagatcatgcaggtggtcgatgagaagttgcctggcctattgggtaattttccaggcccattcgaggaggaaatgaagggtatagccgctgtgaccgacattcctctgggggaaattatcagcttcaacattttctacgaattattcacaatttgcacgagcatagtagccgaagataagaagggacatctcatccacgggaggaatatggacttcggcgtgttcttaggatggaacattaataacgatacatgggtgatcactgaacagctgaaaccactgacagtgaaccttgattttcagaggaacaataaaacagtattcaaggcgtcgtcattcgccggctatgtaggtatgctgacaggattcaaacccggcctattttcactgactttgaatgagagattctcaattaacggcggttatctgggaattctggagtggatattgggaaaaaaagatgtaatgtggatcgggtttctaactcgcactgtactggagaattctaccagttacgaagaggccaaaaaccttctgaccaagaccaagatcctggcgcctgcctatttcattcttggcggtaatcaaagcggcgagggatgcgtcatcactcgcgatagaaaggagagcttggatgtatatgagctggacgcgaaacaagggcggtggtatgttgtgcagacaaattacgacagatggaaacatccgttcttcctggatgaccgtagaactccagccaaaatgtgtcttaatcgcacgtcacaggagaacatctcttttgaaaccatgtacgacgtgcttagcaccaaaccagtgcttaataaactcactgtgtacacgacgctgatcgacgttacgaagggtcagtttgaaacctatttacgtgattgtccagatccttgtattggctgg

SEQ ID NO: 252865 - DNA, 1185 bp, Artificial Sequence
  derived and/or modified sequence
atgcccgggaggagctgcgtggctctggtactgttggcagctgctgtgtcatgcgccgtggctcagcacgcccctccatggaccgaggactgtcgcaagagcacttaccccccatctggcccaacctatcggggcgccgtcccttggtatactatcaatctagatctaccaccctataaacgctggcacgagctaatgctggacaaggccccagttttaaaggttatcgtgaactctttaaagaatatgataaacacttttgtgcccagcggcaaaataatgcaagtcgtggatgagaaactaccaggcctcttagggaatttcccaggcccttttgaagaggaaatgaagggcatcgccgcagtgaccgacatccctctgggcgagattatcagcttcaacatcttttacgaacttttcacaatttgtacttccatagtggccgaggataaaaaagggcatttaattcatggccggaacatggatttcggagtgttcctaggctggaacatcaacaacgacacctgggtcattactgaacagttgaagcctctcactgtcaatttggatttccagaggaataataagaccgtgttcaaggcctcctcttttgcaggctacgtcggaatgcttacaggctttaagccagggctctttagtctcacactgaacgagcgattctctatcaacgggggttatttaggcattctggagtggatattggggaaaaaagacgtgatgtggatcgggttcttaacccgcacagtgttagaaaatagcacttcctacgaggaagctaagaacctgctgaccaagaccaagattttagctccagcatactttattctcggcggcaatcagtcaggcgaaggctgcgttatcacaagagaccgaaaagaatctctggatgtttatgagctggacgctaagcagggcaggtggtatgtcgtgcagaccaattatgataggtggaaacaccctttctttctggatgatcgcaggactcccgccaaaatgtgtctcaaccgcacatctcaggagaatatcagttttgaaactatgtatgatgtgctttctaccaagccagtgttgaacaagctgacagtttacacaactttaattgacgtcaccaaggggcaatttgagacttacctccgcgactgccccgatccctgcatcggctgg

SEQ ID NO: 252866 - DNA, 1185 bp, Artificial Sequence
  derived and/or modified sequence
atgccagggcggtcttgcgtggccctcgtcctgctcgccgctgccgtttcttgcgccgtcgctcagcatgcgcctccatggacagaagattgtcgtaaaagtacataccccccatccgggcctacatacaggggagccgtgccttggtatacaatcaatctggatctccccccttataagcgctggcatgaactcatgctcgataaggcccccgtcttaaaagtcatagtgaattccctcaaaaatatgatcaatactttcgtgccttcagggaagataatgcaggtggtggacgaaaaacttcccggactgctgggaaactttcctgggccctttgaggaagagatgaaggggatcgctgcagtaacagatatccctttgggggaaataatctcttttaacatcttctatgaacttttcacaatttgtacttctattgtggcagaagataaaaaaggacaccttatccatgggcgtaatatggattttggagtttttttaggatggaacattaacaatgacacatgggtgataacagaacagctaaaacctcttactgtaaatctagattttcagagaaacaacaaaacagtgttcaaagcctcttcctttgccgggtatgtagggatgctaacaggattcaagccagggctgtttagtttaacacttaacgaaagattctctatcaatggggggtacctcggaatcctggaatggattttaggaaagaaagatgtaatgtggataggatttctcacacgcacagtcttagaaaattccactagttatgaagaagctaaaaacttgttgacaaaaactaaaatcttagcaccagcctatttcatcctggggggaaaccaatcaggggaaggatgcgtgataactagagatcggaaggaaagtctagacgtatatgagcttgacgcaaaacaggggcgttggtatgttgtgcagacgaactacgatcgatggaaacatccattctttcttgacgataggagaactccagccaagatgtgtctaaatcggacttcacaggagaatatttcatttgaaactatgtatgatgttctgtccactaagccagtgctgaataaacttactgtctatactacactcatcgatgttactaagggacagtttgaaacatatcttcgagattgccccgatccatgtataggatgg

SEQ ID NO: 252867 - DNA, 1185 bp, Artificial Sequence
  derived and/or modified sequence
atgccgggccgcagttgtgttgccctggtgcttttggcagccgcagtgtcctgtgcggtagcacagcatgccccgccctggaccgaggattgccgcaagtccacttacccacctagcggccctacctaccggggcgccgtcccttggtacaccataaacctggacttgcctccatataaacgatggcacgaactgatgctggataaggctccagttctgaaagtgattgtgaactccctgaagaatatgattaacacttttgtgccgagcggcaagatcatgcaagtggttgacgagaagcttcccggactgctgggcaacttccccgggccctttgaggaagaaatgaaaggcatcgcggctgtgaccgacattcctctcggagagattatctcattcaatattttctacgaattgtttaccatctgcacttcaatagtggcggaggataaaaaagggcacttaatacacggtcgaaatatggacttcggggtgtttcttggctggaacataaataatgatacatgggtgatcacagagcagctgaagcccctgacagtgaacttggatttccagagaaataataagaccgtattcaaggcatctagcttcgcgggttacgtgggaatgctcaccggattcaaacctggcctgttttcccttaccctaaatgagcggttcagtattaacggtggatacctaggcatcctagaatggattcttggcaagaaggatgtgatgtggatcggcttcctcacaaggacggtcctcgaaaatagcacttcctacgaggaagccaagaacctactgacaaaaactaaaatcctggctcctgcatactttatcctgggcggcaatcaaagtggtgaggggtgtgtaatcactcgagaccgaaaagagtcccttgatgtttatgaactggacgccaagcagggccgctggtatgttgtgcaaacgaactatgatagatggaaacaccctttctttcttgatgatcgaaggaccccagcaaagatgtgcctgaaccggacaagccaagagaacataagctttgagaccatgtatgacgtgttgagtacaaagcctgtgttaaataagcttacggtatatacaacactgattgacgttacaaaaggccaattcgagacctatctccgagattgcccagacccttgcataggatgg

SEQ ID NO: 252868 - DNA, 1185 bp, Artificial Sequence
  derived and/or modified sequence
atgccaggccgatcctgtgtggccctggtgttgctagccgccgctgtctcttgcgcagttgcgcagcacgcccccccatggactgaggactgtcggaagtcaacttaccctccttccggacctacttaccgtggcgcggtgccctggtataccatcaacctagacttacccccctacaaacgttggcatgaactcatgctcgataaagccccggtattaaaagtgatcgttaactccctgaagaacatgatcaatacctttgtcccatccgggaaaattatgcaggttgtggatgaaaaactgccgggcctgttggggaattttccaggcccattcgaggaggagatgaaaggcatcgctgccgtcacagatatcccgctgggcgagattatctcgtttaacattttttacgaactttttaccatatgtacctccatcgttgctgaagataagaaggggcaccttattcatggcagaaacatggactttggcgtgttcttaggctggaatattaataatgatacctgggttatcacggagcagctgaagccactcactgtgaacctggacttccagaggaacaacaagacagttttcaaggcctccagctttgcgggatacgtagggatgctgaccggctttaaaccaggcctcttctccctgaccctcaatgagagatttagtattaatgggggatacctgggtatcctggagtggatcctcgggaaaaaagacgtgatgtggatcgggttcttaacacggaccgtactggagaacagtaccagttacgaagaagctaagaacctgttgaccaaaaccaagatcctggcgcctgcatacttcatactcgggggcaatcaatcgggcgagggctgtgtcattacccgcgaccgcaaggaatctctggacgtttatgagctggatgcgaaacaaggaagatggtacgtggtgcagacgaattatgatcgatggaagcaccccttcttcctcgacgatcgccggactccggcaaagatgtgtcttaaccggacaagccaggagaatattagtttcgagaccatgtacgacgttctcagtaccaagccagtacttaataaattgacggtgtacacgacactgattgatgtcacaaagggccaatttgagacttatctaagagattgtccagatccctgtattggctgg

SEQ ID NO: 252869 - DNA, 1185 bp, Artificial Sequence
  derived and/or modified sequence
atgccaggcaggtcgtgcgtggctcttgtccttttggccgcagcagtgtcgtgcgctgtggcacaacatgccccgccttggaccgaggattgtcgaaagtcgacctacccgccctctgggccaacctaccgtggggccgttccctggtatacaatcaacttggatttgccgccatataaaaggtggcacgaactgatgttagataaggcccctgtacttaaggtcattgtaaacagtcttaagaacatgatcaatacattcgtgccgtctggaaaaatcatgcaggtcgtcgacgaaaaactgcctggattactaggtaacttcccaggtccattcgaggaagagatgaaggggatagcggccgtaacggatatacctttgggggaaattatctcgttcaatatattctacgagttgttcacaatttgtacttccatcgtggcagaggataaaaaaggacatctaattcacggccgaaacatggatttcggagtgttcctaggatggaacataaacaatgacacatgggtcattaccgaacaactcaagcctttgaccgtaaatttggacttccaaaggaacaacaaaactgtgtttaaggcttcatctttcgccggatacgtagggatgctaacgggttttaaacccggacttttcagtttgacgctcaacgagagattttccattaatggcggctacctaggcatacttgagtggatcttgggtaagaaggacgtcatgtggattggtttcctgacccgtacggttcttgagaacagcacttcctacgaggaagccaagaacctgctgacaaaaacaaaaatattagctccagcgtacttcatcctgggcggaaatcagagcggcgagggctgtgttatcacgcgagaccgtaaggagtcacttgatgtctacgaattagatgcgaaacagggcagatggtacgtagtccagactaattatgaccggtggaagcaccccttttttctcgatgatcggagaactcccgcaaagatgtgtctgaaccgcaccagccaggaaaacatctctttcgaaaccatgtatgacgtcttgtcgaccaaaccagtattaaacaagctgacggtatatactacccttattgacgtaacaaaagggcaatttgaaacttacctacgagactgcccagacccatgcatcggttgg

SEQ ID NO: 252870 - DNA, 1185 bp, Artificial Sequence
  derived and/or modified sequence
atgcccgggcggtcatgcgtggctttggtactcctggccgctgccgttagctgcgctgtggcacagcatgcccccccatggacagaggactgcagaaagagtacctaccccccaagcggaccaacctaccgcggcgcagtgccttggtatactatcaatcttgacttgcctccatacaagaggtggcacgagcttatgctcgataaagctccagtcttaaaagtgatagtgaattctctgaaaaatatgataaatacattcgtcccatctggaaagatcatgcaagtggtcgatgaaaaactccctggactgctgggaaacttccccgggccctttgaagaagagatgaagggaatcgcagcagtgactgacattcccttgggcgaaattattagtttcaacatcttttacgagctgtttactatttgtacctccatcgtggcagaagataaaaaggggcatctgatccatggaaggaacatggacttcggagtctttttgggctggaacatcaataacgacacctgggtaatcaccgagcagctaaaaccactcacagtcaacctcgactttcagagaaacaataaaaccgtgtttaaggccagcagctttgccggatatgtcggcatgctaaccggatttaaacccggactgttctcgctgacattgaacgagcggtttagtatcaacggaggctacttggggatcctcgagtggatcttggggaagaaggatgtcatgtggattgggtttctgacccgtacagtcctggagaacagcacgagttacgaggaggcgaaaaacctgctgaccaagacgaagatcctggcacccgcgtactttatccttggcggaaatcagtcaggagagggttgcgtcattaccagggatcgcaaagaatcccttgacgtttatgaactcgacgcaaaacaggggcgatggtatgtggtgcaaacaaactacgacagatggaagcacccgttttttctggacgacaggagaacccccgctaaaatgtgcctcaacaggaccagccaggaaaacataagctttgaaactatgtacgacgttctttcgacaaagcctgttctgaacaagctgaccgtttacaccacccttatagatgttactaagggccaattcgaaacttatctgagagactgccccgacccctgtattggttgg

SEQ ID NO: 252871 - DNA, 1185 bp, Artificial Sequence
  derived and/or modified sequence
atgcccggccggtcgtgtgtagccctcgttctgctggccgcagccgtgagctgcgccgtggcacaacacgctcctccatggactgaggactgcagaaagtctacttaccccccaagcggtcctacctataggggcgcagtcccctggtatacaatcaatttggacctccctccgtacaagaggtggcacgagttaatgttagataaggcccccgtgctaaaggtgattgtgaatagtctgaagaacatgatcaatacctttgtgcctagcggaaagatcatgcaagtggtggacgaaaagctccctggcctgctcggaaatttccctgggccttttgaagaagagatgaaaggcatcgcagctgttactgatatccctctgggcgagattatatccttcaatattttctatgaactctttaccatctgcacatcaattgtggccgaagacaagaaggggcatttgattcacggccgaaatatggactttggcgtgtttctggggtggaatatcaacaacgacacatgggtcataaccgagcagcttaaacctctaaccgtgaacttagactttcagaggaataataaaacagtttttaaggcctcaagcttcgccggttacgtaggaatgctaaccgggttcaaaccaggtctcttctccctgaccctcaatgagaggttttctattaatggggggtaccttggtatcctggagtggattctgggtaagaaggatgtcatgtggatcgggttcctcaccagaacggtgctcgaaaattcgaccagttatgaggaagctaagaatctgctaaccaaaacaaagatccttgcacccgcgtactttattctgggcgggaaccaatctggagagggatgcgttattaccagagatcgcaaggaaagtctcgacgtttacgaactggacgcaaagcagggaaggtggtacgttgttcagaccaactatgataggtggaagcacccattcttcctggacgatcgccgaacacccgcaaaaatgtgtctgaataggacgtcacaggagaacatttcctttgaaacaatgtacgatgtgctgtcaactaagccagtactcaacaagctgacagtttacaccacgctcatagatgtcacgaaagggcagtttgagacatatctgcgggattgccccgacccttgcatcggatgg

SEQ ID NO: 252872 - DNA, 1185 bp, Artificial Sequence
  derived and/or modified sequence
atgccggggcgatcctgcgtcgccttggtgctgctggccgcggccgtgagctgtgccgtcgctcagcacgctcctccatggacagaagactgcaggaaatcaacctaccctccctccggacccacttaccgaggggctgttccatggtatacgatcaacctcgatctgccaccatacaagaggtggcacgaactcatgctggataaggctcctgtcctgaaagttatagtcaattccctgaagaacatgatcaacacgttcgtgccgagcggcaagattatgcaagtcgttgacgagaagctgccgggcctattaggcaattttcctggcccgtttgaggaggagatgaaaggaatcgccgccgtgaccgacatcccgctgggtgaaatcatttcatttaatatcttttatgagctctttaccatatgcacctctattgtagccgaggacaagaaggggcatctgattcacggccgaaacatggacttcggcgtgtttttgggttggaacatcaataacgacacctgggtgattaccgaacaactgaagccactcactgtgaatcttgatttccagcgtaacaacaagacggtctttaaggctagctccttcgcgggctacgtgggaatgctgacagggttcaagccaggattgtttagcctgacgttgaatgagcgattcagtatcaacggggggtatctcgggatccttgaatggattttgggcaagaaggacgtcatgtggattggctttctcacccgaacagtcctggagaattcaacttcatacgaagaggcaaaaaacctcctgactaagaccaaaattttggctcctgcttacttcatccttggcggaaatcagtcaggcgaagggtgcgtgatcactagggatagaaaggaaagtttggacgtgtacgaactggacgcgaagcagggtcgctggtacgtggttcagacaaattacgatcgttggaaacacccgttcttcttggacgacaggcggactccagccaagatgtgcttgaaccgcacatctcaggagaatatcagctttgaaactatgtacgatgtgctgagcaccaagccagtactcaacaagctaacagtgtatactaccctgattgacgttacaaagggccaattcgaaacctatcttcgggattgtccagacccatgcatcggctgg

SEQ ID NO: 252873 - DNA, 1185 bp, Artificial Sequence
  derived and/or modified sequence
atgccaggaagatcatgcgttgctctggtgctcctggcagccgcagtcagttgtgctgttgctcagcatgcgccaccttggacagaggattgcagaaaatcgacataccctcccagtgggcccacctacaggggagcagtgccctggtacacaattaacctggacctgcctccttataaacgctggcatgaactgatgttggataaagccccggtgctcaaagtaattgtgaactctttaaagaatatgatcaatacattcgtaccaagcggcaaaatcatgcaagtggtggacgagaagctgcccggactcctggggaatttcccagggcccttcgaagaggagatgaagggcatagctgcggtgaccgacatacctctgggtgagattatttcttttaacattttttacgagctgtttaccatttgcactagtattgtagcggaggacaaaaaaggccatctcatccacggtcggaatatggacttcggcgtgttcctggggtggaacattaataacgacacctgggtaataacggaacagctgaagcccctcacggtcaatctggatttccaaagaaacaataagaccgtttttaaggcttcctccttcgcaggctatgtgggcatgctgaccggctttaagcccggactcttctctttaaccctgaacgagcgcttctccataaatggcggatatctgggcatcttagaatggatcctcgggaaaaaggatgtgatgtggatcgggtttctcacgagaacagtgctggagaatagtaccagttatgaggaagcgaagaatctgctgaccaagacaaaaatactcgccccagcctattttattctcggagggaatcaatctggggaaggatgtgtgataacacgggaccgaaaggaaagtctggacgtgtacgaactcgacgccaagcagggcagatggtatgttgtacaaacgaactatgacaggtggaagcatcctttcttcctggacgatcgccgaacaccggctaagatgtgcctcaatcgaaccagccaggagaacatcagttttgaaactatgtacgacgtactgtccacaaagccagtattaaacaagctgactgtctacaccacactcatcgacgtgactaaggggcagtttgaaacatacctgagagactgtcccgatccgtgcatcggctgg

SEQ ID NO: 252874 - DNA, 1185 bp, Artificial Sequence
  derived and/or modified sequence
atgcccggcagaagctgcgtagcgctcgtcctcctggccgcagctgtcagctgtgccgtcgcccagcacgccccaccttggaccgaggactgtagaaaatctacgtatccgcccagtggacctacgtaccggggcgcggtgccctggtacacaattaatctcgaccttccaccctataaacgttggcacgaattgatgttggacaaggcacccgtgctgaaggtcatcgtgaatagcttgaaaaacatgataaatacattcgttccctcaggcaaaattatgcaggtggtggatgaaaagctgccgggcctactgggcaatttccctgggccctttgaggaagagatgaaaggaattgctgctgtaacggacattccgcttggtgagataatttccttcaatattttctatgagctctttacaatctgtacctccattgtggccgaggataagaaaggacacttgatccatggccgcaatatggattttggggtgttccttggctggaacatcaacaatgatacatgggtgatcactgagcagctcaaacctttgacagttaatctggattttcagagaaataataaaacggtatttaaggcctcctctttcgcagggtatgtgggaatgctgactggttttaaacccgggctttttagcttaactctcaacgaacgtttcagcatcaacggaggctatctgggaatccttgagtggatcctgggcaagaaggatgtgatgtggattggtttcttaacacggaccgtgctggagaatagtacgtcgtacgaggaggccaaaaacctcctaaccaaaactaaaattctggccccagcttatttcatcttggggggcaaccagtctggagaaggctgcgtcattacgagagatcgcaaagaatcgctcgacgtctatgagctggatgctaagcaggggcgatggtacgtcgttcaaaccaactacgaccgttggaagcacccattctttctggatgatcgtaggactccagcaaagatgtgcctgaatagaacaagccaagaaaatatctccttcgagactatgtacgacgtcttgagtacaaagccagttttaaataagctgactgtctacacaacattgatcgatgtcacaaagggccaattcgagacctaccttagagattgccctgatccatgcatcggctgg

SEQ ID NO: 252875 - DNA, 1185 bp, Artificial Sequence
  derived and/or modified sequence
atgccagggcgaagttgcgtcgcactggtattattagccgctgctgtttcatgtgctgtagcccagcacgctcccccatggacagaagattgtaggaaaagtacatatcctccctctggacccacatatcggggagcagtcccatggtatacaataaacttggatctccctccctataaaaggtggcatgaactgatgcttgataaagcacccgtcttaaaagtcattgtaaattccctgaaaaacatgatcaatacattcgttccatctggaaaaatcatgcaggtcgtcgatgagaaacttcccggactcctggggaattttcccggaccatttgaggaagaaatgaaggggatagccgcagttactgatatacctctcggagagatcatttcatttaatatattctatgaactctttacgatttgcacatctattgtggccgaagacaaaaaaggacatctcatccatggacggaacatggatttcggagtgttcttagggtggaatatcaacaatgatacatgggtgatcacagaacagcttaaacccctgacagtcaacctggattttcagcggaacaataaaacagtattcaaagcatctagtttcgctgggtacgtggggatgctcacagggttcaaacccggacttttcagtctaactctcaacgaacggttcagtattaacggaggataccttggaattcttgagtggatacttggaaaaaaagatgtgatgtggattggattcctgacacgtacagtactggaaaactctactagttatgaagaggcaaaaaacctcctaacaaaaactaaaatacttgctcccgcttattttatcctgggggggaaccagtccggagaaggatgcgtgattacgcgggaccggaaagaaagtcttgatgtttatgaactagatgccaaacaggggaggtggtatgtggtgcagactaactacgatcgatggaaacaccccttcttcctcgatgataggcgcacacctgccaaaatgtgcctcaacaggacaagtcaggaaaatatatcattcgaaacaatgtacgatgttctgagtacaaaacctgtcctaaacaaactcactgtatatacaacactcatcgatgtcacaaaggggcagttcgagacatatctcagagattgccccgatccctgcataggatgg

SEQ ID NO: 252876 - DNA, 1185 bp, Artificial Sequence
  derived and/or modified sequence
atgcccggcaggtcttgcgttgctcttgtgctgctggcagccgccgtctcatgtgccgttgctcagcatgctcctccctggacagaggattgtcgtaaaagtacctacccccccagcggacctacctatagaggcgccgttccctggtatacgataaatcttgacctgcccccatacaaaaggtggcacgagctgatgttagacaaggcacctgtcctgaaggtgatagtaaacagcctaaagaatatgattaacacattcgtcccctcagggaaaattatgcaggtcgttgatgagaaattgcctggactcctgggtaacttccccggcccgttcgaagaagaaatgaagggaatcgccgccgtgaccgatatcccactcggggaaattatcagcttcaacatcttctacgagctgtttacaatatgcacatcaattgtggctgaggataaaaagggacacctgatacatggacgcaatatggattttggcgttttcctcgggtggaacataaataatgatacttgggtgatcacagaacagcttaagcctctgactgtgaatttggactttcagagaaataataagacagtgtttaaagccagttcattcgctgggtacgttggaatgcttacaggctttaaaccaggactgttcagtcttacattgaacgagcgctttagtatcaacggcgggtatctgggcatcctggagtggatcctcggtaagaaagatgtgatgtggatcgggttcttaactcggacagtgttggaaaacagcaccagttacgaagaagcaaaaaacctgctgaccaaaactaagattctcgctcccgcgtatttcattctcggtgggaaccagagtggagaagggtgtgttattactagggaccgaaaggaatccctcgacgtctatgaattggacgcaaagcaggggcgatggtatgtggtacaaaccaactacgacagatggaagcaccccttctttctggacgatcggcggacaccagctaagatgtgtctcaataggacatcccaggaaaatatcagctttgaaaccatgtacgacgtcctctcaaccaaacccgttttaaacaaactgacagtctacacaactctgattgacgtgaccaagggacagttcgaaacctatctgcgggattgccccgatccctgtatcggttgg

SEQ ID NO: 252877 - DNA, 1185 bp, Artificial Sequence
  derived and/or modified sequence
atgccgggaagaagctgtgtagcgctggtgctgttggccgctgccgtgtcatgcgccgtggcccagcatgctccgccttggactgaggactgccggaagagcacctaccctccttccggccctacttatagaggggctgtcccatggtataccattaatctggacctcccaccctacaaacgatggcatgagctgatgctggacaaggcccccgtgttgaaggtgattgtgaattccctgaagaacatgatcaacacctttgttcctagcgggaaaataatgcaagtagtggatgagaagctgcccggactgcttggaaatttccctggcccttttgaagaagagatgaaaggtatcgcagcggtgactgacatccctcttggggagataattagtttcaatatattctatgaactgttcaccatttgcacctcaatcgtggctgaagacaagaaaggacacctcattcatggtcggaatatggacttcggtgtgtttttgggttggaatattaataacgatacctgggtgataacagaacagctgaagcccctgaccgtgaatctggacttccagcgaaacaataagaccgtctttaaagcatcttcatttgcagggtacgttggcatgctgaccggctttaaacccgggttgtttagcctcaccctgaacgagcggttctccatcaatggggggtatctcggcattctggaatggattctcgggaaaaaggatgtaatgtggataggcttcttgactaggacggtgctggaaaacagtacatcatatgaggaagctaagaatcttctgacaaaaactaaaattctggctccagcttacttcatcttgggggggaatcagagcggggagggctgcgtgattaccagggatcgcaaggaatcccttgacgtatacgagctggacgcgaaacagggacgctggtatgtagtgcagaccaactatgacagatggaagcatccgttctttctcgacgacagacggactcccgctaagatgtgtctcaatcggacctcccaggagaatatatcatttgagactatgtacgacgtgctgtccaccaagccagtcctcaataagctgactgtatacacgactctcatcgatgtgaccaaagggcaatttgagacttacctccgcgattgtcccgatccctgcattggatgg

SEQ ID NO: 252878 - DNA, 1185 bp, Artificial Sequence
  derived and/or modified sequence
atgccaggcaggtcctgtgtggctctggttctgctggccgccgcagtctcctgcgctgtagctcaacacgcaccgccttggactgaggattgccgcaagtctacctacccgccgagcggacctacatacaggggcgctgttccctggtacactataaacctcgatttgcccccttataaacgctggcacgagctcatgctggacaaggcacctgtcctcaaggtcattgtgaatagtctcaagaatatgattaacacattcgttcctagcggcaagattatgcaggtggtggatgaaaaactgcccggacttctgggtaattttcccggccccttcgaagaggaaatgaagggcatcgccgcagtgaccgacatccctctcggcgagataatttcattcaacatattttacgagctgtttactatctgcacctctatcgtggctgaggataaaaaaggccacctgattcatggtagaaacatggatttcggtgtgtttctcggatggaacattaataacgacacctgggttatcacggaacagttgaaaccactgacagtgaaccttgactttcagcgcaacaacaagacagtatttaaagcatcctcctttgcaggttatgtcggtatgttgacaggcttcaagccaggtctcttttccctgactttgaatgaaaggtttagcattaacggcggttatctgggcattctcgagtggatccttggcaaaaaggatgtgatgtggatcggttttcttacaaggaccgtcctggagaactcaacgtcttacgaggaggccaagaatcttctgactaagacaaagatcctggcaccggcatactttatcctcggtggcaatcagagcggagaaggctgcgttatcacccgcgacaggaaggaatctctcgacgtgtacgagctcgatgccaagcagggccgctggtacgtggtgcagaccaactacgatagatggaaacaccccttctttctggatgacaggcgcacacccgcgaagatgtgccttaacaggacgtcacaagagaatatatcttttgagacaatgtacgacgtcctgtcaactaagcctgtgctgaacaaattgacagtgtatactactctcatcgacgtgacaaaaggtcagtttgagacctacctcagagactgccctgacccctgcatcggttgg

SEQ ID NO: 252879 - DNA, 1188 bp, Artificial Sequence
  derived and/or modified sequence
atgcccggcagaagctgcgtggccctggtgctgctggccgccgccgtgagctgcgccgtggcccagcacgcccccccctggaccgaggactgcagaaagagcacctacccccccagcggccccacctacagaggcgccgtgccctggtacaccatcaacctggacctgcccccctacaagagatggcacgagctgatgctggacaaggcccccgtgctgaaggtgatcgtgaacagcctgaagaacatgatcaacaccttcgtgcccagcggcaagatcatgcaggtggtggacgagaagctgcccggcctgctgggcaacttccccggccccttcgaggaggagatgaagggcatcgccgccgtgaccgacatccccctgggcgagatcatcagcttcaacatcttctacgagctgttcaccatctgcaccagcatcgtggccgaggacaagaagggccacctgatccacggcagaaacatggacttcggcgtgttcctgggctggaacatcaacaacgacacctgggtgatcaccgagcagctgaagcccctgaccgtgaacctggacttccagagaaacaacaagaccgtgttcaaggccagcagcttcgccggctacgtgggcatgctgaccggcttcaagcccggcctgttcagcctgaccctgaacgagagattcagcatcaacggcggctacctgggcatcctggagtggatcctgggcaagaaggacgtgatgtggatcggcttcctgaccagaaccgtgctggagaacagcaccagctacgaggaggccaagaacctgctgaccaagaccaagatcctggcccccgcctacttcatcctgggcggcaaccagagcggcgagggctgcgtgatcaccagagacagaaaggagagcctggacgtgtacgagctggacgccaagcagggcagatggtacgtggtgcagaccaactacgacagatggaagcaccccttcttcctggacgacagaagaacccccgccaagatgtgcctgaacagaaccagccaggagaacatcagcttcgagaccatgtacgacgtgctgagcaccaagcccgtgctgaacaagctgaccgtgtacaccaccctgatcgacgtgaccaagggccagttcgagacctacctgagagactgccccgacccctgcatcggctggtag

SEQ ID NO: 252880 - DNA, 1113 bp, Artificial Sequence
  derived and/or modified sequence
atgcccggcagaagctgcgtggccctggtgctgctggccgccgccgtgagctgcgccgtggcccagcacgcccccccctggaccgaggactgcagaaagagcacctacccccccagcggccccacctacagaggcgccgtgccctggtacaccatcaacctggacctgcccccctacaagagatggcacgagctgatgctggacaaggcccccgtgctgaaggtgatcgtgaacagcctgaagaacatgatcaacaccttcgtgcccagcggcaagatcatgcaggtggtggacgagaagctgcccggcctgctgggcaacttccccggccccttcgaggaggagatgaagggcatcgccgccgtgaccgacatccccctgggccacctgatccacggcagaaacatggacttcggcgtgttcctgggctggaacatcaacaacgacacctgggtgatcaccgagcagctgaagcccctgaccgtgaacctggacttccagagaaacaacaagaccgtgttcaaggccagcagcttcgccggctacgtgggcatgctgaccggcttcaagcccggcctgttcagcctgaccctgaacgagagattcagcatcaacggcggctacctgggcatcctggagtggatcctgggcaagaaggacgtgatgtggatcggcttcctgaccagaaccgtgctggagaacagcaccagctacgaggaggccaagaacctgctgaccaagaccaagatcctggcccccgcctacttcatcctgggcggcaaccagagcggcgagggctgcgtgatcaccagagacagaaaggagagcctggacgtgtacgagctggacgccaagcagggcagatggtacgtggtgcagaccaactacgacagatggaagcaccccttcttcctggacgacagaagaacccccgccaagatgtgcctgaacagaaccagccaggagaacatcagcttcgagaccatgtacgacgtgctgagcaccaagcccgtgctgaacaagctgaccgtgtacaccaccctgatcgacgtgaccaagggccagttcgagacctacctgagagactgccccgacccctgcatcggctggtag

SEQ ID NO: 252881 - DNA, 1188 bp, Artificial Sequence
  derived and/or modified sequence
atgcctgggcggtcttgcgtagcactggtgttgctggcggcggcagtttcctgtgctgtcgcacagcacgccccaccgtggactgaggactgcagaaagtctacatacccccctagcggccccacatataggggcgctgtgccttggtataccataaacctggacctccccccatataaacgctggcacgaactcatgctcgacaaagcacccgtgcttaaggtgatcgtgaacagcctcaaaaatatgattaacaccttcgttccttcagggaagataatgcaggtcgtcgatgaaaagctgccagggctgctgggaaacttccccggcccctttgaagaagagatgaaaggaatagccgcagtcaccgacatccctctcggagagataatctccttcaacatcttctatgaattgttcacaatctgcactagcatcgtggccgaagacaaaaaagggcatctgattcacgggaggaacatggactttggagtcttcctcggttggaacataaacaatgatacctgggtgatcactgagcagctcaagccccttaccgtgaatctagactttcagcggaacaataagaccgtatttaaggcatctagctttgccggatatgtcggcatgctgacaggctttaaacccggtctcttcagcctaacgctgaatgagcgcttctccattaatggcggctatctgggcatcttagagtggatcctcggtaagaaagacgttatgtggatcgggttcctgacaagaaccgtattggagaacagcacttcgtacgaggaagcaaaaaatctgctcacgaagaccaaaattcttgctccagcctattttatacttggggggaaccagtctggtgaggggtgtgtaatcacccgcgaccgaaaggagtccttggatgtctacgaactggacgcaaagcagggtcggtggtatgtggtgcagactaattatgaccggtggaagcaccccttttttctggacgaccggcggacaccagccaaaatgtgcctcaatcgtacttcccaggagaatatcagtttcgagacaatgtacgatgtgctgagtacaaagccagtgctgaataaattaactgtatacactaccctgattgatgtcactaaagggcagttcgagacttacctccgagactgccccgacccttgtattggatggtag

SEQ ID NO: 252882 - DNA, 1113 bp, Artificial Sequence
  derived and/or modified sequence
atgcccgggcggagctgcgtcgcattggtgctcctggcggcagcggtgtcctgtgctgttgctcaacatgcaccgccatggaccgaggattgtcgtaaatcgacctaccccccttccggtccgacataccggggggcggtgccatggtacaccataaacctcgatttgcctccttataagcggtggcatgaactgatgttggataaagccccggtcctcaaagtgatagtgaacagtctgaagaacatgatcaataccttcgtgccttccggcaagatcatgcaggtggtggatgagaagctgccgggcttgttaggcaatttccccggcccctttgaagaggaaatgaaaggtatcgccgcagtgactgatatccctctagggcacctcatccatggccgaaacatggatttcggggtttttctgggctggaatatcaacaatgatacctgggtgatcacagagcaactcaagcccctcacagtgaatttggactttcagcgcaacaataagactgtcttcaaggcaagttccttcgccggttacgtgggtatgctgaccggcttcaagcctgggctgttcagcttaactctcaatgagaggttctcgataaatggagggtatctgggaatcttagagtggatcttgggcaagaaggacgttatgtggatcgggtttctgacaaggacggtgcttgagaacagcacgagctatgaggaggcaaaaaacctactcaccaagacaaagatactcgctcctgcttactttattctaggcggcaatcagtccggggagggatgtgtgatcacacgcgaccgtaaagaatccctggatgtgtacgagctcgacgcaaagcagggaaggtggtacgttgttcagacaaactatgatcgatggaagcacccattcttccttgacgatcggaggactcctgctaaaatgtgcctcaacaggacatctcaagaaaatatctcattcgaaacaatgtacgacgtcctgagtacaaaacccgtgctcaacaagctgactgtgtatacaacattaatcgatgtgaccaagggacaatttgagacatacctgagagattgtccagacccatgtatcggatggtag

SEQ ID NO: 252883 - DNA, 1188 bp, Artificial Sequence
  derived and/or modified sequence
atgcctggccgcagctgtgtggccctggtgctgctggccgctgctgtgtcctgtgctgtggcccagcacgccccaccctggacagaggactgcaggaagagcacctacccaccttctggccccacctacagaggagctgtgccctggtacaccatcaacctggacctgcccccctacaagcgctggcatgagctgatgctggacaaggcccctgtgctgaaggtgattgtgaacagcctgaagaacatgatcaacacctttgtgcccagcggcaagatcatgcaggtggtggatgagaagctgcccggcctgctgggcaacttccctggcccctttgaggaggagatgaagggcattgctgctgtgacagacatccccctgggggagatcatctccttcaacatcttctatgagctgttcaccatctgcaccagcatcgtggccgaggacaagaagggccacctgattcatggaagaaacatggactttggagtcttcctgggctggaacatcaacaatgacacctgggtgatcacagagcagctgaagcccctgactgtgaacctggacttccagaggaacaacaagacagtgttcaaggccagcagctttgctggctacgtgggcatgctgaccggcttcaagccaggcctcttcagcctgaccctgaatgaacgcttcagcatcaatggaggctacctgggcatcctggagtggatcctgggcaagaaggatgtgatgtggattggcttcctgaccaggacagtgctggagaacagcaccagctatgaggaggccaagaacctgctgaccaagaccaagatcctggccccagcctacttcatcctgggcggcaaccagagcggggagggctgcgtcatcacccgggacaggaaggagagcctggatgtgtatgagctggatgccaagcagggccgctggtacgtggtgcagaccaactatgaccgctggaagcaccccttcttcctggatgacaggaggaccccagccaagatgtgcctgaacagaaccagccaggagaacatcagctttgagaccatgtatgatgtgctgagcaccaagcctgtgctgaacaagctgactgtgtacaccaccctgattgatgtgaccaagggccagtttgagacctacctgcgggactgcccagacccctgcatcggctggtag

SEQ ID NO: 252884 - DNA, 1113 bp, Artificial Sequence
  derived and/or modified sequence
atgcctggccgcagctgtgtggccctggtgctgctggccgctgctgtgtcctgtgctgtggcccagcacgccccaccctggacagaggactgcaggaagagcacctacccaccttctggccccacctacagaggagctgtgccctggtacaccatcaacctggacctgcccccctacaagcgctggcatgagctgatgctggacaaggcccctgtgctgaaggtgattgtgaacagcctgaagaacatgatcaacacctttgtgcccagcggcaagatcatgcaggtggtggatgagaagctgcccggcctgctgggcaacttccctggcccctttgaggaggagatgaagggcattgctgctgtgacagacatccccctgggccacctgatccacggcaggaacatggactttggagtcttcctgggctggaacatcaacaatgacacctgggtgatcacagagcagctgaagcccctgactgtgaacctggacttccagaggaacaacaagacagtgttcaaggccagcagctttgctggctacgtgggcatgctgaccggcttcaagccaggcctcttcagcctgaccctgaatgaacgcttcagcatcaatggaggctacctgggcatcctggagtggatcctgggcaagaaggatgtgatgtggattggcttcctgaccaggacagtgctggagaacagcaccagctatgaggaggccaagaacctgctgaccaagaccaagatcctggccccagcctacttcatcctgggcggcaaccagagcggggagggctgtgtgatcacccgggacaggaaggagagcctggatgtgtatgagctggatgccaagcagggccgctggtacgtggtgcagaccaactatgaccgctggaagcaccccttcttcctggatgacaggaggaccccagccaagatgtgcctgaacagaaccagccaggagaacatcagctttgagaccatgtatgatgtgctgagcaccaagcctgtgctgaacaagctgactgtgtacaccaccctgattgatgtgaccaagggccagtttgagacctacctgcgggactgcccagacccctgcatcggctggtag

SEQ ID NO: 252885 - DNA, 1188 bp, Artificial Sequence
  derived and/or modified sequence
atgcccggccggagctgcgtggccctggtgctgctggccgccgccgtctcctgcgcggtcgcacaacacgcccccccttggaccgaggattgccggaaatccacgtacccacctagcggacccacctataggggtgctgtcccttggtacacgattaacttagacttgcccccatacaagaggtggcacgaattgatgctcgacaaagcacccgtgttgaaggtaatcgtgaactccttgaaaaacatgatcaatacctttgtaccttcaggaaaaatcatgcaggtagtcgatgagaaactacccggattgttggggaattttcctggccccttcgaggaggagatgaaaggaattgctgccgtgaccgatatccccctcggagagattatttccttcaatatcttttacgagctcttcacaatttgcacctcaatagtcgcggaagacaagaagggacacctgattcacggacgtaacatggattttggagtattcttgggttggaatattaataatgatacttgggtgattaccgagcagctgaaacctttgactgtgaacctcgacttccagcggaataacaaaacagttttcaaggcgagtagtttcgccggatacgtagggatgctcaccggttttaagcccggactgttctccttgacccttaacgagaggttcagcattaacggcggatatctcggcatccttgagtggatcctcggtaaaaaagacgtgatgtggatcggcttcctgacacgcactgtgttggagaacagcacatcatacgaagaggccaaaaacctactgacaaagactaagattctggcacctgcctattttatcttaggcgggaaccaaagcggagagggctgtgtgatcacccgagacagaaaggaaagtcttgacgtctacgagctcgacgcaaagcagggacgatggtacgtggtccaaactaattatgatcgctggaaacatcccttttttttggacgaccggaggacacctgctaaaatgtgtctaaatcgcacctcacaggagaacatcagcttcgaaacaatgtacgatgtcctgtcgacgaagcctgtcttgaataaattgactgtgtataccactctgatcgacgtcacgaagggacagtttgagacgtatttgagggactgtccagatccttgtatcggctggtag

SEQ ID NO: 252886 - DNA, 1113 bp, Artificial Sequence
  derived and/or modified sequence
atgcccggccggagctgcgtggccctggtgctgctggccgccgccgtatcatgcgccgtggcacaacacgcccctccatggacagaagattgccgaaagagtacctatcctccttccggtcctacttaccgcggcgctgtgccttggtatacgattaatctggatttgcccccctataaaagatggcacgaacttatgcttgacaaagctcccgtcttgaaagtcattgtaaactctctcaagaacatgattaataccttcgtgcctagcggtaaaattatgcaggttgtggacgagaaacttcctggcctcctgggaaattttcccgggccatttgaggaagaaatgaagggaatcgccgcggtgacggatatcccactcggacacctgattcacggccgtaatatggatttcggcgtgtttctcggctggaacatcaataacgacacttgggtgatcactgaacagctcaagcccctcaccgttaacctggatttccaacggaataacaagactgtgtttaaggcaagtagtttcgcaggatatgtcgggatgctgaccggatttaaaccgggcctgttcagcttgaccttgaatgagagatttagcattaatggaggctatctggggatcctcgagtggattctcggaaaaaaggacgtcatgtggataggattcttgacacgcacagttctggagaactccacctcatacgaggaggccaaaaatctgctcaccaaaacaaaaatcttagcacccgcgtatttcattctgggaggtaaccaaagtggagaggggtgcgtaatcaccagggaccgtaaggaatcacttgacgtgtacgaacttgacgctaaacaaggccgttggtacgtggtgcaaaccaattacgacagatggaagcacccattcttcctggatgaccgacgtacacctgccaagatgtgtcttaacagaacatcacaggagaatatttcctttgagactatgtacgacgttctgtccacgaaaccggtactgaataagctgacggtctataccacgctaattgatgtgaccaaaggacaattcgaaacctatctgcgcgactgcccggacccatgtatcggttggtag

SEQ ID NO: 252887 - DNA, 1188 bp, Artificial Sequence
  derived and/or modified sequence
atgcccggacggtcatgtgtcgcattggtactgcttgcagcagctgtgtcctgcgccgtggcccagcacgctcccccttggacggaggattgtcggaagtcaacctaccccccaagtggacccacctatcggggtgctgtcccttggtatactattaacttggacctgcccccatacaaacggtggcatgagttaatgcttgacaaggccccagttctgaaagtaatcgtgaactccctgaaaaatatgatcaatacgtttgtgccttccgggaagattatgcaggtggtggacgaaaagctgccgggtctgctagggaactttcctggtccatttgaagaggagatgaaaggaattgctgcagtgactgatatccctctgggcgagataatcagctttaatattttctatgagctgtttacaatctgtacctccatcgtggccgaggacaaaaagggtcacctgatccacggaaggaacatggacttcggcgtctttcttggctggaacatcaacaacgatacgtgggtgattactgaacagctcaaacccctcaccgtgaaccttgattttcaaaggaacaacaaaacagtgtttaaagcgtcttcgttcgccggttatgtcgggatgctgacgggctttaagcctgggcttttcagtttgactttgaatgaaagatttagtataaatggtgggtatttagggatcctcgagtggatcttgggtaagaaagatgtgatgtggattggcttcttgacccgaacagtcctcgagaattccacgtcctatgaggaggccaagaacctgctgactaagacgaagatcctggcaccagcttatttcatcctgggcggaaaccagtccggtgaaggctgtgtcattacaagagatcgcaaggaaagcttggatgtatacgagctcgacgccaagcaggggcgttggtacgtggtgcagaccaattatgaccggtggaaacatccctttttcctggatgatagacgaacaccggctaaaatgtgtttgaaccgtacatcacaagaaaatatttccttcgagacaatgtacgatgtgttaagcacaaagcctgtactcaacaaactcactgtctatacaaccctgattgacgtcacgaagggacaattcgaaacttacttgcgcgactgcccagatccttgcatcggctggtag

SEQ ID NO: 252888 - DNA, 1113 bp, Artificial Sequence
  derived and/or modified sequence
atgcctggtaggagctgtgttgccctggttcttctggctgctgccgtcagctgtgccgtggcccaacatgctcccccttggactgaggattgccgtaagagcacctatcctccctctggtccgacctatcgtggagcagttccctggtacacaatcaatctcgacctgccgccttataaaagatggcacgagctaatgctggataaggccccagtgctcaaagtcatcgtaaatagcttgaagaatatgatcaacacctttgttccatctgggaagataatgcaagtggttgacgagaagctccctgggctgctcggcaacttcccgggaccgtttgaagaggagatgaaggggatcgctgccgtcaccgatatcccactgggtcacctaatccacgggaggaatatggacttcggcgtgtttctcgggtggaacataaataacgacacctgggtgattacggaacagttaaaaccgctcacggtcaacttggacttccagagaaacaacaaaaccgtattcaaggcctcctctttcgccggatatgttggtatgctgactggcttcaaaccgggattgttctcattgacactgaatgagcgcttctcaataaacgggggatacctaggcatactcgagtggatcctcgggaaaaaagatgtcatgtggattgggtttctgacacggactgttctggaaaattcaaccagctacgaagaggcaaaaaacctcctgaccaagacgaagatactagctcccgcttactttatactgggtggcaaccagtcaggggagggctgtgtgattacccgcgatagaaaggaatctctggacgtctacgaattggatgccaaacaagggaggtggtatgtcgtacagacgaactacgatagatggaagcaccctttcttcctcgatgaccgcagaacacctgcaaagatgtgcttgaatcgaacctctcaggaaaatatttccttcgagaccatgtatgatgttctgtctaccaaaccagtcctcaacaagttaacggtatacacgaccctcatagacgtgacaaaggggcagtttgaaacctacctaagggactgtccagacccctgcatcggttggtag

SEQ ID NO: 252889 - DNA, 2609 bp, Artificial Sequence
  derived and/or modified sequence
ggctcggtccgactattgcccgcggtgggggagggggatggatcacgccacgcgccaaaggcgatcgcgactctccttctgcaggtagcctggaaggctctctctctttctctacgccacccttttcgtggcactgaaaagccccgtcctctcctcccagtcccgcctcctccgagcgttccccctactgcctggaatggtgcggtcccaggtcgcgggtcacgcggcggagggggcgtggcctgcccccggcccagccggctcttctttgcctctgctggagtccggggagtggcgttggctgctagagcgatgccgggccggagttgcgtcgccttagtcctcctggctgccgccgtcagctgtgccgtcgcgcagcacgcgccgccgtggacagaggactgcagaaaatcaacctatcctccttcaggaccaacgtacagaggtgcagttccatggtacaccataaatcttgacttaccaccctacaaaagatggcatgaattgatgcttgacaaggcaccagtgctaaaggttatagtgaattctctgaagaatatgataaatacattcgtgccaagtggaaaaattatgcaggtggtggatgaaaaattgcctggcctacttggcaactttcctggcccttttgaagaggaaatgaagggtattgccgctgttactgatatacctttaggagagattatttcattcaatattttttatgaattatttaccatttgtacttcaatagtagcagaagacaaaaaaggtcatctaatacatgggagaaacatggattttggagtatttcttgggtggaacataaataatgatacctgggtcataactgagcaactaaaacctttaacagtgaatttggatttccaaagaaacaacaaaactgtcttcaaggcttcaagctttgctggctatgtgggcatgttaacaggattcaaaccaggactgttcagtcttacactgaatgaacgtttcagtataaatggtggttatctgggtattctagaatggattctgggaaagaaagatgtcatgtggatagggttcctcactagaacagttctggaaaatagcacaagttatgaagaagccaagaatttattgaccaagaccaagatattggccccagcctactttatcctgggaggcaaccagtctggggaaggttgtgtgattacacgagacagaaaggaatcattggatgtatatgaactcgatgctaagcagggtagatggtatgtggtacaaacaaattatgaccgttggaaacatcccttcttccttgatgatcgcagaacgcctgcaaagatgtgtctgaaccgcaccagccaagagaatatctcatttgaaaccatgtatgatgtcctgtcaacaaaacctgtcctcaacaagctgaccgtatacacaaccttgatagatgttaccaaaggtcaattcgaaacttacctgcgggactgccctgacccttgtataggttggtgagcacacgtctggcctacagaatgcggcctctgagacatgaagacaccatctccatgtgaccgaacactgcagctgtctgaccttccaaagactaagactcgcggcaggttctctttgagtcaatagcttgtcttcgtccatctgttgacaaatgacagatcttttttttttccccctatcagttgatttttcttatttacagataacttctttaggggaagtaaaacagtcatctagaattcactgagttttgtttcactttgacatttggggatctggtgggcagtcgaaccatggtgaactccacctccgtggaataaatggagattcagcgtgggtgttgaatccagcacgtctgtgtgagtaacgggacagtaaacactccacattcttcagtttttcacttctacctacatatttgtatgtttttctgtataacagccttttccttctggttctaactgctgttaaaattaatatatcattatctttgctgttattgacagcgatataattttattacatatgattagagggatgagacagacattcacctgtatatttcttttaatgggcacaaaatgggcccttgcctctaaatagcactttttggggttcaagaagtaatcagtatgcaaagcaatcttttatacaataattgaagtgttccctttttcataattactctacttcccagtaaccctaaggaagttgctaacttaaaaaactgcatcccacgttctgttaatttagtaaataaacaagtcaaagacttgtggaaaataggaagtgaacccatattttaaattctcataagtagcattcatgtaataaacaggtttttagtttgttcttcagattgatagggagttttaaagaaattttagtagttactaaaattatgttactgtatttttcagaaatcaaactgcttatgaaaagtactaatagaacttgttaacctttctaaccttcacgattaactgtgaaatgtacgtcatttgtgcaagaccgtttgtccacttcattttgtataatcacagttgtgttcctgacactcaataaacagtcactggaaagagtgccagtcagcagtcatgcacgctgat

SEQ ID NO: 252890 - DNA, 2231 bp, Artificial Sequence
  derived and/or modified sequence
gctggagtccggggagtggcgttggctgctagagcgatgccgggccggagttgcgtcgccttagtcctcctggctgccgccgtcagctgtgccgtcgcgcagcacgcgccgccgtggacagaggactgcagaaaatcaacctatcctccttcaggaccaacgtacagaggtgcagttccatggtacaccataaatcttgacttaccaccctacaaaagatggcatgaattgatgcttgacaaggcaccagtgctaaaggttatagtgaattctctgaagaatatgataaatacattcgtgccaagtggaaaaattatgcaggtggtggatgaaaaattgcctggcctacttggcaactttcctggcccttttgaagaggaaatgaagggtattgccgctgttactgatatacctttaggtcatctaatacatgggagaaacatggattttggagtatttcttgggtggaacataaataatgatacctgggtcataactgagcaactaaaacctttaacagtgaatttggatttccaaagaaacaacaaaactgtcttcaaggcttcaagctttgctggctatgtgggcatgttaacaggattcaaaccaggactgttcagtcttacactgaatgaacgtttcagtataaatggtggttatctgggtattctagaatggattctgggaaagaaagatgtcatgtggatagggttcctcactagaacagttctggaaaatagcacaagttatgaagaagccaagaatttattgaccaagaccaagatattggccccagcctactttatcctgggaggcaaccagtctggggaaggttgtgtgattacacgagacagaaaggaatcattggatgtatatgaactcgatgctaagcagggtagatggtatgtggtacaaacaaattatgaccgttggaaacatcccttcttccttgatgatcgcagaacgcctgcaaagatgtgtctgaaccgcaccagccaagagaatatctcatttgaaaccatgtatgatgtcctgtcaacaaaacctgtcctcaacaagctgaccgtatacacaaccttgatagatgttaccaaaggtcaattcgaaacttacctgcgggactgccctgacccttgtataggttggtgagcacacgtctggcctacagaatgcggcctctgagacatgaagacaccatctccatgtgaccgaacactgcagctgtctgaccttccaaagactaagactcgcggcaggttctctttgagtcaatagcttgtcttcgtccatctgttgacaaatgacagatcttttttttttccccctatcagttgatttttcttatttacagataacttctttaggggaagtaaaacagtcatctagaattcactgagttttgtttcactttgacatttggggatctggtgggcagtcgaaccatggtgaactccacctccgtggaataaatggagattcagcgtgggtgttgaatccagcacgtctgtgtgagtaacgggacagtaaacactccacattcttcagtttttcacttctacctacatatttgtatgtttttctgtataacagccttttccttctggttctaactgctgttaaaattaatatatcattatctttgctgttattgacagcgatataattttattacatatgattagagggatgagacagacattcacctgtatatttcttttaatgggcacaaaatgggcccttgcctctaaatagcactttttggggttcaagaagtaatcagtatgcaaagcaatcttttatacaataattgaagtgttccctttttcataattactctacttcccagtaaccctaaggaagttgctaacttaaaaaactgcatcccacgttctgttaatttagtaaataaacaagtcaaagacttgtggaaaataggaagtgaacccatattttaaattctcataagtagcattcatgtaataaacaggtttttagtttgttcttcagattgatagggagttttaaagaaattttagtagttactaaaattatgttactgtatttttcagaaatcaaactgcttatgaaaagtactaatagaacttgttaacctttctaaccttcacgattaactgtgaaatgtacgtcatttgtgcaagaccgtttgtccacttcattttgtataatcacagttgtgttcctgacactcaataaacagtcactggaaagag

SEQ ID NO: 252891 - DNA, 2507 bp, Artificial Sequence
  derived and/or modified sequence
ggctcggtccgactattgcccgcggtgggggagggggatggatcacgccacgcgccaaaggcgatcgcgactctccttctgcaggtagcctggaaggctctctctctttctctacgccacccttttcgtggcactgaaaagccccgtcctctcctcccagtcccgcctcctccgagcgttccccctactgcctggaatggtgcggtcccaggtcgcgggtcacgcggcggagggggcgtggcctgcccccggcccagccggctcttctttgcctctgctggagtccggggagtggcgttggctgctagagcgatgccgggccggagttgcgtcgccttagtcctcctggctgccgccgtcagctgtgccgtcgcgcagcacgcgccgccgtggacagaggactgcagaaaatcaacctatcctccttcaggaccaacgtacagaggtgcagttccatggtacaccataaatcttgacttaccaccctacaaaagatggcatgaattgatgcttgacaaggcaccagtgctaaaggttatagtgaattctctgaagaatatgataaatacattcgtgccaagtggaaaaattatgcaggtggtggatgaaaaattgcctggcctacttggcaactttcctggcccttttgaagaggaaatgaagggtattgccgctgttactgatatacctttaggtcatctaatacatgggagaaacatggattttggagtatttcttgggtggaacataaataatgatacctgggtcataactgagcaactaaaacctttaacagtgaatttggatttccaaagaaacaacaaaactgtcttcaaggcttcaagctttgctggctatgtgggcatgttaacaggattcaaaccaggactgttcagtcttacactgaatgaacgtttcagtataaatggtggttatctgggtattctagaatggattctgggaaagaaagatgtcatgtggatagggttcctcactagaacagttctggaaaatagcacaagttatgaagaagccaagaatttattgaccaagaccaagatattggccccagcctactttatcctgggaggcaaccagtctggggaaggttgtgtgattacacgagacagaaaggaatcattggatgtatatgaactcgatgctaagcagggtagatggtatgtggtacaaacaaattatgaccgttggaaacatcccttcttccttgatgatcgcagaacgcctgcaaagatgtgtctgaaccgcaccagccaagagaatatctcatttgaaaccatgtatgatgtcctgtcaacaaaacctgtcctcaacaagctgaccgtatacacaaccttgatagatgttaccaaaggtcaattcgaaacttacctgcgggactgccctgacccttgtataggttggtgagcacacgtctggcctacagaatgcggcctctgagacatgaagacaccatctccatgtgaccgaacactgcagctgtctgaccttccaaagactaagactcgcggcaggttctctttgagtcaatagcttgtcttcgtccatctgttgacaaatgacagatcttttttttttccccctatcagttgatttttcttatttacagataacttctttaggggaagtaaaacagtcatctagaattcactgagttttgtttcactttgacatttggggatctggtgggcagtcgaaccatggtgaactccacctccgtggaataaatggagattcagcgtgggtgttgaatccagcacgtctgtgtgagtaacgggacagtaaacactccacattcttcagtttttcacttctacctacatatttgtatgtttttctgtataacagccttttccttctggttctaactgctgttaaaattaatatatcattatctttgctgttattgacagcgatataattttattacatatgattagagggatgagacagacattcacctgtatatttcttttaatgggcacaaaatgggcccttgcctctaaatagcactttttggggttcaagaagtaatcagtatgcaaagcaatcttttatacaataattgaagtgttccctttttcataattactctacttcccagtaaccctaaggaagttgctaacttaaaaaactgcatcccacgttctgttaatttagtaaataaacaagtcaaagacttgtggaaaataggaagtgaacccatattttaaattctcataagtagcattcatgtaataaacaggtttttagtttgttcttcagattgatagggagttttaaagaaattttagtagttactaaaattatgttactgtatttttcagaaatcaaactgcttatgaaaagtactaatagaacttgttaacctttctaaccttcacgattaactgtgaaatgtacgtcatttgtgcaagaccgtttgtccacttcattttgtataatcacagttgtgttcctgacactcaataaacagtcactggaaagag

SEQ ID NO: 252892 - protein, 39 aa, Artificial Sequence
  derived and/or modified sequence
AGRGKQGGKVRAKAKTRSSRAGLQFPVGRVHRLLRKGNY

SEQ ID NO: 252893 - protein, 19 aa, Artificial Sequence
  derived and/or modified sequence
KGRGKQGGKVRAKAKTRSS

SEQ ID NO: 252894 - protein, 151 aa, Artificial Sequence
  derived and/or modified sequence
MSGRGKQGGKVRAKAKSRSSRAGLQFPVGRVHRLLRKGNYAERVGAGAPVYLAAVLEYLTAEILELAGNAARDNKKTRIIPRHLQLAIRNDEELNKLLGKVTIAQGGVLPNIQAVLLPICEHSGPSSGKIPSDRAELGAGSVCGHIFQKVE

SEQ ID NO: 252895 - protein, 129 aa, Artificial Sequence
  derived and/or modified sequence
MSGRGKQGGKVRAKAKSRSSRAGLQFPVGRVHRLLRKGNYAERVGAGAPVYLAAVLEYLTAEILELAGNAARDNKKTRIIPRHLQLAIRNDEELNKLLGKVTIAQGGVLPNIQAVLLPKKTESQKTKSK

SEQ ID NO: 252896 - DNA, 390 bp, Artificial Sequence
  derived and/or modified sequence
atgtctggacgtggcaaacaaggtggtaaggtgcgcgccaaagctaagtcccgctcatctcgcgccggcttacaatttccagtgggacgcgtgcaccgcttgctccgtaaaggcaattacgctgaaagagtcggagcaggagctcccgtgtatttggccgccgtacttgagtatctcaccgccgaaatcctggagctggctggcaatgctgctagggacaataagaagacccgtatcatccctcgccacctgcaactagctattcggaatgacgaggagctcaacaagctgcttggcaaggtgaccatcgctcagggcggggtgctgcctaacattcaggctgttttattgccaaagaaaaccgagagccagaagacaaagtctaagtag

SEQ ID NO: 252897 - DNA, 390 bp, Artificial Sequence
  derived and/or modified sequence
atgtctggaagggggaagcagggaggaaaggttagggctaaggccaagtcaagatctagtcgagccggactgcaatttcctgtgggacgggtgcacagactccttcggaaaggtaactatgctgagcgggtcggggctggagccccagtatacctggctgccgtgctggagtaccttacagccgaaattctggaacttgcgggtaacgcagccagagacaataagaagactcgcatcatcccccgccatctgcagctggcgatcagaaacgacgaggagttaaacaaactgcttgggaaagtcacgatcgctcaaggcggcgtgctcccaaatatccaggccgtccttctgccgaaaaagactgaatcccagaaaactaagtccaagtag

SEQ ID NO: 252898 - DNA, 390 bp, Artificial Sequence
  derived and/or modified sequence
atgagcggccggggcaagcagggcggcaaggtgcgggccaaggccaagagccgcagcagccgggccggcctgcagtttcctgtgggccgggtgcaccggctgctgaggaaaggaaattatgcagagcgggtgggcgctggggcccctgtgtacctggccgctgtgctggagtacctgacagctgagatcctggagctggccggaaatgctgcccgggacaacaagaagacccgcatcatccccaggcacctgcagctggccatcagaaatgatgaggagctgaacaagctgctgggcaaggtgaccatcgcccagggcggcgtgctgcccaacatccaggccgtgctgctgcccaagaagacagagagccagaagaccaagagcaagtag

SEQ ID NO: 252899 - DNA, 390 bp, Artificial Sequence
  derived and/or modified sequence
atgagcggccggggcaagcagggcggcaaggtgcgggccaaggccaagtctcgctcgagtagagccggactccagttcccggtcggaagagtgcatcgactccttaggaagggaaactacgccgaacgcgtgggggcaggggcaccggtgtatctcgccgccgttctggaatatttaacagctgagatcctggagctcgcggggaacgccgccagggataataagaagacccggataatccccaggcacctgcagctcgccattaggaacgacgaagaacttaataagctgctgggcaaggtgaccattgcacagggaggggtccttccaaacatccaggctgttctgttgcctaagaaaaccgagagtcagaagactaaatcgaagtag

SEQ ID NO: 252900 - DNA, 390 bp, Artificial Sequence
  derived and/or modified sequence
atgagcggccggggcaagcagggcggcaaggtgcgggccaaggccaaaagccgcagttcaagagcaggactccagttcccggttggacgagtgcatcgtctgttaagaaagggcaattatgccgagcgggtcggtgcaggcgccccagtgtatctggctgccgtgctcgagtacttgacagcggaaattctggagcttgccggaaatgccgcccgagacaataaaaagacacgaatcattcctcgccacctccagcttgctatcaggaacgatgaagagcttaacaagctcctgggtaaagtcaccattgcacaaggaggtgtgctgccaaatatccaggctgttctgctgccaaaaaaaacagaaagccagaaaaccaaatcaaaatag

SEQ ID NO: 252901 - DNA, 390 bp, Artificial Sequence
  derived and/or modified sequence
atgagcggccgaggcaagcagggaggtaaagtgagggccaaagcgaaaagtagaagctcgagagccggactacagttccctgtcggaagagtgcaccgactgctgcgaaagggaaattacgcagagcgcgtgggcgcaggtgccccagtgtatttagcagctgtgttggagtacctgaccgccgaaattctggagttggctggcaacgctgctagagacaacaaaaaaaccagaattatccctcgtcatcttcagcttgcaatcaggaatgatgaagagcttaacaaactgctggggaaggtgacgattgctcaaggaggcgtgctgcccaacattcaagctgtgctgctccccaaaaagactgaaagtcaaaaaactaagtccaagtag

SEQ ID NO: 252902 - DNA, 390 bp, Artificial Sequence
  derived and/or modified sequence
atgtccgggcgagggaaacagggaggcaaggttagagccaaagctaaatctagatcttcacgcgctgggttgcagttcccagttgggagagtacatcgacttctgcgcaaaggtaactatgcggagcgtgttggagccggagctcctgtttacctggccgctgtactggaatacttgactgctgagattcttgaactggcaggcaacgccgctcgcgacaataagaagacgagaataattccccgacaccttcagcttgctatccgcaacgatgaagagctcaacaagctgctaggaaaagtgactatcgcacagggaggagtgttgcctaatattcaggctgtactgctgccaaaaaagacagagtcccagaaaacaaagagcaaatag

SEQ ID NO: 252903 - DNA, 390 bp, Artificial Sequence
  derived and/or modified sequence
atgagcggcagaggcaagcagggcggcaaggtgagagccaaggccaagagcagaagcagcagagccggcctgcagttccccgtgggcagagtgcacagactgctgagaaagggcaactacgccgagagagtgggcgccggcgcccccgtgtacctggccgccgtgctggagtacctgaccgccgagatcctggagctggccggcaacgccgccagagacaacaagaagaccagaatcatccccagacacctgcagctggccatcagaaacgacgaggagctgaacaagctgctgggcaaggtgaccatcgcccagggcggcgtgctgcccaacatccaggccgtgctgctgcccaagaagaccgagagccagaagaccaagagcaagtag

SEQ ID NO: 252904 - DNA, 456 bp, Artificial Sequence
  derived and/or modified sequence
atgtccggtcgcgggaaacagggcggcaaagtgcgagcaaaggccaaatcccgctcctcccgcgcgggcctgcagttcccggtgggccgagtgcacagactgctgcgcaaagggaactacgcggagcgagtgggcgccggggcgccggtgtacctggcggcggtgttggagtaccttacggcggagatcctggagctggctggcaacgccgcgcgtgacaacaagaagaccaggataattccccgccacctgcagctcgccatccgcaacgacgaggagttaaacaagctgctgggcaaagtgaccatcgctcagggcggcgtcctgcccaacatccaggccgtgctgctgcccatttgtgagcactcaggaccaagttctgggaagataccgtcggatcgagctgagctcggggcaggaagtgtctgcggccatatttttcaaaaagtggagtaa

SEQ ID NO: 252905 - DNA, 785 bp, Artificial Sequence
  derived and/or modified sequence
gacgccgagagcggtttgtctccgtctctggagttgtaggcgagaggtgatcatgtccggtcgcgggaaacagggcggcaaagtgcgagcaaaggccaaatcccgctcctcccgcgcgggcctgcagttcccggtgggccgagtgcacagactgctgcgcaaagggaactacgcggagcgagtgggcgccggggcgccggtgtacctggcggcggtgttggagtaccttacggcggagatcctggagctggctggcaacgccgcgcgtgacaacaagaagaccaggataattccccgccacctgcagctcgccatccgcaacgacgaggagttaaacaagctgctgggcaaagtgaccatcgctcagggcggcgtcctgcccaacatccaggccgtgctgctgcccaagaagacggagagtcagaagacgaagagcaaatgaccctgacgccgccctcagggagctggctcccccagcaaaggcccttttcatgagccttcgctctcctgccagtttgtgagcactcaggaccaagttctgggaagataccgtcggatcgagctgagctcggggcaggaagtgtctgcggccatatttttcaaaaagtggagtaactttccgtcttggaagggtggctctgatggcacgatgtcaacttgagattcttcctagcctagtagctgctgtgctttcatgctttggatatcagatatctttatatagcacttttatgttcatattttttttttaatgaaggaaacgttcaataagtgagtcatgaggt

SEQ ID NO: 252906 - DNA, 3665 bp, Artificial Sequence
  derived and/or modified sequence
agagccaatggaaaggggctgccgcgcggccgtaaagagtttgtagaggcagttcgggtgcggtacgttgcattccggtaccggacgccgagagcggtttgtctccgtctctggagttgtaggcgagaggtgatcatgtccggtcgcgggaaacagggcggcaaagtgcgagcaaaggccaaatcccgctcctcccgcgcgggcctgcagttcccggtgggccgagtgcacagactgctgcgcaaagggaactacgcggagcgagtgggcgccggggcgccggtgtacctggcggcggtgttggagtaccttacggcggagatcctggagctggctggcaacgccgcgcgtgacaacaagaagaccaggataattccccgccacctgcagctcgccatccgcaacgacgaggagttaaacaagctgctgggcaaagtgaccatcgctcagggcggcgtcctgcccaacatccaggccgtgctgctgcccaagaagacggagagtcagaagacgaagagcaaatgaccctgacgccgccctcagggagctggctcccccagcaaaggcccttttcatggtcgtcccgcaatgcttttgaatgtgctggatgtcatggagggccggtgacatctagcggggaggtgggcggcgagggtcccggcgggagccaataaagttggtgaaaatcgtttggtcgagagagctgtgtagtcgcggggacatgtcggatggccccaggggaggggggcgaccgggaaacccctggagcaggcactggtgggtgggcttgagccactctggacggctttagtccgcaggtcaccctcgaggcgtcaggggagggtggcctggaggtgggcagggtggaagccacctcgctgtcagtagggcaaaggggaggcagagtcggtgcggtgaggcctccttcggaattatttttacttccctttcacagagccttcgctctcctgccagtttgtgagcactcaggaccaagttctgggaagataccgtcggatcgagctgagctcggggcaggaagtgtctgcggccatatttttcaaaaagtggagtaactttccgtcttggaagggtggctctgatggcacgatgtcaacttgagattcttcctagcctagtagctgctgtgctttcatgctttggatatcagatatctttatatagcacttttatgttcatattttttttttaatgaaggaaacgttcaataagtgagtcatgaggttggaaattcgttcccctgacagtcatattgcataacattgcagcgcctttagtcgtgggttacatatgcttgagcttttaaagtgatgttgtcaagtttctagcttcataatgatcctgtcttcatcatatcatattcactttgagaatcggtttgactttgctttcaaacaaaacaaaaacctcttgcttttaggggttcttacccaacaaataacctgtttgaactctcttatattctcccactagcctgaagcaatgacctcattccagtaatgtctttgggagttgcattgcctaatggcacaatattgctttaataaacatgtaaggaaagataggaccaaatatgtaagtgcagggggaaacacatttcagaccaggaatccacattgaaaagttaacactagtaatcatcttctgcccttaattgacactcctatttatttcatcctcagcaaatttcatcctggctcacagaccccacaaaaaagatcccagtacagatttcacatctttggattcatctttcctgtgagtcggaattgaagtcttccccaaaaatatatgtatatattgtatgtcttcatccttggtagcggctggcccattttcccacatggactttattttgtccccagtatttattgaacagctgtctatgccaggctctgtacaaagtgataggagtagagctgtgaatgaggccaaccagatttccactctctcggagctcactttatttttattggttcctgaagacgggacaaggaacaaatacatacgttaatatgagagatcagcttctgttagtacttgtacctctctgctgtgtgtggatgaatgatggaattacttctcccatgttgccatttttgaggtgtacaaaggtcaggccgtacacacctctgttaggaggcaaattattgggcaggttcgagatgttctgctatttactctgtggttttgtcatatgtaaaagtcataacacctgttttaaggattgagattgttcatttactgtgtgccacatattagacaataaatggaaaaaagtaccatgttcaatgggggtatgggtttatccttataggttaaattataggtaaacattaataggactttttaaaaaatgcctcattgttagaactactactcacagttaccacttggggtcagtggaacaaaatgcatatatggttttgacatttgagtctaaatttcttaaagggatgaggcatctgagggattgttaccaaaatgatgaagaaataaggacaagggacatcaagacattcataagaaaaagcacctttgccttcccctgggaagattcacaggaatctgtccagctcttattacatgatgagcaacatagacaagatacgaggcattgtaactgccctgtcgccacccgcctctcccaccactacccaaaggattcttagcatcccctcacatactctgcctgcctcaacgttcagtcagcccctcaccatttttgtttttgagagttttttttttaacccgaatagtttacgggctgtttaaaatgcatactcctacaaaatcagctcagcccatgatccatgatgaacaaacagtagttcttgctgatgtgtgattatgaatttaaaaggccagtatttctttaagcataagaccatatggaaaaaggcctaagacaaaatctgatgggaactgaattccagtttttaatagagttataatccatagttttatttacacacaaacacacacacacacactctttcctgcagagataagcaagccgttcagtgtggctgtggcttggccaggatttgtttgatctttgtttttcctgcagggccagtcttgtctttgtgtccccgaggactggtctgtttagttgtgcctgcctggaatcaaaaggcttagtcaggccccataattggtgatgactggcatactatatgcaaacttcacaatgccccttccagtggttgaaaggtcgcataccatgctgtgtaagaactttagctctctgcaatgagacttaaattcagattcactctactccttattagttatctgatttttggaaacttaatctctttaaacctcagtttcatctctaaaatgggcataatagtttacctcatagagtttggggagaattgagtgaattaatgtgtgtgaggacactaagattcccatatagaaataggctcaatgaatagtagctgtttttatttctatgtaaagtgagtagcggtagttgatgggagctgttgaaacaggtaaacagcattctagcaatccttcgacttttgtgatagcaaaccataaaaacaattttagtggctgttttactaattaaaggacatccacaattcaatgtataacagaaaaagtaatgattaaagcttgtgaatctg

SEQ ID NO: 252907 - DNA, 456 bp, Artificial Sequence
  derived and/or modified sequence
atgtctggcagaggcaagcagggagggaaggtcagagctaaggccaaaagccggagcagtcgggccggcttacaattccctgtcggtcgggtgcaccgcctgcttcggaagggcaattacgctgagcgagtgggagcaggcgccccagtttatctcgcagctgtcttggagtatctcacagccgagattctggaattggcgggaaatgccgccagagacaacaaaaaaaccaggatcattccaagacacctgcagttggccataaggaacgacgaggagctgaataaacttctggggaaggtgacgattgcccagggtggcgtgctaccaaacattcaagcggtgctactcccaatttgcgagcacagtgggccaagctccggaaaaatcccttcagatcgcgccgaattaggtgcaggtagcgtctgcggtcacatcttccaaaaagtcgaatag

SEQ ID NO: 252908 - DNA, 456 bp, Artificial Sequence
  derived and/or modified sequence
atgagcggccggggcaagcagggcggcaaggtgcgggccaaggccaagagccgcagcagccgggccggcctgcagtttcctgtgggccgggtgcaccggctgctgaggaaaggaaattatgcagagcgggtgggcgctggggcccctgtgtacctggccgctgtgctggagtacctgacagctgagatcctggagctggccggaaatgctgcccgggacaacaagaagacccgcatcatccccaggcacctgcagctggccatcagaaatgatgaggagctgaacaagctgctgggcaaggtgaccatcgcccagggcggcgtgctgcccaacatccaggccgtgctgctgcccatctgtgagcacagcggccccagcagcggcaagatccccagcgacagagctgagctgggcgccggctctgtgtgtggccacatcttccagaaggtggagtag

SEQ ID NO: 252909 - DNA, 456 bp, Artificial Sequence
  derived and/or modified sequence
atgagcggccggggcaagcagggcggcaaggtgcgggccaaggccaaatctcgctcaagccgcgcgggactgcagtttccagtggggcgggtgcaccgcttactgcgaaaaggcaattatgccgaaagggtcggcgcgggtgcgcccgtctacctcgcagcagttctggagtatctgacagctgaaatcctggagctggccggcaatgcggctcgcgacaataaaaaaaccagaattatcccccggcatctgcaactggctatcagaaacgacgaggagctgaacaaactgctgggcaaagtaaccatcgcccagggcggagtcctgcctaatattcaggctgtgttactgccgatatgtgagcattccggaccatcctccggcaaaattccgtctgatcgggcagagttaggtgccggctcggtgtgcggtcacatttttcagaaggtcgagtag

SEQ ID NO: 252910 - DNA, 456 bp, Artificial Sequence
  derived and/or modified sequence
atgagtggacggggaaagcagggtggcaaagttagagctaaagccaagagccgctcaagccgcgctggactgcaattccccgttggcagggtccatcgacttttacgtaagggaaattacgccgaaagggtcggcgcaggcgctcccgtctatctggcggctgtgttggagtatctgaccgcagagattttggaactggctgggaacgccgctcgggacaacaaaaaaactcgcatcatacctcggcatcttcaacttgctatccggaatgacgaggagctcaacaagctgctcggaaaggtcactattgcccagggaggggtcctcccaaacatacaggcagttcttttaccaatatgtgagcactcggggccaagttctgggaagatccccagcgatcgcgctgagctgggggctggctctgtgtgtgggcatatatttcaaaaggtggagtag

SEQ ID NO: 252911 - DNA, 456 bp, Artificial Sequence
  derived and/or modified sequence
atgagcggcagaggcaagcagggcggcaaggtgagagccaaggccaagagcagaagcagcagagccggcctgcagttccccgtgggcagagtgcacagactgctgagaaagggcaactacgccgagagagtgggcgccggcgcccccgtgtacctggccgccgtgctggagtacctgaccgccgagatcctggagctggccggcaacgccgccagagacaacaagaagaccagaatcatccccagacacctgcagctggccatcagaaacgacgaggagctgaacaagctgctgggcaaggtgaccatcgcccagggcggcgtgctgcccaacatccaggccgtgctgctgcccatctgcgagcacagcggccccagcagcggcaagatccccagcgacagagccgagctgggcgccggcagcgtgtgcggccacatcttccagaaggtggagtag

SEQ ID NO: 252912 - protein, 401 aa, Artificial Sequence
  derived and/or modified sequence
MMGLGNGRRSMKSPPLVLAALVACIIVLGFNYWIASSRSVDLQTRIMELEGRVRRAAAERGAVELKKNEFQGELEKQREQLDKIQSSHNFQLESVNKLYQDEKAVLVNNITTGERLIRVLQDQLKTLQRNYGRLQQDVLQFQKNQTNLERKFSYDLSQCINQMKEVKEQCEERIEEVTKKGNEAVASRDLSENNDQRQQLQALSEPQPRLQAAGLPHTEVPQGKGNVLGNSKSQTPAPSSEVVLDSKRQVEKEETNEIQVVNEEPQRDRLPQEPGREQVVEDRPVGGRGFGGAGELGQTPQVQAALSVSQENPEMEGPERDQLVIPDGQEEEQEAAGEGRNQQKLRGEDDYNMDENEAESETDKQAALAGNDRNIDVFNVEDQKRDTINLLDQREKRNHTL

SEQ ID NO: 252913 - protein, 80 aa, Artificial Sequence
  derived and/or modified sequence
MMGLGNGRRSMKSPPLVLAALVACIIVLGFNYWIASSRSVDLQTRIMELEGRVRRAAAERGAVELKKNEFQGELEKQREQ

SEQ ID NO: 252914 - protein, 121 aa, Artificial Sequence
  derived and/or modified sequence
MMGLGNGRRSMKSPPLVLAALVACIIVLGFNYWIASSRSVDLQTRIMELEGRVRRAAAERGAVELKKNEFQGELEKQREQLDKIQSSHNFQLESVNKLYQDEKAVLVNNITTGERLIRVLQ

SEQ ID NO: 252915 - DNA, 1206 bp, Artificial Sequence
  derived and/or modified sequence
atgatgggcctgggcaacggcagaagaagcatgaagagcccccccctggtgctggccgccctggtggcctgcatcatcgtgctgggcttcaactactggatcgccagcagcagaagcgtggacctgcagaccagaatcatggagctggagggcagagtgagaagagccgccgccgagagaggcgccgtggagctgaagaagaacgagttccagggcgagctggagaagcagagagagcagctggacaagatccagagcagccacaacttccagctggagagcgtgaacaagctgtaccaggacgagaaggccgtgctggtgaacaacatcaccaccggcgagagactgatcagagtgctgcaggaccagctgaagaccctgcagagaaactacggcagactgcagcaggacgtgctgcagttccagaagaaccagaccaacctggagagaaagttcagctacgacctgagccagtgcatcaaccagatgaaggaggtgaaggagcagtgcgaggagagaatcgaggaggtgaccaagaagggcaacgaggccgtggccagcagagacctgagcgagaacaacgaccagagacagcagctgcaggccctgagcgagccccagcccagactgcaggccgccggcctgccccacaccgaggtgccccagggcaagggcaacgtgctgggcaacagcaagagccagacccccgcccccagcagcgaggtggtgctggacagcaagagacaggtggagaaggaggagaccaacgagatccaggtggtgaacgaggagccccagagagacagactgccccaggagcccggcagagagcaggtggtggaggacagacccgtgggcggcagaggcttcggcggcgccggcgagctgggccagaccccccaggtgcaggccgccctgagcgtgagccaggagaaccccgagatggagggccccgagagagaccagctggtgatccccgacggccaggaggaggagcaggaggccgccggcgagggcagaaaccagcagaagctgagaggcgaggacgactacaacatggacgagaacgaggccgagagcgagaccgacaagcaggccgccctggccggcaacgacagaaacatcgacgtgttcaacgtggaggaccagaagagagacaccatcaacctgctggaccagagagagaagagaaaccacaccctgtag

SEQ ID NO: 252916 - DNA, 243 bp, Artificial Sequence
  derived and/or modified sequence
atgatgggcctgggcaacggcagaagaagcatgaagagcccccccctggtgctggccgccctggtggcctgcatcatcgtgctgggcttcaactactggatcgccagcagcagaagcgtggacctgcagaccagaatcatggagctggagggcagagtgagaagagccgccgccgagagaggcgccgtggagctgaagaagaacgagttccagggcgagctggagaagcagagagagcagtag

SEQ ID NO: 252917 - DNA, 366 bp, Artificial Sequence
  derived and/or modified sequence
atgatgggcctgggcaacggcagaagaagcatgaagagcccccccctggtgctggccgccctggtggcctgcatcatcgtgctgggcttcaactactggatcgccagcagcagaagcgtggacctgcagaccagaatcatggagctggagggcagagtgagaagagccgccgccgagagaggcgccgtggagctgaagaagaacgagttccagggcgagctggagaagcagagagagcagctggacaagatccagagcagccacaacttccagctggagagcgtgaacaagctgtaccaggacgagaaggccgtgctggtgaacaacatcaccaccggcgagagactgatcagagtgctgcagtag

SEQ ID NO: 252918 - DNA, 1206 bp, Artificial Sequence
  derived and/or modified sequence
atgatgggacttggaaatggtaggcgaagcatgaagagtcctccactcgttctggcggctctagtggcgtgtatcatcgtcctggggttcaactactggattgcaagctcacgaagcgttgatttacaaacgcgtatcatggagttagaggggcgggtgaggagggcagcagctgagcgaggagccgtcgaactgaaaaaaaatgaatttcaaggggaacttgagaaacagcgcgagcagctggataagatccagtccagccataacttccagctagagtcagttaataagctgtaccaggacgagaaagcggtcctcgttaataatataacaacaggcgaaaggctgatcagagtgctgcaggaccaactgaagactcttcagagaaattacggacgattgcaacaggatgtcctccagtttcaaaagaatcagaccaaccttgaacggaagttcagctacgatctcagccagtgtatcaaccagatgaaggaggtaaaggagcagtgcgaggagaggatcgaagaggtgacgaagaaaggtaatgaagctgtagcttccagagacctgtccgagaacaacgaccagaggcaacaactgcaagcgctctcggagccgcagccccggttgcaagctgcagggctgccgcacaccgaggttccccaagggaagggaaacgtgttgggaaacagtaagagccagactccagctccctcctcagaagtcgtgttggacagcaagcggcaagtggaaaaagaggaaacaaatgagatccaggtggtgaacgaggaaccgcagcgcgaccgcctgccccaggagcctgggagggagcaggtggtggaggaccggccagtggggggacgagggttcggaggtgctggtgagctcgggcagacaccccaggtgcaggcagccctgagtgtgagccaggaaaatcctgaaatggagggccctgagagagaccagttagtcatccctgatggtcaagaggaggagcaggaggctgcgggggaagggcggaatcagcagaaattaagaggggaggacgactacaatatggacgagaacgaagccgagagtgagaccgacaagcaggccgcacttgccggtaatgaccgcaatatcgatgttttcaacgtcgaagaccagaaaagggacacaatcaatctgctagaccagcgggagaagcgcaatcacaccctgtag

SEQ ID NO: 252919 - DNA, 1206 bp, Artificial Sequence
  derived and/or modified sequence
atgatgggactgggtaacggtagaaggagtatgaaaagccctccgcttgtgctggctgcgttagtcgcctgcattattgttctcggcttcaactactggattgcttcttccagatctgttgacctccagacgagaattatggagttagaggggcgggttcgcagggctgccgcagagaggggtgccgttgaactaaagaaaaatgagttccagggtgaactggaaaagcagagagagcagctcgacaagattcaatctagccataattttcagcttgaaagtgttaacaagctgtaccaggatgagaaggcagttctggtgaacaacatcacaactggggaacggttaattcgtgtgctgcaggaccagctgaagaccctacagcgcaactatggcagactgcagcaggacgtgttgcagttccagaagaatcagaccaatcttgagagaaaattttcatacgacctctcacagtgtataaatcaaatgaaggaggttaaagaacagtgcgaggagcggatcgaggaggtaactaaaaaggggaatgaggccgtagcatctcgtgatctgtccgagaacaatgaccaacgccagcagctgcaggcactgtctgaaccccagccgcgcctccaggccgccgggcttcctcacactgaagtcccccagggaaaagggaacgtgctggggaactctaaatcccagacaccggccccatcttccgaagtcgtgctagatagtaaacgccaggtagagaaagaagaaactaatgagattcaggtagtgaatgaagaaccacaacgtgacaggttaccacaagagcccggccgcgagcaagtggtggaggataggcccgtcggtggacgtggtttcggtggcgctggagagctcgggcaaaccccacaggttcaggctgcactgtctgtctctcaggaaaatcctgagatggagggtccggaaagagaccagctcgtgatcccggacgggcaggaagaagagcaggaagccgctggcgaagggagaaatcagcagaaactgagaggcgaggacgattacaacatggacgagaatgaagccgagtccgaaactgataaacaggccgctctggcaggcaacgaccgcaacatcgatgtgttcaatgttgaagaccagaagcgtgatacgatcaacctcttagatcagcgagagaagagaaatcacaccctgtag

SEQ ID NO: 252920 - DNA, 243 bp, Artificial Sequence
  derived and/or modified sequence
atgatgggactgggtaacggcagacggtcaatgaaatccccccctcttgtgttagccgctcttgtggcctgcatcattgttctaggcttcaactattggatcgctagcagtcgctccgttgacctgcagacccgaattatggaactcgagggccgcgtcagaagggcggcagccgagagaggagctgtcgaactgaagaagaatgagttccagggcgaactggaaaagcagcgggaacagtag

SEQ ID NO: 252921 - DNA, 366 bp, Artificial Sequence
  derived and/or modified sequence
atgatggggctggggaatggtcgcaggtccatgaagtccccccccctcgtgctcgctgccctagtagcctgtatcatcgttttaggcttcaattattggatcgccagctctcgcagcgtggacctgcagactagaatcatggagctcgagggacgagtccgacgagcagcggccgagcggggggccgtggagttgaaaaaaaacgagtttcagggggagttagagaagcagagggagcagctggacaagatccagtcttctcacaacttccagttggagagtgtcaacaagctgtaccaggacgagaaagcagtgctggttaataatatcaccacgggagaacgcctgataagggtcttacagtag

SEQ ID NO: 252922 - DNA, 3022 bp, Artificial Sequence
  derived and/or modified sequence
atcttcactttttccgttgctagcagtggaagggtcacagaccaaacactaaggcctgagcggtgacaaccgaggcgagatgatggtcaacagggaatgcctcgtgggagaaaaaagacaattttattctcagcgctgattttgagatgatgggcttgggaaacgggcgtcgcagcatgaagtcgccgcccctcgtgctggccgccctggtggcctgcatcatcgtcttgggcttcaactactggattgcgagctcccggagcgtggacctccagacacggatcatggagctggaaggcagggtccgcagggcggctgcagagagaggcgccgtggagctgaagaagaacgagttccagggagagctggagaagcagcgggagcagcttgacaaaatccagtccagccacaacttccagctggagagcgtcaacaagctgtaccaggacgaaaaggcggttttggtgaataacatcaccacaggtgagaggctcatccgagtgctgcaagaccagttaaagaccctgcagaggaattacggcaggctgcagcaggatgtcctccagtttcagaagaaccagaccaacctggagaggaagttctcctacgacctgagccagtgcatcaatcagatgaaggaggtgaaggaacagtgtgaggagcgaatagaagaggtcaccaaaaaggggaatgaagctgtagcttccagagacctgagtgaaaacaacgaccagagacagcagctccaagccctcagtgagcctcagcccaggctgcaggcagcaggcctgccacacacagaggtgccacaagggaagggaaacgtgcttggtaacagcaagtcccagacaccagcccccagttccgaagtggttttggattcaaagagacaagttgagaaagaggaaaccaatgagatccaggtggtgaatgaggagcctcagagggacaggctgccgcaggagccaggccgggagcaggtggtggaagacagacctgtaggtggaagaggcttcgggggagccggagaactgggccagaccccacaggtgcaggctgccctgtcagtgagccaggaaaatccagagatggagggccctgagcgagaccagcttgtcatccccgacggacaggaggaggagcaggaagctgccggggaagggagaaaccagcagaaactgagaggagaagatgactacaacatggatgaaaatgaagcagaatctgagacagacaagcaagcagccctggcagggaatgacagaaacatagatgtttttaatgttgaagatcagaaaagagacaccataaatttacttgatcagcgtgaaaagcggaatcatacactctgaattgaactggaatcacatatttcacaacagggccgaagagatgactataaaatgttcatgagggactgaatactgaaaactgtgaaatgtactaaataaaatgtacatctgaagatgattattgtgaaattttagtatgcactttgtgtaggaaaaaatggaatggtcttttaaacagcttttggggggtactttggaagtgtctaataaggtgtcacaatttttggtagtaggtatttcgtgagaagttcaacaccaaaactggaacatagttctccttcaagtgttggcgacagcggggcttcctgattctggaatataactttgtgtaaattaacagccacctatagaagagtccatctgctgtgaaggagagacagagaactctgggttccgtcgtcctgtccacgtgctgtaccaagtgctggtgccagcctgttacctgttctcactgaaaagtctggctaatgctcttgtgtagtcacttctgattctgacaatcaatcaatcaatggcctagagcactgactgttaacacaaacgtcactagcaaagtagcaacagctttaagtctaaatacaaagctgttctgtgtgagaattttttaaaaggctacttgtataataacccttgtcatttttaatgtacaaaacgctattaagtggcttagaatttgaacatttgtggtctttatttactttgcttcgtgtgtgggcaaagcaacatcttccctaaatatatattaccaagaaaagcaagaagcagattaggtttttgacaaaacaaacaggccaaaagggggctgacctggagcagagcatggtgagaggcaaggcatgagagggcaagtttgttgtggacagatctgtgcctactttattactggagtaaaagaaaacaaagttcattgatgtcgaaggatatatacagtgttagaaattaggactgtttagaaaaacaggaatacaatggttgtttttatcatagtgtacacatttagcttgtggtaaatgactcacaaaactgattttaaaatcaagttaatgtgaattttgaaaattactacttaatcctaattcacaataacaatggcattaaggtttgacttgagttggttcttagtattatttatggtaaataggctcttaccacttgcaaataactggccacatcattaatgactgacttcccagtaaggctctctaaggggtaagtaggaggatccacaggatttgagatgctaaggccccagagatcgtttgatccaaccctcttattttcagaggggaaaatggggcctagaagttacagagcatctagctggtgcgctggcacccctggcctcacacagactcccgagtagctgggactacaggcacacagtcactgaagcaggccctgtttgcaattcacgttgccacctccaacttaaacattcttcatatgtgatgtccttagtcactaaggttaaactttcccacccagaaaaggcaacttagataaaatcttagagtactttcatactcttctaagtcctcttccagcctcactttgagtcctccttggggttgataggaattttctcttgctttctcaataaagtctctattcatctcatgtttaatttgtacgcatagaattgctgagaaataaaatgttctgttcaactt

SEQ ID NO: 252923 - DNA, 3046 bp, Artificial Sequence
  derived and/or modified sequence
ggagacgcggcggcgctggacgcggaggcgctgggcgcacggcgcggagccggccggagctcgaggccggcggcggcgggagagcgacccgggcggcctcgtagcggggccccggatccccgagtggcggccggagcctcgaaaagagattctcagcgctgattttgagatgatgggcttgggaaacgggcgtcgcagcatgaagtcgccgcccctcgtgctggccgccctggtggcctgcatcatcgtcttgggcttcaactactggattgcgagctcccggagcgtggacctccagacacggatcatggagctggaaggcagggtccgcagggcggctgcagagagaggcgccgtggagctgaagaagaacgagttccagggagagctggagaagcagcgggagcagcttgacaaaatccagtccagccacaacttccagctggagagcgtcaacaagctgtaccaggacgaaaaggcggttttggtgaataacatcaccacaggtgagaggctcatccgagtgctgcaagaccagttaaagaccctgcagaggaattacggcaggctgcagcaggatgtcctccagtttcagaagaaccagaccaacctggagaggaagttctcctacgacctgagccagtgcatcaatcagatgaaggaggtgaaggaacagtgtgaggagcgaatagaagaggtcaccaaaaaggggaatgaagctgtagcttccagagacctgagtgaaaacaacgaccagagacagcagctccaagccctcagtgagcctcagcccaggctgcaggcagcaggcctgccacacacagaggtgccacaagggaagggaaacgtgcttggtaacagcaagtcccagacaccagcccccagttccgaagtggttttggattcaaagagacaagttgagaaagaggaaaccaatgagatccaggtggtgaatgaggagcctcagagggacaggctgccgcaggagccaggccgggagcaggtggtggaagacagacctgtaggtggaagaggcttcgggggagccggagaactgggccagaccccacaggtgcaggctgccctgtcagtgagccaggaaaatccagagatggagggccctgagcgagaccagcttgtcatccccgacggacaggaggaggagcaggaagctgccggggaagggagaaaccagcagaaactgagaggagaagatgactacaacatggatgaaaatgaagcagaatctgagacagacaagcaagcagccctggcagggaatgacagaaacatagatgtttttaatgttgaagatcagaaaagagacaccataaatttacttgatcagcgtgaaaagcggaatcatacactctgaattgaactggaatcacatatttcacaacagggccgaagagatgactataaaatgttcatgagggactgaatactgaaaactgtgaaatgtactaaataaaatgtacatctgaagatgattattgtgaaattttagtatgcactttgtgtaggaaaaaatggaatggtcttttaaacagcttttggggggtactttggaagtgtctaataaggtgtcacaatttttggtagtaggtatttcgtgagaagttcaacaccaaaactggaacatagttctccttcaagtgttggcgacagcggggcttcctgattctggaatataactttgtgtaaattaacagccacctatagaagagtccatctgctgtgaaggagagacagagaactctgggttccgtcgtcctgtccacgtgctgtaccaagtgctggtgccagcctgttacctgttctcactgaaaagtctggctaatgctcttgtgtagtcacttctgattctgacaatcaatcaatcaatggcctagagcactgactgttaacacaaacgtcactagcaaagtagcaacagctttaagtctaaatacaaagctgttctgtgtgagaattttttaaaaggctacttgtataataacccttgtcatttttaatgtacaaaacgctattaagtggcttagaatttgaacatttgtggtctttatttactttgcttcgtgtgtgggcaaagcaacatcttccctaaatatatattaccaagaaaagcaagaagcagattaggtttttgacaaaacaaacaggccaaaagggggctgacctggagcagagcatggtgagaggcaaggcatgagagggcaagtttgttgtggacagatctgtgcctactttattactggagtaaaagaaaacaaagttcattgatgtcgaaggatatatacagtgttagaaattaggactgtttagaaaaacaggaatacaatggttgtttttatcatagtgtacacatttagcttgtggtaaatgactcacaaaactgattttaaaatcaagttaatgtgaattttgaaaattactacttaatcctaattcacaataacaatggcattaaggtttgacttgagttggttcttagtattatttatggtaaataggctcttaccacttgcaaataactggccacatcattaatgactgacttcccagtaaggctctctaaggggtaagtaggaggatccacaggatttgagatgctaaggccccagagatcgtttgatccaaccctcttattttcagaggggaaaatggggcctagaagttacagagcatctagctggtgcgctggcacccctggcctcacacagactcccgagtagctgggactacaggcacacagtcactgaagcaggccctgtttgcaattcacgttgccacctccaacttaaacattcttcatatgtgatgtccttagtcactaaggttaaactttcccacccagaaaaggcaacttagataaaatcttagagtactttcatactcttctaagtcctcttccagcctcactttgagtcctccttggggttgataggaattttctcttgctttctcaataaagtctctattcatctcatgtttaatttgtacgcatagaattgctgagaaataaaatgttctgttcaactta

SEQ ID NO: 252924 - DNA, 506 bp, Artificial Sequence
  derived and/or modified sequence
atcttcactttttccgttgctagcagtggaagggtcacagaccaaacactaaggcctgagcggtgacaaccgaggcgagatgatggtcaacagggaatgcctcgtgggagaaaaaagacaattttagtctcactctgttgcccccaggctggagtgcagtggcgcgatctcgactcactgcaacctctgcctcccgggttcaagtgattcttctgcctcagcctcccgagtagctaggactacagattctcagcgctgattttgagatgatgggcttgggaaacgggcgtcgcagcatgaagtcgccgcccctcgtgctggccgccctggtggcctgcatcatcgtcttgggcttcaactactggattgcgagctcccggagcgtggacctccagacacggatcatggagctggaaggcagggtccgcagggcggctgcagagagaggcgccgtggagctgaagaagaacgagttccagggagagctggagaagcagcgggagcag

SEQ ID NO: 252925 - DNA, 869 bp, Artificial Sequence
  derived and/or modified sequence
acagatacggtccctaaagtgagaaatgaatgttcgaaagaaggtgctctcgtttggcatggagtgaatgccttgtttccacctcaaatcctaagatggaacacatttttcctggtgacttcaggcagatggcacacctcccacttccgttgtgtgtcatgaaggaggagacacttctatagccagggctgtgcctgaataatgatgtacatgggggggagttcacattcacctccagaatgggtttcctgctttgcttgagaaatgctttaattgggtgtcattagtaatcctgtcaagggtaaaaaaaacctcccttgttaggaatcaaagcaaaaagctctctctgaggagtaatgaggaatatactctttctaatatgatgcggaagcacttaatatttgttattggtgtttacagaaatgattacttctcaaacattgctgcttacagaaatgattaattctcaaactatgccgggaagattctcagcgctgattttgagatgatgggcttgggaaacgggcgtcgcagcatgaagtcgccgcccctcgtgctggccgccctggtggcctgcatcatcgtcttgggcttcaactactggattgcgagctcccggagcgtggacctccagacacggatcatggagctggaaggcagggtccgcagggcggctgcagagagaggcgccgtggagctgaagaagaacgagttccagggagagctggagaagcagcgggagcagcttgacaaaatccagtccagccacaacttccagctggagagcgtcaacaagctgtaccaggacgaaaaggcggttttggtgaataacatcaccacaggtgagaggctcatccgagtgctgcaag

SEQ ID NO: 252926 - DNA, 1206 bp, Artificial Sequence
  derived and/or modified sequence
atgatgggcctgggcaatggccgccgctccatgaagagcccccccctggtgctggccgccctggtggcctgcatcatcgtgctgggcttcaactactggatcgccagcagccgctctgtggacctgcagacccgcatcatggagctggagggccgggtgcggcgggctgctgctgagagaggagctgtggagctgaagaagaatgagttccagggcgagctggagaagcagcgggagcagctggacaagatccagagcagccacaacttccagctggagagcgtgaacaagctgtaccaggatgagaaggctgtgctggtgaacaacatcaccaccggggagcggctcatccgggtgctgcaggaccagctgaagaccctgcagagaaattatggccgcctgcagcaggatgtgctgcagttccagaagaaccagaccaacctggagaggaagttctcctatgacctgagccagtgcatcaaccagatgaaggaggtgaaggagcagtgtgaggagcgcatcgaggaggtgaccaagaagggaaatgaggccgtggccagccgggacctgtctgagaacaatgaccagaggcagcagctgcaggccctgtctgagccccagccccggctgcaggccgccggcctgccccacacagaggtgccccagggcaaaggaaatgtgctgggcaacagcaagagccagaccccagcccccagcagcgaggtggtgctggacagcaagaggcaggtggagaaggaggagaccaatgagatccaggtggtgaatgaggagccccagagggaccggctgccccaggagcccggccgggagcaggtggtggaggacaggcctgtgggcggccggggctttggaggagctggggagctgggccagaccccccaggtgcaggccgccctgtctgtgtcccaggagaaccctgagatggagggccctgagcgggaccagctggtgatcccagatggccaggaggaggagcaggaggccgccggggagggcaggaaccagcagaagctgcggggggaggatgactacaacatggatgaaaatgaggccgagagcgagacagacaagcaggccgccctggccggaaatgacagaaatattgatgtgttcaacgtggaggaccagaagagggacaccatcaacctgctggaccagcgggagaagaggaaccacaccctgtag

SEQ ID NO: 252927 - DNA, 243 bp, Artificial Sequence
  derived and/or modified sequence
atgatgggcctgggcaatggccgccgctccatgaagagcccccccctggtgctggccgccctggtggcctgcatcatcgtgctgggcttcaactactggatcgccagcagccgctctgtggacctgcagacccgcatcatggagctggagggccgggtgcggcgggctgctgctgagagaggagctgtggagctgaagaagaatgagttccagggcgagctggagaagcagcgggagcagtag

SEQ ID NO: 252928 - DNA, 366 bp, Artificial Sequence
  derived and/or modified sequence
atgatgggcctgggcaatggccgccgctccatgaagagcccccccctggtgctggccgccctggtggcctgcatcatcgtgctgggcttcaactactggatcgccagcagccgctctgtggacctgcagacccgcatcatggagctggagggccgggtgcggcgggctgctgctgagagaggagctgtggagctgaagaagaatgagttccagggcgagctggagaagcagcgggagcagctggacaagatccagagcagccacaacttccagctggagagcgtgaacaagctgtaccaggatgagaaggctgtgctggtgaacaacatcaccaccggggagcggctcatccgggtgctgcagtag

SEQ ID NO: 252929 - DNA, 1206 bp, Artificial Sequence
  derived and/or modified sequence
atgatgggcctgggcaacggccggcggagcatgaagagcccccccctggtgcttgctgcacttgtcgcctgtataatcgtgttaggatttaactattggatagccagctccagaagcgtagatctgcagacgagaattatggagctcgaagggcgggtgcgacgggccgcagctgaaagaggcgccgttgagctgaagaagaatgagttccagggcgaactggagaaacagcgagaacagctcgacaagatccagtccagccacaacttccagcttgaaagcgtgaataagttataccaggacgagaaagcggtacttgtgaacaacatcacgaccggcgagcgactcattagggttctgcaggaccagctgaaaacactccagcggaattacggcagacttcagcaggacgtgctgcagtttcaaaaaaatcagactaatcttgaacggaaattttcctatgatctgtcccagtgcattaatcaaatgaaggaggtgaaagagcaatgtgaagagcggattgaagaggtgacgaagaagggcaacgaggcagttgcctctcgcgacctgagtgaaaacaacgaccagcggcagcagctacaggccctcagtgagcctcagcccaggctgcaagcggcaggactgccgcacactgaagttccccagggcaaggggaacgtgttagggaactccaaaagtcagacaccagctcccagctcagaggtagtgctcgacagcaaaagacaggtggaaaaagaggagaccaatgagatacaggtcgtcaacgaggagcctcaacgagatcggctgcctcaagagccaggaagggagcaggtcgtggaagacaggccagtgggaggtcgggggtttggcggtgctggggaacttggccagacgccccaggtgcaggccgcactgagcgtgtctcaggaaaacccagaaatggaggggcctgaacgtgatcaactggtcatcccagacgggcaggaggaggagcaggaggcagccggcgagggccgaaatcagcagaagcttagaggcgaagatgactacaacatggatgagaatgaggccgagagcgaaaccgacaagcaagcagccctggcaggaaacgataggaacattgatgtgttcaatgtggaggaccagaagcgtgacaccatcaacctcctggatcaacgagaaaagaggaaccatacactgtag

SEQ ID NO: 252930 - DNA, 1206 bp, Artificial Sequence
  derived and/or modified sequence
atgatgggcctgggcaacggccggcggagcatgaagagcccccccctcgtgctcgcagcactagtggcctgcataattgtactgggcttcaactactggattgcgtcctcaaggtccgtggacttacaaacccgcataatggagttggaaggacgagttagaagagctgccgctgaacgcggggcagttgagctgaaaaagaacgaattccagggggaacttgaaaagcagagggaacagttggacaaaattcagtccagccacaacttccaactggagagtgtcaataagctgtaccaggatgagaaggccgtactcgtaaataacatcacgaccggcgagcgcctgatacgggtactccaagaccagttgaaaacgctgcagagaaactatgggcgcctgcagcaagatgtgctgcaatttcagaagaaccagaccaacctggaacgaaagttttcttatgacctaagccagtgcatcaaccagatgaaagaagtgaaagagcaatgtgaagaacggatcgaggaggtgacgaagaagggcaatgaggcagttgcttcacgtgacctgagtgaaaataacgatcagcgccagcaactgcaggccctgtctgaaccccagcctcgactgcaggcagccgggctaccacataccgaggtaccgcagggaaaggggaacgttttgggcaactcaaagtcccaaacaccggccccatcttccgaagtggttctcgactccaagagacaagtcgagaaggaagagaccaacgagatccaagttgtaaatgaggaacctcagcgagaccggctgcctcaagagcccgggcgagaacaagtggtggaggacaggcccgtagggggcagaggctttggaggagctggggaactggggcaaacccctcaagttcaggctgcactcagcgtgtctcaagaaaaccccgaaatggagggccctgagcgagaccagctggtgatcccggacggacaggaggaagagcaggaggcagcaggcgagggacgcaatcagcagaaacttcggggagaagatgactataacatggacgagaacgaggccgagagtgagaccgataagcaggccgcattggccggcaacgataggaacatcgatgtgttcaatgtggaggatcagaagcgggacactatcaatctgctggaccaaagggaaaagcgaaaccatacgctgtag

SEQ ID NO: 252931 - DNA, 243 bp, Artificial Sequence
  derived and/or modified sequence
atgatgggcctgggcaacggccggcggagcatgaagagcccccccctagtactggccgctcttgtcgcgtgtataattgtgttgggcttcaattactggatcgcttcttcaagatcggtcgacctgcagacccggattatggaactcgagggccgggtccggcgggccgctgcggaacgaggagctgtggaactgaagaaaaatgagtttcagggtgagctcgagaaacagcgcgagcaatag

SEQ ID NO: 252932 - DNA, 366 bp, Artificial Sequence
  derived and/or modified sequence
atgatgggcctgggcaacggccggcggagcatgaagagcccccccctcgttctggcagcacttgtcgcgtgcattatcgtgctgggattcaactactggattgcatccagccgatccgtggatctacaaacccggattatggaattggaaggacgggtgagacgtgcggccgctgaaagaggagcagtcgagctcaagaaaaatgagttccaaggagaactggagaaacagagagaacagctggacaagatccagagcagccataactttcaactcgaatcagtgaataagttatatcaggacgagaaagccgtgttggtgaataatatcacaacaggcgaaagactgattcgcgtgttgcagtag

SEQ ID NO: 252933 - DNA, 1206 bp, Artificial Sequence
  derived and/or modified sequence
atgatgggcttaggcaacggaaggaggagcatgaaatcccctcccctagtgcttgctgctctggtggcctgcattattgtgctcggcttcaattattggatcgcatcctctcggagtgttgacttgcaaacacggattatggaactcgaaggcagggtgagacgagctgcagcagaaagaggggcagtggagctgaaaaaaaacgaattccaaggggaactggagaagcagagggagcagctggacaagatccagagcagtcacaactttcaactggaaagcgtgaacaagctatatcaggacgaaaaggcagtactggttaacaacattaccactggcgagaggctcatcagagtgttacaggatcagctgaagacgctgcaacgaaattatggccgtctacagcaggatgtcctgcagtttcagaaaaaccaaacgaacctggaacggaaattttcctatgatctgtcccaatgtataaaccagatgaaggaggtgaaagagcagtgtgaagaacggatcgaggaagtcactaagaagggaaatgaagcagtggcttcaagggacctatccgaaaacaacgatcaaagacaacagttacaagccctgtcagagccacagccaaggctgcaggccgctggcctcccccacaccgaagttccccagggaaagggaaacgtcttaggaaactcgaaatctcagacaccggctccaagcagcgaggtggtgcttgactctaaaaggcaggtggaaaaagaggagaccaatgagattcaggtggtgaatgaggaacctcagcgcgataggctaccccaggagcccggtcgggagcaggtcgtggaggatcgtcctgtgggtggacgaggctttggtggagcaggggaacttggccagacgccccaggtccaagctgcgttgtctgtgtcacaggaaaacccagaaatggaaggaccggagcgggatcagctggtcatcccagacggccaagaggaggaacaggaggccgctggagagggcaggaaccagcagaaactcaggggcgaggatgactacaatatggacgaaaatgaagcggagtctgagacggacaaacaggctgcgctggcaggcaatgacaggaatatcgatgtcttcaacgttgaagatcagaaacgcgacaccattaacctgctggaccagcgcgagaaacgcaatcacactttgtag

SEQ ID NO: 252934 - DNA, 1206 bp, Artificial Sequence
  derived and/or modified sequence
atgatgggtctgggtaacggtaggaggagcatgaaaagtcctccacttgtccttgcagcgctggtggcttgtatcattgtgcttggattcaactactggatcgcttcgtcacggagtgtggatctgcagacaagaatcatggagctggagggcagggtcaggcgcgctgccgcagaaagaggcgctgtcgagctgaagaaaaatgagttccaaggggagctcgaaaaacaaagagaacaactggataaaattcagagctcgcataactttcagctggagagcgtgaacaaactctaccaagacgagaaggcagtgctggtcaataatataacgaccggggaacggctcatccgtgtgcttcaggatcagcttaaaacgctccagaggaactacggacggctgcagcaggacgtgctgcagttccagaagaaccagacaaacctggaacgtaagttttcatacgatctatcccagtgcatcaaccagatgaaggaagtgaaggagcagtgcgaggagcgcatcgaagaggtgactaagaagggcaacgaagccgtcgcctcgagagacctctctgagaacaatgatcagagacagcagctgcaggcccttagcgagccccaaccgaggttgcaggcggcaggtcttccccatactgaagtaccacagggaaaaggtaacgtgcttggaaacagtaaatctcaaacacctgccccttctagtgaggtcgttctcgactcaaagcggcaagtggagaaggaagagaccaatgagatccaggtggttaatgaagagccacagcgtgatagactcccccaagagcctggacgagagcaagtcgtcgaagatcgaccggttgggggacgaggctttggaggtgccggagagctggggcagacacctcaggtgcaagccgcattatccgtgtcacaggaaaatccagaaatggaaggtccagaaagggatcagctggttatccctgatggacaggaagaagaacaggaagctgcgggagagggcaggaatcagcagaaactgaggggagaggacgattacaatatggacgagaacgaagccgagtccgagaccgacaaacaagccgcactggccggaaacgaccgcaatatagacgtgtttaatgtcgaggatcaaaaaagagacactatcaatctcctggaccaacgcgagaagcgcaaccacacgttgtag

SEQ ID NO: 252935 - DNA, 243 bp, Artificial Sequence
  derived and/or modified sequence
atgatgggcctgggaaacggcaggcgaagcatgaagtcccctcctctcgtgctcgcagcactggtggcctgtatcatcgtactcggattcaattattggattgcaagcagcagaagtgtggatctgcagacgaggatcatggaacttgagggacgagttcgccgagccgctgccgaaaggggagcggtggagctgaagaaaaatgaattccaaggggaactggagaagcagcgcgagcaatag

SEQ ID NO: 252936 - DNA, 366 bp, Artificial Sequence
  derived and/or modified sequence
atgatgggcctggggaatggaagaaggagcatgaaatctccccctctcgtcctggcagcactggtggcctgtattattgtcctgggtttcaactactggatcgctagttcaagatccgtggaccttcagacccggatcatggaacttgaaggaagagttagaagggcagctgcggagaggggagctgtggagctcaaaaaaaatgagttccagggcgagcttgagaaacagcgagagcagctggataaaatccaatcaagccacaactttcagctcgaatctgtgaataaattatatcaggatgagaaggccgtacttgtcaacaatatcacaacaggcgagcgcctgatccgagtgctgcaatag

SEQ ID NO: 252937 - protein, 563 aa, Artificial Sequence
  derived and/or modified sequence
MAAAAVTGQRPETAAAEEASRPQWAPPDHCQAQAAAGLGDGEDAPVRPLCKPRGICSRAYFLVLMVFVHLYLGNVLALLLFVHYSNGDESSDPGPQHRAQGPGPEPTLGPLTRLEGIKVGHERKVQLVTDRDHFIRTLSLKPLLFEIPGFLTDEECRLIIHLAQMKGLQRSQILPTEEYEEAMSTMQVSQLDLFRLLDQNRDGHLQLREVLAQTRLGNGWWMTPESIQEMYAAIKADPDGDGVLSLQEFSNMDLRDFHKYMRSHKAESSELVRNSHHTWLYQGEGAHHIMRAIRQRVLRLTRLSPEIVELSEPLQVVRYGEGGHYHAHVDSGPVYPETICSHTKLVANESVPFETSCRQVSPNWGLPSILRPGTPMTQAQPCTVGVPLGMGPGDHWVIPVSPWEHPQLGTCSVPPLPYSYMTVLFYLNNVTGGGETVFPVADNRTYDEMSLIQDDVDLRDTRRHCDKGNLRVKPQQGTAVFWYNYLPDGQGWVGDVDDYSLHGGCLVTRGTKWIANNWINVDPSRARQALFQQEMARLAREGGTDSQPEWALDRAYRDARVEL

SEQ ID NO: 252938 - DNA, 1692 bp, Artificial Sequence
  derived and/or modified sequence
atggccgccgccgccgtgaccggccagagacccgagaccgccgccgccgaggaggccagcagaccccagtgggccccccccgaccactgccaggcccaggccgccgccggcctgggcgacggcgaggacgcccccgtgagacccctgtgcaagcccagaggcatctgcagcagagcctacttcctggtgctgatggtgttcgtgcacctgtacctgggcaacgtgctggccctgctgctgttcgtgcactacagcaacggcgacgagagcagcgaccccggcccccagcacagagcccagggccccggccccgagcccaccctgggccccctgaccagactggagggcatcaaggtgggccacgagagaaaggtgcagctggtgaccgacagagaccacttcatcagaaccctgagcctgaagcccctgctgttcgagatccccggcttcctgaccgacgaggagtgcagactgatcatccacctggcccagatgaagggcctgcagagaagccagatcctgcccaccgaggagtacgaggaggccatgagcaccatgcaggtgagccagctggacctgttcagactgctggaccagaacagagacggccacctgcagctgagagaggtgctggcccagaccagactgggcaacggctggtggatgacccccgagagcatccaggagatgtacgccgccatcaaggccgaccccgacggcgacggcgtgctgagcctgcaggagttcagcaacatggacctgagagacttccacaagtacatgagaagccacaaggccgagagcagcgagctggtgagaaacagccaccacacctggctgtaccagggcgagggcgcccaccacatcatgagagccatcagacagagagtgctgagactgaccagactgagccccgagatcgtggagctgagcgagcccctgcaggtggtgagatacggcgagggcggccactaccacgcccacgtggacagcggccccgtgtaccccgagaccatctgcagccacaccaagctggtggccaacgagagcgtgcccttcgagaccagctgcagacaggtgagccccaactggggcctgcccagcatcctgagacccggcacccccatgacccaggcccagccctgcaccgtgggcgtgcccctgggcatgggccccggcgaccactgggtgatccccgtgagcccctgggagcacccccagctgggcacctgcagcgtgccccccctgccctacagctacatgaccgtgctgttctacctgaacaacgtgaccggcggcggcgagaccgtgttccccgtggccgacaacagaacctacgacgagatgagcctgatccaggacgacgtggacctgagagacaccagaagacactgcgacaagggcaacctgagagtgaagccccagcagggcaccgccgtgttctggtacaactacctgcccgacggccagggctgggtgggcgacgtggacgactacagcctgcacggcggctgcctggtgaccagaggcaccaagtggatcgccaacaactggatcaacgtggaccccagcagagccagacaggccctgttccagcaggagatggccagactggccagagagggcggcaccgacagccagcccgagtgggccctggacagagcctacagagacgccagagtggagctgtag

SEQ ID NO: 252939 - DNA, 1692 bp, Artificial Sequence
  derived and/or modified sequence
atggctgccgcagctgtcactgggcaacggcccgaaaccgccgccgctgaggaggcctctcgccctcagtgggcaccacccgatcactgtcaggcacaggctgctgctgggttgggcgatggcgaggatgctcctgtacggcccttgtgtaagccgagagggatctgtagcagagcctactttctggtgctaatggtattcgtccacctttacctcggcaacgttctggctctcctgttatttgttcattactccaacggtgacgagagtagtgaccctggtccccagcaccgcgcacagggtccgggcccggagccgaccctgggcccactgaccagattggaaggaattaaggtcgggcacgaacgaaaagtgcagctcgttactgaccgagaccactttatacggacgctgtctttgaagcccctgctcttcgaaatccccggatttttaactgacgaggaatgtagacttatcatacacctagcccagatgaaggggctccagcggagtcaaatactccctacagaggagtacgaagaggccatgtctacaatgcaggtgagccaactcgatctttttagactgttggatcagaatcgggacggacatcttcagttacgagaagtgttggctcagacccggctgggcaatgggtggtggatgaccccggagtctatccaggaaatgtacgccgccatcaaggccgaccctgacggcgacggtgtgctgtctctgcaggagttttcaaacatggacctgcgagatttccacaagtatatgagaagccacaaggctgaaagtagtgaattggtgcgcaactcacaccatacgtggctgtaccagggagaaggcgctcatcacattatgagagcaatccgccagagagtactgagactcactcggttgtcacccgaaatcgttgagctttctgagccactccaggtagtccggtatggcgagggcgggcactaccacgctcacgtggatagcggcccagtgtatccagagactatctgctcccataccaagcttgtggcaaacgaaagtgtgccattcgagaccagttgtagacaagtgtcccccaactggggactgccatccatcctcaggccgggcactcctatgacacaagcacagccttgcaccgtaggagtgcctcttggaatggggccaggtgaccactgggtgatcccagttagtccttgggaacacccacaactggggacatgcagtgtgccccctctaccatactcatacatgaccgtgctcttctacttaaacaacgtgacaggtggaggcgaaacagtgtttcctgtggctgacaaccggacatacgatgagatgtctcttatccaggatgacgttgatctcagggatacgagaaggcactgcgacaaggggaaccttagagtgaaaccgcagcaggggacagctgtcttctggtataattacctgcctgatggtcagggctgggtaggcgatgtggacgattatagcctacacggggggtgtctcgtcacccgtggcacaaaatggatcgctaacaactggattaacgtcgatccaagccgggctaggcaggccctgttccaacaggaaatggcccgcctcgcccgcgaggggggtaccgatagccaaccggagtgggcccttgatagagcctaccgcgatgcacgagtcgagctatag

SEQ ID NO: 252940 - DNA, 1692 bp, Artificial Sequence
  derived and/or modified sequence
atggctgctgctgctgtgacaggccagaggcctgagacagctgctgctgaggaggccagccggccccagtgggcccccccagaccactgccaggcccaggccgccgccggcctgggagatggagaagatgcccctgtgcggcccctgtgcaagccccggggcatctgcagccgggcctacttcctggtgctgatggtgtttgtgcacctgtacctgggcaatgtgctggccctgctgctgtttgtgcactacagcaatggagatgagagcagtgaccccggcccccagcaccgggcccagggccctggccctgagcccaccctgggccccctgacccggctggagggcatcaaggtgggccacgagaggaaggtgcagctggtgacagaccgggaccacttcatccgcaccctgagcctgaagcccctgctgtttgagatccctggcttcctgacagatgaagaatgtcgcctcatcatccacctggcccagatgaagggcctgcagaggagccagatcctgcccacagaggagtatgaggaggccatgagcaccatgcaggtgtcccagctggacctcttccggctgctggaccagaacagagatggccacctgcagctgcgggaggtgctggcccagacccggctgggcaatggctggtggatgaccccagagagcatccaggagatgtatgctgccatcaaggctgaccctgatggagatggagtgctgagcctgcaggagttcagcaacatggacctgcgggacttccacaagtacatgaggagccacaaggccgagagcagcgagctggtgaggaacagccaccacacctggctgtaccagggcgagggcgcccaccacatcatgagggccatccggcagagggtgctgcggctgacccggctgagccctgagatcgtggagctgtctgagcccctgcaggtggtgcgctatggagagggcggccactaccacgcccacgtggacagcggccctgtgtacccagagaccatctgcagccacaccaagctggtggccaatgaatctgtgccctttgagaccagctgccggcaggtgagccccaactggggcctgcccagcatcctgcggcccggcacccccatgacccaggcccagccctgcaccgtgggcgtgcccctgggcatgggccctggggaccactgggtgattcctgtgagcccctgggagcacccccagctgggcacctgcagcgtgccccccctgccctacagctacatgacagtgctcttctacctgaacaacgtgactggaggaggagagaccgtcttccctgtggccgacaacagaacctatgatgagatgagcctcatccaggatgatgtggacctgcgggacacccggcggcactgtgacaagggcaacctgcgggtgaagccccagcagggcacagctgtgttctggtacaactacctgcctgatggccagggctgggtgggagatgtggatgactacagcctgcacggcggctgcctggtgacccggggcaccaagtggatcgccaacaactggatcaacgtggaccccagccgggcccggcaggccctcttccagcaggagatggcccggctggcccgggagggcggcacagacagccagcctgagtgggccctggaccgggcctacagagatgcccgggtggagctgtag

SEQ ID NO: 252941 - DNA, 1692 bp, Artificial Sequence
  derived and/or modified sequence
atggccgccgccgccgtgaccggccagcggcccgagaccgccgccgctgaggaagcgtcaagaccccagtgggctccaccggaccattgtcaggcccaggctgccgcgggactgggggatggagaggatgcccccgtgcgccccctctgcaaacccagagggatttgcagtagggcctactttttggttctgatggtgttcgttcatctgtatctgggaaacgtgctagcactcctcctgtttgttcactattctaatggcgatgaatctagcgacccaggccctcagcatcgcgcccagggccccggaccggagccaacattgggccctcttaccaggttagagggcattaaagtaggacatgagaggaaagtccagctggttactgatagggaccactttattagaacactgagcctgaagccgctgctctttgagatcccgggtttcttaactgatgaggagtgtcgcctgattatccacctggcacagatgaagggtctgcaacgaagccaaatcctcccaactgaggaatacgaggaggcgatgagcacaatgcaggtttctcaactggacctgtttcgccttttggatcagaaccgagacgggcacctccaactccgtgaagttcttgcacagacgcgactgggaaacggctggtggatgacacccgagtccattcaagaaatgtatgccgccattaaagctgatcctgatggggacggtgttctgtccttgcaggaattctctaatatggatctccgcgatttccacaaatacatgaggtcccataaagcggaaagcagcgagttggtgcgcaacagtcaccacacctggctttatcaaggtgaaggagcgcatcatatcatgagagccatccgacagagagttttgcgcctcacgcggttatcccccgagatagtcgagctgtcagaaccccttcaagtggtgagatatggagagggcggacattaccacgctcacgtcgattccggcccagtttatccagagaccatctgtagccacactaagctcgtcgccaatgaaagcgtgccatttgagacttcttgccgccaagtctccccaaattggggcctgccttcgattcttaggcctggaacgcccatgacacaagcacagccctgtactgtgggagttcccctgggaatggggcccggcgaccactgggtaataccggtgagcccctgggaacacccccagttgggaacctgctcagttcctccactaccatattcttatatgaccgtgcttttttatcttaacaacgtcacaggcggtggggaaaccgtatttcctgtggcagataaccgaacctatgacgagatgagtctgatacaggatgatgtggatttgagagatacacgtaggcattgtgacaaaggcaacctgcgagttaagccacagcaggggacagctgttttttggtataattacctccccgacggacaggggtgggtgggcgacgtggacgactatagtcttcatggcgggtgcctggttacccgcggcaccaagtggatcgccaacaattggattaacgtagatcccagccgggcgcgtcaggcactgttccaacaggaaatggcacgattagccagagaaggggggacagacagccagcccgaatgggctctggaccgtgcatacagagatgccagagtagagctgtag

SEQ ID NO: 252942 - DNA, 2268 bp, Artificial Sequence
  derived and/or modified sequence
gatacttttcccggaggcaagagggcgtcttcacgcaggcaccgagaagctcccactagtgtatgccttaatggtgccgctcttgtccgcgtctacgcttgggaccttggcttctgacttggagagtgtacagctctgcccgacggcaacccagcttgggaagagaagccccagcgtgggctggggctcaaggcgcaggaaggccgagcccggcgcggacgcaggcggctccgggcgggctcagcacccccaggcaccgtctcctagtgaccgcggcgctcgcgggcctggcggccgttgtccgggcgactgcgcagcgcgggcacccccgcggcccctcccctgggcgcgcgcgcgacctgggtgccatggcggcagcggcggtgacaggccagcggcctgagaccgcggcggccgaggaggcctcgaggccgcagtgggcgccgccagaccactgccaggctcaggcggcggccgggctgggcgacggcgaggacgcaccggtgcgtccgctgtgcaagccccgcggcatctgctcgcgcgcctacttcctggtgctgatggtgttcgtgcacctgtacctgggtaacgtgctggcgctgctgctcttcgtgcactacagcaacggcgacgaaagcagcgatcccgggccccaacaccgtgcccagggccccgggcccgagcccaccttaggtcccctcacccggctggagggcatcaaggtggggcacgagcgtaaggtccagctggtcaccgacagggatcacttcatccgaaccctcagcctcaagccgctgctcttcgaaatccccggcttcctgactgatgaagagtgtcggctcatcatccatctggcgcagatgaaggggttacagcgcagccagatcctgcctactgaagagtatgaagaggcaatgagcactatgcaggtcagccagctggacctcttccggctgctggaccagaaccgtgatgggcaccttcagctccgtgaggttctggcccagactcgcctgggaaatggatggtggatgactccagagagcattcaggagatgtacgccgcgatcaaggctgaccctgatggtgacggagtgctgagtctgcaggagttctccaacatggaccttcgggacttccacaagtacatgaggagccacaaggcagagtccagtgagctggtgcggaacagccaccatacctggctctaccagggtgagggtgcccaccacatcatgcgtgccatccgccagagggtgctgcgcctcactcgcctgtcgcctgagatcgtggagctcagcgagccgctgcaggttgttcgatatggtgaggggggccactaccatgcccacgtggacagtgggcctgtgtacccagagaccatctgctcccataccaagctggtagccaacgagtctgtacccttcgagacctcctgccggcaagtatctcccaactgggggctgccttcaatcctcagaccaggaacacccatgacacaggcacagccctgcactgtgggcgtgccccttggcatggggccaggagatcactgggttatcccggtaagcccctgggagcatccacaactggggacctgctcagtgccccccctgccttacagctacatgacagtgctgttttatttgaacaacgtcactggtgggggcgagactgttttccctgtagcagataacagaacctacgatgaaatgagtctgattcaggatgacgtggacctccgtgacacacggaggcactgtgacaagggaaacctgcgtgtcaagccccaacagggcacagcagtcttctggtacaactacctgcctgatgggcaaggttgggtgggtgacgtagacgactactcgctgcacgggggctgcctggtcacgcgcggcaccaagtggattgccaacaactggattaatgtggaccccagccgagcgcggcaagcgctgttccaacaggagatggcccgccttgcccgagaagggggcaccgactcacagcccgagtgggctctggaccgggcctaccgcgatgcgcgcgtggaactctgagggaagagttagccccggttcccagccgcgggtcgccagttgcccaagatcaggggtccggctgtccttctgtcctgctgcagactaaaggtctggccaatgtcttgccccaccccgccagccgcgatacggcgcagttcctatattcatgttatttattgtgtactgactccatctgccccgtcaaataaaaaaccacaaggttcga

SEQ ID NO: 252943 - DNA, 1692 bp, Artificial Sequence
  derived and/or modified sequence
atggccgcagctgccgtgactgggcagaggccggagaccgccgcagcagaagaagcttcgagaccacagtgggctcctcctgaccactgtcaagcccaggccgctgctggactgggggacggggaagatgcgccagtgcgcccactctgcaagccgcgagggatctgctcaagggcgtacttcctcgtgctgatggtgtttgtgcatttgtatctgggaaatgttcttgctttgctgctctttgtccattactctaacggggacgagagctccgatcctggtcctcagcaccgggcacaagggccaggccctgaaccaaccttaggtcctctgacgcgcctggagggcatcaaagtggggcacgaaaggaaagtacagctcgtgacagaccgcgaccattttattaggacactgtcgcttaagccactactatttgagatccccggttttcttacagacgaagagtgcagactgattattcacctcgcacagatgaaagggctgcagagaagccagatcttgcccacggaggaatacgaggaggccatgtctacaatgcaggtgagccagctcgacctattcaggctgctggaccagaatagagatggtcatcttcagctaagggaagtgctggcccagactcggctggggaacgggtggtggatgacgccagaatcaatacaggagatgtatgccgctatcaaggccgatcccgacggtgatggcgttctgagcctgcaagagttttcaaacatggacctgcgcgactttcacaaatacatgcgctcacataaggcagagtcctctgagttggtccggaactctcaccatacgtggctgtatcagggagagggggctcaccatataatgagagcaattcgtcaacgggtactgcgcctgactcgcctcagccccgaaatcgtggagctgtctgagcccctgcaagtcgtgaggtacggcgagggaggacattaccacgcccacgtcgacagtggcccagtgtatccagaaacaatctgttcccatacaaaactggtcgctaatgagtcagtcccatttgaaacctcttgtagacaggtgtctcccaactggggtctcccttcaatcctcagaccgggaactcctatgactcaggcacagccttgtacggtaggtgtcccactgggtatgggcccaggcgatcactgggtaatccctgtgagcccttgggaacatcctcaactggggacctgcagcgtaccgcctctgccatactcctacatgactgtactgttctatctcaataatgtgacaggaggaggggagacagtgttccccgtagccgacaatcgaacctatgacgagatgtccctcattcaagacgacgtggacctgcgggacacccgcagacactgcgacaagggcaatctccgcgtgaagccacaacaaggcactgcagtcttttggtataactatctgcctgacgggcaaggatgggtcggggacgtcgacgattactcccttcatggtggctgcctggttacacgcggaacgaagtggatcgccaacaattggatcaacgttgaccctagcagagcaagacaagcattgttccagcaggaaatggcacgcctggctagagaaggcggaacagactcacaacctgagtgggctctagacagggcttatcgggacgctcgcgtggaactgtag

SEQ ID NO: 252944 - protein, 502 aa, Artificial Sequence [sequence omitted]

SEQ ID NO: 252945 - DNA, 1509 bp, Artificial Sequence
  derived and/or modified sequence
atggccgccgccgccgtgaccggccagagacccgagaccgccgccgccgaggaggccagcagaccccagtgggccccccccgaccactgccaggcccaggccgccgccggcctgggcgacggcgaggacgcccccgtgagacccctgtgcaagcccagaggcatctgcagcagagcctacttcctggtgctgatggtgttcgtgcacctgtacctgggcaacgtgctggccctgctgctgttcgtgcactacagcaacggcgacgagagcagcgaccccggcccccagcacagagcccagggccccggccccgagcccaccctgggccccctgaccagactggagggcatcaaggtgggccacgagagaaaggtgcagctggtgaccgacagagaccacttcatcagaaccctgagcctgaagcccctgctgttcgagatccccggcttcctgaccgacgaggagtgcagactgatcatccacctggcccagatgaagggcctgcagagaagccagatcctgcccaccgaggagtacgaggaggccatgagcaccatgcaggtgagccagctggacctgttcagactgctggaccagaacagagacggccacctgcagctgagagaggtgctggcccagaccagactgggcaacggctggtggatgacccccgagagcatccaggagatgtacgccgccatcaaggccgaccccgacggcgacggcgtgctgagcctgcaggagttcagcaacatggacctgagagacttccacaagtacatgagaagccacaaggccgagagcagcgagctggtgagaaacagccaccacacctggctgtaccagggcgagggcgcccaccacatcatgagagccatcagacagagagtgctgagactgaccagactgagccccgagatcgtggagctgagcgagcccctgcaggtggtgagatacggcgagggcggccactaccacgcccacgtggacagcggccccgtgtaccccgagaccatctgcagccacaccaagctggtggccaacgagagcgtgcccttcgagaccagctgcagatacatgaccgtgctgttctacctgaacaacgtgaccggcggcggcgagaccgtgttccccgtggccgacaacagaacctacgacgagatgagcctgatccaggacgacgtggacctgagagacaccagaagacactgcgacaagggcaacctgagagtgaagccccagcagggcaccgccgtgttctggtacaactacctgcccgacggccagggctgggtgggcgacgtggacgactacagcctgcacggcggctgcctggtgaccagaggcaccaagtggatcgccaacaactggatcaacgtggaccccagcagagccagacaggccctgttccagcaggagatggccagactggccagagagggcggcaccgacagccagcccgagtgggccctggacagagcctacagagacgccagagtggagctgtag

SEQ ID NO: 252946 - DNA, 1509 bp, Artificial Sequence
  derived and/or modified sequence
atggcagccgccgccgtaactgggcaaagacctgaaacagccgccgcagaggaggccagcaggccacaatgggctccgcccgatcattgccaagctcaagctgcagctggcttgggtgatggcgaagatgcccccgtacgacctctgtgtaaaccaagaggtatctgttcacgggcgtattttctggtgcttatggtcttcgttcacctctatcttgggaatgtcttggcactcttacttttcgttcattattcaaacggggacgaaagctccgatcctggccctcagcatcgagcgcagggccccggcccagaacccactctaggaccactaacacgactggagggcattaaagtcggtcacgaacggaaggtgcagctcgtgacggacagagatcatttcattaggaccttaagtttgaagcccctattgttcgagattcctggctttctgactgacgaggagtgccgcctcatcatccatctggcccagatgaagggcctgcagcggagccagattcttccaaccgaagaatacgaagaggctatgagcaccatgcaggtgtcccaactagatcttttccgactgctggaccaaaacagggacgggcatttgcagctacgcgaggtgttggcgcagacgaggctaggtaatggttggtggatgaccccagaatccattcaggagatgtatgcagcaatcaaagccgatccagacggagacggtgttctctccctgcaggaatttagcaatatggacttacgagatttccataaatatatgaggtcccacaaagctgaatcaagcgagctagtacggaactcacaccatacttggttgtaccaaggggagggggcccatcacatcatgagagcaatccgccagcgcgtgttgaggctgacaagactctcacctgaaattgtggaactgtctgagccgctccaggtggtgcgatatggtgaaggaggccactaccatgcacacgtcgatagtggtcctgtgtaccccgaaacaatttgttcccataccaaactcgtggccaacgagtccgtgccttttgagacatcttgtaggtatatgactgtgcttttctacctgaacaatgtgactgggggcggcgagaccgtgtttccagtggccgacaacaggacctatgatgagatgtcactcattcaggacgatgtcgatctgcgtgacacaaggagacactgtgacaaggggaatttgagagtcaaaccacaacagggcacggccgttttttggtacaattacctaccagatgggcaagggtgggtaggcgatgtagacgactatagtttgcacggtggctgcttggtgacgagaggcacgaaatggatagctaataactggatcaatgttgacccctcacgcgcccgccaggcgttatttcaacaggaaatggcccgtctcgcgcgcgagggaggcacagacagccaacccgaatgggctctagatagggcatatcgcgatgctcgtgtcgagctgtag

SEQ ID NO: 252947 - DNA, 1509 bp, Artificial Sequence
  derived and/or modified sequence
atggctgctgctgctgtgacaggccagaggcctgagacagctgctgctgaggaggccagccggccccagtgggcccccccagaccactgccaggcccaggccgccgccggcctgggagatggagaagatgcccctgtgcggcccctgtgcaagccccggggcatctgcagccgggcctacttcctggtgctgatggtgtttgtgcacctgtacctgggcaatgtgctggccctgctgctgtttgtgcactacagcaatggagatgagagcagtgaccccggcccccagcaccgggcccagggccctggccctgagcccaccctgggccccctgacccggctggagggcatcaaggtgggccacgagaggaaggtgcagctggtgacagaccgggaccacttcatccgcaccctgagcctgaagcccctgctgtttgagatccctggcttcctgacagatgaagaatgtcgcctcatcatccacctggcccagatgaagggcctgcagaggagccagatcctgcccacagaggagtatgaggaggccatgagcaccatgcaggtgtcccagctggacctcttccggctgctggaccagaacagagatggccacctgcagctgcgggaggtgctggcccagacccggctgggcaatggctggtggatgaccccagagagcatccaggagatgtatgctgccatcaaggctgaccctgatggagatggagtgctgagcctgcaggagttcagcaacatggacctgcgggacttccacaagtacatgaggagccacaaggccgagagcagcgagctggtgaggaacagccaccacacctggctgtaccagggcgagggcgcccaccacatcatgagggccatccggcagagggtgctgcggctgacccggctgagccctgagatcgtggagctgtctgagcccctgcaggtggtgcgctatggagagggcggccactaccacgcccacgtggacagcggccctgtgtacccagagaccatctgcagccacaccaagctggtggccaatgaatctgtgccctttgagaccagctgccgctacatgacagtgctcttctacctgaacaacgtgactggaggaggagaaacagtgtttcctgtggccgacaacagaacctatgatgagatgagcctcatccaggatgatgtggacctgcgggacaccaggaggcactgtgacaagggcaacctgcgggtgaagccccagcagggcacagctgtgttctggtacaactacctgcctgatggccagggctgggtgggagatgtggatgactacagcctgcatggaggctgcctggtgacccggggcaccaagtggatcgccaacaactggatcaacgtggaccccagccgggcccggcaggccctcttccagcaggagatggcccggctggcccgggagggcggcacagacagccagcctgagtgggccctggaccgggcctacagagatgcccgggtggagctgtag

SEQ ID NO: 252948 - DNA, 1509 bp, Artificial Sequence
  derived and/or modified sequence
atggccgccgccgccgtgaccggccagcggcccgagaccgccgccgcagaagaagccagtcggccacaatgggctccacccgaccattgccaggcgcaggccgccgctgggctgggggacggggaggacgctcccgtcaggcctttgtgtaaaccccgaggcatttgttcacgggcctatttcctggtattgatggtgttcgtccacctataccttggaaacgtgttggcactgctgttgtttgtacattactcaaacggcgatgaaagcagtgacccgggtccccagcatcgggcacaaggccccggacctgagcccacacttgggccgctgacccggctggagggtatcaaagtcgggcatgaacgaaaagtgcagctcgttacggatagggatcattttatcaggactttgtccttgaagccactgttattcgagatccccggattcctgaccgatgaggagtgccggctgatcatccatttggctcagatgaagggcttgcagcggtcccagatcctgccaaccgaagagtacgaggaggctatgtctacaatgcaggtgtcccagctggacctctttaggctgctcgaccaaaaccgggatgggcatttgcagctgcgggaggtcttggctcagacccgtttgggcaatggttggtggatgacacccgaatcgatccaggagatgtacgccgccatcaaggccgatcctgatggcgatggagttctatctttgcaggaattcagcaatatggaccttcgagacttccacaaatatatgcggtctcataaggccgagagttctgagcttgtgaggaacagccaccatacttggctgtaccagggcgagggcgcccaccacatcatgcgcgcaatcagacagcgggtgcttcgcctcacaagactcagtccggagatcgtcgagctttcggaaccattgcaggtcgttagatatggggagggaggtcattatcacgcacacgtggatagtgggcccgtctaccctgaaactatttgcagccatactaaactagttgcaaatgagtcagtgcccttcgagaccagttgccggtacatgacagtacttttttacctaaacaacgtaactggtggtggggaaaccgtgtttccagttgcagataaccgaacgtacgacgagatgagtctgatccaggacgatgtcgaccttcgcgacacccgcagacactgcgataaaggcaatctgcgcgtgaaaccccagcaaggaaccgcagttttttggtacaattatctcccagacgggcagggctgggtgggcgatgtcgatgactattcgctacatggtggctgcctcgtgacacgcggtactaaatggatcgccaacaattggataaatgtggatccatctagggccagacaggcgctgttccagcaggagatggctcgcctcgcccgggaaggcggaaccgatagtcagcccgaatgggctctcgatcgcgcctacagggacgcgagggtcgaattgtag

SEQ ID NO: 252949 - DNA, 2127 bp, Artificial Sequence
  derived and/or modified sequence
gacgatacttttcccggaggcaagagggcgtcttcacgcaggcaccgagaagctcccactagtgtatgccttaatggtgccgctcttgtccgcgtctacgcttgggaccttggcttctgacttggagagtgtacagctctgcccgacggcaacccagcttgggaagagaagccccagcgtgggctggggctcaaggcgcaggaaggccgagcccggcgcggacgcaggcggctccgggcgggctcagcacccccaggcaccgtctcctagtgaccgcggcgctcgcgggcctggcggccgttgtccgggcgactgcgcagcgcgggcacccccgcggcccctcccctgggcgcgcgcgcgacctgggtgccatggcggcagcggcggtgacaggccagcggcctgagaccgcggcggccgaggaggcctcgaggccgcagtgggcgccgccagaccactgccaggctcaggcggcggccgggctgggcgacggcgaggacgcaccggtgcgtccgctgtgcaagccccgcggcatctgctcgcgcgcctacttcctggtgctgatggtgttcgtgcacctgtacctgggtaacgtgctggcgctgctgctcttcgtgcactacagcaacggcgacgaaagcagcgatcccgggccccaacaccgtgcccagggccccgggcccgagcccaccttaggtcccctcacccggctggagggcatcaaggtggggcacgagcgtaaggtccagctggtcaccgacagggatcacttcatccgaaccctcagcctcaagccgctgctcttcgaaatccccggcttcctgactgatgaagagtgtcggctcatcatccatctggcgcagatgaaggggttacagcgcagccagatcctgcctactgaagagtatgaagaggcaatgagcactatgcaggtcagccagctggacctcttccggctgctggaccagaaccgtgatgggcaccttcagctccgtgaggttctggcccagactcgcctgggaaatggatggtggatgactccagagagcattcaggagatgtacgccgcgatcaaggctgaccctgatggtgacggagtgctgagtctgcaggagttctccaacatggaccttcgggacttccacaagtacatgaggagccacaaggcagagtccagtgagctggtgcggaacagccaccatacctggctctaccagggtgagggtgcccaccacatcatgcgtgccatccgccagagggtgctgcgcctcactcgcctgtcgcctgagatcgtggagctcagcgagccgctgcaggttgttcgatatggtgaggggggccactaccatgcccacgtggacagtgggcctgtgtacccagagaccatctgctcccataccaagctggtagccaacgagtctgtacccttcgagacctcctgccgctacatgacagtgctgttttatttgaacaacgtcactggtgggggcgagactgttttccctgtagcagataacagaacctacgatgaaatgagtctgattcaggatgacgtggacctccgtgacacacggaggcactgtgacaagggaaacctgcgtgtcaagccccaacagggcacagcagtcttctggtacaactacctgcctgatgggcaaggttgggtgggtgacgtagacgactactcgctgcacgggggctgcctggtcacgcgcggcaccaagtggattgccaacaactggattaatgtggaccccagccgagcgcggcaagcgctgttccaacaggagatggcccgccttgcccgagaagggggcaccgactcacagcccgagtgggctctggaccgggcctaccgcgatgcgcgcgtggaactctgagggaagagttagccccggttcccagccgcgggtcgccagttgcccaagatcaggggtccggctgtccttctgtcctgctgcagactaaaggtctggccaatgtcttgccccaccccgccagccgcgatacggcgcagttcctatattcatgttatttattgtgtactgactccatctgccccgtcaaataaaaaaccacaaggttcgagccgccgggcccgacaaactccgggtcggcgaaacagag

SEQ ID NO: 252950 - DNA, 1509 bp, Artificial Sequence
  derived and/or modified sequence
atggctgccgcagcagtgaccggccagagaccagaaacagctgccgctgaggaggcatcgcgaccccagtgggccccacccgaccactgccaggctcaggcagcggcaggcctcggcgacggcgaagacgcacctgttaggcccttgtgcaagccaagaggaatctgttctagggcatattttttggtccttatggtctttgtccatttatacctcgggaatgtgctcgccctgttactcttcgtccactactccaacggcgacgagagctccgacccaggcccacagcaccgtgcgcaaggacccggacccgaacccactctggggcctttaaccaggctcgaaggaattaaagtgggccatgaacgaaaggtgcaattggttaccgaccgggatcacttcatccgcacccttagcctgaagcccctgctgttcgagattcccggatttctgaccgacgaggaatgcaggcttattatccacctggcccagatgaagggcctccagagatctcagattttgcccacagaggagtatgaagaggccatgtccacaatgcaggtgtctcaactggacctctttcggctacttgatcagaatcgagacgggcacctgcagctgagggaggtactggcacagaccaggcttgggaatgggtggtggatgacccccgagagcattcaagaaatgtatgctgccattaaagccgatccggatggagacggagtgctgtccctccaggaattctcaaatatggatctgcgagatttccataaatacatgcgttcccataaggccgaatcgtccgaacttgttcgcaactcacaccatacttggctgtatcagggagaaggggctcaccacatcatgcgcgcaatcagacagagggttttgcgtctgactcggttatctccggaaattgtagagctgtcagagcctctgcaagtcgtacgttacggtgagggcggtcactatcatgcgcacgtagattcaggacccgtctaccccgaaacgatctgttcgcacaccaaattagtagccaacgagtcagtaccttttgagacctcctgccgatatatgactgtgctattttacttgaacaatgtaactggcggtggcgaaaccgttttccccgtggcggacaatcgtacttatgatgaaatgtcactaatacaagacgatgttgatcttagggacactcggagacattgcgacaaaggcaacttaagagtgaaacctcaacaaggcaccgcagttttttggtacaactacctgcctgatggtcaaggttgggtgggtgacgtagatgattattccctgcacggcggatgcctggtgacaaggggaaccaagtggattgctaataactggattaatgtcgatcctagccgcgctaggcaggcactgttccaacaggaaatggcgagattggcccgtgaagggggaaccgattctcagcctgagtgggcacttgatcgcgcttatcgggacgccagagttgaattatag

SEQ ID NO: 252951 - protein, 324 aa, Artificial Sequence
  derived and/or modified sequence
MGAFLDKPKMEKHNAQGQGNGLRYGLSSMQGWRVEMEDAHTAVIGLPSGLESWSFFAVYDGHAGSQVAKYCCEHLLDHITNNQDFKGSAGAPSVENVKNGIRTGFLEIDEHMRVMSEKKHGADRSGSTAVGVLISPQHTYFINCGDSRGLLCRNRKVHFFTQDHKPSNPLEKERIQNAGGSVMIQRVNGSLAVSRALGDFDYKCVHGKGPTEQLVSPEPEVHDIERSEEDDQFIILACDGIWDVMGNEELCDFVRSRLEVTDDLEKVCNEVVDTCLYKGSRDNMSVILICFPNAPKVSPEAVKKEAELDKYLECRVEGGSFNKK

SEQ ID NO: 252952 - DNA, 975 bp, Artificial Sequence
  derived and/or modified sequence
atgggcgccttcctggacaagcccaagatggagaagcacaacgcccagggccagggcaacggcctgagatacggcctgagcagcatgcagggctggagagtggagatggaggacgcccacaccgccgtgatcggcctgcccagcggcctggagagctggagcttcttcgccgtgtacgacggccacgccggcagccaggtggccaagtactgctgcgagcacctgctggaccacatcaccaacaaccaggacttcaagggcagcgccggcgcccccagcgtggagaacgtgaagaacggcatcagaaccggcttcctggagatcgacgagcacatgagagtgatgagcgagaagaagcacggcgccgacagaagcggcagcaccgccgtgggcgtgctgatcagcccccagcacacctacttcatcaactgcggcgacagcagaggcctgctgtgcagaaacagaaaggtgcacttcttcacccaggaccacaagcccagcaaccccctggagaaggagagaatccagaacgccggcggcagcgtgatgatccagagagtgaacggcagcctggccgtgagcagagccctgggcgacttcgactacaagtgcgtgcacggcaagggccccaccgagcagctggtgagccccgagcccgaggtgcacgacatcgagagaagcgaggaggacgaccagttcatcatcctggcctgcgacggcatctgggacgtgatgggcaacgaggagctgtgcgacttcgtgagaagcagactggaggtgaccgacgacctggagaaggtgtgcaacgaggtggtggacacctgcctgtacaagggcagcagagacaacatgagcgtgatcctgatctgcttccccaacgcccccaaggtgagccccgaggccgtgaagaaggaggccgagctggacaagtacctggagtgcagagtggagggcggcagcttcaacaagaagtag

SEQ ID NO: 252953 - DNA, 564 bp, Artificial Sequence
  derived and/or modified sequence
atgggcgccttcctggacaagcccaagatggagaagcacaacgcccagggccagggcaacggcctgagatacggcctgagcagcatgcagggctggagagtggagatggaggacgcccacaccgccgtgatcggcctgcccagcggcctggagagctggagcttcttcgccgtgtacgacggccacgccggcagccaggtggccaagtactgctgcgagcacctgctggaccacatcaccaacaaccaggacttcaagggcagcgccggcgcccccagcgtggagaacgtgaagaacggcatcagaaccggcttcctggagatcgacgagcacatgagagtgatgagcgagaagaagcacggcgccgacagaagcggcagcaccgccgtgggcgtgctgatcagcccccagcacacctacttcatcaactgcggcgacagcagaggcctgctgtgcagaaacagaaaggtgcacttcttcacccaggaccacaagcccagcaaccccctggagaaggagagaatccagaacgccggcggcagcgtgatgatccagagagtgtag

SEQ ID NO: 252954 - DNA, 390 bp, Artificial Sequence
  derived and/or modified sequence
atgggcgccttcctggacaagcccaagatggagaagcacaacgcccagggccagggcaacggcctgagatacggcctgagcagcatgcagggctggagagtggagatggaggacgcccacaccgccgtgatcggcctgcccagcggcctggagagctggagcttcttcgccgtgtacgacggccacgccggcagccaggtggccaagtactgctgcgagcacctgctggaccacatcaccaacaaccaggacttcaagggcagcgccggcgcccccagcgtggagaacgtgaagaacggcatcagaaccggcttcctggagatcgacgagcacatgagagtgatgagcgagaagaagcacggcgccgacagaagcggcagcaccgcctag

SEQ ID NO: 252955 - DNA, 447 bp, Artificial Sequence
  derived and/or modified sequence
atgggcgccttcctggacaagcccaagatggagaagcacaacgcccagggccagggcaacggcctgagatacggcctgagcagcatgcagggctggagagtggagatggaggacgcccacaccgccgtgatcggcctgcccagcggcctggagagctggagcttcttcgccgtgtacgacggccacgccggcagccaggtggccaagtactgctgcgagcacctgctggaccacatcaccaacaaccaggacttcaagggcagcgccggcgcccccagcgtggagaacgtgaagaacggcatcagaaccggcttcctggagatcgacgagcacatgagagtgatgagcgagaagaagcacggcgccgacagaagcggcagcaccgccgtgggcgtgctgatcagcccccagcacacctacttcatcaactgcggcgacagcagatag

SEQ ID NO: 252956 - DNA, 975 bp, Artificial Sequence
  derived and/or modified sequence
atgggcgcattccttgacaagccaaagatggagaaacacaatgcccagggccagggtaacggtctcagatacggcctgtcttccatgcagggatggcgcgtcgaaatggaggacgctcacactgcggtcattggcctgccatccggattggagagttggtccttttttgccgtctatgatggccacgccggttctcaggtagcaaagtactgctgtgaacacctgctcgatcacatcaccaacaaccaggatttcaagggtagtgccggagcaccttccgtggaaaatgtgaagaacggtatcaggactggctttctagaaatagatgagcatatgagagtgatgagcgaaaagaaacacggtgcggaccgctctggctccaccgccgtgggagtgctcatatccccccagcatacttattttattaattgtggagattctcgcggactcttatgcagaaatagaaaagtgcacttttttactcaggaccataagcctagtaatcctttggagaaagagagaatccagaacgctggcggctcagtaatgatccagagggtaaacggcagtttggccgtgtcacgcgccctgggggatttcgattacaagtgcgtacacggtaaaggacccacagaacagctggtgtccccagagccagaggttcacgatattgaacgtagcgaagaagacgatcagttcattatccttgcttgtgatgggatttgggacgtaatgggcaatgaagaactgtgcgattttgtgcgctcacggctcgaagtgaccgacgatctcgaaaaggtctgtaacgaggtagttgacacatgcctctataagggttcaagggataacatgagtgtgatccttatatgttttccaaacgctccaaaagtttcacccgaggctgtgaaaaaggaagcagaactcgataagtatttagaatgccgagtggaaggcgggtcattcaacaaaaaatag

SEQ ID NO: 252957 - DNA, 564 bp, Artificial Sequence
  derived and/or modified sequence
atgggagcctttctggataaaccaaagatggaaaagcataacgcccaaggtcagggcaatggacttcggtacgggctgagcagcatgcagggctggcgagtcgaaatggaggacgcgcacactgcagtgatcgggcttccgtcgggactggaatcatggagcttctttgccgtctatgatggacacgcggggagccaggttgcaaaatattgctgcgagcacctgctcgatcacataacaaataatcaggatttcaaaggcagcgcaggcgccccatccgtggagaacgtcaagaatggaattcgtactggttttctggagattgacgaacacatgcgagttatgtccgaaaagaaacacggggccgatcgcagcggatcaacggccgtgggggtgctgattagtcctcagcatacctactttattaattgtggcgattcacgcggattgttatgcagaaaccgtaaagtccatttcttcactcaggaccataagccctccaatccccttgagaaggaacggattcagaatgctggcgggtccgtgatgatccagcgagtgtag

SEQ ID NO: 252958 - DNA, 390 bp, Artificial Sequence
  derived and/or modified sequence
atgggagcgtttttggacaagcctaaaatggaaaagcataatgcccaggggcagggcaacgggttgagatatggtctctccagcatgcaggggtggcgggtagaaatggaagatgcacacacggccgtcataggtctgccttccggcctagagagttggtccttttttgctgtgtacgacggccacgccggaagtcaggtcgccaaatattgttgtgaacacctcctggaccatattacaaacaatcaggacttcaaaggaagtgcgggagccccgagcgtcgaaaatgtgaaaaacggtatcagaactggtttcttggagattgatgaacatatgcgagtgatgagtgagaaaaaacatggggccgatcgctccggaagtacagcatag

SEQ ID NO: 252959 - DNA, 447 bp, Artificial Sequence
  derived and/or modified sequence
atgggtgccttcttggataagcccaagatggaaaaacataatgcacagggccagggtaacgggcttaggtacggtctcagctcgatgcagggctggagggttgagatggaggacgcccacaccgccgttatcggtctgccttctggactggagtcctggtcattctttgccgtttacgacggacacgccggttctcaggtcgccaagtactgttgcgagcaccttctcgatcacatcacaaataaccaggatttcaaggggagtgccggcgctccctcggtcgagaacgtaaagaacggcatccggaccggtttcctagaaatcgacgagcatatgcgcgttatgtccgaaaagaaacatggagccgacaggtctgggagcacagctgtaggcgtgttgatcagcccccagcacacttatttcattaactgtggagactccaggtag

SEQ ID NO: 252960 - DNA, 975 bp, Artificial Sequence
  derived and/or modified sequence
atgggcgccttcctggacaagcccaagatggagaagcacaatgcccagggccagggcaatggcctgcgctatggcctgagctccatgcagggctggagggtggagatggaggatgcccacacagctgtgattggcctgcccagcggcctggagagctggagcttctttgctgtgtatgatggccatgctggcagccaggtggccaagtactgctgtgagcacctgctggaccacatcaccaacaaccaggacttcaagggcagcgctggggcccccagcgtggagaatgtgaagaatggcatcagaacaggcttcctggagattgatgagcacatgagggtgatgtctgagaagaagcacggggctgacagaagtggcagcacagctgtgggcgtgctgatcagcccccagcacacctacttcatcaactgtggggacagccggggcctgctgtgcaggaacaggaaggtgcacttcttcacccaggaccacaagcccagcaaccccctggagaaggagcgcatccagaatgctgggggctctgtgatgatccagagggtgaatggcagcctggccgtgtcccgggccctgggggactttgactacaagtgtgtgcacggcaagggccccacagagcagctggtgtccccagagcctgaggtgcatgacatcgagaggagtgaagaagatgaccagttcatcatcctggcctgtgatggcatctgggatgtgatgggaaatgaggagctgtgtgactttgtgcgcagccggctggaggtgacagatgacctggagaaggtgtgcaatgaggtggtggacacctgcctgtacaagggcagccgggacaacatgtctgtcatcctgatctgcttccccaatgcccccaaggtgtccccagaggccgtgaagaaggaggccgagctggacaagtacctggagtgccgggtggagggcggcagcttcaacaagaagtag

SEQ ID NO: 252961 - DNA, 564 bp, Artificial Sequence
  derived and/or modified sequence
atgggcgccttcctggacaagcccaagatggagaagcacaatgcccagggccagggcaatggcctgcgctatggcctgagctccatgcagggctggagggtggagatggaggatgcccacacagctgtgattggcctgcccagcggcctggagagctggagcttctttgctgtgtatgatggccatgctggcagccaggtggccaagtactgctgtgagcacctgctggaccacatcaccaacaaccaggacttcaagggcagcgctggggcccccagcgtggagaatgtgaagaatggcatcagaacaggcttcctggagattgatgagcacatgagggtgatgtctgagaagaagcacggggctgacagaagtggcagcacagctgtgggcgtgctgatcagcccccagcacacctacttcatcaactgtggggacagccggggcctgctgtgcaggaacaggaaggtgcacttcttcacccaggaccacaagcccagcaaccccctggagaaggagcgcatccagaatgctgggggctctgtgatgatccagagggtgtag

SEQ ID NO: 252962 - DNA, 390 bp, Artificial Sequence
  derived and/or modified sequence
atgggcgccttcctggacaagcccaagatggagaagcacaatgcccagggccagggcaatggcctgcgctatggcctgagctccatgcagggctggagggtggagatggaggatgcccacacagctgtgattggcctgcccagcggcctggagagctggagcttctttgctgtgtatgatggccatgctggcagccaggtggccaagtactgctgtgagcacctgctggaccacatcaccaacaaccaggacttcaagggcagcgctggggcccccagcgtggagaatgtgaagaatggcatcagaacaggcttcctggagattgatgagcacatgagggtgatgtctgagaagaagcacggggctgacagaagtggcagcacagcctag

SEQ ID NO: 252963 - DNA, 447 bp, Artificial Sequence
  derived and/or modified sequence
atgggcgccttcctggacaagcccaagatggagaagcacaatgcccagggccagggcaatggcctgcgctatggcctgagctccatgcagggctggagggtggagatggaggatgcccacacagctgtgattggcctgcccagcggcctggagagctggagcttctttgctgtgtatgatggccatgctggcagccaggtggccaagtactgctgtgagcacctgctggaccacatcaccaacaaccaggacttcaagggcagcgctggggcccccagcgtggagaatgtgaagaatggcatcagaacaggcttcctggagattgatgagcacatgagggtgatgtctgagaagaagcacggggctgacagaagtggcagcacagctgtgggcgtgctgatcagcccccagcacacctacttcatcaactgtggggacagcaggtag

SEQ ID NO: 252964 - DNA, 975 bp, Artificial Sequence
  derived and/or modified sequence
atgggcgccttcctggacaagcccaagatggagaagcacaacgcccaaggccaagggaatggcttacgctacggtctttcttccatgcagggctggcgtgtcgaaatggaagacgcacacaccgccgtgataggactgcctagtggcttagaaagctggtctttttttgctgtttacgatggtcatgctggaagtcaagtcgccaaatactgctgcgagcaccttctggaccatatcactaacaaccaggacttcaagggctctgctggggctccctcggtcgagaacgtaaagaacggtatccgaacagggtttttggagatcgacgaacacatgcgagtgatgagcgagaagaagcatggcgctgaccgtagcggtagcactgctgtgggtgtgcttatttcgccacagcatacatacttcatcaattgcggcgattctaggggactgctctgcagaaatcgcaaggtccactttttcacccaggaccacaagccaagtaatccactggagaaggagaggattcagaacgctggcgggtccgttatgattcaacgagtgaatgggtcgctcgcggtaagcagagcactgggagatttcgattataaatgcgtccatggaaaaggacccacggaacagctggtgtctcccgagccggaagtccacgacattgaaagaagtgaggaagatgaccaatttatcattctggcatgcgacggcatttgggatgtcatgggaaatgaagaactgtgcgactttgtgaggtctcgactagaggtgactgatgacctggagaaagtctgcaatgaggtggtggacacctgcttgtacaaaggctccagggataacatgtctgttatactgatatgtttccccaatgccccaaaagtctcccctgaagcagtgaaaaaggaagccgaactagataaatatctcgagtgcagggtcgagggaggatctttcaataagaagtag

SEQ ID NO: 252965 - DNA, 564 bp, Artificial Sequence
  derived and/or modified sequence
atgggcgccttcctggacaagcccaagatggagaagcacaacgcccagggacagggcaacgggctcagatatggcctctcctcaatgcaagggtggagagtggagatggaggacgctcacacagcagtgattggactgccatcgggactggagtcctggagctttttcgcggtttacgatggacacgccggtagccaggtggccaaatattgctgtgaacacttactcgaccacattacaaataatcaagattttaaaggctccgcaggtgccccatccgttgaaaacgtgaagaatggcatcaggacaggctttttagaaatcgacgaacacatgagagtgatgagtgagaaaaagcatggggccgatcggagcggctctactgcagtgggagtgctcatctctccacaacacacctactttatcaattgtggcgatagtcggggactcctgtgtaggaaccgcaaagtccacttctttacacaagaccataagccctcaaatccgctagaaaaggagcgcattcagaatgccggcgggagtgtcatgattcagagggtgtag

SEQ ID NO: 252966 - DNA, 390 bp, Artificial Sequence
  derived and/or modified sequence
atgggcgccttcctggacaagcccaagatggagaagcacaacgcccagggacagggcaatggcctgagatatggtctctcttctatgcaggggtggcgcgttgagatggaggatgcccatacagccgttatcggcctgccaagcggattagaatcctggtcctttttcgcagtctacgacggccacgccggatcccaagttgctaagtattgttgcgagcatctcctggaccatatcacgaataatcaagactttaaggggtctgcaggcgcacccagtgtggaaaacgtgaagaacggcatccggaccgggtttctggaaatagatgagcatatgagggtgatgagcgagaagaaacacggcgcggaccgcagcggttccacagcttag

SEQ ID NO: 252967 - DNA, 447 bp, Artificial Sequence
  derived and/or modified sequence
atgggcgccttcctggacaagcccaagatggagaagcacaacgcccaggggcagggtaatggccttcgatacggcctcagttccatgcagggctggagggtcgagatggaggacgcccatacggctgttattggactcccctcgggccttgagtcctggagcttttttgcagtttacgacggacacgctggaagtcaagtcgctaaatattgctgcgagcacctgttggaccacatcactaacaaccaggactttaagggatctgccggcgcaccctctgtcgaaaatgtcaaaaatggaatcagaacaggatttctggagatcgatgagcacatgagggtcatgtcagaaaagaagcacggggccgacagaagcgggagcactgcggtgggcgttctgattagcccacagcacacatacttcataaattgtggagatagtcggtag

SEQ ID NO: 252968 - DNA, 4125 bp, Artificial Sequence
  derived and/or modified sequence
ctctgcctccctctccaacgcccggatgatctgagccgcgagggcgccgacagccgggggcccggacgcagcccggctcctcccctcctccgccccttccccagcctgacctggcccgccgctgcagcggtgacccctcccccggctgccgccgtcgccgccgcggtgaccccctccccggctgccgccgccgccgcctcggccgaccagggacctgcccgcctgcggctgctccggattttaaataaacttggagccttttcttgaaagacagctggctgtggagagccttctaccaactgcagttttagatacgttttgaaaatttcatcacctgagacctagaggatcaagacataatgggagcatttttagacaagccaaagatggaaaagcataatgcccaggggcagggtaatgggttgcgatatgggctaagcagcatgcaaggctggcgtgttgaaatggaggatgcacatacggctgtgatcggtttgccaagtggacttgaatcgtggtcattctttgctgtgtatgatgggcatgctggttctcaggttgccaaatactgctgtgagcatttgttagatcacatcaccaataaccaggattttaaagggtctgcaggagcaccttctgtggaaaatgtaaagaatggaatcagaacaggttttctggagattgatgaacacatgagagttatgtcagagaagaaacatggtgcagatagaagtgggtcaacagctgtaggtgtcttaatttctccccaacatacttatttcattaactgtggagactcaagaggtttactttgtaggaacaggaaagttcatttcttcacacaagatcacaaaccaagtaatccgctggagaaagaacgaattcagaatgcaggtggctctgtaatgattcagcgtgtgaatggctctctggctgtatcgagggcccttggggattttgattacaaatgtgtccatggaaaaggtcctactgagcagcttgtctcaccagagcctgaagtccatgatattgaaagatctgaagaagatgatcagttcattatccttgcatgtgatggtatctgggatgttatgggaaatgaagagctctgtgattttgtaagatccagacttgaagtcactgatgaccttgagaaagtttgcaatgaagtagtcgacacctgtttgtataagggaagtcgagacaacatgagtgtgattttgatctgttttccaaatgcacccaaagtatcgccagaagcagtgaagaaggaggcagagttggacaagtacctggaatgcagagtagaaggtggatcatttaacaaaaaataagtagctttattaaagaaaaatcttcaacacaatcaaactttaacattttagcttttagatttttatgtgtctttgacagctagtgtctagtgtatgaaagtggaaaaggacatttctgtagtagctgttaagatgtatgcagttgtcctatcacagttatattagaaataacaactagtgtggaaagtaacccacattctgttcaggatacttttgttttaaaaggctaaaatgtttgtgtgctttaaaattcttaatgaattcactggcatgagtaattttatgccgggaaaatctgatttgtggtctatttaattacaaagagattgtgatggtgataatttgaataccatctttctatgaaaagctgtgtatattaattttaatctctagggccttttttcaataacttgaaaatcacagcctcatcattagcaactttatatacacagctttaaaaaatttgctttaaactgtttcagagcttcttccctaagccataaactgtctcacctaaacaagatagacctcaataaaagacataatatttctccacctggcagaaaagtaactgccaagtaagattaagaaataagttgagcatttctggagtatatttctcataattctgcagagacttccagtttattgcatatatgcagtaaagtgtatatattatgcagtttctctaagtggaaaaacttgacatgactttaatagtgttaaaacatgaaaatgctggtgagctgaggtagaaaaaaaacaagaaaaaaattttaaaaatagcgttaaaatgcattttaggctcctaatgtcgttaatttgcacgttaaagacctctaatcgcatgcaagcattgacctaccacacctacatcccactgtgcctgcattattgaaattactactcactttaattttttttcccctttttactgtttgataccaatcataatcagtctgatactagaatcatgattggttttgttctttagtactgtctagagctactattttgtttttattgctgtccgccacttgatagtcatacatctagtatgtgtttgtactatttagtattgcattcattggacgtactattcaacgaatttgtctccttactgttaccaagggtcttggaatttttatattttaaattaatcattcaatataagttatttataggtatagtacaattttaaaatatttagaatgctacaatcattggttcaaactattgattcatgggaaaatttaaattcataagaataatatgtatagggataagttgatatttaatgtattggcactttaacttgggcagacatgttttcttattggtttaaagaagtaataagtattttaatatttttactatgaaatgggatccaattttagaaatgaattgctacttttctctttagtgtgtacactttaagttttagatggaattatgaaatattcactttacgttattttgttacaataataagttttatatttcttattatcaagcaagagttgccacctggacagagtttacattgatactcaatatttttgatatgttaaagtgttattatacttgtaccattcaattggagattgtcataaattaaatatggtattttttactcagatttgatgagactgcaactagagaataaatattacattaaaattgctgctattttaaaacatagaatgtaactgtttgtattgtaaaagttgtgtgtcctcagtgaaaaatactgccttcagcttccaaagcaggcacctgaatgcctttttcttttctctctctcttctttctttaaatacatgccttcactagattgctgtgacctactaaacctcattttatttgcttggaacatttttggcttctctgtccacaccatagaaaaggacaaaggccttccagctctccttttctcttatttgttcccttctaaatacttgactctctgggggtgtgaaaagattcagctcataatttatactactattaattttgtggtccttctaagccaatttaaaattatacttttgtgtatatattttcaaaatctttgctactgactaccttagctttaaagttgctaatttggagatgactgatagaatccctgaaacttggtggaggggagtggaaaggagcagaatgtgtttgtgtatatgtatgtgaaacatggatcttctatatataaatattctttagaaaaagcgttcagtctttttacaattctaagtaaaacgtataggtcaacagaaattaaaggaatatttcttaaaattcatttatttttcttttttgaaagcagacagaagcaaggctagtatagtatgaatggtcaggtagtttaaatgcgttgtcccacgtggaacaggagatattaactgtttttaaagctttacattatttttttacaagaatttgttttcctgtaattttcttcacagttaaaatatcctaatttatattttaacaaaagagatgtaagatacatcaaatatagatgattcaaggtaatgttttttagacctgaaactattgattcaatttatcatcagtgtttatttctattgtatctagttatctatccaaataattgtattggcttagcggagactgtatgttaagtgtattagttttagattgtgaaattgtgcagtttaggtaaacatcaaatccctttatttttgtacagcagatttccagcattagaaccatgtagaacaaatatactagatgttaaagattacacaataaaggaacttggcaaaccaaa

SEQ ID NO: 252969 - DNA, 975 bp, Artificial Sequence
  derived and/or modified sequence
atgggggcttttctcgacaagccaaagatggagaagcacaatgcacagggacagggtaatggtctgcgttacgggttgtccagtatgcagggctggagagttgaaatggaggatgcccacactgccgttataggtctgcccagcgggctagagtcctggtccttctttgctgtgtatgatgggcacgccggaagccaggtggcaaagtactgttgcgagcacctgttggatcatataacaaacaatcaggactttaaggggtcagccggagcccctagcgtggagaatgtgaagaatggcatcaggaccgggtttttagaaatagatgaacatatgcgggtcatgagcgaaaaaaagcacggagccgaccgttccggctcaactgccgtgggagtcctgatttccccacaacacacttatttcattaactgcggcgacagcagaggactgctgtgtcgcaaccggaaagtccattttttcacccaggatcacaaacctagcaaccctctggaaaaagagcgtatccagaatgcgggaggtagcgtcatgatccaaagagtgaatgggagtctggctgtcagccgcgcactcggggattttgactacaagtgcgtgcacggcaaaggccctaccgaacaactggtgagccctgagccagaggtgcatgacattgagaggtccgaggaagatgaccagttcatcattctcgcctgtgatggcatctgggacgttatggggaacgaagagctctgtgactttgttcggagtcggctcgaggtgacagatgacttggagaaagtttgtaatgaagtggttgacacctgtctttataagggtagtagggacaacatgagcgtaatcttgatatgtttccctaatgcaccaaaagtttcaccagaagcagtgaaaaaagaagctgaactagataagtacttagagtgtcgagtcgaagggggttcattcaataaaaaatag

SEQ ID NO: 252970 - DNA, 564 bp, Artificial Sequence
  derived and/or modified sequence
atgggagctttcctggataaacctaagatggaaaagcataacgcccagggacaggggaacggactgcgttacgggctatcgtctatgcagggctggcgcgttgagatggaagacgcacatactgccgtgatcggactgccaagtgggctggaaagttggagtttttttgctgtctatgacggccatgctggctcgcaggtagccaagtattgttgtgagcatctactcgatcacattacgaataaccaggacttcaaaggttccgctggagcaccaagcgtagagaacgtaaaaaatggcatccgaacaggcttcctggagattgacgagcatatgcgagtcatgagtgagaaaaaacacggggcagatcgatccggatccaccgctgtcggcgtgctcatcagcccccagcacacttactttataaattgcggagactctcgcggtctgctttgtagaaacaggaaagtgcattttttcacacaggaccacaaacccagcaaccccctggaaaaggagcgcatccagaacgctggcggaagtgtgatgatccagcgagtgtag

SEQ ID NO: 252971 - DNA, 390 bp, Artificial Sequence
  derived and/or modified sequence
atgggggcttttctggataaacccaaaatggagaagcataatgctcaggggcaaggcaatggactccggtatggcctgtcgagcatgcaggggtggagggtcgagatggaggacgctcatacagcggtgatcggtctcccgagcggacttgagagttggtctttctttgctgtctatgatggccatgccggatcacaggtggccaagtactgctgtgagcacctgcttgaccatattactaataaccaagattttaaggggtcggcaggtgcgcctagcgttgaaaacgtgaaaaatggtattcggaccggctttcttgagatcgacgagcatatgcgtgtcatgagcgagaagaagcacggcgctgataggtccggttctactgcgtag

SEQ ID NO: 252972 - DNA, 447 bp, Artificial Sequence
  derived and/or modified sequence
atgggggctttcctggataagccaaaaatggaaaaacacaacgctcaaggtcagggcaacggtctccgctacggactctcatctatgcagggctggcgcgtggaaatggaggatgcacacactgcggtcattggactgccatcggggttagagagctggagcttttttgccgtgtacgacggccacgcagggagccaggtagccaagtactgttgcgagcatcttttggaccacattactaataatcaagattttaaggggagcgcgggtgctccttccgtagagaacgtcaaaaacggcattagaaccggatttctggaaattgatgaacacatgagagttatgtctgaaaagaaacatggcgcagacagaagcggatcaaccgccgtcggggtactcatctctccccaacatacttacttcattaactgtggcgactcacggtag

SEQ ID NO: 252973 - protein, 455 aa, Artificial Sequence
  derived and/or modified sequence
MFCSGRKWVAEATICTKLMKREKRRMGKRRAKKAKREEKKKGGERRRNEKRGNQMKRMCERKKYETDLEDQDIMGAFLDKPKMEKHNAQGQGNGLRYGLSSMQGWRVEMEDAHTAVIGLPSGLESWSFFAVYDGHAGSQVAKYCCEHLLDHITNNQDFKGSAGAPSVENVKNGIRTGFLEIDEHMRVMSEKKHGADRSGSTAVGVLISPQHTYFINCGDSRGLLCRNRKVHFFTQDHKPSNPLEKERIQNAGGSVMIQRVNGSLAVSRALGDFDYKCVHGKGPTEQLVSPEPEVHDIERSEEDDQFIILACDGIWDVMGNEELCDFVRSRLEVTDDLEKVCNEVVDTCLYKGSRDNMSVILICFPNAPKVSPEAVKKEAELDKYLECRVEEIIKKQGEGVPDLVHVMRTLASENIPSLPPGGELASKRNVIEAVYNRLNPYKNDDTDSTSTDDMW

SEQ ID NO: 252974 - protein, 382 aa, Artificial Sequence
  derived and/or modified sequence
MGAFLDKPKMEKHNAQGQGNGLRYGLSSMQGWRVEMEDAHTAVIGLPSGLESWSFFAVYDGHAGSQVAKYCCEHLLDHITNNQDFKGSAGAPSVENVKNGIRTGFLEIDEHMRVMSEKKHGADRSGSTAVGVLISPQHTYFINCGDSRGLLCRNRKVHFFTQDHKPSNPLEKERIQNAGGSVMIQRVNGSLAVSRALGDFDYKCVHGKGPTEQLVSPEPEVHDIERSEEDDQFIILACDGIWDVMGNEELCDFVRSRLEVTDDLEKVCNEVVDTCLYKGSRDNMSVILICFPNAPKVSPEAVKKEAELDKYLECRVEEIIKKQGEGVPDLVHVMRTLASENIPSLPPGGELASKRNVIEAVYNRLNPYKNDDTDSTSTDDMW
